United States Patent Application Publication US 2009/0119022 A1 - sequence listing, part 10

SEQ ID NO: 14310 - DNA, 6842 bp, Emericella nidulans
agagcctttttacaaagctcctgaagtactggaagatttcgtctaccgatctgtccacacgggaatcgtcgtcgggaagcagctcacaaagctcttctacgatgaaggcttcgacacatcctactacttgggttgctctactggagggcgacaaggttttaagcttgcgcaggatttcccaggcgaggttgacggcatcattgcaggtgcaccagcaatcaactttgttgggctgctatcttggagtgcgcacttctaccccattaccgggcccgttggatcagctacatatctatcacttgatgattgggatttggtccatgaggagattcttcgtcagtgtgatggcctagatggagcggaagacgggatcattgaggacccggacctctgccatccaaacgccacaacccttctttgcagtcctggtgcgacatcaggctcctgtctcaccgcaactcaggtcaacacagtccacgaagtgtacgcgccgctcctcagctccaacagcaccctcatttaccctcgtatgcaacccggtggggagcaattcgcggcacctgccatgtacaatggccaacccttccagtacagcaaagactggtggcgctacgtcgtctacagcgacccaacctggaacgcgaccaaatggaccatcagggacgccgaggcagccctgcgccaaaatccatacaacatccagacttggaacgcagatctctcgccgctccgtgattcaggcagcaagctcctcacctatcacggccttcaagatcaactgatcagctcagacgattccaagctctactaccaccgtctgatgaagaccatgggcgtcacctccaatcagctcgatgagttctatcggttcttccagatcagcgggatggcgcattgccaggatggtgacggggcttacggtattgggaaccgggctgagacggagttcagtaccgaacctgaggataatgtgcttatggcgatggtgcggtgggtggaagagggcattgctccagagaccgttcgcggagccaagttctctgacggcgttgggtcggaggtagagtactaccgcaagcactgccggtaccctcgcaggaatgtgtataaggggcccggcgactacactgatgagaccgcttgggagtgcgtctgatggcaaatattgtatatatagcatgtacagctgtacatagtaaatacttactctgcaacactaagaaagagcacgcatggaggagcacctgcgccttcatggcctgccaggttcctgcaacagtgtcctggcaaccacagccttcgcaacttctccgtgctgcggcacttgtatcagcatgggtatatgatcaatatattgagcgtgatcgagtcatcaccgtcagagaatttgtcgatgatcgtgtttggatagatagagctgagcagtcccagccacctcagaccgccctcattgacctcgtccgccccgcgccgcaaacctgcggagtcgaaatctaagcagacaccacaagcggactcgacaaatccttggctccaacaaccaaggaaatagatcaggaaattcaagcgaagaagaaaacaatggccgaaattcctggtcttgacgaattcgcgcaaacacgcggcgctgatgacttgttcgacgatgagatcatcccagtctccgcggaggaacaacaaacgattattgagcctgagcctgagtctcaagctcaaagccaagctcaatcggagcctcaccaggcggtgaacgaaaaagatatcgagcgtgaccgtgaagcaagttcgacgcccgtttatagcgatggcgcgcgctcacgcggcggcgaacgacgggggaaagggagggggcggggtggacgtgggcgaggggcgcgcgattcaggactgggttccggcccgaggcggccgaattgggccctgaatgatcctggagatgcgggcgtggaaaacgggaccaaggctcgtgagggagaaaaggcgactgagacacctgctgctgagaaagaggaaccgggtcaagaggataacaacacggctgacgcaccgagagtacccgctgttcgcggggataggagtgcgactgggggtgtcaaaaaggtatgccctgctaaagtcctgcccatagttcaagaataactctaacgctgcccagccaaaactcacagaagaagaactgtcccgacgcattgccgccgcacgcgagaaatctgccaagctcgcagcagcgcatgctcgcgcagaggcagaccaagcgtcctttatggaacgcgagaaaatcgccgaacaaaaacggcgcgaggagcgcgagatcgccgagtcatggataacgagagagaacggaacagactgcgaaagcttgaagcactcaacggacgagaatgggacgccgacaagccggaagaacagtttagcgggcgcggaggacgaggacaatataggcggggggatgcatggcggtgtctccgggtatactaggcgcgtcgaagagtctccaggtgacggtgagctcgaccccgacacccaaccacacgactctggacacgggtaccgcggtcgtgggcgtggtggtcgaggccgagggggccgtggacgtggtggtcaccgcggtgacaagcccgacacaacctcgcaaaacaaggctgcgcctcctacgccagtgatcactaacgaggaggagttcccatccctgcctggcggggagaagaaagagaaagaatctgccccagcctcgggcgagagcttgaaaccgctgtccccagtgacgggtgggacgtgggcggaccaaatggaagctcatgagaagtgaaggccacagttctatgaatatataccgcatgctatgcacgcagtccaaaactggataccccctgttacggttatgaatgatgcgacgcactgaatgtttcctttgctaactctaaaaaatatatatacatatatatatatttatatatacctctattattactcatgctggcttggaatcaactcttttcgatagagaagtctacctctccatattcctccctctcttcttgcccgccggctcatattgtcctactttaagctccttccgcagcaccctcgcctccctctctccaacccacttctccatgaccaaatacgccgccaaaagctccacccatcgaaactccctctggcccaggatctccttcaggaaggcatcaagtatgaacatatacttcacatcaatcaaacacacatcgtatcgggagtgcagttccggccccaggaaagacgcagagtacagcggttcgaactcgtctattacttcgtacccactgggagtgtcgaagatgtggtaaagcttccagcatgtagttgggttagcaaggtcacggagcggtattagggagatggtccagtggtgtggtggtttgtgcgggttgttgtggactgtccaggtgtggatttggaggaggatctttctggcaaacggtcccgggaccaggaatgcggggattgagctgggattgaattgtgtattagagatggaggacaagcttgagatggacattttgatgagtttgattgtaggtgaatggtggaggaagatactacagaggaaggggttgggtttgaaacggatttattatagggcggtgctcctggacttgactctgcagacggaaatagatggtctagagcacagatagatgcaagtcaatcccattctaacaaaggcgccatgagcatttcccaaatagggccagtctgtctttcatctagggcttgttaaccatgatgccggggcttttgaagaaaagctctatgtacccgaggccactccgtgtctcctacataatcaaaacccaatagcagcattcattttcatctggaaacttggctgctggcttttgaagggttcagtgtcgtagtgtgtagtcattccctgtactgcatcagcactgcttaaactgagggaacaaagaacgtgacaaagacacacgacgaagcatggtatcgagttgagccaagtccatcggtctgagatattatttctttccttcctttttttctttttaaaaaatttttccttggatatatctaacagatataattataaggcgccagcccaagaaaatcacttattatacaaacagagagcacctagtagcagatgatgtagaacccctctcccaatgcactgccacgcacagaagcctacctagaccccaagtggacaaaaatgtcagttccagccccgtacaactgacttttacgggctagattataccatattcttaagttcaggttgatttagctccagcgggtcgtatggcctggctgaactagctaagggatcttccagggttccacgagtctagctaattcatgtgaaatatagccaaggagagacctgagtatacttgtactgttcttctctaacgccttagatacctcctcttgcagcgactgcgtggcgccgcatttgcatacgggttggattagcgcttccacataaatgagtacctcgtggtgggcagtggcacaagatgtggggattgaacctgggcggagcagagacgtagtcaacgattttctagttgataccaagagagcagagataggtataaagggcatggacctagataattctatgtcattcccggtcctccgctaagggtcctaaactgtcagtccggtcgacaccacagcagtcagtgaagaccgccgatgcagccgtcttaacttgcctgtccatattgtgtcataaaaagcaaataagctattcagatgacctctcgaaacgtcctatttgaaagcgaagggttctcggaatggctcttggagactcttagggctagcagcccaaccccgctctaaacagagatatggtgcaatacaaactgtacgctcaacctcaacctcatccggctagcggagactacttagattggagaggaaagacgatataaatactacgtcctaagccttccaagcgtttatgttatgtataatgttgttgagactgccaatggttccggcatatgcagaactcagaggaggacgaatcatcaaaatatcatcctcagtaaaaagagaatctagcagaagatatgatatgtccaactgctccctatccattagcccgtatgtctgtcgttgggaactgtgccgtagagggaagaatgggtggctgggtagaattatagccctaaattgatacggccaaaaaacttactggatgcacgcactacatctatttaccagattttgtttcatgttcttccgtgctccacaaattagctgtaattgaatcattctcatgcatagtttgatgggatgaggagaaatggggggtacctgaactgatgcaatgacatcattgccatcgacatcatcggtcttccactcaatacatctcatctatataaggctgccttttccgcttcacaaaacaataagcaatccatatttttactacataatattgatcttctcttcaaaagtcacgtaaattgccagcaatccaacgcggaatgcctactgagtcgcagacaacaagccgtcctgccgcaacccagggcggaaacgaaggcctgggccatgtcgatgtatgccgttcacttacacccctttcaaacacagtgcataactaatgattctctgtaatcgtgcggatagatggatcgccctgccgatacaatctacggtttccacagcttgaaacaacagaagaacgccgctgaagacaagtacaccagccgcgccatgggctctgcggaacaggagccactagagggtgacaaagaggatacaagctttatgaatcataagcctggcggggcggggacgctgccggggtgggagactgccaaggagataattactgggtgagtcataaatactcttccttggtagttatattagttctattggggattgatatgttaatggaggtgggcaatgcagaaaatcagagtagggacgaaagaaatgtgatccatgggacggaatcacgagcttgaatgttttatgtttaatgaaatttaatgagactggtaatcagaatatgagcatatactattccaccttggcgctctttccacgtatccgatcgcgtagggcaacaatcttcccacccaggcggcccttgaatgtctgcgcccgaagcgcggccgcttcttcgacagtgacgaagcggcgcacgagcaaattgaagatgctgccaaaggcaagcgcaatcaccgtgctcgtaaggatgatgacgttgtatggcatactgaaatcgggtgtcgggagggggaggagaagactcgttgtacggatatagataggctttgaggcggcgatcttaataacggccggggcgacattgaaccctcggtttgcgtcgggcgggtactcagtatagcgcaggatagccttctcgaaatcgtaggtaagagtcacggtggaagcgggtggaacggacagggcgagttctagttgtgtcccgcgctcgcggtcaacgccagggcggtaaaaggtctctctgataaaatcggtggtcggggcttgtcgacgaacgccatcggggccggtgatggttgattgaagtgtgtggatataaggtcgtaggaaccagggaagagattcaaagtagatgaaatcgacgggcttctcactcgaagggttatcgaagataatgcgcattccccctcgctcctgcccgtgtccgacaattgtccgctcagcatggagaacgggctcttcaagcgggacactgctagtaatatttatggcagcttgctctgggacatccaagtcgaaaggctcggacgacggtggcgtatagcagcgagtgaactgatcataaaatctcgcattcacca

SEQ ID NO: 14311 - DNA, 545 bp, Emericella nidulans
agcgctattgttcctctacgtataatcggactagctcacctccacgtgctgttacttcctgaacgccgagctcctctgtgaattttactacaacttcccacgcgagctacacatgcgttttggccgacatctatctgatgcagaggctgagcgctttgcgcgcgaggatccgcgcattcgtcggcacctgtacgtaattcgtaaaaaggagcttctcgaactagccttgcacaagatagagagcattcagcaacttgatgggcgtggagcaggcaaagctaggggtttggatagggagaggcctttgggcggaagtggcaagggcgagagagggaagggcccctaacacagcacctattctttaagccaatccgcagcgtttaacaaagacaacagcgtacttttacatccacagggattattaccggaaaccacaaccagaccgtacatccatgagccgtaatgacgcacctggacgggcctgaccgataccgagatatgcttacagacaacatgccaccgagggtttcagctgaatgccccag

SEQ ID NO: 14312 - DNA, 1480 bp, Emericella nidulans
atcatgcaggcctgcacggtgcgtgtggttggatctgaccagttgactgcgccgctatatgctacttctcgactgggcggatctaatctcgcctctggatcttggctgtctatcatcgtccggtgcttgcatagagggatctaccggagaacgtgcagcaaggctatatccatttttcgttacatatccaagatatgtacccgtagtgtcccatcaaccctgcctttgcagcctcgcccatgctgcatcaaacatcctgacggccatctcattgaggcagcaaaagcaaaggcgtccattgatctattcctaccctttaataccggtgtcatattacaagaaggctttcaataggagcacgaatatgctctataacttcctgcaatatggcttgctcactctttcatgaaagtcaggcgagacgcgatttgacgaggctgcatgacagtcaaaatgcccgattgtcaagagacagcccatcccagggccggcatataaagcaatgacaacaggagtcgagtttgatgtgatccagtcttccataagcgcaacgactaccatctcatacaatcaacaaaccctcagggtcaatatcaataacatgtcatccacactgtctactccgtcattgtctcagtttccgacgccgaaccaaacccccaggcttcccactcccccgaactcgccagaggaaacgcatccccatatcatgagtgcggaagagaacgaaattcttgcgcaagagtctacgcggctgactgaatctggcgatgatttcgctccaacgatcacctcactcctgaacgaatataccgacagaatgaagcaaatacagaggcggagactagctgaacagaaaggagaacatgagatactttatgcaaaacttagaagacaaaaagactcagcgctgtctggtctgaagcaggcgcaagatcttaccaccagatacaagcaggaacttgacgcaaaagtcattgaagaggagcagctcactgagaagatgaaaaccctagagaagctgcttgctgagacagccacgcaacattcagacactaagaaggcgtatgctgagaaagaggaaatatggaattctgtcatgggtcccctgtcgaggttagagaacgtcaacggcgaaatccgggagcagctgggagaaataaaacagcagctagaggggaccaatgcttcaattgccgaggaaagagctatcagtgacagaaacctctcagaactcgcttctgtgagagacaaactagctgaggaaaaagtccagcgagccgccgtcgaacgcaggttgaacgagcaagtcgatagagtgagactgctcagcaacagaattatatacttgaaggcgagcaaattgcagcttcgctccgagttgaaccaggctagaagagaacctgacccagtgaatcggctgcgttccgctaacaaagagaaaggagccaggtgtgaaacactgacaagagacgtttcc

SEQ ID NO: 14313 - DNA, 506 bp, Emericella nidulans
tgcgcttttggctatggctgacacgtttacgtggggtaggaaagcgagggggcacaacactagatactttgaccttacagcgtgaatcgtacaccggatggcctatgacgggcgtcctacctgggtataggaatatgccacgggatcgcgcgcccatctcattgtcacatggtgcggattcgcacagcattatccagggaggctggcacgtaatggatgacattgagtgaacatgttgatccatattataggggaccccggcggataggtcttcagcgctatgcgctcgcattgagggcgacggcactagccggctgtaccactgcatgactggcacacgccacggctacagagcaccaatgacgcgctgctgatgtcatgaggacgcactctgcatcaccttgatattgtaccgtagccgatggctcacaccagacgggtagcatggctgtcttgagagtatagcgagagacgctactgctggcatcacacagcagctgaaaatg

SEQ ID NO: 14314 - DNA, 450 bp, Emericella nidulans
ggggttacctgcgcagaccagcggccacctgtataatggacattgacctcctcgccagtttccgtgtcttacggcaccggagtagactccgacagcatgtgcagcatcaagcttttcggccagactggcgacctggggcactcctaaccatgctggaccattgtcgatactttaacgaatgtcctaccttgtcgtccgcatagtgaaaaagaaatgcatgatgaatggcgctgtatgcccaaactgcaagtgcgaaggtcctacaaatctaaaccggtggctcgagcaaggactgccaccgggcgcatgactaataaccttgaaagcgcaccatctgtctgtagactgaacaggcatcgacgtacgatcgcgaacgatttttgggcacaacattaaacagtcacgactgcatatatatgctgcgaccatgtcactgtgcaccatgcctgt

SEQ ID NO: 14315 - DNA, 576 bp, Emericella nidulans
  unsure (1)..(576): unsure at all n locations
actggtgacaacatgcttgtgtttatgcagttcgngtttttaatgtataacgcccccactccacactttaaggaagggacgactttccttacgcattatcgcaggacgcatacggcgctagtggaacggaagggcctctgacgcatgctggccgtgctggcgcagaatgattgctgcaagaaactaacatgtccttcatagccaaactcatcattcgcgtatgcatgctgccattcgtcttccgctgcaatggctcacagaatatcgccggccagactacgctacgcatgctggtctttttgctcaagctaagtgataccatagacgccttcatccgggctgaacatcttgtgggccaactcaagatcattatcgaagtcttcctactcttcgggatcataatggtcaaacgcctgaggaacatgatcatacagatggaactgcatatagaactgctcgagaacctcgccatccgcctataaccctttgctgcatcttcaataagcgcttcatgcgcttcacgcgtctatgtcagacggggacgaaaatatcgatccaatgcttgtcatgccgttt

SEQ ID NO: 14316 - DNA, 1378 bp, Emericella nidulans
ctctattctgtgcaacatcctctgaccaaccatggatttcacaacatgtttaatatactgagcccctagtagctgcttagagactcccacacctccttgaatttcatatagccttattgcgaactgtaactcgctctttcagctaagtacacggtaaggagtaccagatatatgaactgagacataatattgacatatgtgggtaggttataaagcccatttgcaatatgcaggcttcttatattgcaatatatataagcttgaaactttattacagaatggttacgtcctttcgagccttaaagaacagagatcacacttgtgcatcaaactttggtttatcaagaccgaatggaatcaatgagagacaaatcggtctgcagtagaaggtgaatatcaataaaactacaacgcgccacgatttggctgcgtactgggctagttcgatctttattaaaccatttaggttataaacatcatcttgaataaacccgccccgacccgttgtccataagtctatgcgtcatgcgtcaggctaggttagattatctagtaaaataatgctactgcgagtaattgagactcaatatattcccgcggatccagatggggacataaaagtaactcaggtatctggtatttgcttggatatgatatgaatagcatttgctatctgatctacgcagaaatattgcagataagggtccgtagcctagccatgaaaaggatcttatgacacgtatactatgtagacagacttttaatcaacactttagattcttttgatccacagatgagctaccaagctatgctgagtagttcccatccgggagggtgagtgtctatcgacgtgaacaatcacccctgattgtaacatgcttgaacactgcaggttatgtgagtagctcacgcctatcagaaaggcaaaatgttaaaagaatcacatcttttacctctcaccttttcttacctgaatagtgacattatagcagtatagaattagaactatgagattataaaagagcggaagcttcgaacaaaacaactagacgcatatttgacaatagcaataccttgttattttcaggcgatatttttctgcaaggttaacaagaacccggaagccctaaccaacagcgttaagaatttagtcaatttctcaacctagataaagctgtacgggttgactagaaccggcttgcttactggcttaacttcagggagtctatacatcatactaaaaacgtcagaactagatcaatttgtttggttagcgtctgattactaggccgtattggatctgccagagtaatacacagatcatggtttgacgggccgccgggcgtgcatgccgccgcttgacatttgagatgtgata

SEQ ID NO: 14317 - DNA, 514 bp, Emericella nidulans
aggccatcccggggcctgactttggcgccatctcgccggaggagaaggtttcgacttccaacgaatgcatgtcatgctggagcacctctcaaagaacttggagagcctgaccaagagctcctcgaagcatgcctgtcggcggcccagcctgattgcgacgatgaacagcctgatctcctcgggagaccgcagacttaaccgctatgtcatgggacacaagaccgagactggctgctgctgctctcacatgggcagagaggccgaccacactcctggggagcacgagccatgccacgaaggacgggagcatgataaagggtatggccagcagctacggctgcaagaactgacgatgaaggagatcgggaggagattctggcgatgagagtccacctagaaaagcccctcagcgctgatataattgcatgacttgaggtatacactgttacagcggcggcatcggccattcaggcgtgcatatgttataacagagacgacctgtatagacgagcta

SEQ ID NO: 14318 - DNA, 321 bp, Emericella nidulans
taatgactgggcctacgaacaaagggtcggcctagactttgcggcaggtgattttgggtcttaaaacacttcgccgcagagcggaggaaggtactctgaccgtcatatttggcataccaaacccggagcgcctaatatccggaggtgtcctatcttcgccagcgcataaatagagacagccggccgccacactatgatgtagagcatgaatcaggttgcagaccatatcatcaagctggaattcaacgtcagctttgtgcttccagacagggttggctttcacacattaccaaaacctcctgtccggatggattacatggc

SEQ ID NO: 14319 - DNA, 482 bp, Emericella nidulans
ccgtcgaggggctggcgggaacagactgcatcctgggcactgggtgaacattgcaaggttattgccggtataacaagggataaggtcgcatgcggtgcaggataggcaactgacgcaactcggactgagagcaacatataccctgcataccttgtggcattgatctacatggatagcacgactacctaattggtcttcaaagtatttgggtggagtatcgctggtgcaggcgctacctttattgactgcctagatggagctgaaagcgttgaacttgcgcctacctgactgcttgcacatccagtattgacagcctagaacgacctcgaaggtttctagtgggacatctgtacataaatgcggaacttgtcgagaggcaaaggacagccgataccctacgagtctggtaaccgatatcttacgctgatcaacatcccaccatgctttattgagcaagacctgggctctacagtgttatggcg

SEQ ID NO: 14320 - DNA, 881 bp, Emericella nidulans
  unsure (1)..(881): unsure at all n locations
gctcgttgctcttgatagccaagccgagacagtcggtggctagagccaccagggccagaactgtcgtccaaccctcattgcgaaagggcacagctagtgcttctcagataggcaactgagaatgcaagattcaaaagcccatgaagcgagctcctgggctttatagtttgcaggtgtgccgtgcaacgaccaactctaacattctacggccgtactctccacatcggatgtccacaatccagacgtgccggagtcttcatatcccttcccgctatctctctcccttatttcttcctcttctgtgacccctacgctctttctcactttcctttcctctctcttttttccttctttaaattacctgctacctagttctcctttttcttctcattcctcttgcttacttctagttcttacaaatcctactccctcccctgtgcccactttttacattcttttctcattcttttttccttcactctttctctctcttcttcttttttcccatatctcgtacttttaccccatgccctttagcttccccatttcctttctctcctcccctcattctcacttcctcccatctttcctctcattttttcttttttctttatctttcctctccctcgatattcctttactttccatcccctataaaatacctcctctttccccctttccactttctcgtcctaaccgtttcaagcctctctcctttcttcctccacttaagcgtccgcctccacaaaaattgctttaggtgcatactcctcaaaaacccctttntgaacctttttcattacactcctcctccctactaaatattcctatattttccacaccctaccctttacctcctatttttactttaattcttcatc

SEQ ID NO: 14321 - DNA, 526 bp, Emericella nidulans
gacacggctgcatgtttggggtaacgaccatggacgactacgatccaacaccgctacaccgtggccattgttgttagggacacagctcaccgaaggctagggggggttttatttagccacagccggggtgaagaactatgctaaggcccactttgaggtctatagcaggaccgtaaggcacttatctcaagccgttgactcgaccacagctttcatgtccaagaccttgatgatgcaatctggcacggccacttaaccacgctcggagagactggggaagagactcaaaaaaggaggacgcccatgggaaagagttcccagtgagctgggcaatggtgaggacgcggtcggacgagacctactaggagggcgcccagagaactgtaggctcttggcgcctgcatatctagggagttcacccgtgttgaaccattatttaagagactctggggccggcttcctggagagagaaaggaccgcgactagactggtgctgctgctcgaagctcccaccgcatgcattggc

SEQ ID NO: 14322 - DNA, 585 bp, Emericella nidulans
  unsure (1)..(585): unsure at all n locations
cagttcaacgatcagcgcagagtgcagggtggcctgatcctgcgccttgaccagggctccacggtttacgtttttggtcctacgcccagcccctggggtgccgtcatcgccagcaggagacgggaggccaggctccaacatgatgcttgggcaacaatctgaccgatacgggcctgggaccgcttgtgggtactatctccacacgacgacagctggtcccacctacaataacgcgcccgccaggccgggaggatacacaggtgcgttctattgctcgtgatgaacagattgctgctacatctcgcatcatattgactccctgggacactggcggatcacctggacatattctatcccgtcggtgcctcccgtcaatacagttgatgcagtgactgcggttttctacacatcgaatcacaagcatgacgacgctggccgagtacgctgactgntgtgaggattgttaccaatgcacgcaactactatgtgtgattcaggacgcgagactgaagcttcatagacttagatgctaggcgtggcattgcttttagcggatgtcttcgtggtgaggacgagaccgtactc

SEQ ID NO: 14323 - DNA, 1984 bp, Emericella nidulans
gacgagcagctcaaaaccttccagtcccttgatccctccaaccccaacttcattccgacgctgcaaggcctgatgaacgatctgtcgtcacacatgcgagaggaagagggcgaggatatgccgatgctagaggagacgctttcggagcacgacagccagagcctgagcaaggcgtttaatcggacgaagatctttgtgccgtcgcgtgcacaccccggggcgcccaacaagccgccttttgagacagcggtaggacttttgactgcgccgtttgatcaggtagcggacttgtttcgcaagtggccgaggacggcagttgaggtttgacggagatataccagagcctagtcaggtaagctgatatatatcatggagtccaacttcgagtttgtcgattgtaaagaacgagcgaaagttctggatgtaatgatttttggggaaaaatatcaaaatatacctcgatctcacaggtacctaatcaatatttgatacaaagctaaatcttttgattccacttcaccatcccctcgttctcaacaacctccctagtcatcgtgactcaaattcgcaacacatttcccagctccacatcattccatcattgactccgtcacggctcgcaggatctgtaaagtaatgccgttcagcccttgctctcgacttgacgggatgttgccgtataaaacatcctgaaggatccttgctcaagagatcagccgaaggtcgcataactgtgaatatgagcttgcctacaaggctcggtatgcgatctccactgatgctgcatgcatttaggatagctagatttattttggtagtgctggtggtgttggtggtgttgtgtcttgtgttgttgatatgttgacggtgttggtcaagacagtcgagcttgaggtagaaagcgaggataagttcggctaaagcacgacaattccagccaatcacagtatctatcattacttttgaagatcatgtcaggtaagcggcgcagacaagcaatggagcgggagcatggtacactgactcgaggactgatcgaaacaacgatggcatgggtatacttcacaatgacatcaagtcaaaccaaccgcatccggcctctcagcgctaaaggaagccctggagtcgaccgtcttgttcgatatccatgttcgcacgccgtctgatctcagtaatcaaccaatcttgagcttactccatgattcccaagtccgcctccaaaacgaccctgaatcccatatcgatgcatttctcaaaggcagcccacacctagtccttgggggaatgaactcgctcgaagcaacgcatccacacgagaattttcgggttcacccatcaccctcaagtcaagcaatctggcatcgagcgtgttgggttcaccgacctccgtggaccctacggggctatcaacattgagtgctctctctacccttcaaacccacaactgaatgctcagaatctcacgcctgctctgatatacatccatggcggcggctacaatgtcggaacaggcgacgaattcgaaaatggatgccgaattctggctgaaaaggccggggtgcaggtgtatcttgttagtaccggctggcggcctgaatggcagtattcgacgcaatgagatgagtacaaggctgttctgaactggttaagaggtaacgggggaagagaccgaggtgttgaccccgaccatgtctttggcggcggggatagcgctggtgggaacatgacggcggcgctttcgctcaggctgcgtggtgaggggaagagagcaatggccggtgtgtttctgctgtatcctgagccaatgctgtcatttggcaccagtgcggcgacatagaataaccgtggtccgtatctcaattgtgagtcctcctgtcaggtagatggtacgtctggtgtttacggtcatgccaggaatgtgatctttgaattcgccagcaactatattcgcgccggcgtaccgccgtcggcgaatttatatact

SEQ ID NO: 14324 - DNA, 582 bp, Emericella nidulans
aagccgagacgcccgggagtggattaacttgatttccactggagctatctattttttagtgaaaccacggccaacggaacgggctggcaggtatcagccgggaaagaagactcctgcaagagccacgactctaggtagacagtgccaaaagacatatggggcgggaataggcgggaggtttcaccccagtgaaatatcactaccttcaacacttttgtactaattcactgaagcgtaactggtcttcactgccaatgttgtgccgttaaggtgctcgctgggcccattccagttgaagacatctgccgggggcactaatggggtgtggctatcacatatggtaaaccacaacggactgacgctcagggagtctcatggcaaagatacttgtccactggaacaaccggctagaagacatcatgattctgcttatgagtgagactacaaccaggagacgattggactctccagccttctgcccatggatatttgagggtagacgtgccacagatgctaccagacaggtgactggattgtgatagtatacaactactagcggcggtgcatcatgatccttttatg

SEQ ID NO: 14325 - DNA, 1074 bp, Emericella nidulans
gctacgtacctttccttgggcaagtaccccccttccccccgccttctttagtttttctactgctagctttgtgtttgactttagtgagccatattctcatgtcgatcttctttggctgattccaaggtcgaatctcgaaaccgccccatgaagatctcgtgccttggcagactgattctttgcttttgttgtgttatcccatggtacctacaatgcatatcgacggcctacaaagtgtagattggacagaggaacggctgcagagaggcacaccaccgcgttcgtccactggcctcccgcaacagtctacaactggcaaaatgcggtggccgcttgacgctgttctgggccggaacccttcgtcgaggccggatcgggaaggccgagcggcgggactggaatccggcatcgaacaagtcgcactggcgccagcaggtacttaagtggtcgattttacggaatgcgcccagaatcttcatgcaatcgtgcagtacggagtatcgagatatcacgatatggtatgcagcattactgtcaggctgtcagtcagcgcactgcggtcggtcgtacaacgcaagggaggtcgggatgccttaggcctgaggtcgtggttcccgagcggcggtcggacctggactcccagggtcgagagtcaaaatgatatgacaatgatggatccaacactgttgttctggttcgacgcaagtggcggccgacctgagtggagtgcctgaagtgttagcctctcggacgtctcctgtcgtcccatcttcaaaaatcttgcattgggcttgatgggaatcttctgcagctgatgacgtaaatggctcgtctgtgcccaagatccctcgtctttgatctacaaatttacttgggtcaatcttgactatacttggcatcctccctcaagtttgggtgacaagagaaaaggtcgtggtttatcaaatcgtgccaaattgtgcgtggtgtgattatcaagtagtgacaaccacacggtttgccgactgcaaccttcgggttccgtggaggtggagcactcgccttggagcagaaaattttgatggagatgtgggg

SEQ ID NO: 14326 - DNA, 1869 bp, Emericella nidulans
acatcaggcttagaacctaactactaatgacatacaacggacttaaagcagttaaatgccggtgctcgaaataaaaacgagagaatgccagatttcttctccagggctcaatattggtggtgaagatcccaacccgatttattgagagaatagacagacagcattctgaggagcgacatataagcacatgcttaagactaacactcgttctgagagggttcccgttaaacattcccttgcttttggcctgcttgaaaggcttttcgtgtcaaccaagccgattctggcgctgtgatcaagacctcgacgcttccctctcttgaagtgcagaatctattgcccaaacactcttgaaaatggccattattcctgcagcctgcggccgtatccacgactgctcatacctactgatgtattgctcagacagacacgtatgtgggagtcgtaatgcgcatggggcagtcgcctctggtgtccaacgactgccgcgcttcgtggcgagatctttatcgtcgctctcgacctcatcatgcggctgaaactgcgaagcgtaacagtgtaacaaggagttgaagtcagatacaatgctacactgggctgcgcacagacttgaggccagacaaacctcacatggcctggtcagccctaagaccagagaagccatatgttgcgagactaggacttcgtgcggcctgaactgtctgtgtctgtcctgacaggtcagcgattggttcaatctactcctcgatgctactctgtacaggatacgaatcgcgtcggtagatcaactgctaaatatagcgagtatagggggcaatacgagacttcacccaatgatcatcctgcaaatcccaatgcccgacccgtgtttctccacaaatgctactgcagacaatgccagtaaggcacgaggcgatgaacatgaagattatttaatgtcgatctatgcccgagttacatacgggctgaacttcatttagtatctccttcaacagtccgctgcagtagcacagaggcaagaccatcgatctctctcccttctcgagtgatgccctaaaaagctggcacagccctcaaacatatacaatctctacctagccgtcatgaagctcacgtacttccttctccccgccctggcgctctccgccgctatccaagagagaacgccctcggagtcggacctgactcttcacacacacgacgcccgagccgccacgctctgcggctctggatacacgttggataaggccgttcccctgcctaaaggcgtggacccggacaagcgcaaggcaacgctctttgcttacagcaacaatggaaaaggctgcgtcttcctcgacaacaacgtcggaaagaagcagtacatgtccatcaaggtatgcaaagtcgggggtaaaaactgcgacagcgacactggctcctttagccaatacgcggggcctgtctatgtgtcaagctttgcttgtgcgccggttaccgcgaagatgggctcttcgtcgagcaatttgtatgtgaactataagaatgactatgttttcccttgtaattaaagggggactgtggtattgatagtggtttgtttttaatagattgaaggtatacatatttctattatcttttataaattattcacttttttctttttcttttctttttctctttttctttgatctttttctttgttcttttatttacttttttttttctcttcttctacctttttttcctcatttatattttcttcccatatttttcttctttcttcacacttactttatctttcatactttttttttcttctagttttatctctacttttcttatttctcttttttatttgattctctgtctcttcttccttttcttatc

SEQ ID NO: 14327 - DNA, 537 bp, Emericella nidulans
acagccttcatattaatcttataccgccctgatttcagattttcagtccatcgcaagccttttcttcgcttcttctcgaccacctccgtcagaatggccgccaacatcaacaacgccgccgcctggctgactgaagccaaggcgcaccctttccaagttaaggaggcgccctcttacacgcctgaggagaacgagatcctggttaagaaccatgctgtggccattaacccagtcgacggcagcctgcaatccaaggcctggtggcctatgaactatccgaccattctgggccaggatgtcgccggcgaggtcgtgcaggtcggcccaaatgtcgcccgcttccagccgggcgaccgcgtggttggccatgccgtgggcatggctaccaagcgccttcaagataatgccttccaagcctacactattctccagacaaacatggccagccagctccccagcgagatctcctacgaagacgcggccgtgctgcctctgggcctctccactgccgccttgggtcttttcaggacgagtttc

SEQ ID NO: 14328 - DNA, 495 bp, Emericella nidulans
cctgactgtttattaaagccacgggggggaagggaccaagaaatgatagaaaggccattgcaagattatgtgtgctcatcgggcggttgttcggagggggcgtttctgacactgagggcgttcccaaaataattctcaccatgatagcttggggtatgtgtctaaagcaggacctgaaatgatatatgtattatctggattacactgtaatcctttacgcatgccttctctcgatcgaacgtttcaatagcatactcattttttggacttaagtaaagtggcgcttctgtccctggctgaactttacgacctgaagtgaggcaaccacacctcgaatgcatacccattctctgcttatatccggatctgccctgattatgactatgtatcactaacagctgactagaggaaacctacgtgattagaacacttcctccacactttagcctgagctcatgcgagatcgaagaccagtttaccccacagcagctggat

SEQ ID NO: 14329 - DNA, 1785 bp, Emericella nidulans
actgggcaataggtcggcaatcgcttactgcttaagagtggcatgtcccaatgcggggattctagcgattctctcacttcacgatgtaactcaacctccgcatgcgccatagaagtgatttcatcgttgtggaaatcatcttcgtcttccacgataccgaattcatcgtcttcatctctcgcccaaaaaccgcgaggttttccaggaggctccgtaaatcggaggggaatctgcctgtcgatattgttcacctctttctcgatctcatcaaacatcgcctttcgcgctttggggtcgttgaattcttcgacagctctgcggtgctcggcgtcgaactcctcgcgctcttccggagacaacatgtcatagtactgacgctcttccttggataatagctccggcgagtactctggcgctggcggcaggtcttcaggacgagggtctttcggaggaacggggtctgggggatcttcgggtaggaatgtcggtgcggaggcagagaaaggacgatgttgaatagcgattgggcctctacgggccactatccgagcggagcggcccaggtacctcgttaataagaccattgtgcgggggaatgatgatttctggccggtctggagagatttcggtggttgtttttttgcggatgttgaacagggcttggcgcgctagactatattgagaagtcctgtgacggacccgcacttgttgattcactggaccttgcttgctctttcttccccagaatcattatggaggagatcatgctgtataaagcagccatctgcttattgatatttctgcggatctcctgagccttccataccagcttgcatgaagtgtcgttggtgctgacaccaataccgaacatggcccatgaagccagaaagctgtgtttcgttactgttggagctacagcgtccttccatctccttttgaaggccatcttggatcctatctttctagtgactttgaatcagcacgggtataccgatcttcttattcagtatggcaaggacggacagcagctctttgacgactttgtcgcaaactatccacctggcgaccccagacgtcatggtatcatcgtgcaaggattcgacttcaaccaagcaggcttggacaatgagatgcgtctagcgaaggccaatgcctcagagaaccgaagcagtggactggtcattagccatgcaggtaatacctacctcatctttttctcactctagtagctgacagctgccgaaggttccggcagtattctagcagcattgagacttggtgtcccgctggtcgtggtgcctaatccgactcttcaggataaccaccaggaagagcttgccgaggtacttcaggacgaaggctacgcgatatggagtgactacaggtatgatattcctgctccaggccctttcctgataattactgatttactggaagagaaatgcccactgctctcgagcgagctgaggctctgcggactaagatgctaacttggccgccagttcatggtatgcacgagggacagccacgagacttggaaggcgtagtttcagaagaaatgggctacttggattaagaccgctataggtgacggtcaaacgcaatatattcttcatttcctgggttaaattttggcagagaactcactctagtgtactgtttggtattcaggtagaggaagtcaaccttgaagataagaagattaccgtatacttttaagtggtccgagcttctttgtagcgggccatcccaatttggttggttgtgcagccaacgcacgaaaac

SEQ ID NO: 14330 - DNA, 1377 bp, Emericella nidulans
tcgtgaatggccacaatctagctggcaacgaatggctcatccagcgtgttgtaaatgaaggccaccatctagcatcgcacacgggcgtgaaacaccccagggaacagcctggtctcttcgctccaggagtttatttcaaaactaacctgacgtcgtcttactttccagatggggccataccgatcttactgttctcagctatgatcaaatcgtcgaccaaatgacccgactcgagtctgcctttgtagcatccgtcggggtagtccctacctacatgaggccaccgtacctcgccgccaatgactatgttctgggcgtcatggctgaactcggctaccatgtcattggtgctagtgtcgataccaaggactatgagaacgatcatcctgatctgattggacgtagtgtggccaagtttaaccaggagctagatcagggaggaacgatcgtcttgtcgcatgacattcacgaacagactgtgcgaactctgacacacatcatgctggaggaagtgtacgaacgagggttgcagcgtaagcaccattttgccctttctttgtccctatgttgggctccaagagacgttacactgacaacgaacagctacaactgtcggaggttgtcttggtgacgacgcatggtaccgttagttagaatcaatcctcctgtacttctcgacgcctatcattagcctacgcactgcttgtttggagcttgtccgattaattaattaacccggagtagaagttgggctgttcctgcagagtaattgtacacccgtgacacatgatatgacatggagacaactatatagtgcccaaatagctccttgcagtctatggtagttcagatgtaaccataacacgtattgtgatgcctctgtacattccaaaacagacttttcatgatatcgcgtagatctaccacagacttgtatttggactatccacggcgtatattatttagagtatctagtcctcatcccagttagggttaggaccggggggcttcggcccaccggcctgtcgagcaacgatgatctggtcgacgctcagaactgtccgagctgactcgctagctagacgaatagcccaactcttggaggaaagcagatcgaggataccctcttccacggtatccagcgtaccagacgatgaggaaccctcaaggtcaactccagtggtccagtaagcctctgcttcgccgccgccggagctacgctcttcttcgctgtcttcactttcctcctcgtcgtcatcatcaccgtcggtagacttcacgccggcgtttgcctggtgatgagcagtgtaaagacgagaaaggacctcggtagcttcgagaccggcggattcagcgagcgtgcgagggatgacctcg

SEQ ID NO: 14331 - DNA, 1123 bp, Emericella nidulans
tccttcatattttttatcagaagaaaagtgctaatactctcttcattcctaggcatcccaaccccagcatcaaccccagttcccagaaaccgcacccaccacctccatcgactcaagtgaaaccgaacaacaacgcgagaatgccgacatgaccgccattttagacaaactcaacctagctgcggacaacaaccgcgtcttctccatatctgacgaaacccaagaactcctccgcaaattcaagctcatcttcaaagacctcatcaacggcgttccaaccgcataccacgaccttgagatgcttctaacaaacggcaacaagcagttacaagacacatactcgaatcttcccagcttcctacaaaaactaatcgaaaaactccctgagaaatggactgagtcgcttgctccggagatgatcgccgtcgctgcggaacgagcaagtcggagcggtgtgaatgtagataatatcggcaaggcggcggcggcggcgaataaaataggaatctcagtaccgagcttgaaggagcttgtgggcaagcccgccgcgattgtggggatgttgaggtctatcatggcgttcttgagagcgaggttcccggctgtgctgggaatgaatgtgctttggtcgttggccttgtttagtaagttccttaccgtaacctactgtttaattcttgggttaattggctaatcttgcatggacagtcctcctctttgtcctctggtactgccacaaacgtggccgtgaagtccgtcttgagaacgaacgcctcgttacagaggaggaaatcgagaatataaaccaagagtcttctgagaataaggcggcagaaacgggaatgggaacggaaacaacacctccaattcgcagtaccgagactctaacgaccacggccgcacagggtgcatccgcatccgaggtccgtaggggcatcaaagaggcgcaggaggctagagagaagaagactaatgcaaaggttcttgccgctaaggagcaggcacagaagggagataaacccagtggaattgagaacgagcctatcaagcctacgagatcaaagtcgatattatccatctttggcaggtcgggcagccacagttctgcagtaactgagaggaa

SEQ ID NO: 14332 - DNA, 722 bp, Emericella nidulans
ttgtgatgaatgggatagcgtccttcttgtgtgtccaatctggggttagtgatataccctacgtttaatttacagctcctgatgagtctgctctccagatggtctcggtctatatctcctgatacacggaaatattgagtggattaatgtgacagtgccgtggcttgagattggcccgcaaagaagcctcgttgaggaattggagcgggcatatctaaatcacccaaacccagaccgcatcaaggcggtcgtctttaccaaccctaataaccccctgggacggtgttttgcgccctcggttctacgcgaatgcttagcattctgcgctgagaaggctcttcactgtattagcgatgaggtctacgccctgtcttcgttctcgagttcggcgccttttccgcgctttactttgattttgtcattactcgatgacactttgcctgcgactttcgctttccgggtccatgtcatatggagcgcaagcaaggattttggctgaaaggggctgagactggttagcactttagttgtgccccaagcaacattttcgtttattcactccaacaaatcctgggtcctcacctggttaccatatcttaaccagttttttagggctgataatatcgcagccaacgaccctcacggttcggtttttgctcccgagctccttgagtatcctttttaagatcctcatgccataacctttttggtcacgaacctcc

SEQ ID NO: 14333 - DNA, 852 bp, Emericella nidulans
tcatcatctagattgataagccaaatccatgtcaggaagatgctcggagaaattttcaatcattctgcccgcactttgaaccatccaagcatgtgtcggtttgatgccttcttgaattctaaccgtgccattgcgaatactcagggcgccaatatcattttccgggttcgtggcaagcttctgggtcatagtgcgaatctcgtgcggggctaaggcgcgaaatgggagaaggttcgcatagatgccgtcgaattcgtcaatcgtaacggaagacctgcttacggcatagtcataccatttgtcgaagcctctacgagatcattagaacctagtttcgtaggtgtagtggaggaggactaacggtgggggatgttggattgttcttagccgcttctgttgtacagtttctgccggattacttctttccttggcaggtttgcaatccttttatcgtgactctttgccccttcctcgtattagcaattccatcggatgcctgtgcttaaatttgaattgcccatttcccagattagatcattgccgtctttacggtattgggagtctgacatatagtaagccagagatgaattgtggtccttttctctgtctgtccaaacttctttatggtcccttcctgatttattgaatttccccatatgctcggagctggggtatcggaatgtgctggcctaattatgctcatttctaattttattcatactgttcactttttacttattcaattagtactttatctttctttatattatttaatattattcctttggttcttataataatttccctcttttatttttctttttggctgtatcttaatgtatttcatctact

SEQ ID NO: 14334 - DNA, 545 bp, Emericella nidulans
cgcaaagccagccgggaggacagaatctacaaaactataaagctttctgacttaacgactggaggtcctggtttaaaggacacgagtcattgatcatactttgtcgagcaaaagggcaaataatgtggatgtgcggggcttatcacctgagcatttgccctacgacactggtatgcgactaagcctcgggagtccaaagacataacacgtcaagactcataccgaacgacagctcaccagacgaagaggatgctgctatgacccactccacaggagaggacacaaccccatatcattcaaagccacagtcatgtgctgccgaccacaaggacgaacattcgtacggatcatggacctcgacgtgaggaataccacgacaggatttacaattgtgcgaacatgtaatatgactgctacacggaccacctaatgctgaaactgggcacgagccatgagctgtctaccacagcacatatagttatatgcgaaagaattgatccataccctattgaaatatgacagcagcccagaacgagacacatgtg

SEQ ID NO: 14335 - DNA, 2102 bp, Emericella nidulans
gagtctgtatggtgcgcgctctagggacagttggcaaaacagataacgctgccttggtcccatcattcgtttttcttgacctcgacatttgccttggacgatccaaagaacgcgcataaccggccaaaatgtccttccttctcagaaagctcgtccacaatgaggcgatgcgaacagacccacgtgagatatacgggtggagggtgtatgcattggcttgctcggtgagtttcattgccccaggctactatcttgtgctcatttatcattcaggcatgtttcggcggcatgttgtttggcgtggaaactggaatcatcggcggtgtcctcacaatggacacgttcaaagcgtaagctgttcgtccattccgttttccctgtgactgacgcagtcgacagaaaatacgggttgaatgagttgggtgacacgggaagagctaatctttccgccaacatcgtgtcaacccttcaagctggatgtttctttggtgctctcgcagcgtcttgggtggctgataaatatggaagacggcttggcctgatcgccgcttcttttgtagcgctcgtgggagtcatcatgcaagttgcggcgagcggtcacctggaagctatgtatattggacggttagatccctgtccctcgaaaaaaaaaaataaaataaaaattgacatctaacttccaatagcctgctctgtggtataggtgtcggcttcgcgtctatggtcaatccactctatgtctcggaaaatgcccctcgagccatccgtggtggtctcacaggtctataccaactgttcattacaatgggaattatgcttgctttttggatcaattacggctccctgcttcacatctccggcgcaggtcagtacctcgtcccgctagccatgcaaggtcttccggcaatcctcctcctcgtcggcatgctcctctgcaatgaatcccctcggtggctagccaagcaagaccgctgggaagaagcacgcgcaacactatcccgcgtccgcaacctcccatcgactcacccctacgtcgagaacgaatttcaagacatcgtccgccagctcgaattcgaacgccagctcatcagcggctctagcttcgtcgacctcctcaaggaaatgtggttcatccccggaaaccgcaagcgagctctcatcagcatctggctcatgatctgccaacagatgacaggaactaatgcaatcaactactacgctccccagatctttgagaacctcggaatcaccggcagtgccaacggcctcttcgccacaggcgtgtacggcattgtcaaggtcgtcggttgcgcgtgcttcctcgtcttcgtcgctgactctcttggccgtcgccgttccctcctctggacgtccatcgcccaaggcctcgcaatgctctatatcgggttatatgttcgcattgcaccccccaaagagggtgagcccgttattcctgctggctactttgcactcgtctgcatcttcctcttcgccgcattcttccagttcggctggggccctgtttgctggatctatgtctctgagatcccgacaacgcggctccgcagtttgaatgtttcctttgctgctgccacacagtggctgttcaactttgttgttgcgcgcgctgtgcctaacatgctggctaccgtgggtgccaatggttatgggtacattttcctcatctctatacgccatatggtcactgaactaacaatctatttagggcgtatatcatatttgcttgcttctgtttctccatgtttgtcttcgtttggttcttcgtcccggagacaaaggggtgggtctcatttctttccttatccatcgactgaatgtcgactttaactaacaggctcataggctttttcagagatgacgacttttgcatagcctggacccaagaaaagcccttaaagcctcccaacagagagttccatggaaacgcctaagttgaaacactggttcgcggggcttttggtccaatagggaggggcaacttcctatgaagtcttttcccgcaatcattaaggtatggtacgcctcctttctttgcactttatttaaaaaaataacccctcgtcttttccctcaattttctg

SEQ ID NO: 14336 - DNA, 4200 bp, Emericella nidulans
gccagcattgccagtggtccccgaggatcctactgctgagttacgttcgttgccaacattaagacggcgcatgaaggaaccgtggagactgaggattcgcaccggccctaggtgtttgaatctttggagaccactgctccccttcaggcagtgaggagagcggcaactgagaattgacagggattgttatggcctaggcctcttatgtgattaagtattattggctaatgttaagagcgtacctatggggtcattattctcaaacgagtctaactgtatagataggccctttcggcgcaaaggtgaaacttaaaatctaaagagcgtgctagagtaggactatcaaagtaacttaaatcaggataatgattctttcttctttctttctctctctccttccttcttttttcttttttttcttctaagtcgctaatttccattcacaggttgtgagtctatccagaatcggcgcgtcagacgaagtcgagtggagcccgggggcttcagactcggcctggactctgcggattctccgcttcggcttcggtactgaattccttgcagtgattggctgcttcccctctcggtgccggttcatgttggccgttttttgggttgaaaggccgagtcgggggtggtatggcagaagtgtgtgctggcggcaacaaagcctcaccgaggaccctgagatatctctatatatctcattttctcaatttccctgacccgacagagcattccactatcgtacccactcggtggacattcccccgagccctccgcttcccccgcctgtatccccagaatttccatgtcggacatgctccgaagcgagtcattgccggccttggagacgccgacggtcagacgatccgccctaggagacagctagcagcagaacaagtctcgcttataaagcaaagcgtccccgcagattcgcttccacttcgtcattcttgctgtcactgcactcgcatctcttacgttgattaccatggctgaagtcgagggcaagaccggcgtcagccagcagaaagtgcaattcgagcacgacgagctctatcaagcctacgcggccaagggagaagaatggcatagacagatgacgcgccggttgatgcgcaaggtcgatttgcatctcctgccgctgctggtcgtcatgtatctgcttaactttttggatcgcaagtacgcccccaagccctttcctggtcgaactgggtctacgccggtctgactgggtcgttccggtcgaaccggcctattcacgacgtgctggtttatttaggccaaacgctgactggaaactgcagtaacctctcgcaggcccgactcggcaccctagaggaagacctcggcatgtcggggactgatttcaacctggcgacgagcattctctttgtcggatacctcctcatgcagttgccctcgaatctgctcctcacacgcgtgcgaccttcactgttcctcggcattgcgatgggaatctggggcgtgatctctgcatgccaggcggccacgcagtcgtttgcaggcttagtggttgcgcggttcttcctggggtttgtggaggctcccttttttccaggcgcggtcatgttgatgtatgtttcgataccgcctctttacattggcgaagtctggcgcacggtcagggggctgatgatcgcaggtcgagctggtacaccaggcaggaactgagctatcggattgcgtggttctacgccggaagttcgctcgcgaacgcatttggtggacttatcggggcaggcgtcctgggaaacttgcacatgtcgcatgggatttctggctggcggtggcttttcatcatcgagggatccatcaccgtggccttgtcgctgctcatcccgtatgtcggccctctaccgtgtctcccaaacgctggactgacagtacagaatcctcctccccaactatcccgccacaacgtcctggctcgatgatgaggaaaaagcctatgcgcagtggcgtctgatcaacgacgcgggcgaggcggacgatacgggcgcttcgaccatcaaggaagccctgatcgccgtgttcgctgacaagcgtatctacctattcatcctgctccaacacgcctccctcctctcgcagaccttccaatacttcttccccacgatcgtccagaccctgaactacagcaacatcgtgacgctgctgattacggcgcccgtctggatcgctactttccttgtttcgctagttgtgacctggacaagcggcaagaccaacgaccgcagtatccacatcatctgtcttatggctgtcagcatcatcgggtgtatcatctgcacagcaacgaccaacctcggcgcccggttcttcggcatgttcctgatgcccatgggcgcagtgtccgcgtaccagatcatcatcgcctgggtcgcgaattcgttcccccgtcccctggtcaagcgctcggcggctattgcgacggcgaacatgatcgggaacacagcgagtatttatgggagctatatgtggccgtcttcgtcagggccaagatatatacccggtgggagtgcaactgctagtgtggcgctcttggtggcgcttatggcgtttgtgattagggttgtgcatgtgaggatgaacaagggtctggaagaaaaggagaacgaggtcgtggaggacgagcaactagatgcgccgagagggtttcggtatatcctttagttgtctagtctttcggggcgagcgtagcaaacaggacaagagaactggctccgcgttgcgtttcgggcagaggccatgtattttgataattctctttaaggacttcatgaggaaatgacatattttaacgtgctatgcgacaaattctttcttaggtccgcataataccacaacgttaaattcagtattttcaagcaagcgggtgtattggctacggtgtagtcgcttcgcacatagacgaccggataactagaacctatcagcccaactaaagtattggagattaagacacttttgcccgttttggagccagagaacagatagtgccatttccactgagttgtaacttaatggaaagtgatcgcgagactagaagaaaattccctgaggctactgcagactaaatgccccctccagtaactccaccatatcgccgtttatgactatagcggctctggatattggcgtgtagccagacgaattttcaagtctttcgcgccccatactgtagaagcatacgtgcacaccccaatatattagcctctgctgtacacaaagagccgttggaccgtcgtgataaatatggtgcacctccacttccaaaagagccagaagcgtctcagtaggtatcagggtccctcgagtagaagagtgctgtctagccaccggaatcgctggcgttgatctcgatcccatcgtgcttgagtagcatctggacaatggcaggctcacccaacaaagctgcatcgtgcaaggcagtgaaactgttaccatcctttgtgatatttatttgaaagccccgtcgcttcagtattttgcgggcaaggtccgctcgatatccacggatggcgagccggagtgattccttccttcttcatccacacaatccaggtcggtggttgagtgctttaggaggggcgatacaacatcttaatctccagatccaccatgcacggcataaaccaagagagtctccgggtccacgcggaggccgcagttgatccgacagagggctgttggaggagcagaacgagcccctcgacattatttgtgaataccgcgaaccagagagcatttgccacttggtcgtcagtgacattgaggctatgcgggtctttctccaatagcagctgccaaaaatatacattgtgtgttgaggcggcgttcatttaaagatcgctctggttttgttatgcaggcaggtgcccctcctacacgccaagatgaacggaaagagctgtatctctaggatagtgctggtctgagcctggagattcaatacggtgtctccattgtcgtccgtggaggcggattgggcgcttgtaaaaagtccagtcattcgggacgctcccaacacagacacttggtttaaaagggttgaatcagaaggaaaatttcagtgggagtattcgcaattttggagagtccttcttgcacgaaaggaaaagtatttgcaataagaatgtagtaataaaactgttaatatatgaatccaac

SEQ ID NO: 14337 - DNA, 384 bp, Emericella nidulans
aacccggggcctgtacaagcctgttccattaccgtccgtagagactgggcttgtattgcttggctatcaataacgcacgagagggactattttaggccggagggtgtgaatgcatccttcccactcatggctgaaacagacaagccgacgaataactggaacactattataaatatctgggtaaacactctggactgatctcataatataataccaagaccgaatcactactctgcccccagagaactagcaaggaagctgcgctcagcatatgataagaggctataatgcgcgttaaggatatcccactatagctagtccaccagggtctataaaccgatactgatgaaaaattgaaccaccaagcgcaatagataggtagta

SEQ ID NO: 14338 - DNA, 1429 bp, Emericella nidulans
tcacggtacagcgagggagtccgataataaatagatcaccgccatgacagtcgcagtggcgggatggcatgtcttttccttattccctgcgcgcaagtgtgaataatagtcatggcgggctccacccaaagggccttgtatcatcatctcattcctgaggattatcgccatcatcattattagctggagccttatccactggtccttagcgctcagaaaaaggtaatttaccagagttcccggccgtttggttttactctgacactgcaagctgcattctttcttgtcctgtcttatctggagctctcagataagagctaaattccgccactgcgcatttcagccccagcaagctcccagaaagtcaaagaacgacggcggattgcggtctcaaagcgaaatactatccctactgtagctctcagaagctggacagcttctccttaatgatatcagcctgaaatttctcgacaatctttttcaaaaatacgaagttgtttctcgcgacgaactccagaaacgatactctcggggcccgcatggattgagcggcgactgccattggatgggacaagaaacagcggagtcaattggggtatctcattggtgcgcacagtgttccacccatggaccggccacagatcggtggaccatgacgatccagctgtgatgtcattgaattaccattacagctacgatggcctcatgtatagctcattggcggggctgccgcggttgccagttgttgctgttgctttaccgctgcaacggctgcgagaatattaaaaagatagaaggctggctgggatcagcagagatgtaaccaaattcaccaccgactctggctgtctgcgctgtttgcagtgtctcggacgcattattggtaaagaccccgcgtgcggcctcaacagtgaactgcaccacgccaacccctctctgcccacttctgtcaaccccaccggctcccctcctccttcgtcatcgctcctgagtcctcaacctcatcaagtccaccacgacctcaatctcttcttcttcttctctcctctcctcatcatccctagtatccaattgcttcgccgcatcgcattccaactacacccaactcaccatcatgtctagcggaaagaccttcaagctcagcaacggcgtcaccatccccgccgtcggtttcggtaccttcgccagcgagggcgcctccggtgagacctaccgcgccgtcaagaaggccctcgaggtcggatacaggcacttggactgcgcctggttctaccagaacgaggacgaggttggcgatgccgttcgcgacttcctcaaggagaacccctctgtcaagcgcgaggacatcttcatctgcaccaaggtctggaaccaccttcaccgtcccgaggacgttcgctggtcgatcgagaacaccctgactgtagtc

SEQ ID NO: 14339 - DNA, 11835 bp, Emericella nidulans
  unsure (1)..(11835): unsure at all n locations
tggtcccacgtccctcaaactccgatcagcgttctcccatctcgtaagaccaatactagtttctcttgaaggtgtcagcctggtatcagagggaccagggaagtaaacgtacctatccgtcaggtctaataactgcgncgcggttgtgaacatctggggtggtaattgcggcggtccgtgtgtcattggtcctaggtttccttgtggaggaatcccctgaggcaggtttccatgcggtccagtaccaggagggtcattgatcgataatcgctccattgtgtccaacgggtatgtggtttgaattcgaggcgcggggagaaaggaggggaatcggccggtcgttaaagaggtatgaccggaagatcgttcctagagatacaatgaaaacaacagtcgggacaccttagactgcgatatattctgagatcgagaacttggcacgcccgaaggtatcaataataacgttgacttccaagctgctggctgcattggaacgtcttttgcaacagcggatgtggagcgagagcatgtttgtcctgtttgtttccgccatcaccttccttatgtacagccctgtcgccaactttggacatgttttctagtctacttctttttaaaggctatgctcacttgctactgagtaggcgctggctacttagttttgctcctttgctttatttaagcttctgtgcgttgatgattcattccgcgtggaaagggtttctgcaaactatatataatatatatcgcgtttcactattcaacttcatttaattaaaactggtggaaaattggacggttagccatgcttgcagctgttagatggccttatactgtcagtctaggaagtaagatgcctggcaattacattccacttcgaattttgtgtctcacattccagctggcgtacaagcgcaactcaatgcaaggttacttgagcgcagtacagccacatgagatatatccaccacactctgttaatcgttgagcaaatcaagaatcaaccaatacgagcgttgcggggcgatgcgatacatccagactgcgcttcaccgagttttaactctgtaggtgaccctcaaggggagaggtttgatatacccgtgatcccttccgtgcatttgccattcaaatgaaacccatataatacaggtatcaaatcgtgaacaagaataagaaataagctaaatcatacatgccggtgaaactacctgaaacacaggctgttgttccatccaaattgtcgacagttgatatctgtctgcgtggcttactggaccaaaaaggctgaatacaatgagtcgagaatactgaccggagaatcgtaggagaaataacgacaacgcacccgcattgcctatgacacattgaaacctcgccgctgccctcgcattctatcctctcgtcgtcggctatatggaacgcagtatggctcatccgacgatccaacacttgcacggaccgtgtcctgccgccgatgatatgccgggctggatggctggggtgcaagctgcatagccttgaactgttcaacgctgatcaccctcaggttataaagatatcgcattagttcgaaatcgggccgacttcctgcgagagtctggccctgttgatagtgggccacatccacatgcttgagcataagatcccaggctctctgatggggagtgctgctgaatcgctgcgctggacataatggacatcgagctgtgtccgggggctcatgcatacgaaaatgacttaaaacatgcgtcttccattgctcgcaattgtcgaaagtgtcgtggcagtcgagtatgtgaaagaggcaggtatatatttgctgctgacgaagaagaggtgaagacggcggggaaggagactgtatatgccgttggttgatatggtcagggggcaagacaagggctcccgtatcatcctcttccaaaataccgccgccgataactcccgatgcccacatggtacgcagcgacagactcgaggatgttgagcgtgtggaagcgctatcggttgacaaggacgggacgccggctgtggaatctggcctcgacttcattttggaggctgcctctggtgcatcagcgcacatgatcctcgcactgtcgtcctgtgtcattgtttttcaatgccaatgatcgattccttgttcgcgaggccaggctagtactagaagcactcaacagcagtaccgagcgcgatgtcctattgaaaaagtggccaagcggtcctgcttgcacattttttagtctgcgaacggcgagcatagagtcgtttccgacacggttgcgatgccattctccaatgccaaccttgcggggcaacatctcagggaatggaagcatgtatggagagtggtgcgatggaagggccagctcatttacctcttgacaatgatcttgttgatacaaactagcagatgcacgcgactttcctgggctaattctgctttttctttttctgatttccgatactgaaaatagactcgctagcagaaatgtctaatcgaagcgggcggctgcatcaactacaagggccgagatgtggacgagcgagtcagtgtccatggttgagtttggacagcatccagaacaaacagcctgtcggcggagagaaagtggtaaagaagcaagcgaattataaatggaagactcggagagaatcagactggacgaagcccggctgcgaagcgcgatgagaaataaatgaggggaaggcgtgacttagggctggttttggaattaagggcaattacttgggatcttagtcgcgagaaccctggctcccatattttccagactgcttgactgcagctatagtaacaatatgacaataataatctcatttttacggagtaacaactgctccatgaccgtatcgtgttcccctcaagattatgaaggcggtggcttgctgccgtatccacaccacgtgacgggacaccgctcggtctgaggggctctccgcggcgtttgcttgtgcaccagtttcaactcccagctgcgctttcatgccctttctatgtcttgatgactattcgtactgttgattatgaacactgctggcctagttgttcgaccgtgagtacgtgcggcctccgctgcgattaaacacaacccactttatatcggaaaccccaacatttgcgaacacaaacaaccatgagccaaatattgacagctccgcaagcggaggcactgtaagcatagcactcgaaattctgttccaggggtcttactgacgatgcgcgtctagacacaaagccatgctcgcttacctttcagtgataaatgcgccccaaactgccgaaacgctacgcgaagagcttcatttcgatgagagttacaatgaagccacatgtaagaagttcgaaggggtattggagaaaaaatggacgggaattgcccgactgcaaagaagagtacggaccgaaagcatggatcaatgtttgtcgggggatgattgttgaccggaaacgcagataaatgatttagaggccgaagtccgtagtcttcaagctgaacttgaagcctccccgtcagcagcccgtgcgaagaaccaagatccgaccaattggcttcctaaaccgtcatcgacacatacattgacatcgcaccgagacgctgtgacttgcgttgcgttccatcctgtgttcacatcgctcgcatccggttctgaagattgcacgataaagatatgggattgggaacttggggaaatagagcggactctgaagggccatataagaggtgtctcaggtcttgattatggtgggcaaaaaggaaataccctactagcgtcctgttctagcgatcttacaatcaagctctgggacccaagcaaggactatgcaaacattcggacactctcaggtcatgaccactcagtctcatccgtgcgcttcttaacgtccaatgataaccacctcatatccgcaagtagagacggaacactgcggatatgggatgtttcgaccggattttgtgttaaggttatcaagtcagcgacagagtcctggatccgagacgtgtcgccttcgtttgatgggaaatggctcgtatccggcggccgggatcaggcaataacagtgtgggaagtctcatcagccgaaccaaaggccgcgttattaggccacgagaacttcatcgagtgctgtgtttttgcccctccagcaagctacgagcatttagcaacactagctggactcaaaaaaccccctcccgcgacaagttcctgtgaattcgtcgccacaggagctagggataaaactatcaagctctgggaagcgagaggaagactgataaagactctgcacggccacgacaactgggtgcgaggtctcgtattccatccaggtggaaaatacctttttagtgtttctgacgataaaacgatacgttgctgggatctttcccaggaagggagattagtcaagacaatctctggcgctcatgagcattttgttagttgcataagatgggcgcctagccctaatactgataaccccgatcccgccggcgagaaggctggtaaaaaggacgccgttaagccttcgtaccgatgtgttattgcgacaggatgcgcagataactctgtacgggtgttcagctaagtcgcgatcttcatcacagttgcgattcggtacggtgtcttgggttgggtctggaagtccacttgctcatctttgtctgtctttttgtcttgacgaactctgtcatcctcacagcagactattctttcttctatatcccccttgtctgtctttctgtcttgaacgagctctttcttcctttcagcagactattcttttttctatatcccccctttgccctttcgagtcgaatctgaagcaagcttgtgtacttacgcacttctctcacctgcctacgtttcagtctttaaaccccttcccgcagtatgctggttttattcccttctcgaagaggaacgctctctctttccgctttatttctctttccctattcaacttctttcagcatttaccgacggcaggtcgcatggcaccggatggttactactcactttttaaggttggctggtcgttggctcggttggttggcattgaattgaattaaatatattatacattgtacataactattcctttcccgttccattctgtcgcctgaaggtacttgctagtaaggtgtaattgacttgggacggtaatccttatgtttatcttctaaaccagcctttcatatgcagatgttgatcagtagagccgaagtctccctgtcattaggtcagaagaacattcctaaatctgaggttctcaagctagtgagaggtgagcagcagctatacagccataccgcgaggtagactcgtaacagatattaatcggttggtaagaacataaatatgttgtgagttattctcaaattgccgggtattgcaggacggcatgtttcagcttcaactgaataacaaatcatgagtacatactacaacacgaattacatggtagcttacctctcactagaggaaagcgcacttttcggtggaaggtattgggtagtagttgcataattggaaaggagatacgcggtcacttgtaccgatgcaccagaaacttaatcaagaattaggttttcaatagcccaacggaagggccagtaacagtaggtagtagcgaaattaggactgaataaaaactcgaatatgattcgagatcggtgagctataactgaggctttccatataacgccgagatgtaaacaagaccataacactaaacataaacaaggcgaaaagacagacagaggagtagtcgaaagcgcccaagaaccaagaaggggtatcatataaaaagataagggacaaggatatgcggccagacccgagaagaaaaaaccgcaagaagcccgtacaagcgatgcagggtcttatttatttttgtacaggagccccgtgaacgccagaccagactggaccagccaccaagtatacacgcagacattgggtattcttgtcatggctggaatttgagacggaaatgccggcctcgaccttcttcacggactttgtacaggaaccgtgcaatggcctcctgctccacaagtcctgcgctgttgaaatgtttgcggacagccgtagcgagctggctcttagctacacggtcctggctgataatatggttcaatgtgccctttccattgtgtgggccggatcgcttcgagaaggagttctgggggtctccgcttgtgccattggggcggctgcgattatggtgtgattttaacgacccgtccgatggttgcgaaccgtgattttgggctcgccgggcagcaatagctgttggcgataggaggccaattccccttgaaagaaggttatgtgcatattcgctcgagtgtgcacttgggcaggtcaatttataggcgtgtcggtaggagtggagaaactcgaggggcatctcggaccaagggatctaaacgtgagaatatgattagtattcacgcgcaagaagtgctactgaattgagatgagtttaaaagattaggggtgataaatctgtcaaaatgggctttccactccgtctgacaacatactcttgggagattgtccgtttgctctccttgtgtagcgggcgcgctagtcacattggatgtggatttaaggtctcgtgagacggcggtggcattgcggacattagcacctttcttgccattaggtgccgctgccttcaagtcattcgtcgctgtgctggaagcttcggaccgtaagtcgtcctgaacagctgtagttcgctggcgagggggcgccataacgaacagaggactttttcggtgactaatgaaagaaccaagggggaaccgattccgtagcacgtctgagagagaaatcaatcttcaatcaagagcagctattacaattgaagcaaaaggcaagtgagtgtgagtcccataggcattgaaagcacgaaggaggaacttttttggctcggcccggggcatttgtaggcgggaagacgcggcagaatatcgtggcgcgacatcatcctcctcacccaatccggtaatatgacggaagacctgggctgctgtcaacgtattagagaatggccgctaaccatggtttttctcctttgtccggtattgcattattcgcgttcatcgtggccatgtttatacacaatgtttaagatgcgatatgagatgaaggcgtccggctgaagacttatgacatgggttcgatagataagttcgtggaagtgtttcaggaaccgtgagatgaacttatcctataaagtgtggagtaacggacgttggcagtaaggtgaccgctactcaacgccaacccctcgcgctgagaaatacattgtttggagcgaagtacggacatatgcctttaggccttgatatagcacgtgaaaggtgctttccttggacttcattaaagtcttgtctcatctgaatcttccaggatctggggtcatcaatgtgaggctggaaacaaagtcaagaagagcatgcacgccattcgacttcgagatctgactggaggatggagccaactgaattttctttctcaccgctatctcagatgcgatatccaccggacccagatcaaggcaggtctcagcctgagccgtgagaaaattttttctccatcagaagaagccaacatttgcgttgaactcagatcttgaaatttggacgactgggccgacttcttgtgatgacccgtccacatgggccgttcttgagtagaagaggcgactgataaggaagcagccgaggtataaccactactgccggaccatcaaactagagtggatagttacacgacttcccgaaagagtaatcgaatgtgcagactgccatgatggcaagaacattgaccacaaacaaataacaagtttgtcgaacccctttacctcttcccctggtccaaatgaagataacgccggctgagtttccctctgcggcgagctcaggccaccacgggattcgggacagcctgtggtcggcactactggcagacggaggcagagaagggctagctctcgggacggcgataccgagggaaatttctggccggacccgcggagctcccacccctcgaggaaagtcgtggagactggaggagcagtactccgtagtggagaggacctccagccttcaaggcagacaatgtccggcaaaacttcaccgagacacctttggggagaagctatgcaagcaagcaaagtgggttctctccgcaacctgacaatcacaccactgaagtggcatttctgacagctccgaccttttaccgattctttccgaatactacagactgctggcgtagcatctgcaccgcgcggacgagatgcccatcgatccaagtgttnccttgtgatagttgcttcgagcctcgggacggaactcagggaacgggcaattgacggaatctttgaccgccagccctgctctagatgtccatgcaataacccatccaatcgctcatcatactccggcggttcatggaattgcgatcatgatccaggccgcgggagatggacatctcgaaacacggccgcgtacgccactaaggcaggaccatgtctcgatttcttggaaggaccggttagctaatagttagctgcgcatcctggcatgacgccttccaaccatcccttttttagccgtgttccattttaagtctatgcctatctggtcaatcagcaccccttgttccaccattgcatgtttctcctgaagaccaaggacgacgtatcatcaatcaatacattgtattgtttcttgaccaacaagttactgatttcggcagactccatagcacgtttcctttacacaaacggaagctaaagctgcaaagactgggactcacggacggttgtggcaagtatgcgcggagaccctgagaacggatactaccccgtactaggatcatgccatcgccataaatgaagcatgtgagaacactcgtgcttcacgactatcacaagccagcgatgccagaactcgaccgatatccaaattttcagtccatgtcatgaatatccaactgtccgtgcaattgcctgttcgagccaatcaaggaacctggacaataatggtcgatcatcgttatcagcgtatgatcggaaactcggatcatctcccgccatgctccaagctcttcgccatcccagtcgcatagtgcatgtgcatgcagactagtacctcactagcagtagctagccagagcttcagacagggaccggcaactgctaaaggacacggggtagataccatcaggacggtaggctcctgaagaaaaatcaataatccccatctgtgcggagattacttctccaaggaacaaagaatgagtggaaatctggagaatatttttccgattgacagtcagactctttaactggctctcggacacactccgggacagatccggagaagatgtcgtcagccatagactcggcttgtgatgatatggttcattccggccaacagccagcgactatgtagacaacgtgctatgggctcagccacataagcgctgaggcgccaagtctgtatactgtatccttgacccgcttctcctatctttgatacggacactctccggggattattatccgaagcaaactccccctccagcctgggctcaattgagcgaacagtgtgaaagtgtggcgttcatatgaccgtcttcaaaccgcttgccgccggaggacaggcttgcgacatcagatttatggccccggttcttcgtctccgacaatcagcctatttaacggccattattgaccagggttagtttgaacttttgcaacaaccctgttcatccaggtccagaacatgttccccgcccccttctagattattccttagtaccggggttctggaaagattgtcaaaagtgaatctgactctgactctggtgtgtcaacgggaagttacatccttagccctcaatggcagggaattatccaattccgccaatcaatcttaccccgcagtagagtcagcattccctacttaagaggattgatttaaaaggagaaacacaataattaaaaataaccggctccataaacctcgtaggtcctcctgaacctgaatgggatcacttctcaatccggaacattaacggccccgcatatctccaggctaatatgccagcctgagctggggaacgggtttctctttgcgacatcagtgatatcatcagcatgatacagccttgctgtctgattggactaaagctcccccgacccgttccagaaattctgtggatcctccgatccgctagtcttggttttggtcttggacagtcttggtgccctgtatgtgggggtgagattcacacagggtgcgtggccataagcactggctgtgtgtattagcgtgcaacggggcaaattacggtattgaaacgaaccgattaccttatcttttgagataacggcagacgccgcccacttcccctcatatcttccagggatggcgtttcagcgccctgactgggtaggcgtttgttcgtctataatctcattgcaccatagtgtcagataaggcgcccgggtcaattccctgtgttgttgccagctagaggttccaggttgcagtgggcctttgcatcgaactattggttcgtgcaaaagcaggtcgaaacatatcgctatctcagctttttccccggattctgcccccaccatttattaaacgccgcagggaatttggaccttccgccaaccatttatggctgtttgacgacgaattggacgggctcgataactcttgataacgaggtagctgagctactgacatcgctcactgctccggtgaccctggtttcctcctatcacccgcttagatgggtgatgatagacgagtcaaatcaagtcaggttattctgaggtcaccaatgtgaaccaagatgatctcagacagcaggcggaggcacaggtaatagtccgtccgtgtcgttcagagtaagagacgccgactcatcctacatgatcatcgtggaatattggcgtcatcccatgtgagtggtgagcttcgttcttcctctcttcgatatctggttgccccagtctagggttgtcaattgcctgctcatcaacgccgaatatacaacaaggaacttcggaacctggcgttctggtgtacttgcgtatggtgctctgacgcagcggtctcccagtccagccttggaactgaggttaagccagtcctttcaaggtagcacagaagtacgtcaacgcgtacactgcacacaaatatagatactccgcgcaaccttggcgaacctgcatcacctcaccccggtcactctagggctacaatgcctctcaatgggtacatacaagggaacgggcctcttcgtgtaacgacgtcgatatcgaccctgaatctgtttggctcggtgttcgaagccttgaccagaggtgaaggggcggggcgagggtgggagcggcgtaggggcaggttagttcatgatgtttgtacaaggatatatgtggatgtgtacagtggcactccgtacccccattcctgctgagactataatagtcaacctgcggtgagtgcctcatttctaccaacacctttgggtaggctcgtcggcgctatacgcaatcacctcttcttactattaggtaacgcggcttcgcagctgcctggactatagaaaggataactaaaaccgccttgagccgtctatttacattgacgccttcatgacaccataccgaaatcggggcgttcgtgccctctatgggctcctcccacccacttcggacagaagggaaagcctgataaataaacgttcctttgcagttnctaacgatcaccatcg

SEQ ID NO: 14340 - DNA, 1491 bp, Emericella nidulans
aacatgacattcgcggccgcataatacgactcactataggcatctgcgaggtagggttcgaggatattacgctcagcctcttcacagaaattaaccaaagccgcggcagcgtgcgcttgaacacgaggttcagcgctgctaaggactggaatgatgttgctaagcacaacctggtggtacttctcctgcatcgtgcccgcaaaatccgtgctcatctgacccaaagcattgcaacccgcatagcggactcgtgggtggggatcttgcagagcaggaacaacgatgcggaggacttggtccagctcacctaccattaaatcccggcagccttcagagatggctgagatggccatgagcgcggcatgacggtcacgccaggcggccgaagacatcaactttggaatccactcgaaagtaaccggaagaacaacttggcctccgagcttattggcaaggcgatccatgcattgctcaccagcaacatggttcaaatcgctttcttccaaatccaactgcgattgtcagcacattagaagatgccagataatgagggagagacatacatcttccgatgcattccactcagacgcatcatcgtcgtcctcaccgatgtcggtcatcaggctcaaacattgggtcaccatctgtgttgtgaaatcgggatccttcttgcaagttgcgggggcgtaatccgcaaatgtagccatcagctctaacgcgttctgcctgacctgatcactgagctccttgttcgcgacaacgctgacactgaatttgaccaagttgttaaacaggcccttgaacattttggggcagatttccgctaattcaatcaaagccaaaaatgctgatgaaagctcatcactctcggacgactccttcagagggggtagaacgttgagcatctccggcatgagtccgaagaatttcggttgagacttcttggggagggagcggaagaatgaagcaaaagcctccatggctgcgatgcgcacctacaacatacgatatcagaccaaattattcctggaccgcaacaattttgaggcgagtaaaaacataccgcaacgacatcatcccggaaaccctttccgaaaacaccaatgacagcatcttcatgaggcttctcaataacactgggggtcgtcgaaaatatgcgaaaggaagcctctcggagacccgcgtcaggggattggctggcttgaaatagaatacctagcaattccggccattgatctcctagatatttaggaagaatcattcgttagacagattatcaactaccttccaactcttcccccagtgttgtgcataccgttgtcggtgtattgcctcgcaatttcggccactgcgtcaccaatctttcttcggacgtcattcgccgactcggtagtgagacaggtaactagcttttgccgaatgaccagcctctgctcacgggctagagttgagaaaagctccttggcctcgttcgtaacagggtctttccgg

SEQ ID NO: 14341 - DNA, 544 bp, Emericella nidulans
ggctggttatcccgccacccgcggcgaccatgcattctgaatgccatctgaatgttgactttttttctcttggaatctcagatgttattaatgggggatcctactatcttcaaaggggtgggtagaaatcaatataccggatcgatcgactgggggcacctctgcagggtacttttcctcgatcgatatatcatgagcgttaacaacagcagggtcctcacccatgtcaaacccactatccggtgggacctatccctatggcctcactctcgcatggcgccatgccccgtctggggccactgatggatacctcaacctacagggccctcttcgctcatcgggtggagaacatcaccacgcctccaacgtcagcacgaacactatagaactacgcaatgcccatgtcaaccatctaccatagtctccataacatggatggactacttgcctcatcattcaaccgggctctatggaagggacgtaaatggggtctactggatatcataacgcggagatctcccgaaggcgtgtttgggatgtagcc

SEQ ID NO: 14342 - DNA, 1840 bp, Emericella nidulans
gcgtacttttatacccttgcttttcattagaaatctgttcgtcttctcttggttgatgcatcctcactaacaaagctcagatccaaccataatgtcatcttctgttgtctccgggactgtctctcctgggtgtttgtcgcaaaggtgagactttatcccatttctccataggctgtggttttctgtcaccccgcaagactggctgtttatcttatgtcttatctgccttatctacgcatcttctgttgctctctctatcgccttattgatctatcatttgcggtgaatagctactcacatatatcaaatcttgacagaccaaattctgtgagtgtggatttccacctcttttacctttaaccttgcactacttactccctcactccgccagattatgccttctaatccgggttttgtgaccatctccaatgctgaatatcaacgtctggtcagttgccaaccctctcagtgttatactcacgctgactggtatgaaatcggagaaatagcttgaaacggcgcgtcatttcagtatgttatcagcttctcagcttgcatgctgattgctgtcgagctcggacaatcgttgacggagtacgatagcaaagctcaaagattcgctcatgagcggagggctgtctcgtgaaaccctcgatgtaggagcatacttgcctaggcccatacctttcctggctaaacctgtagatgatactatccggagcccccccctttccatctgaggctcatgaaagcggagaagagtccgtcagaaacacagttccgctgtcaaatggttactcagaacccttctctgccgaacccgaccatagccatcacaatatcccgaccgagctctgcgatggcggtgacaatgacgaggatgcgctgacagactcccacagcgatgagagggatgattacggcgagtcttcaggaagcgcatcatcctcgccccaggctgagcaacgaactatactaatttgcggtcttcctgacaaggctacgcatcgcaatattgtggatgttgtaagaggcggtgcattctacacatatatgtttgggcccgtgaccacacagcaagtgtttcgttcgttgaggaatctgctgctcaggattttcttgaccacacaaggagatatggcttgtatgtagctgaaaaaagggtacgtactgcatgctggcagcaacatagttgaatacttacctagcttgcccttcaggtggacgtcctatggaatgaccggcagttttatcttccaccttttgttcgctccaaaatttgcagtggagcctctcggaatctggttatctacaatgtgaaccccaatatcactgaagggctcatcagacgagacatggaacatatccacaatctgattgtcatctctgtcaagttcagacatggcaatgcctacatatcaacgaactctgtacacaatgctctctttgcgcgctcttgtttgatgtctcgtcttacctacaaagggatgaagatcggcttttaccctgatgaatgcgccgaaccgctgacaaggatccctgccgggcccaggcgggacgctccagcttcgaagaggcccgcttcgttgccgaacaggttccatcttctctctattgatgtgtctgaagatgaggaaagtgaagaacatgcactgggagtcagtctcaacggtggtgtctgctggccagacaacagcgtgtctgcttaacatccattgtcagggcttcgcactttttcacgatgataaagatctgaaccttgcctcgaatcttcaaatcctggttgagacggaacgtccgttccaattcccctcgatctctgaacccgccaagagcgaac

SEQ ID NO: 14343 - DNA, 536 bp, Emericella nidulans
agaggcgccgctgagcagggggaaagcaaaggcggattgagcattacagccacccctggagcgaggggcaacggaaaggaataaagcccagggcaccgccacaggcgagggctaaaccagaaagggcaccggaggcgagaggcatactgacagaaaaggcaggcgaggacgaagaaacagacagacagacgcgagggaaaagacacgaaacactggggccgcgactccaggccggcgagggaagaaagcacagtgcaacggagctcgcgaacacacacagcgggagcccggaccgaccgagccccgccggaggacgggaactgggcctccaacaacggcagcgagccacgcacagacaccaaaagaaggccaatgcacgaccaacggaccaaacatgccagaaaggccatgcagcaacgggaaaaaaggccagcggatccgagatcgaagggccgcaagaacggggaaaaaagggaaccagcccgaccaaagatacagggccacaaagaaagcccaacagggaagaacgccaccag

SEQ ID NO: 14344 - DNA, 425 bp, Emericella nidulans
acggaatcctgttcggcccaaaaacggatagcaggccttgagggggggatgtttagagtccataattttgaatttcagaacgaataccaactataaacgacgcgaaaggctaggggcttgatgcagcgacgccctgttgcacatgagtatgggtctctggtgactgacgatacgcacactcggacggactttatggcaaaacggccgtcacatgttgacaattcctttgaacttgcgtgaagagcacacgacctgttagggaatcacaatcaagatcgcgagctcaatagtgaacctagtgaaactcacgtgttctgtagaccatagactgttcatgctcagcgggggcgtcactattagagcctgaccagagtgcgttaaccagaagcgaaacatgaggcctgtgtacttatgatgtgacattc

SEQ ID NO: 14345 - DNA, 123 bp, Emericella nidulans
tgacaggacccggcggggttcatgaccgagtgcaaccgcgatatcgttgtcccacctttattttgccccctgagcaactggggcaccagggcgggcctatattagggggagagccaccgctgc

SEQ ID NO: 14346 - DNA, 1826 bp, Emericella nidulans
gcatatttagtcagatagccctcctgtttaggaattagcaatcaaaatatgtagaatttgtacgtgcacgtagacatacctgttcccagatcgctgtcttgcttccaaggccttcattggcatccttttgcggtttggctggggcaacttttatcgtacgtccgtacagctcgctcccgtccatgttgtcgatcgcttctttcgcatcttccggtgaatcaaattccacatatccaaaccctcggtgattgtcattagagttgggcaagtcgggtttcggaagtgtaatatcgacgacctctccaaagggtacaaacgcctcggcaagggtctgtacggacacagcttggtcgaggcctccgacgtaaaccgtgcacttcagacgagtcttttcactcattgtgactatgatcaaatgtgcaaacccgaatatattaacgctgcggtagaagcttttccctacttccagtctcgaagcgggcattctgatatcaatcacgtgaggcagtttgcgagtttggcgaattccaaaccgggtttagcttcgaactgggtcccccggaggacacttggcttggttgagcaggtgctggattgcactgcacaggacgactcgatcgcttcttccgtccatgcacccctcggctctcgattagaggggaaagtccttgttgaattacatcacttgatctttttacagccctttcgtgctcaatatcaagagcataccgcgtgaacgaccttaaactccctatctatacccccacaccagcagacccctactctcagcatggtgcgtctgagggagattccccggacggccacattcgcttggtctcccggggcggcatcgccattgattgctaccgggacgcgagctggtgccgttgatgctgatttctcgaatgaaacatgtctagagctttgggatttggccttgggcaacgaggatgctggcgcagagctgcagccagtagcgaagattgacaccgactctgggtatgtatggacaataaacctgcggccaccctgttgcaaggactaattgttgcttgcgtaggttcaacgacctcgcttggactgattccgaagacaactcacggggaataattgctggtggtctcgagagcggatcccttggtttatgggacgctgacaagctgctaagtggtgcaaggtttgtgagcgcgggcttgattgtgacgatgatgatgctgatggaacaagtgacgcggtattatcaaaaagctcgaagcactcaggggccatcaaggccctacagttcaaccccaggcattcgagcctactagctacaggaggtgccaagggagaggtctgtgtagaaactgttgattatttgcccaggactagtactaacgttgcatagctgtacatctctgatctcaatgacctcgagaacccctaccgactgggaagctctaccgcccgcgcggacgacattgaatgtttagactggaataagaaggtggcacatattctggttactggtagcagcgcaggttttgttaccgtgtgggatgtcaagacgagaaaagagagcttgactctcaacaacatgggacggaaagctgtcagcgctgttgcttgggatcccacaaaggtaggccccgcgccctcatgttgccgttgacggaaatgcctaacaacgtgcagcctacgaagctcgtgacggcaacaccacatgaatcagaccctataatcaatctctgggatctgaggaattcacatgcgccagagagggtacgtaaccaagctttttgggttaacaatttcatttctaacggtaaatgacccttcgtggacac

SEQ ID NO: 14347 - DNA, 1412 bp, Emericella nidulans
caccatgagttcgagctacaccgggcggagagctttcctgtggaaggggccagggtttatgagcctacaacgcgcaagcgatccagttccattgacaggcttgcatcgcgcgatatccaatccgaaatcgggacgcacagatcagtgaatgctgactctccacgccgacgccgacaccaccatcgcgcttccagcggtggtgactcgttagatgggagacggaagttcgacgacctcggattggacaaagacggagacggagacggagacggagacgatgcagacaaggaaaatgtgaacctagaaagttataagtcgagcaggcagcgccgggaggaaagacggagacaacgatttgggaatggcgatgggaatggagatgggtacgagaaggtatagttttgctcttttttggattttcttgcgatgtgatatgttgcgatgtgatgatgtcttttttttatgatcttgtaaaccatcacttcatgtttatgcccatccgatgtccaatggctaacgacccgaacctgattgattatttattgattgttgaatgatgcatttgctgaacgtatttcctctccttccaccgtataggaaccaacatccagaatgtccctagacagcgaacgagaccagccttttttagtcgagcgccctgaaatgccagtgtcgccgttggacaccggcgagcataagcatgggcacgaatatgagtatggtagtacttcggggcctaaacagtcctctgcaagacccgcagaggaagtaggaggagaattagggctcgggatcatttcccgccggcctcgaagccactcaacgacaccaccctcgtcggagaaaatcgtccccgactcaggtttccgctcgatctctcccggtcctcgacggccatctctctctcgctttgctgactctcccaccgccgtacccctgcacttccgccctccgccttcatcaccaaggctccagcgctcaccctctgtgacttctcctccaggcgcctcacctgtatctcctagccaacaggggcgtcgaagccggcccaactcgcttgaattcaagaactcgcgtgaaattcgtccactattcctcgtggagcgccttggctcaagcaagattgaccaaggacagtttggcgatgaggcattgccttcgctgccgagcagtaagagcgcttcgacggaggatcttacggctttgagagatgagaatacttgggaggtgcagccggtctcaatcgagcagcatcatgatatcctgggctcgcagcagaatacgccgactggcgcgaccttcggctctggaataccgcgtcatctttcgaggaaggaagagcttggttacgagttccattctccgtcggaattgttacgggatgcggagctaagctcgtaccctgatttgcc

SEQ ID NO: 14348 - DNA, 5850 bp, Emericella nidulans
catattgaagactggatcacaaacgaccgctgatcggataattgcttttgctctgtagaagtacgatctccccgtctgcacggagtaccgcgcctagtatccgtgattccagtggccaagtgtacaggaggagtttctgcgagaatacaccgagtctttgcggtcgctccaactcacccaactcaccagtcatattgtttgcgaccgtgtttgcagttgacgcggttgctggcaatgctgaccgctacaaccgccatgaaggcctgaacccttatcaaactgataattcatgcagctgcagctacgactgcaacaacgactgcagaatcctagcccggctggtcgcacatccgccgggtaagtaacagaaatacttcaaatggccagggcccgggagaatttgaaggtgaccagaggagcggtgagatgcgtgacgagtccagcactgacaaagtacaaacagaccgcttattagagactcctacggaacgtattcagtagctacaatggacgtcagactggacaggccggaaattgcaccgcgatactccgtgctctacggagacaactgaagactgaagaatctggagaaggatggatacagtacggagtaagagctggagtaagagtcagccggtagatacttgtcttgtctggggaagaattgttccggaaaataatataatcgcggctaaatccacgagaataaataaatcgataaatcgaaaattcccaaacaggaaatccccatgcccccaaattccatccgatcttccccggcccgcggaccgactcagcatacggaggaaggaatccgacacaaagaagggtgaaaggaagaaggcgtaaacagtttaaaaagccagatcagcgctcaagggggcgcgttttcttgttggactttgagtctcgtactttttcttgtgttgagtgccaaaccgtcaggcatctatcatctttctctatcatctggcatctgctggatagatcagtcaaacagtattattgacaaatggttcaactgcatccctcgtacagctgccggaggccatccgcgcctgatcgccttgactcgcagttgtgtgagactcgccagtggacgcctcattattgtgggcccccgaatattcaaatttcaaaaatcgaatctggaacgaaataaaaaaaataaataaaaaaaaggacccccgcggcgccttatctgctgggagatgcaagggagtccagaaccccgatcgatctggcccttccaagttctttcaccatcacttccaggctccatatatgaccctttcacgcccactgcccggccctgttctggccttcttcacctaccacacaccatccaacacaacatttcaggattgagcctttaccactctggcctctgaacatccactctcccatctcatccatacaacaatacaatacaatcgtctctccactcctacacaacacatacagccacacacagcaaaatggtttatccattccagccctggagcagggactcatccagcgtccgctcttcccttagcgaagccagccccagcaacactcacgcctacttcgacctgagcttcagcagctcatacttgcccgtgggcagcctcagcaataacatcccaccaccaccaccgccttcacccaacgatgacctactcgacattactccccagaaatgcagcttctcttcgaactccaccaacaacgcctgcgctttcccgtcgtggccaaaccggccatctctgatcagctgcgactccggggaatcgacagcgtccgcttacctgtccgacgaggatctcttccctgatggcccgatgaccccagaacccgccagcagtatcgacgaggaatccgccgctatggacccgcgtatgggcggcaccagcctcacgaccgagcagcagatccagatgctccgcgttttggccgaagaagaggcccagcgtgctcggttcctcgcgcaggtgcaggcccacgcgaaggcgcagcaggcgatccgggttgcccagctcgcagcgacggagaaggagaccaacaagcgcaccaagaagcgcaagccggtcgttgctgaaaagaagcgacggacgacctcgtcttccaaggtcgtctaccggtcgtaaacacgaccggtggtcagtcccgcgcaggcgtagggcttccttccattcgaaaatgaaacaacccgatttcgaccgatttcgaaaactacatccttgtacgaactcggtcagccatcgacatcagcgtcagaagcagcctcagccgggctctcagcatgacaggcgcgacgacgtgcgtcggcgaaacgcgaacagcggactgggaattcccccaaccagagctcttgttctttggtgcccaaagtgggcggtcggcggcttacctaatttctccgtcgcagtcggcgcgtctgcagaaaatccagcactgctcgaccccaacctcaggccaggccaggtgacggcctttctgcagcccgccagcctatcatctctctcttcctcaccgcttctccttcttctttaataccgagaccagatctcactctcacccgatcttatcacaccttttcttgttgactttctcttctcgtctcaactgtctgctgtcaactccggagtatgactcaccgattgatgacgcttttcttttctcttcttttgatatcttctccatttcgggaaacttttaccagaacttttaccattgtcttttgcttttgatacataattctggtttgctgctgttattagcgatgcgatcgagcgatcatccaattttttgtatgtcatgtcctgttgataccccgtcatgtactgtcatctcttcctatcatacccgagcgtgccacagcagctcccgttcgtcacttccagcattttcttgatcgtcgttattattagcatagcccagcgtcataccctcggtcttgtttctgtttcattcttaggtagcatagcattaggtagcattcatgaacttactcggatacgagttggtacgtcttacactgtctgctattcttatcagtaatatcagtatgagtaatatgagtagtatgagggtacgagtagttagtaatatttgtattactgtagtaggcaataataacaaaaggctttgaagatcacttgtaccccacccgtattgttactggccgccttgtttgtctaagggtctgatttggtagccccaggggcgccacgatctaagtcaaagaatcgagtctcgttagtctgtatctactccctagtatgagaggaatatgcagtacgaactggagttgaacgctgttgctctggccctgaaacccaacatttgtttgttgtctctgctcgccccttgacccttgtaaaggggccaaagggccagaccaggggctcgccctttgatgatgatacatacatacctaattcaaggcaaagcaaggccaggcgggcaaggttcaggatctacatagttagagccaagtgtctgtgctttctttcagctttattcagatccactagatggacttggattgaattcgcctccgcactgtctccgcaaaaagagtgatggaagagataccgcggggcggtaggataacatcaacagggaccggttatggatgctgattggtatcacaccaacccccctttcctttcccctttcggatctcgttttgaggaagcaccagtctttcgagtcatcgactctttctcttggtgataatcgcgcctacccaatcttcagccaaaatggcccacaaacaaaaaagaaagtacagaagacaaaagtactgcgtgcgtactgcacgtcgttgcctttcagccctcgctcttagcgcttatatctatctgcacttcgagggaggaattagagcactattccagcaaagacggacagcaagtgccatttcctagactgcgtctgcttttatataaatcccaagacgacaatcatgcccccctcaacctgagagtagaagtggatggctatccagtagattgtccgggtcggttacacttccttccttgacgtttcgaagaattgcgctttgtgactgtcgttgtgagactcgaggaatcttcatccgaatggcgtgggtgatggcccagctgattgcttcctcccaatgttaacttaatatccgccatcgtaccttccgtatcgtgtatctgaaacccatgccccctctgctgatcttctgcaggggcaaaggcgatgggccgcgagcaggatctagagctggcccaatgccccttccttcgtctctgtctagatactgaattgtggcggctcgcttttctgagtcgagaagattgcgtacccccagacagcacgctcacgacgcgtaaacgagtgtaccaatggcctgatgtatggatgtgcgttgagtcggcccaggttttgccccaatgacatgacagatcaacactcgagactatgcattatgccctatcatgccaccatatcaacggaattgttattggcacgaatattcctgccctagttattcttgggatcctgaaggcttcgcaaggaagggaagcaagtgactgcagagttgttcttctggattggcggccgtgatcgtcgtggtatttcgagagcaaaggtttgaggtggatgtccactggtagtgacttctgcacagagtggcataggctagcaccaattgaacgttagaaattgtctgtgtaaacatgacgggtaagtcacccgtctacggggggcgctccacaggccgtgacaatggaacagaagatatctagttgatacttccctagaccagatctatgctttcagatgtcataacgacgaccgactgtggcgcaaacatggccctaatagccggacgaatgggtatatcaaagcccgcgatctccctgacataggccgcgcgtgcgcaatagatgtgggctggcgacaaggaaggatgcccaccgaccataccttgcacatcttgaaatcaaaagtgtaatgcttgacacgaattcaaaaatagtattaaatccagcagccttaaggcttgctgacccgtcctcagtatctggagaagcagggacagctccattagatgactctccactgacacatgtgctctcactcccacctgtactgttgtgagtactccagcagtccttgccttaacagctgcatccggatttaatccacctcaacgccctcaacgctctcaagcccagtttgaacgtcccattgctgagagacactcgttcacggcccagaattcgagttggctggcgacaaagacgaaagacagtcgaagcgcccaagcattatctgaatatttcttagccccagaaagcatctccatgacttcaaaatcgtttagcccgatggattctagttgaggctaaacttaagctcgattggccgaatctcatcgccagcaaaagtgttctgaacaggagagttgttgtattggaagccgtaagtagaaagcattcttgaaacgcacagtattgacgagtaaacccttatatccactggagcaggaaggttctcgaaggcggtttagatgcattgaggcagtggatccatggctaattcaactagcttgattcagcctcgaggagcacgatgcaagccagtaaataggagaccacgccaagagagagcggacgaggttgctctcatcgcgaatgatgaactagtgaagagttaacgtcagctctgttctagcccaagaagcgcgataacaccgaccagaacaccgactgcagcatggctaccctttctgaaacgcgttcgcaaccgcagaatcggatgctgccactgcatccagcatagtttgactatacaaatctggaagaggaaagatgatgcgcttggagg

SEQ ID NO: 14349 - DNA, 2395 bp, Emericella nidulans
ggttactggaggatgagatggcaaagtgaaattgtgggatctccgcaatggcaagaatccctcagttgttgcggtgcaatcatgtaggacgcctcttttgcgttttgcttattgtgcttagctattacgctctgcctggctcaaaatttttttgcccccctgccttgattttggcccggcgcctgtgtgagctactactgatcctgcaacagcgaatcaggcacctgtgttgtccacagccaactgctccgaaaccaacagcatcgtcgcggggacggaactgcattcccaccaggcaattgttgcattctggtgagttcacccaattatgcttagatgcactctacgcattttcatatgcaggtttccttgctggatccttcgagcacgtggtggatttcacgagctgctaactgacgcagggatgttagatccccaaaccagccacgtctcgaatacgtggaaagccacaacgacgacgtaactgaggtacatcaaatccaggccaagtagcttgttgaagtcgctaacactcgttactaactgatagcttcaataccacccaaaccgccacaacatcctgctttcaggaagtaccgatggcttggttaacatctacaacacaacaatcactgatgaggacgaggctcttgtgcaagtgatcaaccatggctctgtgcatcgtgccggctttatcaatgagcgaaccatctacgccttgagccatgacgagacgttctcgatccacccagctacagatccagacgaggaagcgcaggagccggagccgattcaattcggcgacctgagacagcctctcaactgcgagtacattgcgcagctctgcctcggcagccaggggccatatatcgccgcgggtaataaagtgtacgtgaagggccctaattgacttttgctactcttttattactcttgctgatacacgcttaatgatacagtgataaacgtctcgacctgattcccctcgcacagtctccctcgtggcgcttcgacgagcagaatctatggcgcctccccggcggtcatggcgaggaagtcgtgcgctccatccacatcgatgagcaggtatgctcttatatgttttaacttgtatgctcaggaactaacgtatccagaatcaatccgtgtttacctgtggcgaggacggccttgtgcgtgcttggaagccagagggcgaacagggtcaggaagcccaaatggggacgccgcggcacaaggagaagaagaccaaggagaaggcacgatacaagccatactaaatcttatgaataggaacttcgtatatggtttgtatgagtaactaagcatgagtaactaagtattgtgcatgcagtcattacggcacgagaacagaatcctgaatatatatcctaagccccgtaccagctcccttatggacaatttggaccagatctgagtcaaatctcatcaaatagaaataagtctactttacagtttaagaacaactcatgcgccacaaaccctagaatcattcaatccttcgctgtaaagggccaaataataccgagtcgctcgctgaatcgagccttagttttaaggcatttacattgaatgccttggcgccgagccaataaaagtcctccactagcgtcttctccacaggctcttatcagttgcacgctgcttgaaatttttgttgctttaatgagaacagtcaagttggccattccagtgctggctctttccctcagttactttcagcaggattagatggatgattgaagcttgatcaactttattacttgttccttgccaaagcgctcgtaattcgcgcgttcaataatctccacgcctgacgagctcattccttccaacccatgtgcctgccatcacgaagcatacctaccgtctgattgccaagctcctcttaccctccaaccatccagctgcttgttcattcaatttccgcacttcatccaaaaaagagaaacccgtccgataccatggatgcctacgcctaccttatccgccacggctggtccggccccggaaacccactgaacccggaccgcgcaggcgttcgcggcggactagggctcacaaaaccgcttctcgttgcgcgacgctcagggaatcaaggcgtggggaataagacgaccaaagacccgacgaatcaatggtggttgcgtgggttcgaggacgcgcttaaggggattggaacgccgaaggaggatacgatcattgggaaggggaatgcattgacgagtgagctgtatcgacattttgttcggggggaagttgtgccggggacgcttggggggaagaaggatgaaaaggaagggcaggaggtgtctaagaagaggaagaggggggatcatgaagagaagcaggataaggaaagcaaaaggttgaa

SEQ ID NO: 14350 - DNA, 566 bp, Emericella nidulans
ggcggacgataggcggagttgagaacctggttctacttctttacataataggcaggctcccagagcgagcggggggggatgcttgacaccggtttgctctgacagcctgacccaggatccctagcgcgcttgggctatagggatggtgcgaaacaacataacctcagaaacagcaactaccaaatcgggcgtcgcgcaaacagcacactctgcatgctcagagatgaggccaggcctccccagggattacctgtagaggaacaggaggctgacttgttggcggaacagaacactggcaggagcaggatacaatactttaccacactctagcgcaagcaccacagctcgaacgccacaggcacgacgatcgaggccctggatgaggacctgctgcacgattacattggagatcaggcagccctgaccttaacccacatgactgcacctggtgttacttgcagccaggtggggcattggattgaagggtctgccagcacaaggtgccaccacagaagacccaaatttaaggaatcaaccaaccagggggccacgggaagagaacggcc

SEQ ID NO: 14351 - DNA, 2897 bp, Emericella nidulans
ttgcttggtcacattctcggtaaaagccttgcccggacgaacagtgcacaggctaccttcttgctcagagattgcctgcgatgcagtaccggaagacgagctgttgccgatagtgtcaaagacgtacctcagactgcagtttgcagcagccttgatgctctccactactcttgcgtcgcggcagtcgagagcgacagtggcaccaagggacctgaccaaatcgtgatgccgggcactgcaggtcgtaataacgttgagaccgtagtgcttggcaatctggattgcataaagcccaacgctcgctgcaatatatgagccttccacgctacacatacggtgcactgcatcatttagactcacagcttccaccccaaataaggactgtttctccagacttctgagggatgctaaggcaatccttggaaaatagagcgagtagtgctgtgcacgcggccaggggtactgttgccgcctgttcgggcgtgatgccttcgggcaaagggaagcaaatacgctcatctgcgagggtgtactcgctatagccacccaaccccttaatttcacctgctcaaacgaaagtttatatgctgaatgaaataagtctggtccaagacggtgactgacctccccagattagaccggcaatcacggtgccaaccttgactctgctcactttgtcacccgtcagctcgatagtaccgacaaaatcacaaccaagcaccgcatcgtcgccaaaggcatcagcgtcgagggattgaactagagggtgacttagcactgtatattttcgcggcccggaaagggttaggggcgtttagcttactatccgttggattctgagctacatgggaaatcttcaccagtacctggtgctcgcccggagtcggcacaggaatggtttctctggacagcttgccacccctggtcacaagagctgtagcggtaggaggagccattttcgatgtccttgggtgctattcttgtcaagacagaatcctgcagcaacgtgctttcaacttctcagaagctgcggcttttatatgcgtccaaagcagcggggttgtcgtatctctgcctctgaatactggccacttacagtaagccggatggtgagatttgaaatcaactctgatatcgtctgcagtacgtcactttaaagcggtgggcacgcaatgctaggaactgcttcgagagacgggacgtctaaggcaagagttttgtcgtctttttgtttgagcaagcagacgcgcccggaatctttttatttctttgatcaagccgctctattgttggtcgtttgatatgccaaagtgtctggagctccacactggctccgctcggtggagcctaggacgtgtatggatcttgcaactgctgtcaaacaagtaggtagccgtcaattaaaaggtgcatgaactgatggcgtcaatgcatatcttgagaaatgtaaccgttggcttgcggtcctcgaaaatgcaaccagagaatctaagatttacgcagctccgaaggccacctgatgcgctcagtatagtattttctgagggaattctactctgcaatagcgcattgcgggtctactgagtggggccaggcgcttagacttgctgtcggcatcttacagcgatggtgggcttggcagggatggcttagctcattgtgggtgcacttgcctcgaacgcatttttgatcgactgtgtccgatttcaaatcaacaaaccgccagtatcttcatcttttccatcctgtgccaagcctagccgtttgatttgtcatggctgcttggaggcaacgatagcgtacaagagaacccatctggtggcgagcaaggaaaacgatcaattatttcgacctcttaagctgattggatttggtcgtatcttacctgtcagctgaggaggcgactacattatctgggttccgtgatcaaattatgctatccacctctatcacaggcaactcttagggtaaatcaaagcaacgcctaaggatggggacgtttcacacctcatgattagactgcatatcggttgctgcaaacttacaggccggggtgtaggaatagattcgcactaaattgactgggccaaccgccacccttcttctacaaatgctgtggacaattcgcccaacacgtgcattctactgcacaggagatgatgatcttccgataaaaagactcagctctgctcaatcacgtgggaaagattgagatattcaccgctcaaatatcttctggtaatgcgggaaatcccgggtcatgcttagtctcttctcgcttctatgggaatgacttgagttttgcgttggtcataaagtggactcgtttcttgccggcgcgcatcgatctgcccaattcggaagttctcggcccgtggcggtggacgttctccggcggcctctaggctgcccgacgccgagcccgaagcgtcatataatgatttagggccatacttcgggccgtctccgaagactacacaaaaagacaagatatgtcaacgtatcatgaatggagtcattgatcatacttcactacgcggtctccccctgacggatgaagctgccgggggctaagtgttatgtccgatattgttacgagactgtggagagactatcgacgatcgattcgttgcaaaaacttttgacagcgccaaagcagccaagtatctaggattcacgggtattataccatctttcatccaaatgatgggagggtcttttgcggcgtggccgtataggcgcactcgatggggccctctcttagcgctcagcttatctcttctcaacgattatcttgggctcgtgatagatcccggtcttcactggtcaacggcagagatagcacacggcttagaatctgctcagccgcctcaaccccggaatgccgccttatggcg

SEQ ID NO: 14352 - DNA, 375 bp, Emericella nidulans
actgttatcgcatagcccaaaatcggccatcgcgccctcctcattaaaaactacagatttttttatgcctgacgctcgatagtaagcggacggaactgggagtagagggtcggtcgcgcatacgtctagatcctatgctatcacagggagacgggctcactcgtggttagggaggacatatccatgcacaggaagcctgcccgaggcgatgccagcgtatgacaggcggactcctcagtgccagcatatagcgcggcatcataccctcagacatgaccaatctggagagaagccatggcaatgtgaacggcattgtacatctcagcaaatagagggaactgcataagatgctgatgcttaaagacatctggcttg

SEQ ID NO: 14353 - DNA, 2001 bp, Emericella nidulans
gatgaatggtcacgaccctacgatatgtctcccaacttccttcgcaagaagagttcgccgcccttcatcctcagcagcagccgcaaccttatgacaccataccctcaattgacacggggctagcttctgatgctggctccaagtacggctcacctgttgaggaactacgatttcccatgtctccaaatcacaatcagtatctcactgcccttgatgctccccttcctgcttcgttcgatagtcaagggatctcccatgccgctcgttatggacccgttgccgcctcggtgccatccagatttggattagatctagcctcccctcctgcgcagagaacgaatccgcctcgaactttccgcgatccctggggtgttgacgtgaagaaggtatcgtcccctttcatcggttcgtcgccccctggtacgcttgaggacggaattgggccgcgattcttacactctcagcgacctctgaaaccgcgaatgctatctgcaagtgttcctcgacccaatgttatggatgattgggaggagagcaacttcccaatggaagaggattatctgccaatgaacctacatgacgatgtcctaacgccccaggaaaggctccgccgtctgtctcgcacggacaatgagctaagctctagccaccgcgacctcggcggattgggcatgagcaccagcttttcgaaagttagttctcctcttgcctccagtccgtctcgatttggggcgctgttcgccaagcagcgacacgaaaagaaagaggaagaggctcatcatggatcgcttacgcatattgggtctcctctgcgggagtcatccttgcaatttggtggaagccccagtctcggccctatcggcagtccaccacggacctcgtcagcctccatgatatcccagcagcttagcggtctatcactccatccaccttcgactcgtcatactccgtcaatcagtgcaagcagccgcctcgaccgcactgtgccatctcccgttagcaccagcaaaattgaagaagaacaggagcagggcgagggcgatctcgttttctctatggaggaagaagacagcagtaaacgaaatggcaacgaagataccacgccgactggaaagtcgtctagcttacaagtttgagagcggcgagtcatctttctgttctggataaggcacagaactcagcacgtattacaccataaaaggtcatcattttcggttccacctcaacgtctatcttaacatctatccacaaagatcatcatccgctatacttgccatcggagggaaattttgcatagaacggtttaagcgatttctgaattcgaaacacggtgccactttatatcgcacctaccctccgttcctatcatcatattcgcaacttcgcgtactatcaccgccgactagacaaatcatggcgtttatttcagttaaaaaggcgttccagatggatggtaagatgcatgctatgctgggtttctaaaaacgggttttgtctctgcatttaaccgggcatcttctctcttatcatctcttttttgtcattattctctcatggttgatcaaggctgaaaataattctccttttatcttgttgccatctgacctgtcacaactatgaccctgtctttattcccatctcatgccctacgatctggccctactctcatcctgccctactttaccttgtctaatctccctctttgcattgttactgtacatgctcttctctatttttgggtttcagtttgtatgtacgcaattcatgagtcaacgattgatgtttcatttatgatctctcactaattccactgtatgggtggtgccgaagaaggcgatgggtcacctcacatgcagcatgcaaaatttatttagtcagccctgacggttggaccaagacctgaaataaacaattagccacattcatgagtctataacttgcgctacaatttacagcttgagaatggaagggttacggggaggcattgcgcagtggttaatg

SEQ ID NO: 14354 - DNA, 1902 bp, Emericella nidulans
ccggtaccggcgaaaaacaccggactaacacgtctgatctagtacccccagcctcacattaacacctcccgctccctcaaagcggcaatgactatctaccgtgacttcgcctacatgccctcgattgacgaaagcaataattcctcatgggatgcccccgttccgatccttcccgagacgtacacccaccatgagccagctgccccatcgagcgccccgatgaagccgcaggtttacaccgtttctggcgacgggatcgacgtctccgctagccccatgtccgaggttgttgacaacgactccatggagatcgatccgttctccctaaccgaagccgtcgggaaatcgagatatgcagcccaactcaagagccaacaagaacagagtggagccaagtccattgcctcggaactctggaacgggctcctggacgaccttttaggtcctaaacagcagaggcagagtcctatgcgaaagtgatttctatgctattgtttgctttggcgctgcacgaatgttcccttgaatgtagttaatctcttcatgaagtcctgaccgactctactaccttatccgaaaatgtcgagttcttccgcgaccttactacttacatatttttgcctcggctgctttcattgttctgttgatatgattgtccttgacactaaatcgagtcacaaaacagcagatcagtacatgacgtagtctgaacaccaacgatggttggttcataatgtcatcccttgcttcctatatcctgcccttaccttgtacctacaccttagtgtacggaatagaggccagggccgaggttcctgcagaacggtagtagtcctccggatatccgcagtggctcccgcacctaaaacctcgtacaattcaacggcctcgttacttctgaccggcttccgataaccttttctaactagattaggctcccggcctcgagaagatgatttgactacaagctagaagccatttgcagtagtctgctcttacccagatatccagtttgttcaacatctgtggttgttgcgagtatctcggtagtttacctgcacactccggtatgtcccgaattccctacagccgtcgcttgggaattccgtttgaccagccggtagaaattggaagtataaataccacagctaccttacggaatattcatggattagcctatatattcgacgtccgatccggcattaagtgcatccgggtagaaagacattgataagtcttctcaacagggcatatgtacactgatcgatttgattagtcgccacactctggacatatcgcccatcctatgcagtcttgatggcgatttctccttagttgttcacgcttccagaaactagcccatggaattcttggaatcatttatgcttaaacaagtttgcggacactatgacttgagaaccaggcttgacagccagatctgggaatcgaccacgtgaccgagcctggcatacacccgtcttggaatcatggacgagtcagcactttgccttgcaccaagcgttaacttggcataggaaatgggatcatccgtgcctttggcaaagtctggattggtgaattgctggaagtagtggcatagctgtgttgcttaacccttgagaacctttgctttttacgttaaacttccagacttacgggtggtcttttgatatataattcattcttatcttgtctcccttgcttacttatcttccttttacttagtattttcttgttctttttattcccagtaaacttaccctcctattgtcttctatttattatttctgtcatatattgacttttattggatatatttcagttacttgattctttaatattattttcttatatttaagtaactatatttgttttatcttatctcttatttctattttttac

SEQ ID NO: 14355 - DNA, 1369 bp, Emericella nidulans
gataacattcgggttcaacgcagttaccagcatagatagagtagccaagaagagtaggttccagacacactcagtcctactctcctaacagaatcatactcatctcaattctcgcatcggccttacttaccagccgattcatccagcccgcgcgacggtatttactcgattgcgtcagcctaacatcactggcagcctctcgcttttgaaccagatatatgttcttatctagagctcacacgcgagtcgctttgtattttgagtcagaaaaaaagaaagcaaatatcgctctccgttcggtctttcatccgcacttagatgccctaccttccgccgatgcggcctacgggtaagggaactgggaaaaggatttctttacaacagagtgcaagagtcccagagagtaagaacatcgaacgaataaaggaatttgaaataatgcaaggtattaccagatgctgaaacaatagaatatgttgggcctggataggtattggtgttagccctacgtctgtttgtgtagttatatatgcgccgtagacgaacgcgataggtggtttatgcatgtgtagcagcgtatacatgatcagtatgtgcgacctgatattgcaggctaaatcatgtgctcgatctctacccaggtagatgatgaacggtctctcttgtacatacctgacgtttgtatgtattgctgtatgtttgtgtcctaatgtatcccatgttggccgcatgatcaaccagagacatatgacagagctagactttaagacaaggggaaaactccagcaactcaccacactaaaggtagcgtaggtgaaactttgtctctgatatcttaaacttgcacttcagtcgtcagccttcaccccatcagactccgctgtccgtccagcaggatcagcaatatcttcatgatcagtgctataatcgccgtcagcgtttccgcacctgcaatatgtaacatacacagtgcatctgactacctttggattgaagtgtatttaatacagcttttgacgaagtgggcatcgcgtttccttgcagcatggtagcgatcaatggtagtgaagtcaccgttcccagaaaggcatatattgaactgacgaatatttagcagaggcttagtgaaatggttagctcaagctcattgacgatgggcccataaggcgtaaatttctgaatgttgctggtattatcctcttagccggtgttcctcctcggcgagtctgcccatttgataggatagctggtaaattatctccgctctgggagacggtagaatagccagtttcgtttactgctaacacatgaattcttcgttcaaagtctttgcgtcatccctgatttggaatcacttgggcaagtcaat

SEQ ID NO: 14356 - DNA, 460 bp, Emericella nidulans
cctggtcgttggggggaacaacctgggcatcgcagctgggtttggaagggagattttcacgatagcgtatttccaaccatagagatataatactatcaacagacaccatcgcaaggctgatctagcggccaccggcagtggggccatttttagggcgcatgggggagagccagccctggatgccgagtggaaagcccgcagccatggagccgctgtgaacaggtacaaatgactcatcggctgccacgactcctaaacacgtaccttgacacacgtcggacttaatattccttctgtcctgtgggctgaacacgctctgatctcccattctaatagtcctgactagtatgccttggcgacgatcgcatactaaaccagaccgcctggagccagacatgcaaggagaagcacgtacagcgtgaatgagagtcctcctacgcgcacgggcaagcaccagaca

SEQ ID NO: 14357 - DNA, 560 bp, Emericella nidulans
agtggcgaagaaccaagagatgagatcgatcgtgtataactccacgacaaaggtttgtggttgcacggaaccaagcgcatgctgagcggcggtatagcctatccacgaatcccgactttcgtaccagtggaaaggcatggtgagctatctgacggcgggacccgaggctgctgaagatgattattgttagcagacacacccgatagagagcgaacaaatccacacgggatggctaaagggcatgtagcgttcttgtaatagacgtatgatggcaagtgagcgcaccgcagaacgaaggaccctcatgcataaacagtaagccggacgcttctagaagataatcgatggtggcggcgatgaaaccaggcggctcggctggcatggagacaacactgatagtaccctgcgcgatgaagctgtgtgcatattgggcgcacattatgagagaagatgagccagcatgagcaggtacgcaacgagaaatgattcaaggaggggctaccgtaaggaggagtgactgtgaatgaataatcagcagcagggagtgaggaaacctccgt

SEQ ID NO: 14358 - DNA, 2619 bp, Emericella nidulans
ctctggttcgctcctggcgcgaagaccaatccagaagcatagagttgaagaggcacattatttgctatgtgactatttttcaaaacagagcgctgtctatcgtgcagtattctcaatatgggatgatttttgccctatcaaagcttagcaacaatcataaggtgatatttctgactcacttgtaaagtagactgcagagtattgatacaatccacaatgtctgttataatacctaagatgctcattacttctgcccagtgaaggaaatggacttcaagaaatgccaaaatagtatcagcctgcgtctctggatccttgctttgtgccaaatggtaggtccaatagcggcaggaatactgcagctctggtggcaaataatgaccaacagaatatgtatcaatatctctgcgccagttccatagcttttaaggttgcatatgttcttcttcaacattttgcgcatgatattaagacagtaatcagtcagcctttgatgtgtctgcttttcgtcaacccagattagggatctttcgcgcgttctaggatgaagaagaaattcccggaatgagagatggaaaattctgactggcattatatcatcgttggtaagttaagaactgagtgcaatgggttcaatctggctttaactgaagatagttcaatattcatcagcttggcaagagcaacagctgagagtggcgtctcgagaaggataatcacaccaacaagctcttgggtttcatgagtcagcttgcatcgtctttcttcgtcatagttggaaaggagtctgatgaatactggaagatatgttccatctaattgagactcttggttctgatttttaaggatttcagtgagacattgctccgggtccagattatgatcctcgaacagacggcacatggtggcagcaacaatgaagagtggaaccgacatcgtaagcagagcctgaaaattggttttccctggccattctgctgacagagaccgttctctccgaatcatagcgaatttgtgctcaaggaacaaggatatgtcatgttctattatcggcttaggtatctcatggagaatcagatcctgataatgacttccgacatctctgaagccgagccgtattggtagctcaggcctgcttgtgacaaagattcgcaggcgtactgacctgcacatctgcacttgtggtagcagttgaaggatagttcggatgtgattgtcaccctcacattcgtccagcgcatcaatcacaatcaccaaggttgggacttaagagttcatgttttctttccaatagaagacgtagaactagcattttaaactggtccctaagcgactttgctgatattctgggatcgttctgtaatgccccttttgacgaacaggtaaaagctctggaatcttggtgaaaagttgccttgtgattgttgaaaagaacctagttgcatttccacggtccccttcacctcgtctgaagaagaagcttgctcctaatattcacattttctggaatgatcgggcaatagttcgagatatagtggactttccagtccccgccagcccattcagccaaaaaatgcactttcctttaggaagattagaccactctaatatctggcgccgaagctgttgcctagttcctggaagacattcatcttcatgttgattgctgtacgaatcatactctgccccatctgcgataggtaggttgtcgagctctagcttctgatcaattttatgcgcataacgagccgcagtgtcaataccaatcaacatcgcatcaacctgattccgaatgcctgcaaatgccttacgtcagtacacagtgtctatgacagccaggctacacgcaccatacactatctcgcgcatcggcttttctgctttatcggccagggacaattcgacataaaagatcttttgcataagctgctgctgccattgctgcgtattcttgccattccttattcttatgggagtctgcgtagtcgcagattccacgaatgaccagacatggaaaatggttcatcaggccagctccctccatctcaaaacaaagaatattctgttcaagtgcaagcttgtcccgaaattcggcatctttaatcagcttgtttccagatgcaataaggccctaatggattgctggtatatcctcaccgtcatcccgttcttctcgaatgattaatcttgacatatcgcatacttcagcacacgtcccttccctgtcagaaggatgaataacttggctttcaaacagcctatcactgttcaactctcgccgattatatttccgtctcatttttctcttgttctcgagcaccgtgttgattgctttttcaagctgatggcccttcctctgatattgtgccttaaggccgttgaccgcttgtcttaagtataatcggttgtcgattcaataccccgttggctgaaatctttgttcttgaaatttttagccaagtcatactggatcacaccgccgtggtccagggccctggatggactggcgacaatgtcacccaggccaatttacgtttgggctcgttcacccctctcacaccaccaaagaccattcggtttaggaaatctgctcttatcctgcgatcttgcacatagatg

SEQ ID NO: 14359 - DNA, 532 bp, Emericella nidulans
ggccataaacggatgcaggcctataaaggggggttgtgtagagtccatgagttttaatttttaatagactccctactataaatgggacgcaaaggggaggttacattacccacggacgcactgggccgctttgtatgggttaccggccataaccgtttctgccgctctagctatcactgaggatgaacgacatgcgtttggagaagggacgttataacttacgggccccggacacgaccctattggggctacggaacaaaacgcggagctaccaattgggaataatatccttacctagtctgacatctcacatatatgcaataccatcgctgggatccacatgaatgcatgacctgatgctcatctcatggggacatacgttgagcctgagtaacaaggtcttggttctgcacatggtcagcgaagagcgacaccactcaaagacgaactgctgctctgaataagaggcacgaccatggttcgaagcggcgcgcaggatgagcatgatacaatgggcgcagctacactacac

SEQ ID NO: 14360 - DNA, 607 bp, Emericella nidulans
tagttcacgccgacgaccggagcgtgctgcacactcggggatagaggctacattttgtgtccctggatcgcaattgtggcgctctagcaatttaactggcgtcgtgctagtgtctatagcacacactcgtggtggaattgtacggtcgattaacaggctgagctgtgcatatcctggagcgactcctaacgcgaggttcatctatgcttgatggtatgaaataatcggtaccgtgacaagcacagatctatcattcttctacgtggtcttgcttggctatgcactggagctctttatcacttttaatgaaagtgcacatgacggaggggaaactgacaggatatgagtacgcgcactgactgaccatgggtgtaccgcgcttaaattatctggagaaagggctagcaggtgagtgtagctgctgtaagtatcctgaaacaatacactgatccaacgtactgaccttcctgactggatcgcatacatgacggacgactaggaggaatgtactggtagcgcagacacggctgtcagactggggcacgatgtctgccgggtgctgtacctatcgcttgcataggtgccacatgcgaagagagcgactgat

SEQ ID NO: 14361 - DNA, 562 bp, Emericella nidulans
cacatgtattcaatgagatctcggtcgggctggattgctctaataacgcactctgtgaactttgttgttttaagacattattaatatatcctggaccaccatcgttatttactacaacgtgtacattcgagaatgctgtaaattaaagcacaaacttacctataaggcttcacgccatcaacgcttcatgggctcgtacatagctctactgggccaggatttggtgcactggaaagcatccgggagcatcatcatatctatatctacttcatatgcaacgcaggctttatgacaagctagtcaagattttatccgtgacgaccttacaccaagataccatgtacctttaggggaccaatgcgcttctgtggctagatctattaataggcagccaaaacattatcggatactatataacaacatatttatgagaaggtacacgccggagtagacactgagtacgagtgaacggggtggcgactaacggcatgctacaactgagggtagactgcaggtgcaggacaccacaaatacctcattggagctatcggactggacaggt

SEQ ID NO: 14362 - DNA, 462 bp, Emericella nidulans
  unsure (1)..(462): unsure at all n locations
taaccgttggaagagctctggatttctggcgtcgccgcggcgttagatcccactccgggcccaaacgtttgccgcttttaactgtgtcgcaatatctaaagacctatgcatctacataggtatatctcaatactaaatgtgtgaatgagctgaatgctataaatattactctactgagttttctatacgtcttttgctttaacatctagcccacggagaacagagtatgctagatatatacatagatcggagcttgtctagagtaagctattatgaatcatcgtccctaatggtctaagtaacctctatttacaattaaatcatgaacgaggagtgacttcaacccgaattttggcctctagaagatcgggcttgaaccaaaacccaatgtccttggtccgtatctacaagctcgacccttccgttcacgaacttcgggtcatncctaggcttcaacggacc

SEQ ID NO: 14363 - DNA, 439 bp, Emericella nidulans
cctggtcctggtaatctcaaggccctagtaggatggattcttgtgcagacggcggaagaaaaatgcccaggttttgtagccgagagcgtctcgctcggcggcaatggttccagcaaaacctcgcacccaagggtgcaaggacttgggaggaactcaagaaacgggcagaggctgaacccttgatcgggaaacgcaacgacatataggcaccgaacacattgaacgctgaaacagcatcctcgctggtaaacggtcctaacgacacagaggcgagggacccacaaggcgggacaaatgattgtgggaaagtttcgtgctgcatgacacaccaagagaaaagcaagagactctaagatatcaacgtaagtaacgaactctcaaacgcaaaacaggatcccatcacaagtatagcttgcgcagcgtgctcgagacaaaatca

SEQ ID NO: 14364 - DNA, 539 bp, Emericella nidulans
acacacacggtctatcacacacatgttcggcttgacaggttttaattctctcagatcgccgcgggccaaagcgccgctgatgcatatggtacggctggcctctcaccgggactatgctactaactacggaccctgaactgacggtaacctgggaggaactagaccagtttatcacgaggagaaataagctaggcacgcagatgcagaccgataggatgacgaagacatgtgcttgcatatctacaatattgacatgcaaggatcaacaaccatagaacgcagagaccagcgggtcctgggacttaaactgcactgacgacaccaatgtttgcttgagactacaaatcatacatgcaatggacatggtgtgcaactagacactgagcactcgaatagtcattccgggacacccgaccctagcacacgataacgcagggctggcaaaattgaaatctgacacaccaacagcactaaaggctaagacacagatagaagtcaagaggccataccagactgacgtaagaacaaaccgggcacct

SEQ ID NO: 14365 - DNA, 926 bp, Emericella nidulans
acctgcggaatacgttatcgaaagtgacgccagctctgccacttacccactcgccgttgcagccgtcactggcactacctgcaccgttcccaacattggctcgcgttcgctgcaaggagatgctcgtttcgctgtcgaggttttgaggcctatggggtgtactgtggagcagactgaaacttctactactgttactggaccgtcggacggcatcttacggccacttccaaacgtggatatggaaccaatgaccgatgcgttcctcggtgcttccgtactggcagccatcgcccgtggaaaagagtcaaaccacaccacccgtatctacggtattgccaaccagcgtgtcaaagaatgcaaccgcattaaggccatgaaggatgagcttgccaagtttggtgttatctgccgcgagcacgacgacggtctcgagattgacggtattgaccgctcaaacctgcgccagcccgttggcggtgttttctgctatgatgatcaccgagttgcattcagctttagtgtactctctctcgtgacaccccagccgacacttattctcgaaaaggaatgtgttgggaagacatggcccggctggtgggataccctccgtcagctattcaaggtgaagcttgagggcaaggaattagaagaagagcctgtggctgccagcgggcccgatcgggctaacgcttcaatttacattattggcatgcgtggtgctggaaagtcgacagctggcaactgggtttctaaggctctcaaccggccattcgttgatttggatacagagcttgagactgttgagggcatgactattccggacatcatcaagacccgcggttggcaaggctttagaaatgcggacgtggaaatcctgaaacgtaccttgaaggaacgctcgagaggatacgtttttgcttgtggtg

SEQ ID NO: 14366 - DNA, 585 bp, Emericella nidulans
cggccccctggggggatctggcgcgtgaccataatggccagagctcaggcttatgaccactgaccgctaaggagcacgaatggcacaagactgatcaggtgaacgacacctaggagaccgtgaacggccaactgctctcagtgactcagcactgatgatggtggaactacgacagagcgtggaactcgtcaaggagctcagagctctcaggcaagctgcattctgacgccagcacgatacacgaacggttgtagggctgctcggcggagaagctacgaccaccactacagagggcaggtgctagtagatagcaaaattccacacagcatctatggtctggcatataagtggttactatattataagcgcccatacatttgtggtgactttcagacttgccataagtgtgttagcctaccgggatcttccgaacttcggaaaatataggtttgatgaacacataaggtattttggaaaaaccgggcggcaagctcccaaagttcttggggctggcctaaatcctagaccgggggcatctttttcacttaaaaaaaaaagcccttttcatctttttaatctcggggg

SEQ ID NO: 14367 - DNA, 591 bp, Emericella nidulans
gcgatatgcccacgaacgtatgaacgctgacttgaacctcatcggacgtgtggctgttttcaacgactacacccttaccgatgacacgcgttgcacgtaccctatattgtctatagcgaactccaaggttgcatgcctctgcaacagccaccgtgaaccataatactccgtacatgcgatcctgcgagcacactcccccctattgtcaagcgtatcactgaacacaccatgctgcacttgactgcacggacacgctcagatagcaacccaggacggtgcaaaaagacacacactaccttgtattcctgctcttgatcagccagttacatagccgatccccccatgcgatacgccggaatgttagatgacacaatacatgaagacaaggccaacacgtgaattataaacaccgaatggacaggtgctacgccccaccaccgacgcgcagcgttgtcagtgtaagttcacatgcgctatcctagatgtcatccacagcagacaagcttaatgaggctgaatacgagactagcatgtatttcaacttactaagccaaaactttgccggagttattgttaacttttgaacccaaa

SEQ ID NO: 14368 - DNA, 1936 bp, Emericella nidulans
cggcttagtgtctagcacctctcggtgttccgtctttatatacccttcggcatctacattaatttttcgtcatggcttccagaaccgcggtgcgctcgatgagctctttgacacatgctactgccaaagcctccaacacctccgcattggcccgggccgcgacgttggctgctcgctcccccgcctcgttcactagccgacgcgcgttgagctccaatagccgaccagttacacagttcccccgccttcagtccttccagtctttctccagcaaaagatccttcagctcaaccgtcgcaatggtatgttcgacgttgtggaacggtccggcgaggacatttgatcagaaggcgctgactttatcctcatttaggcttccgagactcgcactgaaagtgatgcttttggcgagatccaggtacgacagttggttccgagacgatcacatatgacatctaatcaaacggtttaggtccccgccgacaagtactggggcgcgcagactcagcggtaaggcatcgtcacttgagttacgcgaggaaatagagtctaagaggctgacgaatggatagttcactgggcaatttcgacatcaaccagccccaggaccgcatgcccgatgctgttgtcaaggcttttggtattctcaagggtgctgctgctaccgtcaacatgaagtttggccttggtaagctctgtctgataaaatttaggcaagaatgcgttgtttaatagcgtctagatcccaagattggtgaggctatcaagcaggctgccgctgaggtcgccgagggcaagctccttgaccacttccctctcgtcgtctggcagaccggttccggcactcagtccaacatgaactccaacgaggttatctccaaccgtgccattgagattctcggaggcaagatgggctccaagaagcccgtccaccccaacgaccacgttaacatgtccgcttcctccaatgactctttcccaaccgccatgcacattgccgccgttctagagctggagaacactctgcttcctgctcttacgagccttcgtaatgcccttcagaagaaggtggacagcttccagaacatcattaagatcggccgtacccatttgcaggatgccactcctcttacccttggccaggagttctccggatacgttgcccagctcgaccgcaacatcgagcgcgtccaagcctctctgccccacctgcgctaccttgctcagggtggtactgccgttggtactggtcttaacaccttcaagggtttcgacgaggcgattgccgctgaggtgtccaagatgactggcaccgagttcaagaccgctcccaacaagttcgaggttcttgctgctcatgatgcaatcgtcgaggcctccggctcgcttaacacccttgccggctccctgtttaagatcgcccaggacatccgttacctcggatccggcccccgctgcggtcttggtgagctcatccttcctgagaacgaacctggttcttccatcatgcctggcaaggtcaaccctacccagtgcgagtccttgaccatggtctgctctcaagtcatgggtaaccacgtcgctgctaccattggtggcatgaacggtcagttcgagctcaatgtattcaagccactcatgatccgcaaccttcttcacagtgtgcgcattctcgccgatggcatgaagagctttgagaagaacctcgttgttggtcttgaggccaacgagtccagaatcagcactctcctccacgagaggtaggttttacgtacccgccttactgtttcatgtgtgctaactttctcagtctgatgctcgttacctgcctcaaccccgtcatcggttacgacatggcttccaaggtcgccaagaacgcccacaagaagggtatcaccctcaaagagagtgccatggagctcaaggctcttagcga

SEQ ID NO: 14369 - DNA, 585 bp, Emericella nidulans
acggcaaatggcagcggggagacagaagcgacatcccacaggtgcaggccgagagtttactgttgctgggcagagcacaaccagcggagccgcgggggagatgagatgcggctctccgaacacatcaggccctgaggctttccactggaagaattcaggacatatgagcggtaagcggagtgctgcaattgcaatagaacagaagccaagatgctactgaatatggcttaccgcttggagtgggagcagtagctaggaggtggggcgaatggaactccgaggttggggcgctatactggatgcctcatggagaaagaatggtggagcccaaggactaagtgcatgggcagcctcacggacccatggaccaccaagtggaatctggcaaaagccaacgcgctagaaacaactaaggaggccactgcgcggaggtatatatgaaacccatagaccgacaaccgcataatccaagcatgccatggtgagcacttttgccaggtgcatggacgggagtatatgttggaaggcaagaccgagctttaacccttggccttgctccagcccaaggccttataacaggtcaag

SEQ ID NO: 14370 - DNA, 2799 bp, Emericella nidulans
cgctttgcttcatggtttaagagacaaaaggaaacgttagacagattaccaaagttgtaacgagagtcacatcacggtaggaagaaaaaggcagatgaagaccttgggaggtttgtgcagaaattcggagctcgaagcctcattgtcttcacgcgtcaaaagagctgacactgggcgtcataggaagcgcccgatgctcagccccgcagcgaatcgccagtaacactgtcatccaataggcgtttgctttattgaagaagtcgtctgacaggctattgtccttgggacaattcttcaggtattcactggcgagacaatgaagcctctaacaccagctgtcaaggaatcctttccgtagcgagttatgcattgtctctggagccaggaaaagttttctgacacgataaatgtttcgtatgggattatgactagatatttttgagaaaacctgacatgattgtaaaggtctccgtctaaacacctctatcaatgttgtgttagctcgtagcattgaccccaccccggcgcttaccacgactgccattgacggtgcagaacgcgttctgcagcgccgctattattagttcaaggagccgccagaatttaggcatcatctatttgtgacgaaataactggttcagtgaagagcatgacgttgatgtcggctcccatgctgaggttcgtcggtgggatcaacaaaccgaatgagagtaaaattaaaaggcgacagctctcgagcacaaaattagtcagcattcttttgtgtcgttgtgctctgtaatgctcatatcaaaatcattagactataatcatggctacagcctcgccatgctgcactcgacaagctatgtggctggataatcgcgtaagctgcttattggacttaccatgatccggcttcaatatcgccgtagttgtttaaattcctatcattgtatcgcaataccctggtttccagagctcatattaatagtgctgtccgttaggagcaaaaaagctgtctctttggtgaaatgctgtggtagcctacaatgaatgctagagggctagaatgagctgggataagtattggggttctgcatattagattacaaccgccccatattggcaataggtcctttggcctggcctgctgcctgaattggcactataactgtttcccgacactacccaccgaataccattctccggcataagtttctttgtttctgccagtggtttgaatatctaaccaatccgcagtccaccctcctttaacagcggaagaatgtgttccagaaagtgatcgaagtcgactttccagtcgtagaaccctagctggacaccatcaatgccaacactatgcagagctttaagctgctcaacaacttcctcaggcgttccaatgacctctacattaccaccgaggttgtacccttgcttgcggaaatcattctgtcctctccaagcatgcgcatcactatcatatttcgtgaaaggccgcctttccttctcgtccacccccatcccgtcaacaatgctctgcaaataggcttgagtgtcttccgctgtattcctggaaacaataacgggatttatgagcactttgatctcacgatgcgcgttcccagcagcattctttatacccgcaatgtgatctgggagtgaatcaagcgcactctgtatatccgccccagcaggcgaggtgataaacaccaggtccgagtacctgaccgcaaagtctacacctgcgggagagccggtcgcgttaacgagtacaggccggccgtacaatggctttggtgtgacccaggcgttctcgagcttccatggcgaaaccttgccctcgtatgttagattctcagtctcgccccagagactatttaccacatcaaaaagttcacccgccatctcatagcgcttgtcgtgctcgatccggttccatccgaacatctggtgttcgactgcgcggtgtcctgttacaatgttgatccccatcgtcccttcgatatatgatcgagcgtggcccgaatttggcaatatgtagtggatggagtgggccgtaaagaacatggatcgttgagatcaaaaggattttgcttgtggccgccgccattgcacccagggcgataaatgcgtccaatgaggcttcaccgtcataacctcctttgggaagccattgcattcggctgaatgcgatatcgaatccggcttcttcagccttacgcacaatttccaggttatagtcgaatgtccagctgttgcttgtcgggaaagaagaaagcttcctgtcttgcaggtcgaggaagacacctagcatcaggggttgccgtgaagccacgcggagaggactatttgggaagtcagaggggcccttgagggtaggccctccttctctgaccgaccttgtccgcatgaggagcaagttggtattttccaaccgctgattaccttctcgctttgggggtacaaggctttgaatcatttctttacagaagacgggttagccttatttcccctggaccatattggcccccccatattggtcattctctcagggaaaccctttttactttcttccaatacccatatccttactttttccgttttgtcctctccctcttcctatccgcatcccttactatctatttttcacctccaccattgcaattcttttataaatgttcctattcgtcactcttagagttgttcttcctcttaaaactcttcccacttttattttttcttcaatttcctcctctatattggctcatcagcttggataatattccttctccccttttctcttatccccccacc

SEQ ID NO: 14371 - DNA, 587 bp, Emericella nidulans
gaacctcgcactgaagctccggatattctggcccctgcacacctagcccctgtctttgggggtacggaatgactagccccctgaccgctatggttgggaatcgctgatatgagccagcggctctgggtcagtctcctcatcgacaatgctgatcggtctacctaacgactacgcgagcgggcgctcagtccggttacactccagtagagcctgcggcggaccggagcctagaacagactgtgcacgctttactggacgctgcctgggcaggacgaacagaacgcatattcgggtgagcagacccactatggtccacacgctggtgctcggcgatgacagcacattgcacatggtacagagcatcaaaggtattatgctacagacaccaagcgagccctggatacccacactgatactgttggccgttacacagtaactgctaggcggaggagactcatacatatgtgtgatcatgagtatgcccacaccatgccgtagaccatacgagactgactcgggaaatagatcctgtggcatgggccactggttagagagctacccagcaactcaagttgcgctcgctctgg

SEQ ID NO: 14372 - DNA, 485 bp, Emericella nidulans
  unsure (1)..(485): unsure at all n locations
ggactccagacctaatcctggagaattataaacagggggatctcttgaactatgtagactaaaagccagccgtgttgtggcacgggttctctatgcatgctgtgcatatctcagggcggagggccaatatgctggggggagacatggctggccatgcacaggcacaatgggtgccgcggcggatacgacacgggtctcacatcagacggcacagtgcggggtggcgggacaatgatgaacgcgctgcatgggctgatgtgatattggctcgggaaacggatcacagaagcatctgaagcaggagagtgaggccaacaggacaaggctgctggctaataagcggcaagcatctgaacaagtccgcgacataatgcaatgagatngggctgcttgctgtgctgcgacatcagctactaaagcagacactcgcatcagatgacataatagaggaggaaggttcgcaagtatggagtatcattgccgat

SEQ ID NO: 14373 - DNA, 631 bp, Emericella nidulans
  unsure (1)..(631): unsure at all n locations
gaacccttagggtttggtctgtgagtacaaatattctatagcttgtttctgcttggcctcttcctccgcagcaggggttcggtatttaaactcatgttagagcatgggggaccttattgagatctgacagttatcgatccttacgcgcaatcctgctagtatatcttgtgtccagaaaatttacgaggtaagaccaacaggtagaaatattaaggatgtaagatcactcactcgataatccggctcaatttaggactaacatatggttccatgcactaggattgaacattagtatagctagaatcctgatttagatatgtcgttttagggtagtcctccaacattatacccacagagaattcaacttcctccttgtcaactttctcttcgtcgcggtaatagttttatgacaaaaaaaaaaagggcttaagcgtatctttgtttagggctaggtaacaactaccttgccatatgtttcgagtacactctaatcagctaaactccgcccttggaataaaaagatggcctctgcacgtgcaaaaaaagctaaccggtagctctacatgaaagacatncatatacttgctacgtgagaatttggggcaaagatctgtagaaactgccaacaaaa

SEQ ID NO: 14374 - DNA, 538 bp, Emericella nidulans
ggggaaagcgcgtcctccgcctcaaggctctgctgactgaccttgctaggggcttgctatagagctgccccaaagagacacacccggctgcgttattgctgctggcgcccacgctctcgtcacagggcgcacgattacaggcgtgggctcgacgcccaacatcctattagcattgctcctcgaggaccctagcaatttggtcagtcaccggcggatatttgacccggacggtcgcaggctctttactcaccatgccgatcagttacacgtgcatactgacgtggatgtaagcttatagagctggtacacacctcatttactaggactttggatgctttcaatatcagatcgagaattacctactgaagctaaccaagatcattctgtggagtgcaccggcctacgaatatccaagctcaagcaaaaacacagggagaaaaaggcatgccacgtggggcgtgctaaatgactcctgatttgatgcgactacccactgccctaaaaaccaagcatttcctttaaactgccgcctaacttc

SEQ ID NO: 14375 - DNA, 1048 bp, Emericella nidulans
gtggtggaaggagtgaagtatacgtgagttggacagggcaggccctcgcgccccttttgcatagtagagctgacgatagtattgagacagacgggagtatatcgcgagcttcccggctggggttcttgctgcgcggttcactgccagtgagaagggtgcgctcacgctgaatgcgacgttttgtcgtgtctcggacgccacgtcgttgcaggcttctgtgtcggatagagcaccatggatcaggttgagtgggacgagcggacagcctgctgaggaataccccattgtgtttagtgggcaggcgagcttcgtggctgaagggggtatgctccgtctttcacctcgtacgagcgtatgctagctgacttccttgagccctcttcacctccagcaacggcactctcacacttgtcaatgccacaacagttgacatcttcttcgacgccgaaaccaactaccgctaccctagccaggaggcaatcgacgcagagatcgcccacaaactcaccgacgccttgaacaaaggctacgataggattagggacgaggcacttgccgactcgtcatccctcctcgaccgtgcctcaattgatttcggtatctcaaccgacgaaaccagcgacctagccacggacgagcgaatcgcactcgtccgctcagctggaggattagacggggacctggaactcgccacgttagcatggaactacggccggcacctgctcgtcgcgtcatcacgaaacaccaccgaggctattgatttgccggcaaacctgcaggggatatggaataaccagacaacagctgcctggggcggaaagtacacgatcaacatcaacacggagatgaattactggcccgccggtccaactaatctcatcgagacacaggagccgctattcgatctgttcgctgtcgcatacccgcgcggccagaagcttgcaagggatatgtacaactgcagcggtgtcgtattccaccataacctagatgtatggggcgacccagccccgttgacaactatacctcgtcaagtatgtggccgatg

SEQ ID NO: 14376 - DNA, 402 bp, Emericella nidulans
cagcatggctgcacggtgcgcatgaaattaaaacagactggatctctgggctggtggtatttttctgaccccactcataatatggctgagcttgaggagagaatgggatctcaggatcggatactgctggggagcggccacaacaagccaaggcttcttattgcagcgtgcggtgcgcaactacccaatacagagttggcccacgacgcttacacaacggtcacttgacccagcgcacggtatggcaccgcctacggggacccgccggtccaaaaacgaccccgagatggggccccgatacaaacctcttgagatggcatctcacgatctggatgcgtggagccgaccccagggtagggcatactgctgcatgatggagttcaatatacagattcgatacat

SEQ ID NO: 14377 - DNA, 1056 bp, Emericella nidulans
ctattcttcctaaatcgccttccacttccgatcctcgttctcaagatccaactctccactttcaggtttaaaccaataaacaaacatccccaaaaccgctacacccccagcgagataaaacgtcgcactgtcgccacccctctccctcagcggcataaaacactgggttcccaccgctgcgcccgtccggccaagcgccaacgcaacgctatatcccatcccgcgcatagcagttggaaacgattcagaggagatcaaaccgattgtggcaccgggacccatatgaccgaaggcattgaggagaccgtatagcacgacgaaagcagccatgtgctttgagatcttatggaacagccctccaattagaaatcccgtcaccgtgtagccggcgaacccgagcagaccggtgttgcggcgcccaatggcgttggtaaggtatgcgcctagcacgacgccgggaacagggagtgcggagaggatgacttgccagattgccgtggtttggatgttgttgtccgtaaccagagacgaaatgatcgtgctagacatgatgctgttcggaaagttgatgaagtcgtagaggaagaatgcggtagaggttgtcaggagacgtgcccagtagcggcggacgagcaagacgtagaagcgcagagagcggttctgcgggctttgtttgaaattcgagttgtgatagagtgttgagtcggccatgaagaagcggaggagcatgactgtgaaggggaggattgcagcgatggaatacatggcatggaaggtaatgtgcagattgttgctgcttgctttcaggctgatcagatagatgatttgcaggatgggcgaggctagtgttgccattagggttgtgaaggagacgaagacaggacctcgatagcgccgtctgaactgcccttgtcaatatagctctatgtaagtgaacgtagagatcttacatcgtctgattcctctaacccagccgccgcactgggcggatattcacctccaacgccaaacccagagatcccacgcacaatgacaaagaacacagcatgttgtacg

SEQ ID NO: 14378 - DNA, 2523 bp, Emericella nidulans
ccttaaatttaagcaaaggccgcaggggacatctacatctgccagggttatatcatatttatatttttacgaggcgtagagaaaaaaaaagggagccgggataggcgcccagcatagtggatcctccgggtccaattcagttgctggcccccatttcctaattcagtaagcgctaaagattgcatcacatgactactaagccctagccagcatggtcagccatgcttgcactcgagaagaacttatcgaaaattcgagatgaataagaagggcaattgatagagaaggagaggagctctctgacgccatatttgtctttctaggaatatatgaggtcagtcaatatgtatggtactagacatatttccctgaaatgcttttggtactactcttgagtacactactccggtataatgtggagacctccaagtggatatactcaaccaatgccgttgttgggcaaactagcggtgcatgaccgccaccaaagtccgttagtttgacgctaggcgagcttttggctttcgcgtccgggtccgggccaatgccgcagccagagggaagacaccctgggtggaacaaaaagcttgaaagcaaagggtcttgggagaagacacaaacttatattccttggccctcccgcctgtgccctaatatcatctaaagcaaacttctagcacactcaggaactgggctttcctccaggcgagtcgggatacggatccacccacgaaggcagatgcagagcctggatgaactttgccactaatttcgagcaaggatcctactccattgcctcagctgccaagaatatacttcgttttgtcggatggggattgttggtacaagaggcaatgccacagtgataggcctgagaggaccggtagtccatttcacttggcaaacactgacatctcgtcaatcaattgcaaccctcactgagccaccgcaacgttgcaaccgtttggagattggtgatgctcaggggcgattatggctgtcttggccgcatgacatctgggctggctgatccactccacggtcttggcctccaatcacggctccttcttttcatagatagggcgcaatagaaacggctcggcgaaatcaccatagctggcatcggattatcgtggccagacaacagagcagcagtttccaataggcagtttcggaagacattcggaggaaatgccgtgtcggactcgtacaccgctattgctgttgctgaaatcaggcgtccattcttatccgaacctcgagccttatcctgcaactctgcaaccgccagttccagatctgttcgttgctcggcgtagggacgaaattgcatcttttaccgatcgaaagccgccagatgccagttcggtctcttggtgacggcattcatcagtttaacatggctagttcttataaaatgggcatccgggccacctcggtcatgattacatgtgacaaactgatatgtaggcacacatcattgacgggctatcctgagcacgagaaactttaatggctcgcctgtcttctcatgaacggtctcgatagcacccggcgcagttaatgtgctaaatggaagggagaaacggataagactgtaatgagcactggcggctggactgggattggacaaaggcagccatttgagtaggcacaggtaaatacctgcgggagaggactagcattataggttagttgaagagagggatctacaatctggaaaggtaaacacaccaagctgactgggcataatgtgcaggtgattgttgatctcataaactttgagctacctgtcgttgatcgtgaattctccgaaatggtcaatttgggtctggctaccgagtacaacgtttcaatcaacctggacaggcttgtggaggttcacgacaaataagttcactgtatgacactaaaggagtgcagttgccattccatgaatggtcaaagaaggacgattaatctacaggttagtcacaggtcttccgctcaagtgcgatctctgatattctctggtcttgagaagacatctccgtatcaaactgacatattatgatagtcatcaccagcaaaagctactgcctcgcccaacctatcatcgtgctagtcgagttgatccacctgcctatgccatgatgtcatgcagcataatcctgctccctctcctgagctttcttcatagtacacagaataatagcgatctactgctccttccttagtcccatcggtgcttagtaagctctcgcagagcctagagaagacctgtttatagagacgacagtaacggttcggcaactcccccaaaccgcctctcgaggatttaggttgctaagaactagttataaccttccatctccttcgaccaatcggcccgtacccgcttggatgacctgcaggtggacttctcggcattcagcccccgatcctataatccaacgtcaccgtgaactgaaaagttgaccgcgttaccaaaaccagtccgaaagtggccgagcaagtcgtgaatgtgttaccccaaatcccgac

SEQ ID NO: 14379 - DNA, 1061 bp, Emericella nidulans
tcttcgttgtagacactcactcattcgttctgtggaagatgtgtttgaacatgcgaggggatcatttttgttctgcaacagggtgaggaagtacggacactggggttttgggagtcgagaggtcaggcctgaaccgctggaccatttgagcaatgatggattcgcacattatatgtacgtgagtacagcatttttgcagtgtcgccatatacctggttaggccaataatccactgacatgtattttcagggcgaaacaacccccagattcctgaacgcctttcttactatttactatcaggagacacagcttcccggcatagttagtgctaggccggtgtttcacaattcgtaaaccgcagctcccctgcatatctagtactagcccggtacccgaccatcgcttcccaaatgcgcctaacaaaacgccaagcgtccccatgagatagtgcgagatgaaacccaggattattctggctttggatctttgtcaatcgccgaggtatggtcggactggcgtgaaatgttgacggggctgcattgtcggcgaagcaaccaggctatttgacgacgtccgtcactataaacgagcgttagcaggaagcaacgctggctcatgagggaacgtcgccctgcgttttagccataaaacgttctcgaggaagaacttgggaaccggctatgggcttcaagcagcaattttacagcggggaggccgccggccgctctcaaggagacactgtcgtgttatgaagctgatatgtaatcaacaatcaactgagtgagagaacaggttggttgagacaggcatggcaatctctttcctgatttggcaggatttgaattaacataattcgcggttcgcagtatagcgtgggcggaaggaattgacgggatgtgccgtgatctgcgtgtggaccgaatatagcgggcgaagggcattgtacttgggtgctaatcacttttggaacattatactaaccatgctttttgtatgtagcctccagagccataatgaagttacctagtcgatgtttcggaatgagctgtaaagtttatgtt

SEQ ID NO: 14380 - DNA, 1509 bp, Emericella nidulans
acctgtttgcactcctcaatgtgcggagaaccctgcatctttcgctcgccacggacagttcctctcggccatcgggggaaaggagatggagctgtccttacaaaatcaccaagtccggttcgggagcctgcaaagggctggatgttgcttatttgttccttgtcagatctcggggtgggtttacaccgatgtaaagcctgcttatgtcgtattgtggtggtttaagggaactataccgaaatccagcgcttcatactcgttcccttgcagaagaaagtcccagatgatccacttcaatcacccaaagaacaatagtgctgccctcttggaacaaagctcaacactgttggaagctcagacacgaatatacgccacggaaggcaatcatcgccagcctgccgttataaaccaaggcctccagctgcgccacctttcatagctggccgtttaggagtgttgggtgctagtctttgtttgcgatgagcgatttagctagggctcatcgggacccataggacctggtcaaaggatgtcctttctgactatcatcaatggtaacatgtagactacctgctgttgtgattgtcaatccgctatgcttccaaccatgcttctcgtcgtccacctttttcctgagaggaatgtcggcttgccagcccagtatgcgcctgccgttatatagttggtaaatggtaccaatccatctcacgcagaaggagcacgaggcatttatctagaatgcccgcactagatctatgtaacaactctagtagggatgatcttcatactcgccaggataacacgtgtaagaggcagtaatgttgacacatccagtgtccccgcttcttccgccatgagcaactccttcagcgtctgcgtcaaccgtgccttttgtcccgtcggcgctgttgatgtggagactgagtctgctgctctacgcaatgcatactcacgcgcctcaagccactctctcaaactacacgatcgccacatacactccggcgctggaagtggtagagtcagcacggcttcgtcgtccaagggctcgaagtaagcactactgagctttcccgctcgagcatcgagtatattgatgacgttggcaaagaagatgtttcgacgaagcgactcagcgaacttccataattcccagttaagttcggcgtcgtgggttgtttctatcgcggtgcggcagtgtgcgtacaagcagcggatcatctaagcattgtaagctgacatttctgtcgggaacaaatagagagacagctacctttaagagaaaagaactatgtagttctgcctctcactccgatgcctctttctgtttttccagcccttcctctacttgtctggatagcttgacagcgacaggcaggaaattccctccaaagaggccgggtgtctgataaatgcagaccgcgtgcacggcagcaagggaattctcaggcgtaccaagaaacgactggaaattacggactaacttgtcccgctctttgttgatcagagtat

SEQ ID NO: 14381 - DNA, 1756 bp, Emericella nidulans
acgatacctacatgcatataccgggacgtcgggtgggaggctgagaagtgtattgtataccagtatatagatcggcttttcttggtcgtccaggggggtgttcttcatgccttgggggagtagcaccttttccactagctcctccagtttagaaaacggaagctcgatgtcggaagacccagggtttgacggggacggtatagagatggtcttgtctaagatgtccgccaatgaattttctgctgtttctttgtaataaccggatcttgaaggctggcaccatgcgaaccgactgacgacctcctcacagaattcaaattccactgaaatcgtatccggctgtgaatccccgcccaaaagccgcgtaaacattcgccccgtttcctgaattaaagaccgcatcgcccttgtactccgttttgtagtgacttccctgtactcataaatcccggacacgacggtctccgcccagccaatatccaccactaaagccgaccgcagtccagctgctgtcgcggccattgcagcgctcgtcaacaacgatatactagggatcctccaccgattaaacagcgttgtcaaaagcgatgacagcaacggatgtggtataacagacggcagaacaagaaccaatcgtgccgagcccgcgtcggtcaagaggtatttgttgtatgcctcccgaaacatcctctctatcttatcctcaacgagacccaaatcaagctcgcgtagatccatgtgccacaactcgaatggccgcgtccagtcgtccggcctcgctggtggctgtggtagtgtgtcgtctgccaccggtgtacccttcagccattgtctgtaatctccagccctccgcgactcatttgggccaattcctagcacacatttcggctcgctctcgccttcgaagccggcccggagccatcgagtgccgagatcgaatattatcgcatcttcttccacgcggtatgtggagccggaagacgtgctcgcgaaggagttattattcgagcgcaaatggtgctgcggggtatgcggcggtgattttgcagattgactatggcggatcgacattgaggacattctcgtcaataaatttctgtggttggaatgccgcgtctacgaggctgatcaggttgagtgcgggctgcggggagaggaaatagagcggtgcaggagcagcaattcatgctagaagagatgctccacagcaacgcactctgtccggcaagtccaattcgaagagtgatagaagagaataaaatttcagagggaactcgcaaaggttctttgtaaatggtcggagggccatagttactgctactccttgtgccaagatatccaccggatcttcgtcggcccgtcgccccggtgttgctatcaacaaaacaacctcaagtgaacccggccgcagcactgcgcaggttttctgcggtattttcgcgcttttttggtctggacttgcttgaagctgtccaaatgggtatcccggggtaaggccgacttttctcttcttttagtttccagtcgctatgctgaaacgggggtttaaccaaaatatatctgcccgtgccacacttttataacaactatcctaacaagaacaggctaatcaacgcgctcggccctggggagcggatatctctgtcaaagttggcgataagccacctggaacggacatctcggccgatcagaatagctgttgacatatcaatatggctgtttcaaatacaagccggccgcggtggcaagaacccag

SEQ ID NO: 14382 - DNA, 1433 bp, Emericella nidulans
gttggaacattcagcggtgttgggtaaagaatatgtatgacactatttttgatcataactgatgaatgacctagaccactttataacgccgagctggcctcgcctgagatgcgtggattcttcgtgtccttttatcagttcgctactattctggtatttacagctaagtctggtcagatcagagatctcatgcttacgacatcttagggcatgatgatcgccttctgggtgggctacggtagcaatctgcacatgggcggcactggctcaacgcaatcgaatctagcctggcagctcccatcaatcattcaaggaatacctgctgcccttcttctgcttgggatctggtttctgccgttctctccgcgttggctggccaagagaggtcgagacgaagaagcaagagaaaccctcgcgtatatccgcaaccttcctgttgaccaccccatgatagacttggaacacaaagagatcaaggctgagacgcttttcgaacagcgcgcatttgctaaagcctttcccgggctggcggagaaggagaaacaaagcgtcgtcatgcgcgagctggcgcagtactggcatatcctacgcaagtgggacgcgtttaagcgcgttgcaacagcgtggcttgtcatgtttttccagcagtggtctggcattgacgctatcctctactatgcctcgaatgtgtttcaggatctgggtctcactggcggaacaaccgcactgctggcaaccggagtcactggagtcgtctttctcgtgtttaccatgcctggtatgcttcttattgacaaggccggcaggaaacccatgttgattgccgggtccgtggctatgtggatcttcatggtcatcgtcgccatcctagtcgccaagttcagacacgactggcccggtcatcccgtcgcaggttgggtggctgtagtttgcgtttggctttatgtaggcgcgttcggcgctacatggggccctgttagttggacactagtctctgaaattttccctctctcaattcgctccaagggtgcggcattcggggcatctagtaactgggtaagtcaagccaagccactcgatttactgtaatcagtcagacgctaattcaggattacctacagctcaacaacttcgccgttgcattctacacccccgaaatgttcaatatgtgggcatttggaacgtacatctggtttgcaggcttcttgactgttggtatcttctgggtctggttcttcctgcccgagaccaagggcgctacgttagaggagatggatcgagtcttcaagagccgcactggagcagaggacgcagctatgctcgcacaggctcgcgccgacgtcggactcgatcatcatgtcgtgcagatggccgagaaggccgcgatgggcagcgtgcatgtggatgatggaaggttctcgcaggaagagagg

SEQ ID NO: 14383 - DNA, 462 bp, Emericella nidulans
cgacggattttcgaacaagctgaatgaccgcgtccttgtccggttgcgtgaccttctcttctagctgttaaattcagtgcattctgaaaaacccagctgctcgtcgcgactcccataacagatcctagattccggaagagccctaatgttgtggtagccacggcctgctcatccgtttcactagtggcgaggacagataccatcagcgtagggaaagcaaatccttgaccgagacttgcgagagaaacacaggtcatggccacgatgtcaggggtgttggcgcccatcatcgctgcggccaagcctcctaggagcagaaatatgtcaccaatcataatagttggtttcaggcgtttggaccatgtaatcaagaagcctgtagcgacgctagaacaagttacggccagtgtagacgcaactagtctgagaccggagtcggttgggcttgcaagtttgaccgct

SEQ ID NO: 14384 - DNA, 567 bp, Emericella nidulans
gaaagcgttgggggccggccatggtgactgctgacatgctgctgtgctcctttttttcttggatagatggatgaaactgccgtcagcgagaacagctggggaaatgctggggctgatgtatttgttagtatgaaatgcgagtcgcctccaaggtaggattctcatagtgagagaggcagtagggtggggagacagactgcgagaggcagattgacgatagagataaagaacctataagatagatgagagtagtacggagcggatactaggtgggtagtgtctatgtgagcaggaaacgaggaggatgtataggaactgcacgggaaggagagatgtaacacaagaaggagaaaacaagatcaacagctaggctactgacatgagatgagattattgaaattcagtcgaagatgatggggagggagagctcgataaatatcgtgggtgcagagtgcgctacaaccagatcttggttagttaaacagactacggtgtctagatggaaaggcctgccacagaataaggctcagacagagcctgaaaattcgggtggacattcacatgttc

SEQ ID NO: 14385 - DNA, 418 bp, Emericella nidulans
agagaggagcaccgtggataggttgcataacaggagttctgcgataaccggacttttgtttccagagtggacgcctttgggcttgggctgatgtccgtcacgaaggcaccgcccattcacaggatcgagtggctttgcggccggatccccgggtaccagaactgcatctgggactcaggccctacctgcagccccatgacaccacgtcaatctaccctgctcggaccagcacgagaaggctacaccaaccacaggttacacgcgttgcttgggtcgcacatatacatatgcttaaggcattggcttaatggagacggccatgagagactagaaggcactctcaatcaagtgatttgttgccacgaacacatactcgtgaggcatatgacagcctaggattagcctcgctgttgcatat

SEQ ID NO: 14386 - DNA, 574 bp, Emericella nidulans
gtcctggttttgaagaggccacaagtcttctttggccctgctagcgaagcacgagcgtactttgtttttcttgggttcaaagaaaagcctcgccaaaccactcccgactacctcacgtcgtgtacggatccatttgaaagggagtacaaagagggacgggacccttctaacgttccatctacgcctgaggcactcgcagcggcctttgataactctatctacagtcagaatcttgccacagaaatgaacgaataccgccagcagatacatcatgagaagcaggtctacgaagatttcgagattgccaaccaagaggcgaagcgtaaattcacttccaagtcatcagtctaccttataccatactacctgcaagtatgggctctgatgcagggccaggatcttatcaaacggcaagacaagtttgccctcaatgtcttctggattacttacaccggtgtggctattattcttggaaccagttggcttaatcttccaaaaaacgagcccgagcgttactaggggttggcttattttaccagctttcttttaacggctttcaacatttttcgagctt

SEQ ID NO: 14387 - DNA, 540 bp, Emericella nidulans
tatagactgtaaatatgtctgcagaggataggaaacaggactgaccaatcctgacacactaaggatatttactcaaaccatgagcaacacgctgacgtggggggaactacgctggtactcctaagtggtacacagggcgctagaactggagcacatacactctcattcacataacaaacccagctccgtaataacacagtcgcagcatatagggcacccaacagatttgtggcggatatgctatcatgacccttctcttaacaagccagagctcacctaacagatgaacgttctcttcttgtattccgggggaccatggctgtttaactcaggaaaccatatgtggggaatacataccgggagttatgataactatacgatgcaaaaacagtgctagacgaaatatcatcgagaaaatcaaaggaacacctggacctccacagacaacagataagtctgcctagctattatagacgtccagggcacaacggatcaatagctaaacgcaggactcgcattgaatgactatttttgttgcgc

SEQ ID NO: 14388 - DNA, 570 bp, Emericella nidulans
ttttctgggatgtttctggcaccaattggttttcagtgcatcatgatgcaggtcatattgccatcacgcggaactaccaagtggacagcgtgattggcatacttattgccgactacctgggaggactcagccttggatggtggaaaaggagccacaatgtgcatcatatcagaaccaacgagcccgaacatgatccagatatcgagcatatgccttttttcgccatttcccatcgctttttcatgaaccttcgaagcacatactatgaccgcgtcatgtacttcgatgccttctccaatttcatgctcaaataccagcattacctttactacccaatcctactattcggccgcttcaacctataccgactaagctgggaataccttatcctcggccaaggaccacgaaaggggccagcctggtggcaccgctggtttgaaatcgctggccaaattttcttttggatctggttcggctaccgggtcctctactgctcgatcctacctggggcagccgtcttagcttcccttttatttcttacatggtcactggacctgtccacgtgcagat

SEQ ID NO: 14389 - DNA, 1411 bp, Emericella nidulans
gtaagaggagatcctgtggcatcaattgagcactagaatacggatgtcatcagcacttgactcttaatgtgtaaaatatgtggcgtcaatgcttacaccaccgagcaagtggtcttgcaggttgaaagtgatatcgtcacgactcttttcgatcacacggaggatctagtgcgggtcttgcggttagcttcttgaatcgcccaatgctttttgtaaaaactgttcagtagctcaccttgacagcctcggcggtaacctggagtataggcatcagctccgcgccatagcgattgtgtacgtcaacctcacctcaggaccgcaatgatctcccccaaagacaacaatattgtaagacggcattttgacggcacagttcacaagggactgcaaatagagaacagacagacaaaagaccttgggcaaaggtgttaagattaggagagcctcccacgttataaaggtagtcggcggggttggatttgcggccttccccacgccgacaccggagggcggttatgtacggtaatccgatattcccaattgggctaatatagaccaacagccaaagaaacacattaaaatagctaaaaaaaaagataaaaaaaaataaaaaaataaaaaatcaaaggaggcaattaatgacaagaagtgaaagagaaagtagaagaagcaacaaagtaaggggggaaaagaccagagaccatcactcaaaccattcttggttcacacgccttttggtgacagatatacatgcccaattccacaaattcctcccaatccatatgcccagccacaatctatccattcgtaaggaaccacattacccagaggacttgtcgcaaaagaggaaatgaacatattaatgaagctagtcttcgacgaagaggcaaagcaccacggccatgcagaacgatataggccgccgataagacaggaaaggccccggattttggttcgacttcgctagcttcaagatagaacggttatataactcaaagctccaatttcgaatgcaggctcatgtcatgtgccgagttaattatccctggccttgcgagccttccgccggttgtcaaggtctccttcgactagccaattggacgccttgaccagctgtacgacgttgacaaattgtttgaagaccataactgggaacgagactgccgtgatcacccaaggccaaaagctgtcaatcttgttggcccgggccaattccagagctccagcactccaaggacttgcgaatacactagtcgaagctggaggaggtggtgttccgccacagtaacaccttgtggaggctggagtagagaggatgatagagtaggagacgaaaaggagagtaggtacaggccgataaagaagagctcgttgagagcacagcagatgaaaaggacagtctattgtgtga

SEQ ID NO: 14390 - DNA, 433 bp, Emericella nidulans
  unsure (1)..(433): unsure at all n locations
cccccgcaggcgggagcagcgacaaggcgacagaataaatcagagcgcccggggcccagcaccaccgggggaacgagcaagaanacaaccgcgacacaaccagcncaaaggcagangaccgcacaaaccacgagcncgaccaanggcccaaggaagacgccgacaaagcaaacgacgcaacggnaaggggcncgnacaacaaganaaacgggaccngggcccgggagcacgacgcgcaccncaaagggcagccgaaaggcgagccagaggacaagggacaggacccccccgaccggaacgcgcaacacaggaccgaccagagcgcgaanaccggccccgacaagaccaagcccgggncagacaacnccacccccccgggggcgacccaccggggggacaaaccagcagccgcgaaggcagacgggcccgaccc

SEQ ID NO: 14391 - DNA, 982 bp, Emericella nidulans
tcgaaacattctgtattcaacggtacatctgctaaccaagcctcgccctatagatcggcttggattcattttagctccaagaatcttggccgcacctgccgcagcttttattttactattttttttttttttttttattttaattactccaaagcagtggacccttccgggatcggacaggtaatccgtactgtctcctgactgtgcacaggcagaccgtcaacaggaaaaacaatcttccagccaatcagagcagactaagccagaaggggccgatcataattacgaagaggtactttgtaggaacctagaccgtttcacgcacatctgctggtgccggtgaaggtgaagatgttttctcaacggacgcttgaaataattttattttattttattttttttttttttttttttttttttttttggctgggcttcaaggatgaaggtagcgggcatgattcagctcctctggactgtctctgattagcggtgccaatactttatattcgcttagcccactccgccagcaattcgggccgaggatcgagaaccgaggactgagctaccccaatccatcggtctctgggcagatcctcacatttatgaattgaatatagcagcccacagctatgatccgtgaaagatgagacaggaggctagtgatatataatcgaagccgaaaaagccatgcggcggctgggcagattttcccgtgcttcgccggggtgcgggcgaacgtgtcacgcgattgaaaggagctcaacctctttatcaaccccatatcacgttggaaatccacttctgttgttaccgatatcttcatctgaggatggcacccttcatcccgccgccgccgagccctgacaaaccaggcaccctcccccctgataccgggtccccaatccccattcccatctccccgccgccctggaccctgcgcgccaggtcctggacgttcctgtacaccttcagctccccaaac

SEQ ID NO: 14392 - DNA, 432 bp, Emericella nidulans
taaggtaactgcagagacacatagcacaagtgactcagcgtggatgggtatggattcttaattaagcgatgagtaaacccgattgacaccgctaatgccactttaactgaagacggtaatgctggcctacatgaacaacataatgactactgctacacacacaccagattacgtgccccaacaggttctgcccgttaccggcctcaggagccttctcatactggtgggcgccaacaagaaagttaagaggtctatcctggtgtgcgaggctactatgggtattggccgcaaatacagaccatagggaattagctaccgtgagtcctcatacatccatgttgaagagccagagccatgcttatttttatagcgggcatctaggacgcactggacctgcacatatagggaacaaggtagacgtgtcgataccta

SEQ ID NO: 14393 - DNA, 1019 bp, Emericella nidulans
tacaattcaagaaattcgtctcatcatgagtcgtgcagtcccagcaatggatgacatgggacgcgcagctgcgctggcgtatgactgctcagtctcagtgtcctgggcctggaccacgcagaagtctgtcgtggccaaggtcggtggtcttcaggagactccccgatatggactgttggatgtcggagcggaggtgctctgactcgtcttcggcggacggggtctctcgttggtcggaagatgaccggtgagtccggtgagtccgcgatgggcgatcgaatcgatctgtttaataggtgtatgattgcttgactgccgcagcttgtcaagctccccgattctattcaagccgcagcaagtacagtcggcgaaggtgtccactttgtaacagtcggctgagttttcttaaacccgggcccaaagagcagattccattcattgcgcgtaatgggcgtgacatccgacgcggagagcggcgtcttcgggcccctcttggtcagcgttccagcgggagagagtcctgacttttgcgttgccgctggcttcctgatacgcacagtgcggacgggcgacttcttcttctcgacgacgacaattgcggccttgggcgccggagggatgacgatgccgtcctgcttatattgcttcttatacaggtccgcaacatgagcaatcaattcgtcggagacgtcgagctgctcgtacacgcggtggaaaaaggccttgctgaagggacggccgttgaagtcctcgatcgtgcggtggaggagccgcacgcacgagttgatatatgattcgggaggtgcagttgccttggacccagaactcgatcctgatgcagagaggatgcatagtcgacgcttgaaggtatagatccggtcgacattaagcagcgtcaacccctctcgcgagaacacaacttcattctgcaaaatcgaccgctcgatcaggtactcgttcgcatggcgttcatggtgcgaccgtgcaagagcatcagaccagctctgtcgatgtgcgat

SEQ ID NO: 14394 - DNA, 1202 bp, Emericella nidulans
aggcattcatccccaaactgtggaacaaattatcacaaatactacagagtatatccgtacacacccctctagggtctccgattatagctatacgctcgcttgtcgcagagagagattccttaccgtgcatttgctgttgggtctatggagcagtgggatatctcgcaggtccagtgagcaacatcgcctcctgacctcatctggtattcactggccaaggcgccaaatatcctggtatgggacaggagttattagaaaacaatgcgattgcgagagataccgtcaatcgcctcgaccgtgcactggacgagatcgaaccaacacgaacatggactttatatggtaatccgccttcctgatgttactccctgttctactagacccaagctgatgctttgattgatgctatttcctctcgcagagaaactcttacgagcagaaaactattcaaacctaggcaaggccgagtatcctcagccttgttgcaccgctcctcagatcgtactcgttggcgttctgaagtcgttgaacatccatccctttgccgtaaacgcacactgttatggggaatcgctgctgcacatgctgttggcgctctctccgccgcagattctatctccgtggcgtatcaccgcgggctagatatcatgcgcctcttcgttgagcacaacgtgcaatctccgcagccctgcaccgcagagaacggatgcgcagataaactgctggtagcggcgacgaaggaggggtgatgttgaccctgtgacgagaagaggggaggcagctgtgtatcttggtatgaaggggggaccgttcaagcggttagcgaatcatctgaggggtcgccgagttgtttcaacacatacaacggagatgggagactgtgctgcatgctgctgtggcttatagtccgctggctgttggatgatgcttgtcgagatcagtgcggatgtttatgtttgcgagaagggcaaagtatcctccagcacgcgatgaaggcacggcggactaagacgatcggagaataccacgaataccacattaaagacacttgtcgggagagaccaggtgagctgctctgtcggcgcactttttggtgttgaagtgctgaattaaggtagccgaaggctaaatctttaccatgaccaacaagaccgattgagcaacaaacaagcgactacaatctacaaaaggaataacttcca

SEQ ID NO: 14395 - DNA, 489 bp, Emericella nidulans
cgtttgtcgatccatgggctgagcatacattaagaccttgctcacactctctgtggagaggaagctggatggggacgcgcactcggttgcattgacaatgtagtgttcgccatcaggcgtctttacagcagtcgttcggagtcccgctacatcactgccagcgaatgcctccgtcactgcaagacacatcttcttcttgcctgagaggacttcctcagtgaccttttgccggaggggtgtcgttgcgcatccagatctgaaccgctgtaagactgatgaccatgccggccatgttaccatcttggaaacctgcggaaatataatcagtactctgtctcccgaaaatgccacagctattcaagataagcttggtgcacttaccacgcgcattgaccctgaccatctactgccaagaatcaaatcatgcaaatgatcaaattgctttccatcaaccacaccacccagcagctatcgcccatgcagatgctt

SEQ ID NO: 14396 - DNA, 1387 bp, Emericella nidulans
gaaccctatgccgcgattcatcctgtacctgcgcctgtcgtttgcgtttgtgacggccgtctgggccgcgcagagcttgatcattgcgctgcaatgcatcccactcgaggcgctgtgggataattctattactgacaagaaatgcatgggttccgccatggtgtttatatctacgggcgctctgacgatcgtatgtgactcgttgatcttgctgcttccggtgcagattgtcatggggttgcaggcgaagacggcgaggaaattggcactactgggaatcttgtgttttggggttttgtaagtcttcctttccctaaaccttagtcgaaagtgaacaaccagactgcgtgatcgctaaccaccaagtccagtgccgtcgtgtacgtggcatttccttccatgcccgatataaaccgccagtttaaacattctaacaccgtactagaacctccatcctccgcatggtatccatgatcgtctccgtccaacacgaagacgacgcaacctggtacttctcacccgtggtcgcctggacatgcgccgagatcagcgccgcgatcatcgccctctccctgcccgcactacgagccatattcggtttcttgaaggaacaccactcgacgcgcggcaaaagcaattcgtacccaaatacgggttcggggtcaaagggaatcgggctagactcgctttctaagtcggcaaccaagcagccaaaagtgttccatgggagcggagtctatgataacacggttgatattggggttgggaggagtccaagtcaggaggttctctggaacggatacggggaccgaagttatgggaataggggtaatgggagtccgagggagattatgatcacagagacagtggatgtggaagttggaagggggtagaatcgggcagtcacttgctatgacgactttctttgttcaacaacagtacaaaagctacccttcgcggcacaattgcgacttgggtctgaagcactcgattatagctgtcgaacaagctgtgccgcatcaacgggcttcgatctcctgaccccaaccctaaatgtactactgccttattatcctagagtactcattagtcaccaagcaaacttagagtaagatatagatcaaattccgcaggtagttggctcaatgctaagaaatccttgtcagaagcatctcgcaagtctcgccatatgtacgaactctgcgcctccagaagtaccttagtagttagggatttatccagcattcaaacagaggactgctctatgttctctgatactatcggtcctctgttgacaagtaggagaaactacaacgaaaattatgctaattgccatccaaccgggcatcttggaagtcggatgcccacatatgtgcatggaactagt

SEQ ID NO: 14397 - DNA, 1964 bp, Emericella nidulans
agcttctatattctagtcccctgccatacctcttccggctcttcctaaaaatatcggttcttgaacagtgttctcatcattttggcgtttcgtggattgcgccgaggcgggcttgtcgggttgattcaatttctttgatataagggtaggcatacctattaacttcaattaatatgctcaattgttttgctcgggcattattttagctttcccgagtcgtgggttgggaaaacaggtgcagtgcagttgaagagatgtgaaagaaatttgaatgacatagctcgggagcttaggttaacttaggtcgcttaatctgctgagtaagcggcaggggtgaggtagttaaccaccaccataggtagtaactacttactataagcaccccaattgctttggtgttgttactttattatccagagtgctaaaataatgtattgaccaaatgaatagtattatatgttatttatacgctacttaagatgcaaatcgagttcaagtgaattcgtaagtcatagtgtacggcccaaatgccagaactaaacatgagccctaagaactgacaatacacatttgttgcaatgcccatatcctaactcatgaagtttctttcatcctgccgcaatttgaacaagtccaccactctgtttccatgaaactaccgcaggaactgcataaccaccccagcggttttttctgagcatttttctcaagggtggaaagggattcaacagcgcttcttcgatttttgaaagacctctgcccgactgtgcgattgataatgcctttatttctactgggcgtagtcgtggagctggacctcgccgtgctggggggcccagaaaccgaccgggaaatgacaggccgaggacgttcggatgcacatgcatcgcaacacagaaagttggatgggttttccagcgtgcaaaccggacaagtccaagattcggcatacaagctgtcatccgttgtaaggctggcagggtcttgtccactaaccggcaggcttggcttgctgtgttcaggtaccggcggaggcgtgagggttgttcgagatcctgctgggttatcctgacttggggggatatacgatggtccgtacttctccctttcttcttcctcaattaaatcaatatagacctgcatgatcgcttgttcgtttgcatcatcttcctcggcctttgttcggaagccattcctggaagcctcctccgcgagctcagtggagttgtcagctccggaggcacaaccctgagtcacttctatgcgtctttgagctgcatcagctatgacctttcgcatatcagctcctcgcgctggacctgtccctcccactcgctggcctgatccggcgtagagagttcgcctctgctctgcagcagctctggctctcctacgagcctcatcaataggcaccttcgctccgcccaaacgccttccatgtgatagaaagccttcgccggtgtagcctttcatggtgagttctgtatgttcatcgcgtagttggttccagagggcatggaactgttggttgtgtgggccgtgtacaatatggcacagtctgtaaggttagcgaggcaaatatgcgatccagagatgttcagtctactcactcgtgtagcatggtgtctactacctgatcaagcggtagaaactggctctggtccccggcatgtcggaggcgcagacagatcttctccccaccgttgacattaaggccaagaaggttccgctgctgtggaaagaactcgcaaagtgttccaactctccatgaccgtcggcgcattatcggtcttaccaatgaagctatctttcaaaggataaaagggccctccactccctcggcgatgcctatcgtgctggacacgcccactacggtctagttacccatatgaatctgagagccgtccgacactaaccaatacgaattatatgaggacagaaactgccaagcccccccccacggg

SEQ ID NO: 14398 - DNA, 486 bp, Emericella nidulans
  unsure (1)..(486): unsure at all n locations
aaccaaacactcccaactaccggtacccagctccgaatggctggggggcgccgcgtactaactcaccggcccnacggcgcaccaggccggggcncggcacacaccgaaagacgaccaagncgccagccgggggccgacacaagacaggccaggcgccgacctgagagacgcgcgagccggcccaccgaccgccganacaacaccgagccgaccacgaccaacaggccggagggcgnagcgcatgnctcccgagagagcgccagaagacaagcaaccgaacggccaggggcacgaagcccacccaatggccaagaacaagacggcccagaaanagancgacgcggacacgacgggatggccggggacaacagcgagngctgngnccaagccaaaccctacgacnggaccggcacggcgagaaacgccgctagagcacgcggcatgaagcttgcctgtgcgcaagagacagacgattggccgcacaat

SEQ ID NO: 14399 - DNA, 586 bp, Emericella nidulans
caacacaaacaagcatcagactactaactaacttacagacaagccctcatttttagatgttctttagacactacccctcaagaggacgcttgactcggtatggaactcattctctgggatgatggtgggccagaaaacgaacctgacaccgactcagaacccagcttgcctctagcagtagctcgaggccaacaacacgagatgcactgactgtaccagcatgcactacgcaaaccactcccctactagatgactatcatcctctcacaggttgccatatacaaagaatacggtccgcacgctaagagaacgcagcatctgctggctactcacgtattaaaaccaactctacttgctagggaagcaccatggatgtgaacacaaagcaaaccattttctcgaggtgacaccatcggtactttgagcgtccctggaatgacaaaatatccattaggcggccactcggatcgacactagcctccctgagtgacgtagaactgttacttccttcctaaactcaccatagactggctttggctgttgccaccttcactctaacggctttaagaggtgaatgctcccttcc

SEQ ID NO: 14400 - DNA, 1950 bp, Emericella nidulans
caaccccctaaaatagtttaacagcccctaaccaaaaaaagccctgcgcctaattagattcgggtccttccgattggaaacgaattggctgcccctctctagcgatcgactcgatctccctccagtaaaaaggctggactaaagcattcttccaaatacaagcgcaagtcctaacaatgctgcttatattatctttccctccggcagtactgggaaaccgaaaggagtggtcgttgagcattctgctctctccaccagcgcaatcactcgtggcgtcgttctagggctcggtccggactcccgtgtcctccagtacgccccacataccttcgacgtcagcgttgatgagattcttacgactctgatccatggcggatgtgtctgcgttccttccgaggatgacaggttttcgatcgctcactttatggaatctgcccgtgttacggttgccctgttgactccgacttctgctcgaactctccatcccgacgaagtaccctctcttcgaatcctccaaactggcggagaggttcttaccgaggatgtgaacgacaaatggtcaaatcgtgtgacgctttttaacgtttatggacctactgaggctagcgttgcttgtgttatcagcaaccgcactggcctgaaaggggctggtcatgttcttggacaggcggtcggagggaagctctggatcgttgatcccgacgatattgagcgccatcttccggacaatgaagttggcgaattggttatctcaggagcaatattagcccgtggatattttcgcgatccgagccgcacagaaagctcttttgttagaatgcgaaacggtgaacgggtttaccggaccggtgacctggcgagtatggatagcgctgggaccatcatataccacggccgcaaggatctggaagtcaagatccgcggtcagcgaatcaatatcgcggagattgagatcgctatcttgcaatgcgatttagttcatagtgttgtcgtcgagtaccctcgctctggactgtttgagaagaaactcgtcgctgttctacgcttcgaggactcttcgtccgacgctgaagatggattatttggcggggccaagggattaactgaagacatttattgcctgcttttaagccatgtctcgagtgttcttactccagcgatgatcccatcgaaatggttgtcgcttccctgcgtaccacagatgccatccggaaaggccgatcgcaaacaagttcgtggttggcttgaagatatggacaaaagaacttatactcgcattttccaccccaatggcactgataatctgatctcagatccatcagacagcatggtagcgatttggctcaaagtcctcaaattagagccgcagagtctccgccttgatcaatctttcatccgtaacggcggtgactcaataatggccatggaggcccggcaccaggcgcacgaagctggaatcaacatcgacgttcgggagctcctgggtagccgtgcacttcaagagattggcgaaatggcaaccaaaacttcagccgtagaagaggtctcaaagatagaggatgatagggacgaaccttttcccctgtcgcctgttcagcagatgtacttcgataaggtatctgatcccagtcttggtcttcagcaacgtgtttgcgtggaaattatgacgaagatacagcctgatatgctgcgcgaggcattgaaccacgttattcagaaacaccgaatgttggccgctcgatttacgaagcacatgggacaatggatgcagcaggttccgtttggaaagaatctcaaacacctgtctcgctgtcatatctacagtcaggctgtggggtcccttggcgacttctgcagtgagcccatggcccttgaggatgggacgctacttcacgcgcatttgcagtcgagtggtgagaggcagacactcgtggtctgtgttcacacttg

SEQ ID NO: 14401 - DNA, 463 bp, Emericella nidulans
  unsure (1)..(463): unsure at all n locations
cgaggcgagaggacccccagccaaacccgccggaccgaaaataaaacgaccaccccagccagcacccgggggggacacaaaggcgacaagggcccgnccccaacacagaaaacgagaagcggggacaaagccccaacgaagccacgccgaagagaacccgcacccgcacgaggacgacagccngcaggaacacaaacgaaaagcgggccaagaaggacgggacaacggccccaaaaccgcgggccncacggaaacaagcacaagangggcacggcaccaagaccgcgagacccgaanngagaaggcgncnacggancagcccaccagcaacccaaaccggcaccaagaagaagcccaaccacgccgngggagggaccggacccgccccaagcaagaagcagcggacagcgccgcggcacaggcacacacccggaagaaagccgcaccggagggccgcccgccc

SEQ ID NO: 14402 - DNA, 983 bp, Emericella nidulans
taggccgatgacggcgttgaggtgtgagacggagacaaggcctttgttatttgggtctgcgggaggcgcattgaggctcccacttgtggctgagtagagtcccgagccggtcacaaagccgttggtcaggtttgcaatgccccgtgacgtctgcgtgagtttgtaccgtgcctcttgccagcgcgggccgcgacgctcccactcgatgagccagccgccagcgagtccagcccagtcggtaccgagggagatggtggctgactgtcccggcgtgggcgtccaaccgtccgtgcggaccttgcggttcggatcgaggacctcgtatgtcttgtcggtgtcaagtgcttcctctaggatctcgccgacacgctcgtctccaccagacaagtagaagaagtattttctatactggggctgggtgatgcggacctgtttggcgctgtcggcgtagtgctgcacgccgtggcgcgtcccaagacccttccagtcgccaatgtggtagacgtcgacttcgccggtgtgccgggtcagtgcctcagcgagacgatagacgtccgcgcgtccggtgcgcaggaactgctgccagaggaacaggtccggcgagagctcggagttatcccacgcgtagccgccaacgtcgtaccgccagatgtgtctgtcctcatcgtacgtgtgcatgtagtcgccgtaatcgaggaacccgtaccacctacggtcctcgacctggccttcgtagaactcaatgagaaaatcgaggtggtcttcgattgtggcggccttatcgttcgatgtgtcgggcaagttccagtaggagcctagggctttcgtctcgcggatgtaggccggttcggcgacgaggacgggtggctcgtttgtgtgcgtgctcagaatggataggtggtcactcgagggtgacaagtcgaacgcatagaggtagatttcgcttgttcgcgcgatcccgggtggagtgttaaacaggttat

SEQ ID NO: 14403 - DNA, 1060 bp, Emericella nidulans
gtttattcaagctgcttaaaactttgaagatgacggagaaatttaatttttattctgcagaaaataagcgccaagaccgcctttctggatgctcgcttgtttttttcctccaccgcctaattttttcaacagactccgatctatattgctactcacgctcactgagagccttacttgtttgtgctgatttaatctcctcttgtgaatcaaagttagttgtcagctcggcaatctggcatctctcccgtttcgattcaagggctccgccggtgccaatatggcgcctacctcgacggtgcaacatcaccaccgttccacaacaaagactacgcacaaaccttacaagtctggccatgcttctaagcgtgccttgaaggaccaggctaaaggtatgatcatgatcagctactgatgtgcagcgaaagtgggcgagactgactatcgccaggcaaggtggaaagagcagagcggggtactcgcaagacccctcatcagcaacttatgtcgaaacttgatcgaaggaatcaggctcgtcagaagcagcagaataagcagcaggaaagggctcaggctataagtattttttccggtcaaaatggagcaccgcgtcacgttgccattgttccgctctctatcgatatcgataccacggctattattaaggcgctgaacgaaagtgtcgatgtcaccagcgatgtgtttccagacaccatttcccgtgttcgaattgatcggttcccaccaaatttgcattatatcccggccaatgttgatctgatgagcgcattgaatgcttgccgaattgcaaattttgtcgttttcgcaatctccgaccacttggagcgggaggagccagggctaacttgtctttatgtcatattcaggctatggtgtgcttatctcttttttctgatccgggcttctgaagtacttccctcctatttccttcctgatttctacttccttttttctcttactttttccccatctatctcttttctttcttctcctcatatcgttctgcctttttctcttctcttccctcattttctatgctatg

SEQ ID NO: 14404 - DNA, 1580 bp, Emericella nidulans
gaaagttaatcagaccagaagccaaagaagagatgatcgatgttgtcgcagtcaacgaatgctccgcaaaagagctggtgacgaatggagtcaggttcccgatcatgcccgaagcgaaagccatgataaagtggatgacccagatcctatagtggtcagcttggtccgtccgaacccgcagttaggatatggtcgcaggtggtgtagaacttacaaggtgtaagccgcgacaatatggctgaacgaccaaacttgggtcatggcctgggcggcctgaacaccatgttgaaagtccggactaactatgtcgtcttgcttctgttctttgatgccaacctctgccggctgggattcggtccgtttctctacgaaaccctcattgtctgccggtcgctgattgttctcgtcaaccggcaactcatcgtgcttgtacgggagtctaaacctcattgtgaggaggtttcaagaaagtagctgggatacgttgaaatcgatgagctgtagagaacggtgataaacaaatgagtgcgagaacagccggagaggccagtgattataaaagcactgaaaatggggcaatccgcaacgctcagttagactcccaggccgaaaaacggcgcgcaaagtggcgctagacttcagcgatgaaaagctggacaggagagccggcttgaatccgctaccaagcgactgaaagtgcatcgaatgaagctgtgggcccatctagtctcaggctgccggtacggttctagaagtcaaagcttccatccaaagaggctagccctactccatagaatgtgatgtttgatactcgcgtactagtggctgcaccgctactgaagagtttttcagagaagcagcagaaaggcctgcaattggacccttgacggacacagtgaggtgcagccttcctagcggcactcccactgccaaagtaggtgtgtggcccgtcggctgggatgggctgggggccaaaaccgaagctgccagtgttgagtggtcggttgcaccttccaggctccattgagccgtcttatctgattgattatctgataatcaaatcagatcagcagaccctgttctccagagtctgcaggtaaactggacatcgtgctcccgatactctcgccaactcgcccgccttccactatggatgtcgagccgatacgaagtacattgccgcgtccaaggtataagccctccagtttgtaggtattccatggaaggataggggaaatctacacatcggcatgtgcgcaagtcaagggacccactgcgagtacactgcctgactcggcgaattagcgacttaaacgaaggattcgccaatatgcactagtcaagcttccaaggcgttgcttggaaagactttgatccttctgccaacccaacccctgttgggactttggacacgcactgctgagtacatcgttgagattcgtaatgggaacagaatgcatatcgcaggacatcatgacgagtactcccagttataaaaccttggctggagctggaaaggcgcgctctaagagtgtgtagagtacctgctagccaccctgtggaatgcgctccatgttcgt

SEQ ID NO: 14405 - DNA, 1858 bp, Emericella nidulans
tcatcccaacaattggccgtagctcaccttctcgggaaaaaggaacgattcgcagcgcaggcttctcgaggggatcatcttctgtctaaaaatagataaatcagaaagaagaccaccaaatgacatataatgaaccaagaacgtaccttcagttcccgctctggagaatcggtgcgagttttcttgctctgttgttgagaatctggggaaagagcctcctccgaggctttccgctttacgcctgggcctagactcggtcaatatagaactttcgcaatcgagacaactcattttagcggcctgcaacccactttcagtcattgtaagcttgttgctatgcgagtaagctgaaattgtccgttatcaagaggtcgcaaaccgcgctgttgctcgctgcgaggtctgtcaatgatgactgatccggggagggaagccgggctaacaatgttccgggcccggtcgggccagatcgactttccgtggagcttcaagctccaactttgtggtcttagtggtgatgcttgctgtcatcttcaagtctattccctcttcaatgctctagctgtgttttgtctttagcaacatctctcatttgcaagtctgctggtctgagttgctgtactatacccaatgtcgcttaaccaggtctgggaagcagcttctgcacgcccttatattcccctcgttgcgaaagacagtcaatttaccgttggcttctctcttctgctgctcggtaagtcgttgaagattccgtggtgctcagttgctaattaagctgccagctttcattttcaccggacttttcggtctaagttagtgttgattgccgtgatgatatttgagtgtttactaagagccagtatagaccggtcactttcaagcattgtctcacttggtttgccggcatctttggctttcgggtatcgtagatcttgtcgaatgagattgacagtcgctaatattaggattagtttcggagctgtgtatatgatctgtgccgttggagtctacgtttaagtgacatctccctgtacggttgtttggagatttgaagacgcaagctgtatcactagaacaccacatacaataaatacccggtgtttactccgtactgctcctatccttttttcacccgcaaccatgacggacaccggtcccatcttcactgcggtttctagcaacgcaaatcaactatacactttattacattgcatcagctttgctcagaacgccacggtacagataacgccggatggaatccgcttttccgtggaggagggccgagttgtacaagggcttgcgttcctggacaaagctctcttcaccacatataccttccacccgcccactggcgtcaataacgaacatgacaccttcatggacacagaaccagacggagccaattacccttgcttcgtcgtctcactctcagctctactggagactttaaaaatctttggcataggcgactcttcatccgccagcaccagccgagcagccagcgtccagcctccgaccgcctcagcctccaatgcattcacagccccagctctactcctcaaccgctcatgcaccttccaatatctaaccgacggctcccccctaaccggtcaccctcaccgaaacaggcgtcaaaaccgtctgtgaattaacaacatacgagcccgacgaaggcgaccttgagattcccttccacgcgattgtatcgtatgaaatcatatgcgctctgcttgctgcacatgcaatacagactcgtgccacgaaccaacatttgaaataggcgtcgcaaacagacatacttacccttccgcagagccattaacgatcgagtgatttaatgacaaacaagcccaaggtc

SEQ ID NO: 14406 - DNA, 455 bp, Emericella nidulans
  unsure (1)..(455): unsure at all n locations
gcccgattcgtggcgagcaaccacgccaganaagagacagcccgactagaaaggaccgagcacaacaaaataaccccagcgacagnncccancacccagggcgccctcaaacaacacagggcgccccagaccaccggcccggagcnacaaagacccaacccaacgcacgaccgacacggaccagggccccaaacaccaccagcaccgagaggcacaangacccacncccccgacaacaacgccagagacaagcaggaaaccganccagagcgccgggcaaagacgcccaccaccgaaagcagngnnaacggcgagaaaggcaccgcacccaccccagggccnccaacccggcaccccccgaccggaaacaccggccccaaaggcggggccggaaaggggggaccgacgaccgcggcagaaagccggagaaagggccaagaaggngcgggaaaacc

SEQ ID NO: 14407 - DNA, 2707 bp, Emericella nidulans
tccaactgcaataggtgtacaacctaaaattaaaccattaagaggcattcacagggttaagatcacggcccgttacttcctggaggtgggtgaggcatagaacccgccctattcagatggaagtgacaaggtaaactcttgctccacccagacagacacaggcctcgcccgcaacgcatctcctttgcagtctccaaatctcgatcccgtctcctcgcctgttggacgaccgcaacccaactctccccagtcgctgcctgagttcctgcacctgtggcagatatgcgtcccgcataggcatctcgagcacgacgcgggcatcgagaccccgacttagccaaatagctacagtatcagccagcaaccgtggatgctctggggaataaagaggatccgctgccagaattaaatcgtactgttcttcagcggttggaagcatagcgggcgaatcagaccaatccagtaccccggttgtgacagtcgcagcggttctgttaagaagctcaacgttaagagccgcgttgtaggccaggtttggcactatttccggaagatctgtgaggtgaatttttgccgagttgccgcgtagagcagcaaatgaaaggccgaccaggccggtacctgcgcctaactcgagtgctcgaagggtccggtcagagttaagtgttggaccggttgatgtagagggaacgagttgtgaggtagaatcaaggatggtgtggaggcgccgagaaaggagataggatgaaacccatgttttcatgcctaggttgtcggcagtcaacgagggctcgtggagggtcagtgtgagctcttcgcccgatgatgtgggaaccgcaaaaacacgggacatcgccggcatcgctgtgagtaagtcagtctccaattgctgttgtttgatcgtcagctatcattcctatatagtacatacccgttcggccagaccgttcactgagacgcgcagctgcagcatcccatatggcttcccgcaactcatcggtatctagccaggaaagggggctcgcaatgatggacgtcagatatcgggtcagtccggtggattcgactgtctggcgtttgactgattcatgaggactgacgccgaaatttcgcggtttgatccttaacaggtctagggtttgaagaagttcggtgccggaaggcttcgtatagatctggggaaggtccagtactgcgagacgcttatcagtccattcggcccacaaatgtccatccggaggacatgacattggtagacaaaccgtggagaggcttctcgggctctgccgttatcatgttgagcggcgagaggtcaactagattgaatgggtaagatcctcaacagcagggagcggggtccaggcattcttcttatacaagttcgtgcctgtggcgactggcgaaccgctatctcaaattcaggcacgcagaaaaaaagcagaaaaaaggcgtaatcgcccaaaaaggataggctcgtttccgctgttgtgcgggttgactccactcaggcccaagagataagacaacccaaaactatacaagtagataaataggcatcgctatggtatcgaactccaaaacgccatccctatgctttacatggctaactctttactccagtgttgacttgaatccctggtacgccgactcgatgtcaaacgaaagctcccgggcttgctcttcgctcagctcttcggtcgcccgcatctgattcaatgtgatcagccattgaataatctttcctctgttttcgaaatctgcatccgtcaccttgttgactgactggatgacttcagagagcagcgggtgaagtgcgtctttagagaccatgttcagtttgagtgcatcgaggaaggtgatgaagttctccgtagccgtcagaattagactaccagatgtgccgccagcagatccagttgttccgggagctttgttggtcgaaggaccactgtgtgaggcctgttcgactgtcgcgggcattcctatacgaagacgttcggtggcacgtggacattcgagctgttgagagaaagataatcagtatagcaccaagctcacaaaccatgagacttacatcccatgtccgcttgaatgtctctaggtcgacaaatgccctggcaacagtgtcgtcacccaggctggatttgtattgcttcaaaagtcgagtacatgtttcagtgtattcggcttctgtgacaacatccttgatataggctttctctagtccatcaagcgtcactataatactgtagatctcagctagggactcgtaaaggtcgcgctcagctgagcttgaggcgagtttcacttcctggcgattcgattagttatcggccccgctcaagagtcccgcttaagatatacctcatctaaattgatggacgcagacctagttgtattaggagtatagctgtatggagtaggagcataagccagaggccgctgagcgtacattttggtaagtactaataagatcgatatgatcaccagcgtcaagaagcggggagaggagagctctctgtgaaaaggccgaaggcggtcacccgatctgttgagcggcagcccgtgcctattttctgccgcccaagagatttttttgaggattttactcttcctgaacttaatcacaataactggggacttgttcctgtgacaacagatttttaagaaattgttgaccctaccgaccgggggaataaactgccac

SEQ ID NO: 14408 - DNA, 557 bp, Emericella nidulans
aaccgcggtgaaggaacataaaataattcttatccaccaacagcacatttgtctattcctctttacacagatcaaaccacagaccaactacagggacaagccaaccccaacactacacagtgttgccagcaagccggcgctgcgggtaccacatcaggaagcagtagcaccagcaacaccggtcctgcgatgacgaccagctttgcgcagagcagctttcccttcgctatggatgcacagggttagcgtttgagcaaagaggaggcggatcggctctatgaagaacgtatggaggacgagtatgcaaagagagaaggcggcgcttaggtcacatttactctgtctttacagttgctttgatgagtatgctaggcctgcttcacaaaggactgtgcttgaggggcgcttgatatatgatatacctggctacatgaatatccacttgaaaatcgtttagaaaggcctcggtttatgcatttgcccataagtattaacccgtatttcaattttcctggaacttcctctcggttatgcttgcatgctagcgttaatgtttg

SEQ ID NO: 14409 - DNA, 1467 bp, Emericella nidulans
tccaggcattggcatcacgttggagatataattgggttgacgcccctgttcggggttggaatacccggggggaggggccaaaggagctggaggggcagtttgttgcgggggcatatggtgaccagcccaaccgggaggtggcatgtgctcaaaaccaggagggcgctggatgcccatgggtggcgcatggccctgaggaacacggctgccaccaggtgtaatgggaccctgcgccaagggaacgtcgtcaaagtagcccattggcggcccattagtaggccgtcgtcgcagctgatcaacatccgatctctgcatcgtggcgattgcggggtcattcaaaaagctgggacctttcatagaaggctctactccatggggatgaggcatgccatcaggcatattcattagcccagggggtggtccagtactctgtggctgattttgagggccttgattggggccagcaccgggactgactctcacttgttgcatcagccgaagcagatattggctgtctcgtccttgagattcctggctaaacaaattctccttgagtggggcgtccactccccgtgcaggagtgccttgtgtggctatatgctccaggcgttggccctgctcacgagaaggagatatcgggctgcgagtctgttctgcatggaccaaggaagaaggacggtttggttgagcattgttctgtgtaggatcgttatgaggcgtggtattacgcgatttcccaccaccgagcatttgtaagatacgctgaaagccttcttgatcagcatcggtcgaggagttcattggtgcaggagatctagagctaatcggcgactcgggctcctttgcagggctgccgagaggaggactgaataggcctgcaaagcgagaggactttacaggctttcccacagtcgattccttcttcacagtcgattctgaagggagaggcgatcccaagtcctgagcaggcttcgtgtcacccagcaggccgaagaagcgctccattgtactgtcgtgaagagcagcgccgctcgggctaaagatctcgccatcggtaggcctgggctctgatctctgtacaggttccgggaccctctcattgggggaatctttcctctcttcgggttgagcttgggaagaaccagctttcatcttctctttccagcgctcaaaatcctcttgtgtgtggactcttcgaggttcgtctcggcctgtcgcatccagccactcaggctcttgctccagctttgctccacgagtccattcacggtcagcgccatgtctgtcacggcgccaatctcggctgcgaagtgaagctttctcttcttccgcatcgggtgcttcttgtcctttatcttcacggaaccaactgccctcatgtctagcacgcccagctagcgcttcccggcgagggaaaaagcgtccgtctttgtcttttgctgcgttatggtcttgggaatcgcggga

SEQ ID NO: 14410 - DNA, 568 bp, Emericella nidulans
  unsure (1)..(568): unsure at all n locations
gccgattcaccgaggcaaccccacagagagagcgaccccaacgacgcccatcgaccacccaaaggaataaatcaacagcgccaacacaccacgngccgagcncgccaagcaaggcggcccgacccaggaaccngacaggaggcacagcgcgccagacaacaccgggaanggaaacgagacgagccnacccaccccacgggaagcaaaccngcagaggaagacgcaggcaaaaaccgacgcagggagaacgnggaaacccaggctanagaacgacncncncaacanaccccnngnngcgcnngagcgaaccccaaaacaacccncnncaacaagaagaanncggcaccggcngggcggcnnacccacaacngaaaaccaacaaaanagacangnnncccgncncaagccgggcgcancncccaacgcgcaggcannaaccccggnacacnaccagaangnnggagagngaaacaacgcccgccgnacaaaccgcccgacggccccggcaacccnacccaacaannaccgagcacccaacacacacngaaagggggaaagagacaacccc

SEQ ID NO: 14411 - DNA, 482 bp, Emericella nidulans
  unsure (1)..(482): unsure at all n locations
atggccgagaaccacccgggggaaacaggaggctcatggcaccgacaccgacccaaagagaataagacagagaggacgacggcggcccggcggggacgataatagaaagggcgcgcagggcggccggcggcaggcggaccaaaacaccggcagaaacaagagcaccaaacacaaaacgcgggncgggcccgccggcagggcgcacaccccaaacaccaaaccggcccngagcagggaacgccgcacggagccgacaaaaccaggacccggcacggaccagagacaccacagagcccagaccagcagcggagccataccggacgcaaggcccaccgaagaagaggagcgggaagcgacaccgaaggccgggaacacagacacccgcaaggacaaagcagccgcnaccagacaacnngccccagcacacaacgcggacaggcnnaccacaccaaaaaagccccgcagcgccggaccaagggagc

SEQ ID NO: 14412 - DNA, 433 bp, Emericella nidulans
cgaaacaccagtgatgagacggttttttccctaagacccgctgagcaactgctccagagcggatcccgtgttgctcttgctcagcgttgacaggccgagcatgattgttgcatccggaggcacgggtttcacaccaagcacggttccatggatactgccatagcgaagcaggcgaagtcctgcagcattggcggctacgttgccgccaatgtggcacgagcctttagcaccaaggtcaagcgggaaaaggtggtgtcgctcagccaggtgctggtcagcgaccttgaggataacaccagcattcacaaccaacacaccataaggctcttccaatgaacggattttgttcatcctacaagtattgctgacgatctcgtcaaacacaggcaccgaacccccaagcaatgtcgtgttagcaccctgtgggacgact

SEQ ID NO: 14413 - DNA, 545 bp, Emericella nidulans
cgcggggcttgcttctggcctggcgaccggcgaggtacggcggtttttttggtcggctggaacaggactgaccgtaagagcccaacaagatacacacggcacacgccctatagcaggcggataacgcgccggacctgcccccggtgaagaccgctgctatgctgcaagcgagcgaggaccttactaaccaacctgatgatagcgaaccaccgggtactacggcgacttgcgcgcgtactgaaggttaaccaaccgaggggaggtctacaagccacaaaattccatctttgtacagtaagagatctagggcttgacccggcatcttggcttaaatgtagccaagcgatatcgcttacgtggagacggtgtatgtgccctaaatcggtaccaagtttagcgctggacagcacacgcgcatacgtgggcccaaaaacgcgtgcgcttctcgcttgtaaacgcttcccgtgcgagctgtgtgatcttcattgcgcggtgccgttaaacccctggtttggaccctgcaaatgcacccagccccatatgaa

SEQ ID NO: 14414 - DNA, 1972 bp, Emericella nidulans
gggagactcaacaaaaatccccaaaaaaattttggggggggccccggggccgcattttttttcaggaacggcgcccctctataagagagccccccccccggggggtggcccacgacaaaaaaccccaaaaaaaggcccttttgtgtgttaacaaaaggcccgttgggtgttgggggctttgttggacgacaaaagcttctgactcaattcgtcagtgtggacgacaaggtagtctgcactcttgccattcatctatctctatgtggcctgcggtatactttgagactgctcttttgtttcatttagcgcctgtgttgcattgttatatatatatagatgctgttgtcgtacggagaccacctttgtatgttaccatacaatttcttttttgtctatgacctgtttttgtgtgttttgaaaaaaagaaacagatagaaatatgtgtatattttaccaactcaagggactccatataatacattccgaagtttcaggatgacagcccggttagtcgtaggactattagggaccgagtaaaggtcattcaagaatagctttaataccctgtaaaacatgcatacttcgtcggggaaaggtgggaagaatgatatatgtggataaattaaatgaaggagaatatattgaatacctcgacctatgtaaggcttgctgctcgcgacaggtaaatgataaccaagatcttacaaaagcacgaaaatagctcactttctacatgaataattatatcaattaaattcaaaataaaatagaataaaggaagtaaaggcactaataggagtacgaatgagaagcaagcaaaaaaggatatcacaccagtgtatgttattgcagtaagtggcacgggaaatcatatacagatggcatttgaggccaaataaattccatgttcaacgggaaaaaataggctcacatttagcgatagaaccctattcttcattggtaatacaggaattgcctgcacgtttcaccaaagcctcctcaagcacacagactttgacgactgacaacgctcatgctcaggtctctcagaccacggaatgataaagaacccttcgagtccatgcttcattccatcgccgtaataactgcctcattttctctcgttcctgtcctttatttgattctctgcctcctggtcgattatatctagcggcggcttccaccgtgcattccaatcctgtgcctcatccatcttcaatagtcaccatcatcctcatcaacgacttctctattcggacttcagacttcctttagtgggccagaccagaactcaacttcaaggtctcccttgtccttcttcaccagaagttctttgatctgctcatgcagagccgcccaatcacttttttcttggcgagataccgtgatgacaagtgtaggattgttctcctcgaccgtcagtccaacattaaatagtgatgttttatgccagactaatgcattactccaactcctgcttcaatggagtatctgaaagtcagaaaggaagggttcgtttcaggggggtcgaagagtatcgggttccatgcctgattcgtgaaggtgatttcggtgaaaatgccgtttattccctttcttatcaagagagatgctacttcgtcgcgagctgcgtccatggtaattttggtggtggtcgaggtgcgcgtgcagaatacggatcagttatataggttaaggagaagagtgtttctggtttcgacgaggcataaccgcttttcgtgacggtttggacaataaggcggaagtggctcgagggggaaagctgtgggcatcaaggatattgaggatctcttcgcgttgtagttcgagtttctgggtgacctccggcgaggctggctttgtgtcaaagaggaggggccatcggagtgttgaagaggtgtatggatctacccggtcaaggtattcttcgattgtcatcacgcctttgacataatcagagttcttgctgagg

SEQ ID NO: 14415 - DNA, 1939 bp, Emericella nidulans
  unsure (1)..(1939): unsure at all n locations
gttattggtcggtttctttttcccgtgtcccttttgggggcttgccagttcccggggttcctccctccggtcgcccggttggtgttatcgtttttggggggtccagtcggttggttggggggcgttctgttggcctcgggcttttggttccagtggtcgcctcccagtggaggttctgtgcgcccttccttgtttggtgccaattgtttgtaaccgtcggtttccctgttgttcgggggggggtcgagctgctggtagtggttcccagtgttgtcgtggtaggggaagtagtcccgctgggggcctcctttttgttagcccgggagttagtaggctttggtgggttaggtgtacctgagtaggagaaggagatccggtgctagaaggaccggtagagcttccgccggtcgaagtagtctcagtggtagtcgtctcaccattggcaccagtagtggtgacagcgccgataacggttgtggcgccgttagcaaccaccgtcgtagagtcgtcgccaatcacgctagtagtgtcgtctccgaggatagtggaggtgccgccgccaacaatggtcgaggtaccgccgccaacgacggtcgaggaaccgccgccgacgatagtcgaggcatcgtcaccatagatagtcgacgaaccgttatcgccagcgccggcagaggaagtggcgctttcagtaccagtgccagtggcagtgccagacgcggtctgggtagaagtaggatcgggagtcagggtaaggtcactgcctgactggcctgggatacattaggtcatgctctcgccccattctagaggatcgacaaacctgggcactcgtcaagaacggcctgaaggacatcattggcattatcaccggggcaggcctcggtagtgcagtcacgaatgccgtatcggtagtcgggagttccgcagagacattccaaatcaccatcatcgcagccgagctcttgagacatggcaagcatgttgctaagacacatgttctacaaaagttagcagcaatcaccgaacaaaatcaaaaactgaagacgtacggcacactcgctgacggagatctcagcgcgggcgacgctgagagtggccaggacggccataggaagggtaaaggacttcattgcgtgtgtatgcgagaacggtaaggtctatggaggagtaaagggtactgggataacaaggatcgacgccaatacgcgagccagcaacgatagaaaggtggacgtgaagggtaaagcgagaaagatggagagtgaagaaatcgacgaggttggaaagaagggaagagaggctttaaagttggcagcagcagagacccgcctaagaacagaagcagaggcagatcgtgcctgccaccacgtcaaggccatccagaccgggtctcgctgcggtcgcttctttctaatttctgtttctttttcctgctgaatcgccgttcgtgattggtgacgcggaaatggcttcagtctttgggtgcttgaccgtgttgtccaacgtggcgagaatccaaggtactgaggtcatcgcaagcccgttgctggcgttccgataggtcgacaacgtatctcagatcccgaatcaagctatcccaacgccggccgaagccagctgcagcacagcttgcgtgaagatcgtactgggatgagttagcggggcacccacagctctggcataggaacgctagtcgtactaaagctcgctgtccgtgttactgagttacgtcatctccatgacgataaggttgagcaaccacacagctcaccctctactgtcttcaaagctccaatatgctgccattcagcaattgaacgctcgtctcgccaattctgcacagccaagtccgctgctggtgttcacaacgactatgactccagttctgccatgggttgtaagaaaacaaagtttcccgcgtctcgccntattgcccacg

SEQ ID NO: 14416 - DNA, 589 bp, Emericella nidulans
agtacttccggtccccagagctactccactgaggacaattcattgtaaccgtgtgagtactcgccaaaatacttcagaaaccaaggccgttccttaggagccgccccccggttatgaagaagtacagcagcagagcgtcgcgaacgagctcgaggaaagattgcgccgagcgagctgagactagaagacaacagcgcaacaatggaggaccagtctgcttgccccaatctgagtaacaatctctactttgcttttgaaacttgtggccttgctgagcgcattagcggcaaaacgagcacgtgtctgattttaccagcgatttttcaatgcaaacagtacagatgatagaaatgataatcatacagtcagtatatttaattgtactaaaggagcgtgcaacgatgactgttgttgcgatgttctaagcgggcaaagcaacagccaatcacgtgtgtggtaattgccgttcgtcggtggccggggtgtttcgattttccctggacgggagaacagacaccagctttgtgaaaaccaccaaaccttatcaacctcgttcatcctccactcacccgtcacgccagaccttcca

SEQ ID NO: 14417 - DNA, 402 bp, Emericella nidulans
gcggatgaccggtccatacgccatgctgtgccaacgtttttttcgagctacctgtacgaacgggtgttgagggcctgttcatcctgtcgtcctgagagatgctgcggcacagggttgactaaagtccagcatgaccgaccggcggtgaccatgtgccatgggcgggtttatagaaagggggctcatgctaatttgcaccctgcggctgaccccatccaggacgtcgcggtgcaggaccctatacgcggcctttctgcgtgtcatggtaatgtgcctacccggggagcactctggccgggccaccccgactgactggaaggccgggggccccttagagcatggagctggcttggcagctgggctcaacgccgcttgcactgtgaacgcagcgaagacaggaga

SEQ ID NO: 14418 - DNA, 446 bp, Emericella nidulans
ggtgaagaagtagagggaaaaccgccggaaagagagtatagacagacatggatcctattccgaggggctcgtagataccccaatgagacgggccaggccggggggcacactgatttaacgtggcgctatcacccaagatagagacatgggacacacataaaggcacggtcatgagacagatgctggggactccattgtgagagacgtgcaatcaggcgctgaaagatatgaccaaacacactacaggacctccggaagtacgtctatcatgagttgcagaccatgctaaaactagcgtacgctgcaatgttctcgaccctccaggaggcctggataatcgcacaggataacgagtgcagactgacacacaccttgaagaggtacaccacgaaaacaaacagtgcctccatgtcgactgaaatttactgtcggatcattcgactgcc

SEQ ID NO: 14419 - DNA, 428 bp, Emericella nidulans
  unsure (1)..(428): unsure at all n locations
cacgcacgggcagnagcatcngctccaaacccacncattacaacccaccgacaccccgagaccaggggaactccagcgcagcccacaccgaccgcccagcgcaacaacacagaccaacaccccagccaccgccgaacgaccccccacgccaacagacacgaccagcaaccccagccacccgaacgcagcacaggaagancaannaggcaagcgagacaccacncgcacncaaaccaccancncccnccagcagaaaacacccggagccacgnacagcancngaggcagagggcacagcccgcgagaaccngangcngaccgagccacacgcgggagaccgagaagccaacaanggcaaaccaggncacaagacgcaacncaaangggcggggcggggcccaaggaaggccaaagacangagggcgaga

SEQ ID NO: 14420 - DNA, 1367 bp, Emericella nidulans
catacgcactgcagcaaaccatccattagaagcgcaggctatacacttacatcaagagtcgcccacaatgtcgacctacagcccaccaccagtgcagcggcaacctcgaacaccgccaagcaaactgcctcctcttacctcgaccttggcataacgctcgcgataaacgcctggccagccctctcactcgcagtaacaagcaattggggtggtccgacctctgctgacaaacgcgactggctctgtggcgcaatctctgacatgattgctgaccgcccggaaaccgacgcagaggacctggaggacgtcttgatacaagtaatgaatgacgagttcgatgttgttgtagacgatgaaagtgcaggggaggtagcagatcggattatggaaattcgcaagatggtcgagaatggggagttcgatggcatcagacagatgtgggaggaatgggagaggaaggcggcgaagaagggcgatgctgttgcggcgtttaagaggggggaggatcaggacggtgagacggacgatgatgaggaggatggtgaggaggacgaggagatgggggaggctccagctttagtgagtgctccgagggagcgagttgagcctgaagttgatgaagatgggtttacgaaggtggttgggaagaagaggcggtgactttaagattgaaagaatgagttgggcaagcgtgatgtgattcccctaaatagacatatcttttgcatgtaatcgtaacttgtcatgataatattgtgggctacttcatggtatctagaaaaggtctacacaacggcaaacgcgaaagatgacttttcatatccaggaaaacagaaaacaaaaatgcgtaaatctataggaaaagtaatcgaatgaaattcatcatcatcaaccagtcttagccccctcaagtcacccttgggtccctgggataccttgaccgttgcccagtaatatcacatgagagtattaggatgcgttactggggatccgtctacgcatcaatgagcttggtaatcataccaatagcaatagtttggccctgtggtcttgattagtttatcgttgctttacccaacaaaagatagcacttacttggtcacgtagggtgaaacgacccatttggttgtagtcttcgaaacgctcaacacaaacagcgccggcagccgtagtgatttcgatgcgggcaatgatagtctgacccctgctggcgaaaggcggagggcgcttgctccggcgtccagtaccgggctcgagcttgtggagcagagctgcaatggtgatctcttccacagctgagtgcacgtgcatgacgcagttgaaaccggcagtgagaatactcttgagatcaagaatcctaattttag

SEQ ID NO: 14421 - DNA, 487 bp, Emericella nidulans
catcctgggggggcgggctttttgtatctgtccatctgcctttttcgtataccaactcgctggctgcatctattattacagccaaagcctggcctagatcctcaggaagcagcccccttacaatagtctgtaattgttacctgccatgcatggtagtcaaaggtgaccgggtcacacttgaatagacggcgcacaccataacgcatcccgcgcgtattctctgggacgcgatgccccgcgacttgcactggctggctttctgtaaacgtggcgacccatctaacatgtgcgccgatcgcgctatttacggggctcgtacgagtgcgcgatcaaactgtctgcgaggctttcaggtcactcacgagcccatgagcattaatttagacgcatctgaacttgcctacacgtacaaagagaccctgatgagccgaatgggaaccacttacctataacatggcgacgaacgctcgctcttcgtgctagcttg

SEQ ID NO: 14422 - DNA, 1425 bp, Emericella nidulans
taacctacgatttaggtgacactatagaatactaggatccactgcgctgtagcgggagcggcaagacgcagttcttgcttggcctgttgctggctgtgcagcttccaccacctcagggtgcgggcagaagcgcgatatacatctctacggaagccccgctcgctacaaaccggctttcccagcttatcgagtgtcatccgtatttgtcgactctttcgcgcgagcaggccccttctctgggtaggattctttccataaacgcaatggatctcgagagccaggatcacatactaaattaccaactgcccgtggctatcaagcgatacaatgttgggctagttgtaattgactctatcacctccaactaccgggccgagcatacgtctcacgatctatccggcttgtcgacacgctcgggggagctcgccaaactaggccagatgctgcgcaacttggccgcgagcgaagatgtcgccattgtcgttgccaatcaagtctctgacagatttgagggtgacgctcccttgcctttttcacgggtgaccggcgaccggacgccgatgtcttctcccgccacgcaacaactacgagactactacgtcggatttgaccgtgaggctgccgcgtcgcctttgtctcgagtgcggacatcagaaccggctaacgcggagctgaatcatcacactctcgccgtttcgcagtgcacgccgagcttcccttcttcatcacctctgcccacgcaagatgaccagccgcagttcgatgggtcatacctggtaggcaacccagtacgaaatgagattctcagcttgcaacatcagcagcgtttcttcaccggatggggggactctcctccgccgttggctcacggtacgcagccttgggtccagcaatatactcttaaaactccgacgttaggcctcgtctggtccacgcaaatcgcatgccggattgccctaaagaagtataatcggccggtgatctttgacgcggtattagatcgcaatcccacaattcctgtccagaaactcacttcccaagaacaagacgagccatctgagtctgaggttgcatcagatgcggcttctcttcctgaagagaattcgacccgcccgaacaactctactgctacagccatgaaaaacgtgcctacagcgtcggctccacagatcatacactctaccgagcaatcaatccagcgaaccatgaaactggtctttgctccatgggccggaggatctgcgcctctatcgtctgaattcggagatgaagtggagtttgagatctggaagggaggtatcaaggccgctaagagagagtaaagcagacgatgtttacatgccagtccgctttatggtctgatatgtgcggcaaggctcatagctggagctatgtacaagtctctgtacaatgcaccagttttta

SEQ ID NO: 14423 - DNA, 259 bp, Emericella nidulans
gagagctactctcggttcacaatattatttaaaagggcttcctctgcacccaaacatacggacccaacgggggggctgtacgccaagaggaggtgatctgatccaaaacatacgggctcgttaatcctaaaagacaacgtatgccactaatggaattcaaaacttatggggggcactgtcaacaaaagcttggcgggcatgctcacactcatttaacgtggagaagacaccagcatgacgctactctggaacacacgcc

SEQ ID NO: 14424 - DNA, 591 bp, Emericella nidulans
  unsure (1)..(591): unsure at all n locations
gcgggcacaaaacaacccggacttctttttctcgcgagagccagttgacacagaccccccgggggacgcagcggagaagggttttttaggcgacagggggcgngtcgcccgcgaccaaaaccaaggaccaacgcaccaggaaggaagaagggcgcacggacagaccgcaccccccgaacgcaagaagaggacaggagaaaggacacgaaccaacaccncagacaaccgcgncacaagggccgagcgaaccgaaggcgaacgaaccccgaacacacaacgccggacagccgaacaagcccaagcacganccagcnggaccaacgcgagaccaacccagacncaaganaanacngncaccgcaccacaacggaagcaacagacgcagacccggccacacacaaaagacccncagcaccnggaccgcaaccgcaaacagaacgnagaaaggacccaaccccaccgcaggccacaaaaagcgcnggggaaccagcaaccgcaccgaacgccagagcgggccggacggcaccacaagcagacgcgagccaccggagagggacgcgcacaaaacaancaggccggagcagaaaggag

SEQ ID NO: 14425 - DNA, 534 bp, Emericella nidulans
gctgtggggcatataccgccttctaatcagttgccttctgcctccgcccggtctttttcagcatgacctgctcatacgccgttagaagggcccaacaaaggggaggaagctgtacaggcaccctccggaggcctggaaggccacgcatagcttcgaggcttagacaaccctatactgcacagaaagcgagtggccagccgctgcagggatccggtaccggtgaaaatgaggctagcctatgcacgcacaccgactcaatcgtgcgaactacaatcctaagcatgcggcttacatcattctagtaggagctggcgggttattctaggcacatactcaaggcgcaagaaacatatagcgctgcttgcatcactggctgaaggcgtggctgatgaagagcagatatcacataattgtgggctatggtactttgagcgtgctcaacactttgtctggaggggacacaaagatgcattgactgaacctaggattaaggaacccatagtttgaaagggagggtcttgccttcctttggta

SEQ ID NO: 14426 - DNA, 1271 bp, Emericella nidulans
tcctcttcggctacgacagcggtatcattacctccactatctcccttcccaccttcatcgattactttagcaaccccagcagcacggttaccggtgggatcgtctcatcttttcaaggtggcgccattctggggacaatggtcaacatggccggcgccgactgggcaggccgcaaaatgaccgtccttgccggtgccattgtctccgtcctcggttgcgctctccaggctggtgctgtgaatatgacaatgctgatcatcggccgcttcattgctggcgttgcggttgggatgcttacgtccaccattccaatgtatgcggcagagctgtcggagccgaagtggcgagccacactctctgggttgctgcaatggatgcttagttggggatttctggtggcgcaatggctgggatatggatgttcgttttctaccaacgagttttcatgtataaacccccctctgtgcggccaacagattcactgactgagcctagggcggttcccgcttgccttccagaatgtgcccggcctgatcctcattgccggtatatggtttctggacgagtcgccccgttggttgatggaaaaggacaggcatgaggaagcaaaggcagttctcactcggattcggaagggcgcgtctgcagacactgtcgagctggaattccgcgagattcgcgatgtcatcgccgctgatcgtgctgtgggaaatacctcctggagaactattctcacgaagccctcctggcgccgcagactgatcctcggctgtggtgttcaagcattcgggcctctttctggaatcaacgtcatcaactagtaagctggctctatgaaatctgaaagcagaactaacaaacgcagctacggacctaggatctacagtatccttggaattgacaatcagacatccctgatgatcatcggtattagcggtgcactttcaattgtttactgctccattggtctctacctcgtcgacagagtcggtcgtgtcaagccactcttcgtttctgctctcttcctcggcgcggcccttctcgtcaacgctgtgcaagcgcagtacatggatcagaacaacgagaaccagctgcggtccatggtggcaatgaacttcgtcttcagcctattctatacgcctgtcggaatcatttcatgggtaagcaaatccttttcttaagctgattccatatcataattactaccaccatagtcgccggtacatactaattctaaatcaggtctacccgctgaaatctccctgtggagg

SEQ ID NO: 14427 - DNA, 1438 bp, Emericella nidulans
aactcaaggtagagactgagtgtacttcttctcagcttgggaaggtttgggagacaaatctcggcaggaaagcagctggtacttataaccacctgaggccggtatcaattccggcctctgaggggccattacgaaagagaaaataacacgcaggcacgcaagataagcggctgcatattgcctcagggcgtgttcccagatacacaaaggccatataatccaacctaagagccacttacaccttccaatcccctccggtcgtcactgccatctatataaaagcttggcgctggtagggctggttgcaatcacgtgatatgtcgtcgcaaggcgaggtctctcttttattatatcctctggtggaaagaggcagtcacagtcaattagcgacgtgaactgagagttgagacccatttgaaagcgagtagaaggtgttgtgtcggagtcaacaaaagcccccttctccatcaggattgccacacgagtcgttattggagtagaggccggaatattcccggcctccggtgatagccggccttcgccaagttatcaacactcggtacgcggtttggcgtgtgactcggacaagctcaaacccgacagcctgttgtttggtgcgatccagaatagccacggcatagagctatccaattgccaagaatattgcagcaccacgtcgagagtccgatcgacttggaagagtcatctagtcgagacccagcggcagaatgtacagacatccctcaagtacttgtgttgagaactaagagtaaacaaggtatgaaagccaagttcaccatctgtgacaatactatgaaattcctgccttgaacaccatggtgctgcggatcgctgactgccaaaggaaggtcaatggacatccttggtccgcttaaattgagagtactgaattggaatatggagtctaagtcgtaaataatgtacatgtcgtgtctatttacaggaatatcactagctgtcaatcagttgctgcttaagcctgcgcaagagctaagcttcacggatcccttttgttgaccgctgaacggcattgtcatggatccagattcaggttgcccggccttaccaaggggccctttttcctggaaggatttctgagtttcaaattcccttcaagattttctgtgtttagctcccctttagccatattgagtcgtttctttgatctcgtcttttctttgataatgccccaatatttattttttccggggcttttttttatcttttctttttctttgatacataaattcctatcactttctggattttaacccccctttgcttttcttttttgtaacatccttattttatctttccatattattctatttatcttatttttttcctctttatatcctttttacttcttattttctctttttcctgtctctctcttgcttcttctcttcttttatcc

SEQ ID NO: 14428 - DNA, 1218 bp, Emericella nidulans
ggtgctatcagaaactagtcgaacgtcggccaattagcgaagccatataatagctttttatgtctttaggatacggctatgatgcagaactctggcaattctcgcaacaggtctatcccgacctccctccaatcgaagcgtacctcgcatttcaccgcgactacgtggcaccaatggtacgaccagtcatcaatggcacgcttaccctagctgagattgttgctctttttcgaaaacctacctcaccaatcgccagaatccacggactccgcctagctgggctggtggcggagcggctttatgaccacatcaaacgtctttttagaactccgcaggcaacggtcagcaatatcacggcaggcgagaaagaaatctcagctctgctgacagcaggaatctggaaacaatataaagcgggcaccctgagtcaattggacccatttcctgatggcgttgacatggcggctgcaggtgccagcgtttccagtgaaaacgtgaagaaggttccgaaggacatcacggactatgctgcgtcgggagcttttgccggctctggccgaacggagtcactcctcgatcgcatcaactacttggaatgctggaatacagcattgcgaatgattcagactcttcaggcacagcatatgatcaaatctctgaaagtcatcgccgaccatctcggggacaggaattgcatcgccgtgatgggcgcaggtggtcccgatggctttgcccgacctatatacgacttgataaaaatgaagataagtgatatcgatagggcaggcctcaagaatcatcgcttcttcgtctaccatgactccaactattggcaccctgcattcaagaggctgacaagcgagaatccactgccgtcggaatttgtcaacaacccctgcgatgacctcgaccatgcgtgcctgttcatgcgtgaagttagacagaagctacttgcaaaagatgaaaatcaaggaaaggacatcaaattccacctactcatcccgacatggtccaagctccagatcaaggagccgctgcattttcctgaagacctctaccctctccaaattgaggggctcaaacatggtggcaaagatcaagtcgagttgaatctcccagccgcacccgctggacttcttcatgaagtcacgaatactcttgaccctaacaactggaacagaagtgcaagggggaccagggaagccgtcacattgatag

SEQ ID NO: 14429 - DNA, 530 bp, Emericella nidulans
  unsure (1)..(530): unsure at all n locations
ctaggaatccacaggcanggtaggcgtacaatggcatacacaaaccacttgtacctgtccacaaccgttgtcagcgcgtgtttaattcagatatggtgatcgcgcatctggggccgcaggtgactccggagcgtgttctgagcctaaggcggatctgcgctgtttaactgggcgacacctagcatggcccaggctcaatcccatcccgtggatcgcgcacatggagacacccgatgtactccatatctcggggggcggctttccagatacccacgtagagccaacatggctggtagccgcgctcacgcgcataggcttttggatcaactacgacctgtgcgacagtatgactaccacccaggtgaagcactaaaccggcacggacgaggctatcaagcgcatgccttacttgttacacgcgtcacagaaagtcactccacatcaagcacgaggatgccggatgtagacacgcatgatgctcgccgatggtagttcccgacagacacgcgcatcacgatggagccgctgtc

SEQ ID NO: 14430 - DNA, 517 bp, Emericella nidulans
ggtactacagctctacatttggtcgctgaagccacgaatgagacaggagtgttactgccatatgctctcctgacataacttctgtaccttaaaccatactctgttcggactgcttagttgtgcaagcacttctaaccttcacggtgagggactgacttgcgcgcccacatccatgcacgatgtatgtggtggacgtcgcatcccatgctcagtgtggagactaggtgccgttaacagctatatcccgaggcccagttagtgttccgttgggtgcgaacacctattgccatgaggacgtacggaacgccacgcagagggcaacatggacggcggatcatactgcgagtgtctctaggacatttaagatcatcattgtgctggcgagggtatagtcagagatggatgcctgcgctaatgatgcacgcatcgcatgaagcgcttccatatagagggcctaaagaataacaactgacagggtgctaattaaggctgccattgcgggtcacttgattaggac

SEQ ID NO: 14431 - DNA, 1311 bp, Emericella nidulans
gaaagtttcaaagtgttaccgcccaggtcaaattgacgatatgatgagcggactattgagaaccgaaagatgacgtggtaagagcaaatggtgaggtgactaggagaggagcggtcacaagggcgaaatgagttgggggaggcgagcccgcgaggcagataaggaggccggccggataaggaacagatagtatgaagaagctaaggaggatgaaaaggatggaagggatgtctggaggaaagcggtatatatacgagagaagattagcggactctggaaccgggtgaaggtcggaggcaacaggaagacaaagaatggcaaggagacagaaaagggcagcggcgagagcagcgcaaaagtcaatttatacggaattgcctcatggaggcccggctgagtcaaagggatcgccgccgacagcaagagagtattattagattactagattcaaaggtggagcgctggaaacttccacgtctcgcctggggcgcttcatcctgaatattcgctgctttattaatcggtcatgatccagactatatgctgctgggggtggtagcattagcgatacctgaggcaggctccaacctagccttgccggtgcctcatttccttcgcggagggtacgacatagtttacgacgtcgtgatggtggtggttgacgaccaactgtccttgtccatagttacgtgtccgtctcccaaacttcagccatcagccattcccctttcaatgtcgtcatgctgccaccaacttctgactgaatattgtcgcaagtgccactatcacaggaactgaatggagaatgagccaattctagtctactctagtttactctgaacaagattcacaacccaaccgctgcaatgcaccagccctgccactagccagtgcgatgcacgcaatatccaggtactcagctcgcagtcaagccactgtccgtgcaatatgcatctgggtttaactaaccgtctccccgcaaataatcagcccataattgatttgacttattaaaaaggatcattgataggaacaggtgacttggtcgtcggttgacaaaatcccaatcccctggttgagacttgcgaactagtagtcacatggatcggttcacggtagatcgcagcctgcggaatcccttccgtcagctgagtgtatagccgtcccacctcaagattcgagagtcgaggataccgagagatacgtagcactctagagagtcacattgccgtgcttggagcctatctgtgcggtaccttttgaccagcagcgcggagcacagaaagtaggacgtcggatcatggatgagtt

SEQ ID NO: 14432 - DNA, 941 bp, Emericella nidulans
gtggcgatgttgatccctagggtcgtgggcatcttctttcttttacccatgacctcaaccatctcgttaatattgtaaatgtgatatccagatggggagcgcggcgctgtccgtccaacccgattataaggaggtgattctcgtggaccaccatcgttctcccgtatcgaagcatgccgaggatgagaaaccggtgagggcgcgaatgttggtgactcgagatggacgggagatgtcaactgctccgaagggggccgtcgcggcaattgaggtgggggaggtgacggctcacggtattgcggctctgagggcggctgcggctgtgggggagggggaacatctctgggtgattccgacgaggcgtgctgcttgtgaagtatactggcgatggcggctgcagcgggattctgcacggcatcactgggagagctcgagacgggcgagctaggctcctccgcgggagccggctctggacgctgcgggaggctaggaggtgccggtgcgggagctggggacgctggggacgctgcagccgccgaaggaggttccggcgatgcagaggtctgggcgggagctgcatgagctacagagtcgtcaaggatatcgatgtaatttgacggagcgaatccaaaatccccattgactccaaccaaggtccagtccggatccgaagtgtcgtacaccaccaagttcgcatcctccgagaaagatacctcctcatctgtctgacgtgtataatcgtagagggctttcgcggtgtgaatcggcgtggcctgttaatccatcagtgtttcagttcgttcctgttcattctgtggctgtgggagaacgtcatcgcaagcccctgagagcggaacagccacagggaagtacaagtaaggcaccaggcgccattgtgacgccccttcacacatggcactccaccaaaaaaaaggtggccc

SEQ ID NO: 14433 - DNA, 613 bp, Emericella nidulans
cacaggcctacctgtgcgggagtttatgctagctgagtgtatgccagagcagctggatgtcagatggggctgtcttggaaacgtcaatcccggtgtataggaccgcgggtagcacggcagggtacaaaaagtcgagggcagaaaggagctacatacgatggctgggcgaccgacggccacaagtgctcgaggaggtgttagcccagctgggaattgcgtgctgacactgatagcgggcttcagccacagaacgcgggaatgagcggatgagctgcacctaagaacagaattcatgcgattttctatgggacgagttctgcagacccactatgcgcctgagaacacagggagcatttggccctgtgcgaaccggctttcggatcggggcgcgagaccagcacattcatgacggcgccatgcagccaacaatggccaactttggacaggtggtgttagatcttatcaatagtctaaatggacgatcggtgctactgtgtgctataaatggaccgtctagttcattggagatcaattgggaacaaaagtgacatcagagctaactttctgctagaccttgttacattagaaaggcagctttgtcttccgaaaaaaa

SEQ ID NO: 14434 - DNA, 1251 bp, Emericella nidulans
ctcaacaatactcctaacccatccgcccctgcaccactccaaaatccctctcgtagatgtctggtgcgctctgtgctctggactcagacgcccgctcccatctggctccgaagctcagaatcccagctttgcatccaccgtctaaagggattctcgctctctctgatggctcgagcagaattattcaggctgtacgcgaagttttcgagattcgcgacgaggccactccaacaaaatccagctcagcagcggaggactctgatcgcaggagtcagtgcaagattgtactgattggacgggggttgggcgatgccgggccatggcagaagagttttgaggagtgtttattgagggattaacaatacttggctagttacaacgctgcttctagatcgagactctgcatgaactatacaataggtaaacatatatttagtaaccattatgtcagatgtactgtagatgcaaaatctagatcacccaagagagaattcttttcaattaatacagttcctgctaagaatggtagacggatggggtagtactcaactagttaaatgccgggtccaatcaacaggttaatcgtccaatatactgaaatctgacaaggtgcgcatgcaagagcccgaagacagaggcggagaatgaaacaggctgacggggaaacaaaagaaatgagataaaaaaccctcataaggacactaccacagtaggggacagtaagaacagcgaaataaggccaagaaaaagcaaataatccatccattcattcgtgtatcgtcatgagggaaaaaaagacaaagaaaaggaataagatataaaactggaataaacgggaagagctggaaaatgcagtcagttgagacccaagaaagcgcgaatttctcgaatctgcccgctaatgctcaatgaattgaactcgcctgaatcatgctagggttggtgctttaggaagacgggagtagcgtatcaatcgaattttatgcatttgagagacggccgcagtcggaattcgataaggtagaaaatgaaaaacaagaaatcgtataggtccaaaacaaagaaaataaggaaaaagcaatgaaactccgtgtttcgccgtcaaggccgctcgctgcattgtgctgaaacgcaagtaggtaaggaataagaatacagcgcaggatgacaccgcgcggaagtcccaacgtattttgggatcttatcaaacaagtttcttgaagacctggtgggtggggtgttgctgatagg

SEQ ID NO: 14435 - DNA, 1531 bp, Emericella nidulans
accaggcactgcagccttctcgaccgtccagctgcaacagcagtgttttcccgtcataacagttcattaggccccaggaaacttttgctatataaatatatatgcaggtggcgacctcgataagttaactacagggagaaaagtataatgctatgcggagtggctggcctgctgtgcaaaagactgcagcctaacagcacaactttgacagttactggacacagggtatcagagcttagtatattcgtcaagcagcacagttggaccctacttccccacttgaacagataatctttaatgcttcaatcagtcaatacttgtttagatgtcgagtagactggtgagtgaagagattgaaccaactaattgaagttgacgatcttcccccaatctccaagcccctagaatcgtctgtagcgacatcagacctatgatcccacacattgcgacgttgggagctttcttttaagggctcgctagccctcagcatattggtgtggctatgaagcgtccccagaatggagggcacgacggtatgccgctggttccacgttacaatccgaaaagaatcttaaatctgacactcttagagatctgtaaactatggctgtatttcaccgaaaagaacgtgtattctggccatcgaatattctgttgcttgtatggcatgctgctaactaggatggtctcgagggcgatcgcatgtattacaatcagaaagcaagtcatccccagtatgcgtaccaaaagggctctatacacgatcgagactgatgacattcccagaaccaggatgaaaatccagggcgttaactaagatttgccttctccgatgcaagcggacgggcgatggaaaccgtgccttggggcatggacccgaaccgatacttctccctcggttgtctcaatcgtgatctccttgtccgtcagaccgataagtctgcctacggttttgtgtctcgatccagtatcagcaggccacaactgcaccagctgtcccttctgaagaccgcgtgcctgaaccaaggggtcgcttggatccaccagatctcccgcctcgtccgccgcggccattttcaatatttctgcaactcgctcgccagaaagcgcctccggggcacgcagagctttccgggcttggcccacagctgcttcaaatctgtcaacccaggcaaataccttggggaactggcgtggtgagatgtgttcttctgggagtgcgcctggcgtcgagaagagccagtgcaacggccacaccatctcgatgtcagccaggctgggcacggcagtgcccgcgagccactgcctcccgtccgcaagtagtgtagtttccaacatctccacagcgttcttcacctcaactatagcgtccggtcgagtggccagtacaaagttgccgaaatcaaactcaggcccgccgcccatcatatccacacgatctttcataaacgcttggttgtggatcagcggtgtttggggaagaagaacctggacaatatttcttgaagagactggtgtccagagcgaattt

SEQ ID NO: 14436 - DNA, 2125 bp, Emericella nidulans
ggacaccggctatatgtggcggtggtctccactcctccaccaatgacctaagcatctttctcagtgctattcttattcatagcattcttgacaccccgggcgacgtgcgtagatggctcaaaccattgtccacaaccagctccgtcaacaccctggtcggacgaccctgggaaattttccgcgcaacagacctcctgcctcccaaatatagtcacacagtggatatttacgccaaatctggtggtgcaatgggttatatggcccaggttgctgctatcgaccaatatggggtcggtcttattgtacttactgccgggcccgtcgacgcaatgaatattctttaccgcgctctccttggtacatttattccagccattgaagaggaagcacgcttccaaagtcgtcgatttgcaggaacttggacatcgaagacctcgccaccatttaacaaatctcagacgcacaatgacgagaaaattaaactgactctggaaatagacgacggaaccggccttagtttagcgtccttcactcgtggcaacgcctcaattgttgatgctatcaaaaatatatgggacgctgaataccttgcccttgggtttggtattctgtctgacacgctccgtctttatcccaccgatttaaacattccagttccggcctccgaagttgagtctctccttgctcaatcgaatacaaattcacaccttcgccactccatgagccacattgacaaggataaggtgagagttgaacgccaggaatggcgtattaacctcgatatcgtcccgcttaacggcgcagccatgtcagatcttccggggcaaactactgccacacagtattgtggttcgtggcagacagtggactggatgacgtatggcgggatcagtctagagaaggtcgtgtttgtggttgataaagttagtggggtcgttctcggtgttgaggtccctgcgctgaggggcggattgttgactcgcaactgaaccttcttcttatcccattgcgtcttagcattgcggaaaacctcctttttcttttgctacatgtgccttatttacccctagtccttgccttttcattctcttcaatggaagtaatgtgattaagtattaggattctggagcataggtgaacgtggatatgcctagccgcaaaggtaggacatcttgcttgggttggtcattgttgaaatcatactctacccagtcgcccaagggttgaagactgttcgagatagttctagatcactctgctcgaccgccttgttggcgattttccggatcaatattttcatattctcatccttgaccccatcaccagatgttgcatcgggtaagaggatagacctcacagcgcatacattctcaattcatttatcaacaaatttcaaggatcgtgtgaacatccctgaggacccgtagacccgcatagatacgtgaaagccaagcacaaaaggttgacaatacgagggccggggcgaaagactataaagtctcaaatgaccttcccttgggacaatgctcgttttgcagggcaaattttcggatatactaaaaacacagggatcgactcactagtgctggaggaagttgaaagaactgttttgatcaacagctttggaatgttgctgcaatgttatatattgaccacgtcgtattctaggtaaattatatttctacttgatagcctgcctagatcaaaataaaatctcgcttgaccattattccagtgcctggctcctcgtcgaagataggtatacatattacctcttccgaaccaatagccctattaacgtcagatcaaaaccaaaataccaccaaccttaattccatataaatgtctcgaagggtaaaagaccatactttctacagcgggttctgactctccacctctccgaaacccggctcgagcctcgacatttgcatcgccttccctgtactgatgatcatccgtccctcggtttcgagccactcaatagtcggcgtatcattatcgacattcctggtagtcgcgtgcgtgggacccagtgctgataccataactcgcccaacagaggtagcattcagataccgtttcatcttggagagtgttgcacgaagaagttccagatagcaagatc

SEQ ID NO: 14437 - DNA, 549 bp, Emericella nidulans
aggatgagggtagacctgcagcaacagtttacgcgcaaggtttcttctcgaccgggcagggggggacactgggggggggttttaagatgcccagcgcggtgacaacactcggcatcaatgaccaggaaacactccgagtcgaattctgcatcctcaaccgagggggcaacacccgtggaaaagtgccatacgtaacaagagcccagtacctaggtcgctccggtcattccttggccgacggtctaggggggtagagaaccaccttacacggacttccatgcgctctgctggaacatgctcggcgattacaccagaaccgccggaaactagaccgtcaatttgccggcaatttaccccgcgcatggtcccctaggctaacaccgagccagcatcaacgatctccaggtgaacaggctcccctagtacacctggtccatcatcatttaaccgctattggatacgaaagcgtttctaacccgacctgatgttatgcccaatcgattccattcccggtgggtacacaaccctgaccttttaagttgccggttg

SEQ ID NO: 14438 - DNA, 288 bp, Emericella nidulans
cggggggggggccgcgggtcacgaggacactgtgacgggcagcgcctgcaaccacccagacgggcccaacacaaggggggcgcgccaagaggaccagggccgacccaccccgcccgggcgcggcagccctaaaagaggacggaagccgcccagggggctcgcgcctcctgggggacaggcgcgcccctagggggccggcgatgcccacacccacaagccggggccaggcgcgacgcctgggcaaagaggagcccgccacccgtaatcaaagtgccaaccgaacttcga

SEQ ID NO: 14439 - DNA, 514 bp, Emericella nidulans
  unsure (1)..(514): unsure at all n locations
gggcagagaagagcatcggcaacacctccgccaaggccctcattaccacgcaaacnaacgccgacaacgagcgggggtcaagaaaagcgcgcgccgggcccccacagccgagctctaccaacaggacacagaagccaaggcccaaggcccaggccaccagatcagaacagcaccccccaacccaaaaaggagaaccggccgacccacaacgggccaccgcgagaaagggaccagtcacaccaaccacatgacatacgaggacgagggggcccccagcgacggcggccacgccacaaatgcgccagagacaacagacacaagtgtccccaaggcccgcaccccggctacaagcccggaaacaaacgcccgcgcccgaaagaacgggcacaagggcagccgggccaccagaaccccccagaccccccggccgacccagggcaagacccaaacccagccgcaacaaaaggtcccaaaccccagaagcgaagcaagagggccccccctgaggaacagc

SEQ ID NO: 14440 - DNA, 1569 bp, Emericella nidulans
gactacagccttctcttgttgttaccgcaaggattggtcgccgtaagctcttcctcggcggctctatggtccagaccacagccatgattatcacctttgcatgtttgatccctggtgacgagcaatcctccaagggtgccgtattcggactcttcctctacatggctgccttcggcgctacctggctgcctcttccatggttgtacccggccgagctgtctcccgtgcgtaccagagccaaggccaacgccgtgtcgacctgtaacaactggttgtttaacttcgccgtcgtcatgttcacgcccccgatggtcgcggcgattggctggggcacttatctattctttgccgcctggaacgctttcttcatccccgttatctggttcttctaccccgagacggcgaaccggagtctcgaagagatcgatttgatcttcgcaaagggctaccacgagaagatcagctatgtccgtgcctcgcacgaactgcccaagctctctgatgacgagatcgaggctgaggctgccaaataccaatacagtcctgagaccgaggccgaggttgagaagggccatgtcgcgcatcctggtagcaccagtgaataagggtgcagctagtatctcggtgatgcgtatacatacatacttgaatatgcacaaaatcgatattctcgagggtttttgtggatgtttggacgttgattgatcttttcttcctcttctctttcttttgttcatgagtatagtctcttgggtttgagcgctggatggatgactttgctgtgttttgcttgttccgtataccccagtcgaaacccttggataggtgcgatatttccttcccttttttttttttaaatagagtatatatccagatttacatccggagtactttcttagacaatacgacctcaatacaatattttattgaacgtagtcaaagatcttttattgttagtagatacctgagggttaacggcaaatggcaatacccaccctctcaacctcagctgctaacagcaagccatggccatgattttcaaccaatccatcagctccctgcaaatttatccgccggagtggtcgagcgaagcctactgcatcgactccatgcacgatcacgatcgactatgcatcgcgttgagatggtggctggcgcgatggcgtttgcagcagggatgatgagacggacgtcctctgcaaggggaccaagcgaatttagtgaagccgggatgcggacgaacacctgatcctgattcctgattgattacgactcacgatgcgatcggctgatcgctctctttctctttttctgtcaggtttctgcctcgctcgttttgtcccttcagccgccgaccccgcctcccttttatcctcactctcccctcctctcattctctccactctttaaacggctccttactctaatttctcgtctttcctatcttttgcattactacatcttcttttctcgctgctagaccatgcaaatccagctccccggccccgcttaacccggaccccaccatgagctcctccctcgaggcgaagatcgttgtcctcggcgccc

SEQ ID NO: 14441 - DNA, 562 bp, Emericella nidulans
  unsure (1)..(562): unsure at all n locations
aaaattagtgagagnaccccgcgcagcagcaccaacacaacagaacggggggcgcccggccgtcccttcccaggcaccaaggaggggcgacagggagggccgaaaaaaaacaagcgcggaggaccaacgggccaaccaagggagcaggcgcgcagaggtaaaccagcacagcgcgacaacagaccaacccaaccggcgaacagacgccgaaaaccaacccctaccagccagccccgcaaggaaggcccggggaggtgagacccggctaccgcccccgaaccagcaaccaaaccgagaacgggggccgaaaccagggcccaacccaaagcacgcagacacacgagaagtcggagaaccgccagcaccacgagaagcccgcgcaccaagaactacccgagaacatcacccaccagggcgaacaaggcccaacaagccccgccgagggcctgaccccgcaaccccaagagggccgcaaacgggcagaaacgacgcaacccgagcggacacacacagggcaaccagaaagcagcacaaaaagaaaagctggaaaggccccccacga

SEQ ID NO: 14442 - DNA, 1466 bp, Emericella nidulans
gcatttggtctctgagactaatagattatggaggtcagcaactctgggttatttaggagtgggtcaggggtcttaagggcaaaggtctactactaccaagtcttatgaagatgtcttgggcatatccaatcctggccaggcaggccatcggccagatgttcaagttaccgcagagctgaattggaatcatgacgccggcccttcttctgtacttttaccagccatacgaggaatctctccacatctaaagaaggggaggatattgcaccaaaacgctaacccttcttagagtgatttcgcgaaacagggcatatctgacggcttggtgaattatcgagagctcttggctcagagtcttaggtttccaatataatgcctccgtgttcgaccttggtagcggggtaaaggcacgcggaacaggataatagacacaaatgctcttctttgcctcaattctacaacggcctcgatggaaatttcgaggagatacattatcacatctatttgcgcaattaacaatggcccagctatcagtaactagagaaaggactatattagaagtaagtttccggtcactcttgtgaacaaggagctgaaggacgtgataggatactcggttggcagaaggcagcccatactctgtagcggattgaagagacctgctgcatttcttcggattgatactggacgaaataacagatgagccagaaataaaccagacatcctggtttatattcgagcatctagggctttaggaacatcagcgtagcctgttgacagtccagtcgaaagatgaggccatgagaaacctagacatcagtctaatcaccacctttccaggttgtcaagcctacttcgaaactaaatttattcatgtgctggatgatcaacaatggtcaatagatattgcttgcacactacacgtgcgcttctcctgccggtgccaagatcgtcagctttcacccaaaatagcacatggccaatagacaagcttgcttgtttgcgagattcgcattctatctgggcacgatcttttcaagccaggcctcctaagtggctctagtagacactgaggcgctaaggtgcctaaatacgaggttatactccaaaatctcgcatcttctcttacatagtctaggccttgagcattgaccttctatttgtttccatctgattagtcctgagtgccttcccatcactgcgctgcctttaaagcattggtaagtggccgaagtctcatgctagggttgcaatgggacagattgttgcgaatacgaggtccaggaactggggtacatctcagcgcagattcggtgagtcttgctcgagccaatggaagatgttgccagagacatgtgtatgaatatatcaatctggatgggcatgaacttcgagcgagattaggacgcaatatagaagggcaagggaggtgaaaggtataagaaggagaagaggagcgggagtag

SEQ ID NO: 14443 - DNA, 434 bp, Emericella nidulans
gggccgggctaaccccgactcatgaatatattccgcaggcatctcctgcatccacgggacacggactccccacgggggcatttttatagagtgacccgaaagtcgccaagacaagctgtcgcggggcactatcaggggctgactaccgtaacctgactacaaggatcaggcgtagcacgactggcccactcacttctgtccgtctcaaagccctcacaataagttgcgaattcattgcactgtcacacacatgacacattatatgcacaatctgaatcaacctaatacacgccaacactcatctctgagcagcgcggtatcgccagaatggaaagcaccacagaacacatccgggggctctaccacaagatcagagaatgcagcattattgagctacgatcacttgcattaagtacgggaagcatgttactact

SEQ ID NO: 14444 - DNA, 361 bp, Emericella nidulans
gcaatgagtgtactgttaattattcactttattccgctgctcttttttgcctctggacaagacgaactccacacggtggctgttttaatacgtgacttttttcatgccatgtcttggcaccgagtggccactattcgagctgacaaccaataagtgcttacaattcttgtgtgctgcacgaatgacccagtggcttctgttcttgacgggctttcacaagatttcgagatttcagtcttctggcccttcaagacacagttgtttataaagttgagcacatttgtgtacaccatcaatcatctctgggatgctagccaggcttaagccgtggtgccctgctcgacgaagtaagggctacttg

SEQ ID NO: 14445 - DNA, 356 bp, Emericella nidulans
gttttatatggcaccagcgccctatcgttaccaccatgcctagacagggaaagcttgatattttgcgatcagttgcaccaggatttggctgctgcatgccttgcagtcggaagctgtgtataaaatactgggcagagtacatctatatggggctcggatcattctcgcctccaaaagccatagtgagtttgctaaatagtgatcagcgctacttacgaccaattacctggcgtgatctgcgaacagtgcggctcaggggagggaggaacatgcgtgatcccggcttagctggacagtacaaggactatttgtacctcgctcatggatacagggcctaatgacagatctaccactgc

SEQ ID NO: 14446 - DNA, 537 bp, Emericella nidulans
gcaccacacgcgtagttggcccccccggagcccgaggctgcctaccaagaccttcccgtacactctaaggggtttctcaagatccagatggaagacaacctcgtgccgaggtgcaacaagccacactagtacgcggggcaagagtatcaccgaaggaggacgtatggagacacgcagagaggactgaagaccacttcgatgaggtccatcagcacgatgcgctggagacacaattgcaaaaggccgagaaccacagcgcacaggttgaacctgcagacgactacaacacagccgataagggagacgacgctgcgacgaccgtctactccactgataaggagggtatgcatagtgaagacatggcctgagactgagaccagaatactggctagcactacatgctgaccattgccgagtgcatgactaggctcggagactgatcctgctctgtctcaacaacggagcccgtgtgcaggggtaccatgctactcttgacgctaaggagggggttgataaccacggcgctaccgcattatt

SEQ ID NO: 14447 - DNA, 425 bp, Emericella nidulans
ggcatgtggctcctcgcggttgatgatcctattccgcagagctcctgtttctccccaatacacgaaccccacaagggggcagtctgactccgtgtggctctttgccccaagttatggctccgagacaatcttataagagctggcaagtcacaaatggatggacatcttttgtgagagacgaacaaccctggattttcagatatttgcaaagccatctcaggtggtcgggaaattagtgtaaaggccgttcaaggccccggtgttcataaagatgggctccttttgctagaccactcagtaccacgggatacataaccagacactagtaggtgaggcccacccgctgatttaggagctccagaccaagttctaagatttcagctctgatgcttgagcatctaatgttatatatgtgggtaaacttt

SEQ ID NO: 14448 - DNA, 564 bp, Emericella nidulans
gcacagaaatgattgagacaacggccacggggctggcccaccagggacgggtatatcgcgacactggcctacttaacggccagtcaaagcgcactgacaagagggcacacctataaagagctggctacgctggccgacacggttggacaaggactggatggaatatccggacagaaaatgccaaaagacaaagctgataaaaacggcacactaggatactgagcttgaccaagagcaggaccatgcccatatataagacatgctgggcagactgggagcctgaaaatcggggagcacatgcgtcacatatcgagtgcgaaacgaattccaggccacatagactatataaagggcctaactcataattcgatggcggctacctataccggcgaagctagcaaaaatgtactgaccctcggtaggactacagaatgcagtgcgagaatgcagactagcaggcgttgagtacagtaagaacgaagggaaatgtgacccatgtaaggagcgaccgagaacaagcaccatgcctgcagaggccatacgcagaatgatgtcctacatgcc

SEQ ID NO: 14449 - DNA, 385 bp, Emericella nidulans
gcaacgagggtagagccatttcgtcaattcattccgcagacattctatgcctccggatccgatgaacaccacacagggacagttttaacaagtgacccgcatcacgacacgacctgccaccgagcggccatattagcagctgactaccaatgacggcctacaaatctcaagctgagcacgactggcccgggcgctacagaccttcacgaggccatcacaagacgacgagaaatcagtctacaggccatccaaaacacacttggcacaaaagatgcgaacataggtgtacaccatcatgtatcacgggaagctcggcatccataagccgggtggccctgctcaacgaagagggggccacagcacatgctcaaaaattcccacatct

SEQ ID NO: 14450 - DNA, 445 bp, Emericella nidulans
gcaataagctcaagggaacacacggcacgagggtacagccctttcgtcaatccattccgcagagagtctacgcctctggaatccacgaacactacacgggggcagctttactacgtgaggcgcatcacgccacgacttggcctcgagcgacacttttagcagctgaccacccacagctgccgtgtagccctaagcagggcacgactggcccggtagcgacagaccttcacaaggccatcacaggacgacgagcaatcagtctaatggccattcgagacccagttagcacaaaagctgggaccatttcgctacaccatcaagcactacgggtacatgagcagccacaagtagtgtaggcccgctcacccaagagggggcaagagcacaaggcctaacatcccacatctggggaggaccagctaatgacctatcagtgactagcctg

SEQ ID NO: 14451 - DNA, 433 bp, Emericella nidulans
cccggaggaaagaacaacccagcaccgaaagaggcaaggaaccaccccgtcggatagaacgcaggcacccccagcccggggacaccttaaggaggacagggggcgaccccagaggtcaatcgcatcaagaccaaagagggaaccaacggcactgacaaccgaaaacgaagaagatgaagccaacctaaacaacggacgcttcgacgccaatagaatacaagacacaaaaccagtcgaccaactcacaaccaaaaaaaacgagaagcctccaacaccgagtcatatcagtgaccggaggccccagcaacaactgacaaagcgacaactggggacactaaaccggcgggcccacacttgcaggcacaccgaaaaaacagcccacagaggaaaaaagcgcctgaggcggacccatgaacggccccaaacactgacc

SEQ ID NO: 14452 - DNA, 1274 bp, Emericella nidulans
aaggacagctgcacgccgggagtaagatactagctctagtatacacgataataaagcgtcgatatgatgtccgtgtttagaccctttcaagaatacctctagacatcattgggaatctatcacctgtttccagcgcctataggaaaaacgacccaattctatccgagcattcattcaacagctaaaatctacagtacatcatttctaagcccaaagcagactcactttcctttcttattcccatcgcccttcctgttaataagacccctgatagcccttgtcgctagcggcaccggaaacgccatgtcaggcgtgggatcccttcctgcctcgcccgcggtgatcagatcaaccacagcgacggcgatataaccgccaatccccgtcaagacgtgccaccagccatggaactcgaacaggaatgccagcggcatcccgagcacactccgcacagaagtcaaggacagacataagaagttatcaaccagccacagcgcgtagccagagatgaagcaaataagaccaaaccgcgagacgatcttgatgttcagtctgatatcagagtcatggatctgctgcgggattgttttgattgttttgatagtgattagcagcactgcggcgccaaacgagacggcgtgcaacagaaactcgtccatgatcatatgcgtgaccatgacgatcgtgaagagaattgacagaatgacccctacccggcgggtatacgactcggtcttctggaaagttaggatacggtagagaagcggtgttgttaagaggtgcatagaaagctcgtcggctgttttgccggtggaccaagaaaacctgtgtaagctagacgggtccgtagtaataataataatagatggtcgagggagaacatacacatctgcgtatggtacttcaaggtcatatggtacccggcagagcagacgcccacgccaatgagaccgtagtacgggatgcagcgggagaaagatccctgcttgcgctgggagagctgatagagcccgaacaggccaaatgagcagtagatcagactgctgagggtgttgatgaactcggccacgtagcgagtgattacgtagtcttcttcacagaaactgagcgcagttagtatagcgacggcattggctagaggggcaagtacttgaggtaggaggtctgggggccccagaagggctcgatagcgtgcattgtgcgactggcactggaatggctggggatgagaggagggaaggagaggactcaggggtgtctggtctaactttctg

SEQ ID NO: 14453 - DNA, 399 bp, Emericella nidulans
tccggcaggaggatacagccatttagtcatcctatttcgcagagctttttcttctctgaaatacacgaacaacacaggggggcttttttactaagtgaggcgcttcaacccaagttttagcggctacctactctattagcagttggccaacgacgaatggagtcaagtcttaagcatgagactactaacccagtagctatagattttttcaaagctatctcagcaggtcgggaaaatagtctaatggccgttcaaaacaccgatgttaataaagttgggatcatttttctacaccatcatgtacccctggatgctaggtagtcataagatgtgtagcctcgctgaccgaagtaagaagacctctacaagggcttatatttcaccatctttgagtgacca

SEQ ID NO: 14454 - DNA, 912 bp, Emericella nidulans
taatatatatatctgtattttcaggagagttgatactgaagattgaccacaaccttataaaatcacaccgttactacggtgatgaaataaattattgaataggatgttgtgtagaaaagaatttgcctggttacggtgggtttgtggtggatgttgttggaaggcgcctggacaggttcacattgtccaccgtcttctggtctgcttttcacatccaggactcatctctagccaaatataccactagcaatcgtctgatcatagttattgattgcggaaattgctttaacgtgagctctccgccgaatcgtcggggttcatactgacaccatgcagacgcacgatgtcttctcgacgcccgatcttcttcaaccccttggccagctcccagagaagcgagtttccacagattgatggcctctctaagttccataagtctctcgccggctacagtccaacaccacttacttcgttgcccgatcttgccgccgaactaggcgtccgcgccgttctcgttaaagacgaaagcaaccggctcggtctaccctcgtttaaagtcctcggtgcatcatggggttgttaccgtgcggtagcagcttatcttaatctgccgttgaccgttagccttgaggagatggctgcgcgggcgcaagagaaatcggtgacgcttttggcagcaacgaagggaaaccatgggcgggcagtagcattcatggcgcgtaccctggggattgaatccagaatttttgtgtcagagactatggatgggccaacaaaggatagaatcaggtcagagggagcaaaggtgacgacgattaagggcgattatgacgcggctgtcttggaggcactgaaggtgtcgaccgagatggatggcgcattgctcatccaggacaccgcattggaggggta

SEQ ID NO: 14455 - DNA, 1848 bp, Emericella nidulans
tacaatcgtgcggaaaatctcaaccgacagcaacgcccaaccacctttctaatctatcttcgcaccgagttcacccgcaaggctgcctttcaaaattgtttaattgagaattcttttaatatagacactgcatactctaaagtgacaaggaacagccgcgtgctgctacggggcgcgctaaatgtaggtcctgtcagcctgctgagagttcgagaatgttgaaggatctgaccatatccgacattcattccttgggaaagacccaagccattgagattctctcccagatcacgcgcattgagaaaaagactttcccagcaagcgaggtgtatccatttggggaggagctctggcgaaaaaaaccgaataccagggtgctctatgtgacccaaacaccgcaggggccgttgatcgcctatgccctctatgttcggcagaaagggattgccttccttcacaaggtttgtgtggcagaagcgttccgccagaagggagttgggatgcagctgctgaagtacattcgaactcggttgcaaaaggaaggttgccaatatgttcatctctgggtggataagggcagatggtctgcacggtcattgtacatccgtaacggctttgaggaacgtgagctgcttactgattactatgcaccgggaagggatggtatcaaaatggtcctcgatctcgagcgtgggatttgaggatatgcccctgccactcctgcccctcccccttggtcttgtcactcgagggccgcaaaaacctgtgctaggggaattccacccttatcaaactctggaactttatgttcatccgctcattaatggaaaattgatcggtgctctctcatggttggtctagggtgggtgttggctcctagatgcattccttgcagatgtgtattccgcaacaacgtgagccccatcgcgtcagaccgtgttctctgaccattcccataccatcgtgacgtcaaacatatccaggcatggctcttttgaaggcacgcgaaacctcgtgtgctcctgtatagattgcgcccttgggtgcaagagccctttgagaatgtcccctaagagcagcacctttcttacatgtgccgtctccgaacccatattccagtttctacgaatctgtccgtctgctccgcagaaatacgaactgtcgggcgtcatatggggcttctacaacctccgtttcgtgggatccagtgaacttttgcgtctgaaactatggcgcatcgcctgttcatcatcttaagcttcctcttgtcggctgcgagtgctgccgtacttgcgaattaccctgtcaatgcgcaattacctcctgtggcccgaatatcgaagccttttcatttcgtcttctcacaaagcacctttagtggaagcggtccccagacggtatactcgctctccaacgctccgtcatggctctcagtggataatacatcccgtaccttgtctggaactcctcagaaggaagatgccgggtcaccggagttcgaccttatagccactgatccatctgggtccgctagtatgcaagtaactcttgttgtgactggcgacgacggaccgaaagtcggcaaacccattgtaccgcaactccaagccatagggccgacatcttctccatctaacgtcatcgtacattctagcgcctccttttcgatctcttttgaccaagagactttttccaacacacgcccctcgacagtatactacggaacttcataccctgacaatgctcctttaccctcatggattcgattcgaccagtcaaacctccgcttttatggtacagcaccgaacattgggccccaaactttcagtctcaacttagttgcgtccg

SEQ ID NO: 14456 - DNA, 440 bp, Emericella nidulans
ccagtgctggcaaactcagaggcagtggcctagtgctccatcatactcatgcccgtgagactgtgggttcacggtggccgtactaaacagggtggttcatgcgctcacataaaggatgacagccttacctctagcgtcaggcctacagtgatcgcgttcaaccctgtgtggggccatgcatagcatgccatcaccgtctgtccaatacctcatcaaggacaacgaccgaggtatccatccagtttggctataagcttgcttactgcacacgagcctctctagcttctcgctcaaatacactgtatgttctgtccaccctaccgccggaatgatctcgggcccaagacttgaccccggccctgctccaatgctcgctgcttggatgcatccaaacgactatggtattctatggaagaacctgtctcgcgcgttaaccatgc

SEQ ID NO: 14457 - DNA, 1725 bp, Emericella nidulans
tgcataggtaattatacaagttctccaccgctgccatggaactggccctctgcgccgtgttggtggccgccccaatatgcggcgtgctcaccacgttcaagttctcccacagcttgccatacctttctacagatggaggctcctgctcatggcagtcaaggccagcgccccagagatgaccttcagaaagcacccgaaccaggtcccgttcattgacaatgcctcctcgggctgcattgatgaggatggcatcaggtttcatctgtcgcaactgttcgtaggagatgaggttgtgcgtctcatctgtcaatggaacatgcagcgtcaatacatccgccgtttcaagaacctcctgcacactttgtgctcggtgatgcggaaggtgaggccaggcgtcatcgggcgtataggcatcataggcgaccagcttcgtgtcgaatcctccatgaagatctcagccgccgtgcgaccaatattgcccatcccaataatacctactgtcctcctgcggagtgtcaatcccttgcatgtctccttcggtactggtgctgtcatctgtcgtgtagtaatcgaccggatgctgcgcgcgacggtcaatgcgagagtgacgacaagctcagcgacatccctggagttggcgcccggcgtgttcaggatcttgataccccgtttggcacaggctgcctggtcaatcttgtcaatgccgactccgtgcttcccaatggcgatcaggttgggggcacgagcgatgtcgtcggctgtgacatacgatccccggacaaggacggctgttgcatgctctcgccagttgttcagtttcttatccccggggaggacgacattccagagcatctttgcgtgctcgaccgcgtctggatgcaggctatcgatcatatacacggttcgcttctccgtcaacacctgggttgcgactgttttctcgtgggattccatgattctggggatcattttgggtcggtaacactagcagttggtgtaagggtaggtatcagtgataatggacggaccccgtaagtttgccagggacgggtccatatatgccggtctatcacagcgtcggactggatccggagaatttccgaaccaagtgctggatcaacaggcgcgatccgtcggggatctcagggggcagatggagcagcatctggccagctgtcagctaagtctcggtatgtcataggcgtggatggctgctcgcttaccctcatctcctcctctgtatgcctccccatccgcagctctgaggctgccaacaagaccctccggaacaccttgacctcgtcaaagcgcccacccactgctgtgagaagcgcgacgcatttgcttattcctgttgaatctggggcaaggttctggatcaatgcgaggtccgccgtgcagaggatggcaaccccggcggcaaagacgtcgtagccgtcggtaaaggcaaacccagctggtgcatgaccatctaaagagcgatacatccgatcgaccatatgctcgcagctgctccgcacatcgttttcaatttctagaaaggggtcttcagagacctggatttcagaggtagagaaaatacacaaggaaaggatctggatcaacgccctgcacgacagctgcttcagatgatcacgcgcagtctcattctggtccagaaacagacatagttcacgaggaacatccctccagaagcagatgtttttgtagtgaaagaaggggcag

SEQ ID NO: 14458 - DNA, 2313 bp, Emericella nidulans
ccctcgaagccatcggtgagccagaggctgttgtctatagaatgtcagtctactatcacgctatctattttataatcgcagtaccataatgacgatcctccccagcggcgcaaccgctgtaatcgccgtcctggtggaaaaaccttccacaagcttcagcacactgtggaatgccatcagcatcggtgtcggtgtaaatatcaatgccggaggtgtctccctcgagcagggactctttcgtcacagcccagccgacaacgttgacctcgacagtgtcataaggccaaccatcgaatccggcaagtccagcaatccacttgttataggagcggctggcggcctgggcgatctgcgaacgctgctcggcagtgacggattgagaggaatcccagcggacacagtagttgatcttgcctccagcggcgatgacttggtcgaagccatagttttggaagccgagtgcatcgctatatgtctcgacttcgtggtcccagacctgattttgttagatgcgctggatcagcagctgtgatggattcagcggtttacctcttgcaaaggagtgacaaggtcagaaggaggatcccaggtactgggaagggtgacatcgcgcttgctatgagaatcagatgaactgggcttgggcacgcctatatgccagggaaagctgcggtcagtgaaggtagagagcacggtgcccttgacagggtgcgcggcaacatagctggccagcagctggagcgcggtaagagaaaaaacggatttcatttcgataaagaaaacgaatgaaggaaacgcagctactcaatagctatgtagaagggaatggcttgatttcctccattggcgggcttattagttatataaatattcatcctgaaacaggggtctggggaacgcttttccttatgcttggcagcatctctcggccagacaggagcggctggacatgaagccatatgggaggaatcccgcttaagtaatcaggaactttcctgtgtgaacaaccagggatagactgaggggagcacgtcagaatagactgcatgggagacgctgtgcagggactgtagcaaccgctgggccatgtgcggacggccaagcctccgttcaataatcaacaggaaacagcgtcctccgctaggcaaaacgaactgcaggccaaaaggcttggttcacttattccgagacagtgggtcactcggataaattatcatcattgagttttaaaggcgttcgcgagtccgagagaaagccgaggctgctctggccctggctggcggggctttccggatcctgatttctggactgactgtgacgcaaccggcattttgtcgcatgcaaggcctgcacgatgttcctcgacaactcctaacagcggcagatatgaggcaagtcgtcgcaattattgaagaaattaacccggaaacaagccgacccgtgcctgtacacctatcccttctcagtgcagtcgctggtcgtccactttgcgattgtccttgcgctacgggcgaagcaccgaccaagccgcaagctaacgcagctgggctatcgtctagtgaacgtggacaggaacgagaacctgcgggagtggtatctcaaagtaaatccatatggccgagtaagtcatttcaagatgttgaatttcgaacccagagctaactgttgtaggtgcccactctcacgtatagtgggctcccgtcaccgctgacggacgcgctgtcaatcgtctactggatttgcgatcaatgtccaagtctacttcccaaggcacatcagacggaaatttgtcgactactctcgcaattgcatgaagccctggatcgctacggcgcggccaacccgaccgtggatgaccttttgaccaaccatgacatcactccctcccaccgccaggccctggagtacaagcgcgactggttcgttcctgaccctgaagtttatcaatttagttgctgacaccgaccagccagaggaaacagagggagttggtatcgatgaatttatcggacggccaaagtatgacggcacagtctatcgccttcctcaatgaaatcgtcgagttgcgggagaagtacagcaaaggcggaacctggatctttggggataaagttggcccgacggtgctcgatgctcatgtggttcccttcgttacacgactggacgacatccatctggatgacctagtccctgaccagctgcgcaagtacgcacagaaaatcagaaggctgccactggggaaggaggcgatggggcagcggccaacggtctgggacgcttcactggggccgatagacgagattcgactatgat

SEQ ID NO: 14459 - DNA, 464 bp, Emericella nidulans
gctaacaccacgtatgtggaatgagtacgcgcaatagcctactttatgtccagatcagtttttagcaacagctaccttagggtctgtctggggggatcccgatcatatgactagcacacatcgggtgacttattgccgacagacaaacactctgcacagagcgcgtacgatcacttgccatacatactgagcttttaaagataattgtagcctccgaacaggcacgagagagagccagtactgccactgtatatactgaggaccatcctactatccttcctcagggatgagggactgtccattcttagcgatggtgtgcgtccattacctgtgctgaattcaaattgtgaccgctcgcatatgaacccactgattaaggattgacaagcaacttaagaacactcataatgatcccaatcttacaggtgcgctagccttttgatattacataatgcatatacagt

SEQ ID NO: 14460 - DNA, 1748 bp, Emericella nidulans
tagttcatgtcatgcgctcatgtggtctcgcctcgaaacgtgcgatggcgtttcctgatcgttcctgctctccctcctggacctgaagcactgcggcgcctgacgacacatccaagcaacttcgaagtatcggcacagcgacgcattccccccttcgaacatacacgtcccagaacatacggagcacctttatttccgacttccatgatatcgcgtatctgacgccaagggcttattcaaacgtgttcgctgtctcactctccgacgcattcagtcttccggcattcgccgttaacacactgcgatctcaccgtactggttccgttacctcacatcggccattgcctctcctctgtgaaaatctagcggggggttgttgatggtgtctgcggtggtgaatctccggtcttgtctatgaaagatcatcaaccccagctcgagccgttaaccaaactattattcaacaatggcgtttccaggcggggaactgccagaaggaagacatagctcggagagctctgggaacaacagtgggctatcgcaagaaactatcagggatgatggtcgtcgatatggtcgcattgtgcctagcggtcggagcatctctccccattccaaagacgatggcagcgataggtaacattgatcccctacccaatttgctgcttaaagtcgaattgcttctagcgatatggcgccatatattctgtttcgataactgaccgctcgttaggcttgaactcccggctccacgaccaccttctctaggcgccccgaatgacctatacacctccatgttctcgtggggctcgcccgatatttctcccacggacgtgcgcaagaatcaaggctttggtagtcatagaaaagcattagctgtccttgggaatgacgatccaggccctccacctatcaataatccgagtccccgtgtgaacaccaattacggcgattattttcagcacgatccgcagggaacactatcttattccccaagattgggcactggcgatgcacacggcacttttttccacgatcactccgaacacgaagcctcccctgccacagccactttccgtccaggcacaggacgcacacttgccagcgacgccccagatcttgattataatggagatcaccggcgaccatctgttgccagtgctacgactgtaagcagccaagggtcaaaatcaagcacaagcgggctcttccggaaaaagttacaagggttcttcggtgacgatcccaacgctagtgattcaaagcaagaccatgatggtcaccacagctcggggtctaaaccctctcccgtctggctccctcttgaccttgttaaaagagcattctcctagggcgtctacaacgtacccctcgttctttatacctctttacttataccacccctacacctataatgactctatccctatcatctttctaccctatatttcccctctttcacctcctccttattatttgctttcctccacccctactttttgtttcacacctctttgctcccctcccacctccattactttcccttccctacttctcactctccatttttgtaattaactcttccctcttcttctcttcctcctcaccttcctttttctccaccatacaatatctcccactacttcatcactacttctccacactactattctctattcctcccctacatccctctccttatctctacttttatttcgatgtcctctcacgcttactcgtcctgcact

SEQ ID NO: 14461 - DNA, 2291 bp, Emericella nidulans
tcctcccaaggttccaaattgatcactgtgctctcgaagacttcaatatccttcatagtgtttgcgaggggtaaaaacgcagcttccgtgggagtcatcagaagaccacatttcaatagataaaagtagagaacattgagctgcttcatcggcgggagacacataaggtatttcgatacctcgccttcttttctgggtttcatggacaggtccaaaccgtgtttgtttatgtgctgaacggtactgcgtcgctgatcgtgccaaattctacatgtaacttttctactagtatttgcggcctctcatatgtctggtgtctgttcggggtggtaagggtatgcacattgccccaattccaaaatttcagtaaaggtgctaaccgactctatatagttcatcctctggcaagctcgccgaaacaacagaatctggaatcagaacaacgtccctcactttacacggcgttcctctccttctgccaggacccctgccctcatctggggcgtcggcgctgtacgcgaggtcaactggttcagcctggtcatcccgatgtgtgccttgactgcgtcattgaccataagatgcggattgcgatcagtactgcaatgatcactataaggatcgcggcgccagacatgaccatcactggcatccaaatcaagaacgcgacaagtttcggtgtgagctgcgggtatcatatccgcgaaatggggtcggcgactgcagaaggcaagtgcgaatcagtattggaatatgttcagcagctcaaagaagacggcttgctgcactggtttcgttgttttagaaatagcttgagctggaacagacaagctgcaatagagcggaaatgagtccacgaaggtatgcacagctaaagaggccgcttgatgatgcgtctataccttgtcgagtagtctctagggcgttgaatcatccaaacgtaagtcgtgtttgacccttctccgatttgcctccccgcccgccgcgagcaggttttgaccgggaacctgaagccgctctgttgggtagctgagcagcctgagaacttctggctgcttgtctttcctgagtttcgagatcctttgcaaagtgccaatcattgtgttcgtcttcctcaccacaatttatgtacctaccacaacgagggcatctgaaagattttgaatgtacctgctcaatctcgccgtcagacgcaacatgatcatcaagttgtgcattgtcaacgttgatgtcgggagtgtctgccatatgacccttgtcaaaagagtggcccggcccgtccgtttctgatggcttgttgaaaaagcgtcttaacccgctatcttcgacttttcttcgcttttcaatcggttggtgttctgcgggtacctcatccgccacatgaacccggctcgacgacgaagacgccatgttcctcgcctggtcgccgcgtagcaaaaagccatcaattgcctgattcttagacgtcccgtcttcaaatccgccaacactcattgagatattcgcacacggccatgcagccccatctgcagcaatctgccggagcaatgtcttcccaagctcaaagagtaagtcttcatcaatagtagctgacccggggattggcaattgccgggatttaacctgcgcaccttgccggtggtgcagcgcaatggttttcggccgccgcttgtgctcaaggacgccttcttccacaaggcgaccatatatatctgccgcaaaaatatggagccatttatctgcctgatcgagggtatttatactcggccgaaaggattttgctgaaagcatggactttatttgcgtcctggggttgacttcgcttttatcttcgccacgaataataccgtacaaccaaactgccgtgtcatcgttcagcttagcgcggaattgctcaagcgacactttgaggagttcgctgatctgttctgttccaaacattgcagtgacctggtctcctagtttgccgccaagcatccggatcttggtgaacttgaagccgctgaggaagttctggatcgcacgattgcgaacgacggtttgcttattgggtttgttcgttgcactgcccagcttcgccatcatcttgtttttcgcgatgcctgcggagcaggtgtagctaagtgaattccaaacggccgttcggacggatcgaacaatttcagcgccgataagcatggcaacatcgtcccagtccgggtcatcgacctcagtctcgttctcgtcaaggtcaactaagcaatcctcagtatcccattccagcgcagttgttggcggacaaggcagcaacg

SEQ ID NO: 14462 - DNA, 541 bp, Emericella nidulans
actcacatctaccgtcgtccgggcatgcgtttactactacctaaacgcgaccgtctccttcttaatatcacacactgctcatcacatgttttggatgtacgtcttgcctctgccagtcacgcgacccacatcatgtggttgaaggccatatccctccatgccgaaccagcaaaggcgttgcaaggaccgttcgccctagaaatgtggacaggctgagtgactgtcctctacagataccagaacattaacctagaacatactaatcctatgagagccgtacacagtcattcataaacatcctgacacctcaagccaccgatctctgaggaagtactggtatgacgctcatgatgactgctgttgagcgggcagtcatcaaagctcgatcgatctatgagctctgtactaaggctacggataacgacatgactgaatatttgcacgcatgacaccctgtctgcagaatggtcacgcgccgctgtgatatgtcgctaaggacagcagatcatactcattaaagtggctactttgctggactcaa

SEQ ID NO: 14463 - DNA, 431 bp, Emericella nidulans
cagcgacactcgaaagggcgggaggggccgacgctataccgtgtttttaagcatcccaaaaagaacttattaatctgttacctggccagtgcgcgacattcattgaatcattgctgtgtgacaggcgtggaaaagcgctagcgcctatgggtcttgcagacagcgagactcaatgcgcgccaagcgaagtacagaacactgccgagtactagagtgacgaggctatcaagcagatagaacatgaacgagcgtagggaacaccattcggaaccctggaaagctttattaatctgttggtcgctcctgtagcacatgctcttgaccttatacgccggcgcccagtaattcctgcatccatcctttccgaggagaaagaatccgggagccggcttaacacgcccgtgagactgctggacataccacggaataca

SEQ ID NO: 14464 - DNA, 1781 bp, Emericella nidulans
acgcatttgacatggctgcagaattaataggaccgttatgagtttactggtcaatcaattgaccgcaagcaacacatataaaacgaactattaatatgaatatggctataaaactttgcggaatgaagacaaatatcgcaatagcgtgaacgtcagccgtcactctcgagcatccggatacgctgcaatatgccaaccgaggtccatcagagtagccggtatagaaacagagctgccaagtctagtaatgtcactccttgcccagcccagtcatactcaagtcagacttacaatgattcttcgtatcctgtcttggggctcagcatcaagcagtatccactgaatccctctgccgtctccctacccttcctacctcacatacctcggtcaccgtgatcgttaaaggagcttgcccacacccaggccgtccacgataccaggtttgccagttgattgatcctcagaagtccacctttcaaggtgggatagggtctggagcagcaccagaatcccgtgtggaggggcgatcttcactgggtttggaaattgcgctatcctccgcttggtggacattgacaatctgtttcaggctcgagctgatctgcctctggaaaaggtactagtcccgtaacactgatggaccgaatttccgtgcccggcgaaatgagaataagatgatgcattgcaacgacggtgcacgataaagctggaactagctcggctactgcctcgcgaatttgtcagatctgttaggaatggcttgagtgaattcatcactttgtgaaccaaatgcacctgatttctactttaattaaattgcctggttcgccgtgagggacatgatgaatttaggctacaaacaccatggggtgctgcgtaagtactgggtaagttgattcttcaacgccccaagcgtccaaactttcaataatgccttcttaaagtttattcttccctagaatgtgaatacgaactagtgcagagtctacctatcgatggactgacagtcagccccagatcagccaaatggtctcctatgagtggttttgtcttagactctacgttgcgaaaaacacggcagcttaagttatatgagacttggtattcaatgcaatgctgaccttgccgcagtactgccatactaataaatcattgggtatcctttgtaaattaggttatctcgtatagtaaatgaaaaccgtgaaataaccgtcgctgcgtcaagagtcgcgctgagtaaattctcgctgaaccctgattccttgcaatggcacctcatctccggtcaagtcgccttcctggcctttcccttgaactacaattttcgtgtgagcactatcatactctgggcggaagggcggactaccgtgttctgactccaacgaatcgtcctcatcaggaagatggtagaaggagcgtctgttcgctcgcccggcactggtctgcgctgtcttcgatgtgcccagactgacatcattgcctacgatattggtggttgttgtttgcgattggccggtgcggagcagggagggcatgatcgattgaagtcctagaatccggaaaaagaaatggaacgccgggcgtagggtgggtaggcaggctgagacgatgcctgcggacatctcgatcgcagtccatcccactgtcggcgcgagggtataggtggagtcaaggggatcgtaggagaaaaggacgctgaaacgataggcggaccaaagactacgctgcattctggtcagcatcgccatccacagcccgggaaactgcagatacagtacgcg

SEQ ID NO: 14465 - DNA, 621 bp, Emericella nidulans
gagtgacaccgcccgggggtgccttggatttcgagaaggcggttccagccgccctttttaccaaaccatagacacacactaccacaggggggcgtttgttgatcagctgcgtgtatgaaccctctgcacctagtgtaacacaccattatcagactgctgggacatgtacccccagctgtcgagcgagagaccgggttgtcaaccatgtcaccacttctgactgggagctgtatcagatacttacggggaaatatgcggcttccttcaatcttgttagaggagctggcaatcatgtgaaacagaaggttcccgcggctggcgtaacccatgtgcattcgcccagaacctaggaagactgctcgatcgaggagcacatatgcctatactgaccgtcttatcggcctatctgctacgctgcgtttgataactaagctgaaagccatgctggagtatgccagacatgtcgccatggtatgccgctctagcgtacttgccgatgaaagctcttcccacggcatgatcggtagacacttgtgctaagaacaaaccgctggctgtgtgcagagcttcctaactgactccatgggcacacttgacaggatatgctgcctgcggccgatg

SEQ ID NO: 14466 - DNA, 517 bp, Emericella nidulans
gcgacaccatggactcgaagatcggaaagaaggactgacccgacgccgctctagttttttcgagcacatgaggccggctcaagagcgggagggacctcgcacgcatccagagtcaagggaccgcctagtatgatgcataccaaacagcgcgatctagggacaatcgcgcagccgaacgcacacatgcatatggtcaacgcgatgcctgcagcgagagaatggggcagactagccatatccagccaatagtggacctacctaaacgaggatgctgaggacatacgaaggaatagtacgaggctgtactacataacaccgaatagcaccaagatggtgcgcaccaggagcgcatggagggatgggcaatactcgcgcatagaggactcatgctgaccaggctagacaaagcgcagtggttgtcatgaccacgtagactggccattagaacatggccagatagaggtgctcattcttgacgcttgagtccacgattaggaagaacctactgcacatgaag

SEQ ID NO: 14467 - DNA, 2570 bp, Emericella nidulans
aaattgaccggggtgtaaagaagggggggggatacgcggggaccccggaacccatgttaatgaagagatttgggtagaagaatacaatgccgacataggggagatattagagctcctgggaagaagccggggacaataattggggcagtcagaacgaaataagggaggcgcaatgaggagagggtctactacctgaccctaatcatagaatgttgggtaacaaatatcttagcaggccaaaggtatccaagcgtgtattatccacagaaagacaagctttcctacccacaacttattcgcaccagcctctgaaaacgaaggcagtttaagtcccatccaatagcagtcgctggatgcaggtcttaaaaaacctgggcggaggtaagaagaagtcccttcaagtaggtttgcaaggaagtaagttgaatggtccgggactgttgcaaggacccggccggggtggaattaagggtagcaaagcggacttccgcagcggaggtggtagaaatacgcggtctcttcttggcgcgcggtgagggaataatcaccaagctgaatgacgggctcaatataacagctgaataaagcaagctggttcggaatgcggtgcaaagtgggctggtgaaatgaggggcttctaggaaaaaacgttgttttttgtgaaagcctggtgaagacccgtatagcgcaagaggaacaagaataagcgaacataaagcaaaggtcatccctgggggagacaagaccaagggaagtcttctgagtcaactcttgggacaacgtaaaggtattactgaggcacagcaacaaagcccagcgagccttgagcggcagccgacgatcaccgccttcattcccttgaatggcttcgacaagtcctcttcaaacatgcgtgatattgaagaactctcattgaatcatttcagtcatccggcaatctgtaagtataccttctgagtcacaagctgaggtgatgtgccagtcattgcggtccgcttgccctgaagaattgctccacgtttatgtgcagtgagttggcttcgactaactgccgcgctgcctcactttaattatcgccgtcatctttcgcaacctcggaggcaccctgaccgtttgtcgcgccgtaaacatcttgcggccattattcagcttcgttaactagccattccctcggatgggctaggtctagagcttcctttctttctatttttcgtctgttggaatccattcggtgtccatgacatcgcccggagatgctgctccggtcaaacctccgccgtccttctcgcccggcgtaccccgagtcccatccaagacgagataccctcagcgccgcgactcgtctgcgtctttggatacggaaagggcggactccaggatagcgtcgtctccgaccaccccgttgtcgaataccaccgatcttcccatccggtctgcgtccccatccgctcgatccatcaggtcatctacccctcaaatagggagaacgtcactcgggtcaccattggatgggcgcgcggacactgctctagatattcggtctctaattatccggtctttttcacccgttgttggtgtctacgcatctccggacactgatgagctggtgcgtcagaaagggttcaagggcggtttctgggagcttattcgacccttcggagaaaatgtaccaggtaaactggttgttcgcgacagcgtcgggtcaagtcgtggctgggaggattacggagttcggtttgtcgacttgggggacttatgtcgggcccctaatgacccaagtcagggatacaactcgtcgctagcccagcttgaagcagtcctagaaaagcagctggattcagccgacagtctgccaagcggaccattacatccgaaagatctagcaggtctttcctctacttcaccactatataaactatatctacgccaattgttgtcaatcgcgtcagctcaccccatgagacatttcgccatcctgtcgcaagtgtgattgctatcagttcccgcaaccccgcccccctggaatctctccggcaactgtatgcagatacaaatactggcccacagaaagtgcccgactggatacatccagagtaccttcggtactatgtacttgtgcacgacgaggaccgcgatgatatttccgcttctaccaaactttatgatcagatgaagcgtcatttcggcttacattgccacctgctaaggctacgcagcaatcagtgtgtcgtcacagatgatgatagtgtccaggtgccggagtgcgagtggttatccccttcagagcggctttccgaacggccaggtacgcgaaaatatataattatgtctttaaataaaagctaactgtcccagaaccacttgttgatctcgactcggatggtcttctgtatctattcgactctgatgtaatggcaatcaaagggtttgttcgagaactcgtcgcgcagtccattgtcccatttatggaaaatagggttgctgtctggaacgatcaagtagcatcgcgaaggcgtggtatcagcggcagattcatgtcgatatctcgcaaatgggccggctttggaacg

SEQ ID NO: 14468 - DNA, 561 bp, Emericella nidulans
  unsure (1)..(561): unsure at all n locations
gaccaccgggaacggcngaagccgggcgagaacccgagggcccccaacggcatggtagacacccggcgaggcacgcgaggcagggggcacggcagccgcagggcagccgcgacgagccaaccgagggagaccgaccgccagcgccgagagcccagcgcgacccagggaagcaaggggagcccggaaaagggcgacgcgcggggcgccgcgcggacagcgagagacggcgcagaagaaacgaacgaggagaccgggcacaggagcagggggaggacggcccagacagggacgacgaggcggggccacgagggaggagggacggaacccgcgggcggacggccggaggcgggggacggggcggagcgagggggcaagagaacgcggggcagcacgcaggaaggacacaagcgagaggagagcaacaaccaaggagggcccgcagggagcgaaggcggggaacccccagccagcaggccaaaaggcggaacccggaagaagcaagcgcccgcaaaggggggggaacccacgggcagaaacccccgcgggggagggaactcacgc

SEQ ID NO: 14469 - DNA, 960 bp, Emericella nidulans
ccggcgacacatcgtcaaggggacacagctcgtgaaatagcttgtctatctcatactagaatgtagcaaaataaaagcgaaggtattatggctggcgatgaaagaaaggccgcagaaaggataattcatctaaacttccttactgagagaacgttaaaactcagtccgtcagataggtggttggacttacacagttcggccaaaattatccaccagaggggttataatagcatttcggtccccaaaagggttgttctcgtcatcatcatcaggctcaaattccgactcactctcggtatcatattccggtctgtgtgtagaagatgaaggtacagaaatgctcaatggtcgagtaggacggggcggttttggagggttaatggatagcccagtaaaggattcgctgacttcgcggtcgggtgtccagccgctttcaagaacgtcctgatcactatcactatcgtagtccacacttttgtccaacacctcaaatgccatgagtgcggacaccaactcctcattagcatggataagacttccaagatattcctcactctccacgtgttggatgtaccggagtatctgacggcgcagttgtttacacgtctcaaacctgttgaggacctctgcatcttcactcacacgctgcgtctctcggttgacacgcttaagagcattaagaagatttgtgctggcgaccgaagaagaagctagtgtttgaagcatttccggcttctctttctcaaagttgaacgaccggctgtaaagcttcttttccttcttttccttcttcagcgacttgctggacgagtgcttgtgcttggggctactgaggacctttgcaggcccatttccggcggacactgacacggtatggcccaactgaggctcggacggcctttcggcttcccgtagaactttggttcttgcttgtgttgccggttgcttgcgtttcggaag

SEQ ID NO: 14470 - DNA, 1113 bp, Emericella nidulans
aggactgctcaggaagcaccggcgcctaaccgaaacgaggacaagagctatccagcggcagataatgttcctatggagcctccaactatttcttctgctgaaatcaacgttcatttcacaaatactggcgcccagggcgtctcgcatgatcaaccacgcaaggccatggttgaccagccatcaaatctgaaaagtgaaaatgaaagacacagagataactaccagccaataaacaaagcccaactgctccagttgggcatatggcgaggcacccagaaatacttcgagtccaaaggactcatctcgcggaattctcagtttcacggactgacgctggaagagagagaccgacttctaggggtcgagtacaaggctgtctcgttcttatcagtaattgtacctttgtactgggtattgttcttgtgctgcggtattctgggcatggggatatggctagaggtcaataaaccgcaagttcctcgagataatggtctgtcgcctttctggaccggagcattcttcgcggtatctgcatttgtgaatagcggtatgggcattttggatgcgaatatgacggctttacagacggagtatgctcactctctctatgagaatataaaatactgattgttgtgcagtgcctaccccctcatcaccatgggacttctgatcctcgccgggaacaccctttatccctgttttttgcgcttgatcatttggtctgtgagacggatgctgccggatcaacaggcatggaaaacttggagaagtactttagattttattctagaccatcctcgaagagtaagtaagttaaatttcagtttcaggaatatcttatctgaccacatccaggtctatacgaacctttttccggctcgccacacatggtacttactagcaacagttgtcatattcaatggaattgactgggctggatttgaggtcctttcaatcgggaataaagagattgagggattgccaacagcataccgtataatggatggcctgtttcaagcattaggtacgaagaaaccttctacccgagcgcgcgcagtactaatgtctttcacagctgtccgagctggaggattctcagtcgtcaccatttcc

SEQ ID NO: 14471 - DNA, 407 bp, Emericella nidulans
ccgcaactcctggcagaacaccacaggggacagagtctaagacgatttgtctcgcctaagcacgccacatgaaaaaggccaggagtatcaaaagggatacctgctcaatcaaaaggaacacggggggcgcatctgagcgagtaaccgagagcactaacgcaacggtgtcggccagagggaggcgcgcagcgtctaagctaactgcgactggtgcaaagcgacagacacatgctgtacacattgagacagaaaatgagacaacaggctagctcggaaatcactcgacgctgcgacaggagccaagtcaagggacgcaggaagtgaaccggtgtgtacacgctgcactggtgcataagcctgatgcaaactgttaacgacattgaccagaacacgaagctctaaagaga

SEQ ID NO: 14472 - DNA, 1927 bp, Emericella nidulans
ttgatgctggttttgccgttgaagtgtacggcatcgtgaaaatacctgacgtgagtctactccatatacatccgttgctccggaagtggagacaacaacattccccttggatacgaagtccacttggcaataaacgttgcactactgcacgaaagcttctagctgccttcgatacttgcgcgcagcgacgggtggtgccgaccgcggtgcaccgtctgcatttaggcccgctatgatcgtccttgcagctacgccgcgagattcagactaaggactcaggaccaccgggataacggaaacgcagctattatcggtatttgattgggagaccctggccaacggagaccataattcgatactcgcgaaggttgcggaagtcgtcccgctgccccgggccgtcttcgagacactatccatagtcggatcgttttcactgttgaaagcaagaagtactgaacttggctcatagtggggagtctcatgcccgcaagcgtagtctcacaaagtatctcggagcagcgctctgcgcggccagtgagactgttctgtgccaagtagcccccctttattgaaaggctcgtcttgcatgatcatcatattcttccaggctgactttagaccgtacaataatagcaggtcctgatacgccagcagtaagcatcaatcttcacagggcccaggatgaagtcatactggccagtgcgcgcctcgacaaagcctcaccttcgtggatcttacccaaaatggtgcttagcctctcctgcaccttcctctccagatcaagaccgtcaccatcaacgtaaataaggggcttgtatgtttctgggaacgaactattaccaagacatcattgatattcactaatatatactgctagggactgggatgtgtcgcattctagtccatgctgcctggcagcctcgccgggggccgggacagcgtctagttcttatcttgaatggaggtagagcaggctcgcacgttgtaatcattgtacagcgccccgaaagcctggtaacaagtactttcagagccttgtaccaggaaatgcaactgtatgcagggtcgtccacttccccgcgaggggcgcctcccacttcgtgcgacacttttggcccctagagcgacggctgtttcagcacgcggtacacgatctgcgtttctagaaataggggagaagaggcttacaatgtacatccttactatgtacttgtgtggcatgcacctaaggcgatatcgatatggaggccttggtctcataggcctcgttactcttcctgtctgccgtgtttggtccggtcaggtttattctcgggcatactgtggcacaccgtcgcaagggaatgacaatttgtcctaatgccggtacacctgccgtacacactgccacggcgcaccgtcgcccagcaggcacatactgtagccaccagctctatcctgcactatttgcaaatgcagcgtcatttcgtcgctgacgaacggctaaacactcattctggaagattcttgagagagcctagactgaccaggcttgcccccagaatagttgtgctccttgcctcacgaagctgggttcagggcttgttatgctgcctggtataaggcgccgcagccctttagtaaatacccagcaggcggcagagcatcattgatcgactaggtttgccactggcatgttcgacatcattctatgctccatttggaagacgcgccatctgcaagagcctgacgatgagtgtatcgggctgagtaccgggcatggtcatgtccgaagatttcagttcaagagctcatctggttggagaggccaagtcattcgcttattggtgacgcgtaatataaatagctataattgagcttgagggtaaggttgcatctttggaaacggacggattaagtggtaggtacctggcacgagtggagagtg

SEQ ID NO: 14473 - DNA, 268 bp, Emericella nidulans
ttcgaaagccaactcgaatctggggaacgggatgcgaggctggagcatggcacatcatgttttcaattttgtggtcggcctgccacgagagggatcatgtgatagactctcgcctctagccacgaacggccagcgttcggggtttggcgttgcgttctaggactgccgtgggctgcaaccacgccgcagcacttgcgctgcaaaccccactatttgatgcccagtctgagcatcgactagtacaggttattgtctgcatgtctatgag

SEQ ID NO: 14474 - DNA, 1205 bp, Emericella nidulans
atccggtcgaagagcgctctgtcgtcgaatgttgccagggatcttgtacagatctacatggtataccttctcgaacgcggtacgcaggatgctgcgaaggaatacatgacccttgacagagaagtacacggtcccgcgtctgtatccaaggcgaagactggaggcacagaaccagtgtctcataccgcaccccaggttcctcctgtgactccggcccctcctattattcctacgccccaagtcaacccgtacaactactatccacaacagagtcctgtcaacgggggctatgggaatgcctaggcatgaaggcatcacaaactcgcaagacgcgtcagttgtaacttgtctatcaactccgcgatgctagcagattgattgtcagctggagtcttggtttgccctgaccctgtgtaaaacaccaccgttgccctaatgttccccctacgttttttttttttttttttttctttctttttgaactatttaccacctcccagcgattacatgtccgagctaaggggcgggccttcctacctcgcctttactcagaaacgagaccacgtgatttggattgggtggacttcattggtttggacactacctcccttgtattcctatgactaagtagcaggctcattatctatctcggcggtgcgaacgaatttcagatttgagctggtttgtagaaatctaatgatcacgtgatatgcacatatggttttctttgccacccgtataaaatcgagcccatctgcggtctttctactccgagcaagcttagattcgtttaatagcagacgcttgcactttctttgacagtgcaccgtaaagataagaacggctacatggaatcacagtcgatcctgcctcctccaccccctcctgaggatgccagcgcacctccacctcccccagaagagtccgctgctcctccgccgccgccagatgtatccgcgcctccacctccgcccgaagaccttccaccacctcctcctgaaccggaagtaaagaaaaagaaggtgggatggggtaccaagcgtccggctacgacgccgttgagtgtagaggagttagttcggaagaaaagagaagccgatgcagcagcggctcgggtacgtccttacactattgaccatactggttcttggctaagttgctatcttaagagtgatctgatggctaacatttcattttatgacttt

SEQ ID NO: 14475 - DNA, 461 bp, Emericella nidulans
ccggggagcgtaacaccctgctcctcggttgtacggccgaagggtaggtgcccaaccaacacgagccgagcggggggaccgtatactagacgatcatccgtatcaccccgggccctgattgtaggaggacggctcaactttctcaagggcccctctaacggactacggattggggctccgccggtgagggctgggtgggctctaccagttgagccggacttattgacgagcgctggcagggatcagtaccaacaggccacagctgctgcacgggggtggctgacgccagtcatcttcaagagaccgccggataggagaaagggaacgcaacgggtaaaatcaaggggcgggagctttagaaacagggcacctgaagctgggaagcttgctggatggcttgcaaattacccaacaaaaaacctggaacatgggagggaacaattgactctttaacaccctta

SEQ ID NO: 14476 - DNA, 1371 bp, Emericella nidulans
agacgtacaatgagcccagggcttcgcaagcagtgcttcgtcaatcatcggcacgaatttccacttatcaagtttccatcctgggtttccctgtttcccaagggggccgttctcatcgtcccgccagtcatctgcagtgagaccaccacgcccagatgcacgtagacgattgtagataccaaagtccgagttcgtttgcttcatgccttcgctaacactgcgcagaacatcctggacatgcactccgtagatatactcctcgaagtctgagaagatgacatagtgctgtacgcattccagcgttgttcttaaatgcacggggatcttgtccaaagcttcggtagcgcctgttttcaagatgactaggactttatccataccgggtagatgggcgcaagctgtcatattatcgtacttaggcgcatttgtcacgttcttgatctgccagtccgtggtggcgccagaattatcactgaaggcccaatccttgcgcataaaaaagtagaccgttaatatccctaccacggtgagcgctattgaagtgcagcaccgtagacaacgacgcggcaagtacgaaaacggcatcttagtagcaattgatttgcttctgactgcgaagttctagagctaggatagcattgcgcgtcattaagttacgttattcattgatgtcgaattctacttcgaatatccgggtaagcgcgaccgagatcaggtatagagcatgatgtaacgcaagacacttttctctgagagtgcctggggtctgcaagagcaccataagtcggctttgatagtttcatgaagacaatcgcatccatacaggagttcattgcaagaaagctcccaactgggtcgagtctgagatcatcacgtggattagagctgccctaatgcggtactcgactaaagggcaagctggagttggcatgctaagattctgggacgtactaagtgatccccggctgaagaggaaataattggagagatggcattccatcaaccaatctaggccaaggggtgatgtgtttgtataagcagtcaccaaaagactgctaaaaacacccatatgagacaattgtgagtgacgagcaaaagagtggagtgtcacaaaggtagaatatgcccagtatattccaggaaggtgccagagctaatgaggaatggcagcttccatatttagagtgtatctctccttgaaggcagcatgccggaggcgtccaacgtcgacccaattgctgtattcacccggacagtcgtcagagttgtcaatccaatcagagcgtcacaatcaatgctctttcttgggatattgagcccttaaagggtcctccacatccttcgacccatgtgacgaagcattgcaggata

SEQ ID NO: 14477 - DNA, 906 bp, Emericella nidulans
aggcagcttcaggcacgggtggagatgtggagcaagacgaggcggcacttgataaaggatctcaaaggcggagagtgccgcctaacacatgtaaagagggtccgcgccgacgctgcctgttaactagttacctatgcactgcttagtcacgaaaaactcgattccaagatcattgtcatcgctaccacttcttgaacagtatgtagtggctggtctcgccgtcgatcatgaccactattctctgtcagcaacttgttcaggacaggaagggcacgcggtgtcctcctaaagatagtaatagtaaatgatgggcgaaaagaggcgacatcactgatagtcgctgcataggtggagctcagagttccaggagcactcaacggccgcattggtgggcattaaggtgaagctggccttgacgttgcttaggtattgaaccctcctcaatgtgctgccataggtgccttcgcatgtagaaagtagacaccgtcacggctcatcctgcgggtacggtagagatgttggcgaagacatcggttcctcttcgctggcgaggtcgtccttccagctttggttgcagtctagtgatctcggctctttgacagtgccgctgagatattactggtccgccagggcagagctgaggctcagggatctcggtcaccctgttcttaggactttcgaaggtgtccgggtaaagagagggagagggcaaggcgggcaaggcgggcaagagcaattgagctaggacgggttagtatggctcgaacgtgcatgatgatctgactgacacttgcagccatggaggcagaagaaccggcaggcggagagggtacgttgtcaaaccactttgatcactggcttgactttgggaaggttgagcagtgttgataggccgacagtgggcga

SEQ ID NO: 14478 - DNA, 1698 bp, Emericella nidulans
tcgagccctgcgaacttgctccgaagcgcagaattgctcggcatatgcggatcacagtcttccccaaaatcatcgccattcatctttcacgatccatgttcgaccggagcggctccacaaagaatgctgcaaaggtcgctttccctgaacggctcccgctcggtgggatcttgagccaaaagtggttcaaactgctagctattgtctgccacaagggcagtcataacagcgggcattatgaatctttccggcgcaaccacctctaccctccatactcaacacccagcgtattcagctcctatgcacagagccgcgcagccagcgagaacccctcgcgtgtggcaagcccccgtcttcctgcgagtagcagcagtaccgagccgccagctctaaatatttcaccaccggcctcaacttctactaactcaccgttgtctctaacacctgattctccatctagacccccatcagcaaccgatctcaagagcccccgtccaacaacatccagctctcgtgtttccttccaaagcacacactcgtcctctaaacagactatttctcccacttctgcagcacgcaactcttcatcacttgataccgctcgtctcagcagccccgcctcgagaagctcacttgcagaacgcaacgcctcggcaacagacacagaagccagtgcaagcgcaagtcttgcatcgcgaatccggcgacgtcgcaagacagctgataggtggtggcggatctcggacgagaagatcaaagagtgcaagacctcggacgtgctgggcatgcagaaggaggtgtatcttttgttctatgagatcgagaagtcaggctcttaagcttctaagctattgattcctcatattttctgtttgaaggaaacgtggatagattcaattgacttttgtgtggttcgatagtatatacatttcaggacttgggaatctgtatagagggctacaatcgcatcagtggacatacgggcatttgctgttcctactttcctttgttctgggtgggctgaatacacggagccttgtgtcggttgctcttctttatttcgtccctaccatttatcctgaaacctgaattagctatcattaggtccaagttcatcaaccttcagaattatagctctaaatgtaaagaattttatatacctagtgacatcaagcggatgatctatccgggggaaacggtacctcaccctgctcctcgattggagagacgcaccacttcaaagtactcagtcctcgctcttttccctcaacaagcttattatctatacagcagcaggttcaagaaacatagccaacaagaatccctgcgtacctatcgtcacctgcagttcgtatctcattctcgtgcctacggtatccccagttatcagtgcatacatagactttcataccacggctaatattgcgtgttcgaaaatagaacaaagatctttttcgtcttttctcaaagaaaatcaacattcaagggttaggatgagacgagataggtggacttgcatggtatggctcgatatatagggcagccatttacgatgctacctaaatataaactcatctatatttccttccataatctgatctagtattcttgccgtttggtgactctgcgacctgttcttgattggtttctatctttgcggtggaaccgcgggggggctagccctaacaacttgctaca

SEQ ID NO: 14479 - DNA, 381 bp, Emericella nidulans
cggaacgttatccgaggaaaccaccggggacggcgcgcaccgagcaagaaccccggggccagcaacggcatggtagacaggcggcgaggcgcccacggcagggggaacagccgccgcgggcagcccgacggccccaagaggcagacggaggcagagcaaaccggacaggcgcgaacagacccagaggccgcaggaggccgagcggggaaaaggccagagcacgacgccgacgagaggggggccacccagacgacgcccaggggaggacccgccacgaggagagcgcggaccggaagaagacggaccagccgcaaagcacccagggccgaacggcagccgacaaaacgacgagccgtcagcggccgaagggagacggggcgc

SEQ ID NO: 14480 - DNA, 2142 bp, Emericella nidulans
ccgccgaccagacctggtcaatgtttgagtacggttgtcgcggggagcatagtgaaaagctatgtagcttccttgaggtgtaacttcgagggatgtggctcagaatctcgaagaaataagtgatccatgacttacctatgttgtactgttttcaattgcgtcgtttgtcttacttcatcagcgtatgagaggtcaacagcgtagcgatgctcatccaacttctgcccctccataatgatgctggtatgccgtgaacgatctgtttgtgctgtttgctctgcttatctgacaaaaccacacgctggtccacttagacctttccattcagcattctgattggaaaatggttgaagaactacaacagtctaacaccgctccttgacctcagtctatcaacccccaaaaacgtataaaagcattagatgggtttcgctactctgtcacatcgaccagacaattactccggcggccctccgtcgggctgtttagcccgagaggtagatagctatacggggacatcgcaaggctgcgtatatttgccgatgtcgagttgacgccggcattttcagcctcgctgttatgaggcagcttcgttcattgtctcttacatattactgggcatttttaaatttgttagaggattatcatgccttaatacgatgaggctcatcttctccgcaatcatccgccggggcgtcactctcagccagtaacaacgacgcattcctcgctgcaaattgccctgctcagtccttagactctgtagcagccttacaggctcgtttatttggcaacatttgggaaaggcagctgtgtgggcatgacgtggagcatgcagctgtcaaaccttccatgccgtacgccttccacaaccgggcgtggacatcggggcactacgcttgacgaatggcaaagagggtgtctaatcgtaatcactatcttctatagcacattttgcctacaaaaagggccgtgctcccattgtaatcatgactgcttttcagtcttatttctcccgcctttttatttgacgaagtcggaatatatattccatgtttcaccgtcaaaatgaggtacgtgctagcttttctgtatacagtcaagtatttgctctgaaacgagaacactgtaggtattgcattgccgaaccaagcgagtacctcgtgctcacaggagccggtattgcagacattgagatctgcaagaaggcctgggtgtggccgtggcagcgggtacagtcaacaaatatgcagttcgatcagaaagtgttgaccaactgcagtgcgcaaggatctcagtcatgccattcgatttttccctcagccttcaagctatgacaattgaaaagcttcaattttcacttcctgccgtattcaccattggcccagaggacaagctgtcgtccctcaagaaatacgcgctcttgcttagtgggaaaactggacatcaaccatccactagaccagctgcagcaacagaagacctaaatacgccaactacaagaaatcatgtccaagatatcgttaagggtatcatcgagggtgaaacccgggtcattgtttcgagtatgactatggaggagatcttcaaggagcgccagatctttaagtcaaaggtcatcagcaatgtccagaatgagcttgaacaattcggactgaaaatgtacattcggttttgcttctcattcaggcttcagctgaccatattctagatacaatgccaacgttaaagaactccaagataccaagggcagcgagtattttgctttcctaagccgaaaagcccaagagggagccttgaaccaagcgaagatcgacgttgcagaggcccgcatgagaggtgagatcggcgaggctgaaaagaagggacgaacaaaacaagaaatatcgaagattgatgcagagactgcggtcctagagacgaaacgcaaggccgaaaaggctaaggccgactcggagcttttgaaccgtcagacagagcttgactcccaagtggagatgggtaagatcattgcaaagcgccagactgaatcgagagatgcagagctgcagaaacaggttgagaccaaacgggcagagacagagctcgagcgcctcagggctaagcaggtcacaaagagtaaggtagagcgagagtcagctc

SEQ ID NO: 14481 - DNA, 587 bp, Emericella nidulans
  unsure (1)..(587): unsure at all n locations
tgtaaactgtatatatgactagctcgaggagtgggtatcattcagagcgaggttgtgaaaacggagaaattgtatctatcaagaaagggcactgcgcatgcggcaagttgaccagttttatcattagtatctttgacttggagcttaactcggctcgtatccactattaccttgaactggtagcggtgcgatccgctccgaggcctcaaccatttcaccgacgtagaatccagaccctaattacccaccggatacaccctccatggaggctaaaagcatttccatcccgcgcttggcacctcgagctggaaacaggctccggctttgattagaggaaacaaacagatatgcagcagcaaacccttatcgtatcttccttccactcgtcagtaaggcagaacaagtaactacaattggcgaatggtacgtggaagagtgatgcagacatggaactaggcggaggttctcttgcggcgcaggtcccgggtctgtgctccagtgcaaagggaaattagccggtaagggaccaccctgtgtgcattagttcaggaaactggtgcctgcngatgcagcccgtatggtggata

SEQ ID NO: 14482 - DNA, 1074 bp, Emericella nidulans
acacccacgagcaagtagcaacgacagctctttgaaaggtgttcgaccggtgaggaaattgcatgggagatgcaaattcacgaatgccccgtgaaagggcaggagcctggggaggaaggacggtgatatcctggagtaccatggccacagcggctgcaacttcaccttcagctacaactgcacgactaaggacatacataatcaacttatgcaaatgggttgtgttacttccatcgggtatctcaattcatgcaatgtacttctgactcaacaccgatctatagcgcaatgatctgtatattctaaaccgacacggctggctcaaaagaagaacgtgtttccttctgcatcgcgtctcgttgtacgcatcttctcttcaaattctggtcccggttcgtactcccgccatagacttgcgggaaaaatgtgcttgttccgctcgtaccaccgtctgtcgaccaccttcgttagcgtcggatctttgtcgttgccttcgagttcgtcgttactcggccggtataagggatcatcggtgggaggcggtggtggaggtttgttggaatagtcgaagagcagccccccggcgctcgagaaactgggaacactgtttgcgataaagtagtacagttcgtagtgctagagatagctgtcagcgaaagagtcatgaccagactggacaaagtcttacatgtggaataatgacatctcctttaacaagcatcaagtcatccacgctaaccctcgcccattcccggcgattgtacttgcgtcctttcgatgccccgctggtaccgctgacacccaattcggcacctacttttcggcatcgatcgagcaacagccatacttgatcgcccttctttaccttggctgtaccggcaggtatattcgttccatcgtagaatacaaaagggaccatgatctcagtgttttttatagcgtcctgcatgaccaaaaactctcttcgtaaagcatctcgtgcttccgcttccgctttgagcgcacgttttgtgagagccttcgggaggaggtggcgccttgggtttggtgtaatgcgacgagattgtgatgtag

SEQ ID NO: 14483 - DNA, 1915 bp, Emericella nidulans
gactttttgggttaaacgggctggtgtaattggcctttgacctggtaccgagttactcatccagtcatgtgtgcgataactctttaagccaaggacctctcagttcagctctcatagggcaatagttatttcattttagatatataccaggcaacacagaagcaggttcatttctcaggctctcattccatttactggtcgcccgctgctcaggcagcagtcacgtgccggagctcggaataccgtcgattacaatactcgtatggcaggaagctcattaacccgattaggcccttctcctcttccgccttgactgctggactcttttccctcgcgtcagtttcctcacccaactcacctccttcgccctcttcgcttctcgtcacccccaacttgtccttttggactcgtctattctccttctgacgacgtacatctgtgggtagctggtgtgacatttttcctgatctatcttctgcacgatcagctttacgttgaggtaaaaaaacaaaacacttttgccgaacccttttttcgcatcctttgcgcgtcgtatattctagcgcattgagctcgattctctcgattctctcgattactgcgctatactcgtttattagctggtgttttgattgttcgcaccggttcacagcctcttgcgactactcgctacgaccgatcctcgaaagaacagatgaagctataatatccgcattacgcagcaatcatgtctttcggcggcggattttcaggattcggctcgaataaccagcaaagctctggctttggaacaggctctggtttcggcacgagttctggtggaggtaggtccatccaatccgtttgacgttcacgaaccccaacgcctttgtcccgacttcaatcttgctttccctcgttgtttctatctcgcttcctttcgtgatcgatcgttggctggcgcttgagacgtcgatccgtgacggccctgtaaggcttccgacagttaatctctccgtgcggagaccatcgacgctgagcagctcagcaacgccacaagagaaaggatcgcagcttgatgacagtctctgacagtcttaactccacaatctaggctttggatcaacctcgtccccatttggtgggagcaatactacttcaggtggcggcctgtttggaaatgcctccagcagttttggttccggtggaggtatgtgcttgacgggttatgtttcgatgagcgagcgatcctttctcttttgcggccaccttggacggattctctgtcgccttgcaacgaactctgctgggtttatggttcaaatcgctccgctccctggcctctcgacaagtgccgaaggaacatatcctagagttgtcgattagcagggatccgtgcctgggatggcttttgttttatccgaactactgttgtttcttgttgttttcttccgttactgtttccttgtgcttacgcgcggcgctaacccacgtcccatataggatttggaacaaacactcagaattcaggttcagcattcggaacccaaaaccgtcctaccactggctttggctcgacgacgtctggcggcggcctgttcggaagcaacaatgccggtgcaagcacaggcggtggatttggtggctttggctctacgagcacgagtgggtttggtagctcgaacaccggcaccagtctgtttggaagcaagcctgcaggaggagggtttggcagcacaactggaactggaaccggaactggattcggtactggaactggcttcggcagcagcagtggctcaggctttggtggagcaggaactgctttccagcagggggtcctccttctgaggggacaggcagcactcccttcagccctttcactgagaaggacacagcctccaatgttatgaacactacaaagcatttcgttcat

SEQ ID NO: 14484 - DNA, 446 bp, Emericella nidulans
cccgcatgaggcagacacatccaagcttttttcttcggtccggccaaattacttcttggtctgtacgaggaaagagcctgtgttgatgactgtctattcttccctctaccgtggggatgaaacactccactttgaactccagttgcttacgacttttccatcgacaagcttgcattccttcacggcccttggaccaccatgccccaactgtgcacctttgccgacgcagttttttgtgcagtgtaaataagtgcagtccgcgtaatacctgagactgtgatgcttcttattctaaaaacacttaggggacgcctccttaaacctgcaacgagaatgctctctcgcatatgtatgccagatgggacttgggagtcaaggcactgttggcgtagatctgtgcacgcgccccggagcattagctgtagtactcgtcttttctgatgcgg

SEQ ID NO: 14485 - DNA, 713 bp, Emericella nidulans
ctatattcatcgcgtgtattgcttctgcaacaacttcgcgatcgtctgcagctggatgttactcgttccctcgtaaattgctccgatcttgctatcacggaacatcttctccgcgatgccctcgcggacgaagcccatgccgcccatccactcgacagccgagccagcaacgcggccggctacctgtgaggcgtaaagcttggccatagcggcgtcctgaacgaaatcctgacccgcttccttcttgcgagccgcattgtagacgagggcgcgggcggcggcaatctcagtgtaggcttgcgcgatctggtgctgcatgccttggaactctccaacaagttgcccaaattgtcggcggtcgttccagacgtatctgtaaattttgttagcggctttgtctttcgcagccatttggagtgaatatgtggtgattgtagcagacttactttgcagcattttcccatgcccctagtgccaaaccggtcatctgagcagcaatgccgatacgtccttcgttgagtaaaccaatggcatatttataaccctggccttcctcaccaagaaggttacccttagggatgacaacgtcatcgaagttgagcacgcaggtcgtgctggccttgatgccgagcttcttctccttcttcgcaatagagaatccgggggtgtcttctcaacaatgaaggcagtaataccttgtacccttgctggga

SEQ ID NO: 14486 - DNA, 561 bp, Emericella nidulans
cagggtcccgaacctatctgatcttaatgataccttcacgttggcgcccaacccattttttatattattacagtccgatccccttaccggggcggtgttcgtttccaccctcggccccgactggcctggcaatcgccagcaaaggcgacctgctttgcctatgtccatagagtctgtcattcctctgtccacccccccactaactcttaaagacttgatgcgagcacttctatgcagactttcctgtcgacaataccctaatcccataaggctggacaagctggcttaacctatgcacagcagccaccgttagccactgccattggccggtcagcagatctatagctctcagcagaatatatcaactatatcgatgcaaagcacttatgagtttcccacggagctagtgagttgtacccgtcctgagcgcgcgagaaatgtttaatcctcagccgctgttcctcccagtggagagacctcccccgtacctcggtcatgcacatactccaaaagactacgagcactctgtcccaggcatatacacaaccgaaggcccgaaac

SEQ ID NO: 14487 - DNA, 1546 bp, Emericella nidulans
tccggcgccgcgtccctgatcttctagccgccttcgctcgctttatcaagtccgagacaagtgttcgagaaacgagacttgcgaggcgtgctttggagcttctagctattaccgcaacagataacactattttcgaacatacagagccgctacttacccggactattcgcgattcaagctcggattccattaaagtggcggcgattcactgcttaggaacatgcactatgtttggtggcggtggggatgaggctattgaggaccagatgacgttttttctggatatcgttgcctcggacgggcagtccatcgatgcgcaagaaggcgctgctacctgtgtcaccgcagctctccaagaatggggttttatggcgacggagattgacgaccttgaaagtgagagcgaagagtatattcagatattcatggatcaattgagcagtggcgatccgagcgtacagattgcggctggcgagaatatcgccttactatacgaaaggagctacaccccccaggagcactggaccgatgagggcgaggaggacagcaatggcgaggacagccttgatagtgaatcagaagaacaagtctaccacactggacctaagcgtgtcaaacgctacagtccttatcacgacactcccgaactcgaacgccaactgcagtctctcgcaacagtgcatagcaagcgcatcaacaagcgcgacaaaagagaccttcacaagaactttgcgtctattcgcgctactgtcgcagatccgcgctgcggcccgatgcacagcgaccacggcagcaaactcaccgtcaagatcggcagacaagggatcatgcatatcgatcgctggtggaaatggattcgcctcaactctctacgccgtatactgcagggtggttttgctgtccactatttcgagggtaaccgtgccgtccttgataatcttcccgtaatgatggttcgccggcagacgggagaccgtcgcacttcccctaccggtagaaaggaagataagattcgccagaatcagcgccgggcaaagctcgagtttgccgatgacgactactactgacacgaatttatattgcttcgaaatcctccctatgtcgccggtgtaatgcgcggccgtcctctattacttgccttctcttttttttttgggaacgcagtctgctatagttgtttcggccaagcctcggcctatgttgttagttttactctggagcatgctggcgaagggtttctcgtgacttgcagttgtttactacgattttggttatatatacatcaatttagttctatcatttcttgcacctatcactatggtaaccctctaagaagaggaattgtagacggctcagctcaccccgttaatgcaaatatatacatgtgtatatctatttttatatgcaacatgttgtatcgtatatgtcccacgaccgaataagtaatatgaaaccgactgcagaaccatacttcacattcttcaaagacctgcataaatagccgaatagcattatcccgtatatatcgtcactacccggaaatttt

SEQ ID NO: 14488 - DNA, 576 bp, Emericella nidulans
agagattctaaatgagtcgtcgcagtcatgacaaagccggtcccgagatgcactaatggagtaacaacctccggacttgttctgatcgtatcccgtaaccaccagggaggtaagagacaaaaagaaaaaaaaaaaggagccaatcagacccagcggccgcgtcaaaaccacaacctatcgtttaccaccaggaagaaggtccagtagaaccagacgggttgccatagccaccaccgccgtagccacctccatagccggcgccgccgtaagaaggagcaccaccataaccaccaccgtagttgctcgctggagcgccgaaaccactaccgccgccatacgaaggagggccacccatgccaccgcccatgcgacgcatgtcccgagtggcgttacgccgcggccacgacctccacggcctccgcgaccgccatatccgctgccttcacgcgcaatactctccaggaaagagggaacttcctggtgagcctccttgagcaggtcaattagatcacggacgacaccacggttgccacggttaaagaaagcagtggcgataccggtgttaccagcacggcc

SEQ ID NO: 14489 - DNA, 2355 bp, Emericella nidulans
gtaatctctaaaccccagatttgccatcacacgaatacaaccgcagattagatcttgattccagtgcagaagttggctagcacaaagacaatagtttcggtacctagcgctggccagagcgcgagatgagatgaggcaatattccaagacattcctagatgactcgccgtcgctaccgcatgttcgctttcgaataacaagaacacatgccacgatgtccatgacgcttgatggagagtacaaggcagatagggcgctggacgtcgaagtcgaacatgaacctgtcagaaccagtacccctgctgatgaagagaagtcgtatctccggggacggcggttgacaagtctcactattgggtatgtcggccatatcacatactcagtacgacatgtaatagctaacgcccacggaaacgaagacttgctattgccgtatttctctcctcgcttgacgcaattatcgtcagtacctctctggcagccatcgcggaggacatgcaggcttttgacaagagtagctgggttgtttccagctatctgacaacctacttcagtacaatccaacgcgtgcatcgcaagaagcatgatactaacgctaccaggtttcttaataatatgggcaaactttagcgacctggtaggacgcaaggttatgctcatcactgcactcgtcatctttcttggcttctccggtggctgcggcggggctcaaactatattgcaattgtaagtaaagactagctgaatgagactcttctaacagaagtctttgacagaatcatcctacgtgcgttccaaggagccggcggcgcaggcatattcagcatggtgcccatcattacagcggaaatggtgcatcccgacaaatatgcggtgtacaacgccaacatggcattttcaatcgcattgagctttcttctcgggccgctcataggcggtgccctcgtagaccatacgtcctggcgctggattttctacataaatctcccccctggtgctgtcggtatcttactggtatggctttccatgcccggtgcgtttcctgatctatcgatgcctacctcactctggaatctcccaaagaatgtcgacttccataggagggtagattaccctggtttcgggcttcttctggctgcatccattttcctgattgtggctattgaagaggcggcggtgttgtatacgtgggataatgccgtggtaattgtgctccttgtgctgtcctttgttctggtttgcgcctttctcacctggatctggttccttcaccgcagcgactctttcagagagcccgtctttctctgggaatttgtcaaaaacagggtatttatgggaacgtgcctgtacgtggccctccctaacaagcataagagatgagagcatactcactaggaaataaggatgaccctcctctctggtgttcctttggtaacgctcgtccttgaactccctggccgctttcagatcctcaacaacaactcagcctttgattccggcattcgcatcttaccactgacattgacaatcgccatatcgtcagctttggcaggaggactgaccgctcgaggccgcgtacccccgttggtcgtgttctccgccgccgccgcattgcaaatcgtcggactgggcttgctgtactccgttcccacagactcaccactgagcgcagctctatacggataccagaccctcattgggacaggcgtaggcatgagtcttgcaactgctatattgacggtcccgtcgctcgttagggagaacgggatgtgtaagtgcccgctcctccccctataccaagatagaccccatacttgctaccccgactaattgtaagcagccggagcactgggaagtatagtgcaatttcgagtcctcggcggcgcagtcgggctatctgttgccacgaacttgctcaacaatgctgttcaagaccgactccagggccagattggtcctgatgtgcttcatcgtatcatggaagatatttcctccatggtatctctcccagattctactcagatgtctatcagggatgcctttgcggatggctatcagcgccagctactcatggtattgggattttgcgctgctgagattttggcgttggggatgatgtgggagaggcccatgaagaggttagtttagtttggcttgaatcatctagatatcaattctctaaacatgtccacgatgtctgttgttgaagagtaaaggcagatggggtgatggaggtcgggactgacttgagctggtcagcaccagtacctatgctaatgaagagaagctctgtcttaaagatcttgcagcagcgcctaatgaccttacgcttcggctttctagattaataaactc

SEQ ID NO: 14490 - DNA, 531 bp, Emericella nidulans
aaagcaatattagtgctaacgcgctgtgcgcaggaatggccgctgacgatcgacacatcccactgcatccgtcccagaccctcggtgtcagagtccgttcatgaaggccttagctattcggtcccgagttgggttctgaccgaccgtgcccacggtcgtcgatgcaaggacggcgcagtggcccatcacttcacctgcagcttcaggttcctcctgcagaccacgcagctgtggcacgtcagcctgccaaacggctcttgttagcgagcatcgctccattcccctccccccgcgtctcccagttccaatcaaggggctgcgagcctttcaccgagccccctttaattgggcgacaggataacacagagaattttcgccgtctcgtgattgaaggcagactcgaaaatcggccaactattactcgtctgcgcggtaaatgagctacgcgcctgatttatgggagcgagtctcttgcttgatgttcgggtttacaccgcatgcgcttgccagagtaaataattaagtttgggg

SEQ ID NO: 14491 - DNA, 2161 bp, Emericella nidulans
tgattcttggtgtcagacaaaaagtccgtcgtcgatcggccggagaatatggacgaccggcctcggttccgtttcgacagcacaatctcgtcgaacagagtaatccttgggtccctcgccttgggattcacccgttccctatcactgataaactcgttgaaacctggtttggttagcacggtctccggaactcagcttagagcgacttaccctgagtctgtgatagaacaccgatatattcagcatgttcactaggcaagcttttgcagaaagcatccatgtcaaagctgtatgtaaggcctgccttcttcttgtcgccactagctggtttaagatattttttgtatgtatagaacaggctggcaaagcatcggacgaacgcagcccgaacctgctcggggtaaaatgccgctgggcaaacgatgcagatctggtgggcgcatcggttgtggacttgcgtcttacacgatacacatttatacatattctcgtccgcgcgttcgtcgcagactgtgcatacagccttgtcgtcccatggttggagctgcaggcaatgaccctccacccaggacgtgccgtcattgttgtgaattggctggatagcaggctggggaacgatggtggaggcagccacagtagactgcgcatagaccgaaggggcatatgtggactggaaatcagtgttcaacgtgctgacagataggtttggagcgtggccaaggaaaggtgcactgggccgcctgggaacctggcgcatgtccatcccgaaggacgagcttcgacgagaggcagcgtcaaagtgaccggatcgcttctcgcgaagggatgcttgaagcgccatccccgagtcgttgcgcggggtcgccggcggcggcgggaaatggccagagatgggagaactatctctcggggatggcggctgatccaggtttgaaagttgacccagtgcccggtcgatccgagctcttagaagaatacccacgcgacgctgtttgttcattgcgcgcgtgcaggaaagcattgaaaataagtggcggatgtgaggtgagggaaacagaaccctgaccaaaagcattcgagttgagactgacgtacttggacagttgcgtggactgcgccttggatgtgtatatggaggagttttcagacatgaaagcatcaaacgggaaagtctcgatggcgtaggcaggagggccgacgggcaccccgtaccggctgtgatgaggagcggcgagctgaagcagcgaatggagtttccttcgctggtggcgggggagtggggttggctttaccgtgctctcgatgatatcttggtcaaggtcgaccagaacaaaatcatcagatggaagttcaaccttctcgtaccgccgctcaataccgacaatgtacgggcaaggcgcttccagtgcttggatgagtcgtgcagggaggataggaattagcacacccgaccaaggaatggggaataaaaggtctaccaaagcccgagtagcaaggtacaacatggacgtgtgcgaggacaaaaagatgattcgggattcggtcaaagcatactcaaagagtattatgatgttagccagtgacagtgtccggaacagggcgtataaatcagtgtttcgcgatccgggcagctcattggtagcttccttgcgggcgaacaagcgtaattcgcgcacagccagctccacttgggttttggaggtgttgggtgcgaacgcctccgtgcacaagttcatcacatatcgttccagaggctgccaggaacccatgcggggcgatgctgggggaacgcgttggacactattgtcggtcatgggaacaactaccgccttcagccactccttccaaaagctggtcatgttctcctcccgtcccaggataccgtaggctctaggaatccagaaaccagtatcgccatcagtcagcccctcgatcttggatgccgctccgtgacgcaccgagcgcaggagatcggtcatcagcccaatcttctcctcgaccgcgctgatttcgtcttccaattgttctctcgattcagacccagatggcaccgtaggaagctgggccagaagtcgagagagcttggcactaacttgagccaaccgttctcccaggcatgctgccaattcccgttcctgtgctgtcatgtaacactcccaca

SEQ ID NO: 14492 - DNA, 2733 bp, Emericella nidulans
atctcataacgaggatgcccgcctcgtgcagccgcttgatcacatgtttccggtttgtaactccaacagccgaaacaaacggcttcgggccatgcgagataatcacatcgattagctcgtccagttttccacccgtatagtcatggtttgtcttgcgtgcgttgccgccaatctgtggaagagcaaggtcgacaccgaacggcagagatttgtccttgagcaggctcttgagttccgtgagcatttcgttcatttgttcgggcgtgtagcctagcccaccaatcacgccaagccctccagcgttggagactgcagctgcgaggggcgccccagaggctttcgccatccctgctaggaggacggggctctggatgttgaggagcttagtaagaggggttgtgattgacattttaacggtagaatctggatcattttagtatccagtaagctagaagttcgacgggtagacgcgattacctttgtattcctgcttttatagtttgcagtagtttaagaaagcccctgacaggattttgggtctaaaaggtaagaggacgaggtgggaacgaagaacagtggaagtcctagtagataaatagtataaaaccttttcccgtggtaattaatcggctattcaaagctgacttagtgcatatgaagagaggagggagagctggacagctgctggaaatgcggggaaacggaccgaggctcacattgctgttgtctcggccccaacttctgaactctactaatgcctcgtatcggcctcacactcgcagttttgtttcggccagcagttggatttgggcatgcgcctccgtacactggtgaagatgtggcttaacgtgtcactgtttaataccgcccactcttgtctctcctagatcctacggcttgctgagcaaactgtccgagtttaggtctattcggcttcaaacacagctttctgtgtaatattcttgcgatgcaatgagatgcaatgaaatgtgcagaattgaggcccatttcagttatgagtttccgttgtgaagctttatcgatcgcggtgtatgaacgtaatcgaccacgatgaatgaccatgaataatgtgaacgatgtacataatatctagtggcgatgggtaactgtacatataattggtacgtccagtcataccaaaaaatcctgctaactcatctctagccacgtcttttcccggtgggagacgttgcggagtattcggcgcaatattctgtgtttctgtcataactgtaggaaaggcacgagtatcggcactatcaagcccatcgatggccacgccacgcctttattcgccgatgccgcttgagcctttgctatcatcgcatccatctccgtcacagaggggatacgacttgttaccctagcagcgaccattaaacttcattcgtagcattgcaggcataatcaaggatgacttactcgtccgcagcgtcagggctttcggtcgcagccatggcccgccttgacccgtatccaatgtcgttaccatctgcattcgcagctgccgaagcaatcgcaggcgcttccgagctaacggggtcagtcgtcggcaaagggccataatggatgggccctggtggaggctggtaatttccaatagcttctcctggaacaaaagcaagagagcccggtaaactgcgggtaagaacgctggggtgaaggccgcggagcaaagattcgaagctggatgcagagacgataatgcatgacagattcaagatgatgaggtagccggtggtcgataaatggaaaaccttgaacttcattgtggacgtgcaggcgatatctcggattgaccgtggtcctgtccgcgtcctagaacgccaatagtggaagagatgagtggtgaatgaatcgagcctttgaggcgcgacacaaagatatgagggactcatggtccaaattctttggcaaattgtggaatatgtttaatgcccagaatgagagtcgaatgcatactctcgatggaatatggcctcggccattctctctacggcgcctgaatattcgagtctgtgggaaatgccatataatattaaacaagtactagccaatggaagaccttggtcttaccattcttgctgaagtcattcggaaactttatagatttgtatggtatgggcatgcgggtaagggttcgagacccagcgagggggtaaggcatctgaaagggatggatggcattagacgcatccatgcctggtatttctaactgagtaggctgagcactgctgtgcttaaatgagaatctcacatccagttatatggaggagtgatacccttcactcgtggtacttagattcgctatatcaattcagataccgtaccctgctgatggaagtttccgccatcactcattctctgagttgcgatccattcggcgagcgtggtacatcataatcagccgcattttgtgagttttaggggaacaatcggtggccaaggtgctctgggatgacgcatatcagtgaattgctgcctggccgttctgctagcgagaagacggaggtggttagagattagctcctgatcattagtaacattctgaggtacaagggcagcaacgatgtacgaataagcatctcggtccttggaactgcatagtggttgctcaagagtgctccaaactaccaagtaggtctgcacgccactgcgcttcgtctcgtaggctgtttggcggcgccaaaacattgttgaaaccagtagccc

SEQ ID NO: 14493 - DNA, 354 bp, Emericella nidulans
agaccggaaggcgaccgcagcggcacgaccagagacaacgggacagggatcagataacgggcagaagccgggaacgcgcaggagacaacgagagcccggggaccaggacggacggccgaacgagcaaagacgaaaaaggcaacgaccacgcgccagacgggagcagaggcagacgaaagcacgaagaagaaggagcgggcggcagagccacgagaaccaaaaaagccgaggaaaaagagagaagaggacaaagagcgaaaaaggaacaagcgaacgcagaccgaccacaacagagagagagcgagcgaaaacaaagccagagagacagacggaagaccgcagaaacgagcaagc

SEQ ID NO: 14494 - DNA, 283 bp, Emericella nidulans
ggccctatctgatcttaagaataccttcacgttgctgcccacccggtctgttgtgtcatgccagactgatcccccgaccggggcggttatcgtttacactcttggacccgactggccaggtcatcgccagcagaggcaaactgctctgcccaagggcaagaagtctcagaatcctctatccacccccccactagacattaaaactatgatgtgggcccgtaccaaggagaccggtcctgcacaacaaatacactaatcaccataagtgcttgcgtaaggctgg

SEQ ID NO: 14495 - DNA, 775 bp, Emericella nidulans
cactcactatagggagacccaagcttaggatcgtacctacacctggtttccgacgaagaaagagctctgcccaacgctgtattcctggtattctactcatcacatggtccacggcctcgttgatgctcatgtggatcagatatagctcttcaacatgtctcactgcaatatcttcaatcaatgtcctcaaaaacgctgtatcccatcgattccactttcatggcttcctggaacaactcatggaagatgttaccgaatacttgtggcttcccaaggtccgacgttcgctttgtgcgttcttgaagcacggccctgcgttgacagctgatcgagtccgctataaccgttgcggatataaggtggtcagggtggattataatcatattctgagcatcgctcacgatgcagtggccgttcatatcgaattcaccgatcaagtgtatataatgatccttatcgcatggactgtcgtaccaagattctcgtagtacaacgacctttttatgcttcgtaacttcgtcttgcactgacaaaacctttatggtgttaatccgggacaagggccatcgggataggaagtgtcaaaccttctctgcctgtacgcgtcctctctgtgtaaaataggtagattcggcaatatcaacgatcaagtaacgtttgatagttttgcggcttctataggtctatttatatggtacttagcgatacgctatagatatacccactaagaatgacgaacatcatctggactatcttcaccttgtagaatgggctg

SEQ ID NO: 14496 - DNA, 1926 bp, Emericella nidulans
cttttatcgaaagggctgatgaaaacggtaacctgctcgagtctaccggtgcctttaacgtcattgacgtgaatatcaaggggaccctaaatagtaagcgttcatgaagaccaagggactgcatactcacgacatcacagcgctacgtctagcaatccactatatgcaatgctccccagacaggccagccggacgcaagtcgattgttctggtcgcctctacatcaggctattttggcgggacaggcgtgtcagcgtacgtctcttcgaaacatgcaatcatcggactgctacgaagctcgcatatcacagccagcaaaaacggtgtcgctgtcactgccgtcgcacccttctttacatacactaatatcacagccaaggcaggagcgcgatggcaggcagatgggctgaagccaaacacaacggaggacgtggggatggcgattgcattgagctcgctggagggggagagcgggagctgtactttggtatgttgggtctataccctacattgttcatcttcttgcgattatggtgaatgctaatgttgcctgtgtcaaggttgcggtccgcaccggagagagatggaggcaagccggagtgcagttatgccgcagtggttgggcaaagagatccatattttcttctaggatgcctttagaattatttcgagtagcgggggttatgaacttcctaaggcgtcaaagatctaatggttgtcaggagacgaggtccgctggatggtataattcctttctaacggagacttctcaataaatacataatgaccacaacttcactgcttgttggcctcgccaacaaccctctggatcgtcccttcaacactctcctcccccaagcccaacagcccatttgctaagtccctgtcctttgcgtagttgcttcccaatcccgggatatcaccgtacaccgtggctctcacaagcgtcaaggcaccactaaaatcacccttttggagcttcatagtggcatccttaacttccacatccgtggtcgtacgctggaccgtccaggaagactcggtcgctctctcaagggcagcaagaatctcattctgcgaggtttcgacggaagcgatgtatagataccgattggccgtagcccctggacgtctgaggacggagaccagagcgcgtccgagctgcgcctggttcgtgaaggtgaacctcttgttgccgtcgtcccagattgtcgcggtgcgcgagccaatgtcgtagcctaggaagccgtttgcaactccctacaccgtattgtcagaaatatatctccactctatatgttggaggaaccaacccaatcaaacaacccggaacatgcaatgcccgtccaactgagatccttcttctttgtcttcaagtaatcaatcacctccttcttctgccggaatagcggaagcaacccaagcaccgtatcgttttgactctcagcagagaactcagagggaatgaacctggacaccccagcagcaacagcagcatcaatgagcttcttctgctcaacaaacgctgtcgcgccgacggcagaaatcaccgcatcttggccggttagggctccgtgcaggtcagcgaacgagaagtcggatttgcggactgtgacactgccggggaaacttgcggtgctggtggaacgggtgaggaccgtgatattgaagtcggatgcctccaagagggctgccaggaggatctggccgacagatccgctggcctgtggttgcattgttaaaagcatgcaaagtaggggctggaggggatagtacttaccccgacgatggtgatattcttcaatggaaaggacatgttgttctgatagaactggatgatttggatgatatgctgtccctaccatgaaaaaagggcacttatatatctcttgttctagaaatcttgctgatcaatatctggcgtac

SEQ ID NO: 14497 - DNA, 1101 bp, Emericella nidulans
tcgtgaagtacaaggcttctttcctttcaaaggatgtctgctcagggaaggggggtttgtgagttcgggaacggacagtttggatcccaatcgtacaagtcggcatgaaattgtagcgcaagaccggcctcggtgtagttgccagctgaagcctggctttgggcgagttcgtggacgtagcggatgaagatatcctctcggcccatgtctttcatgtactccatcagtcgaagaacatgcagactctcagccatagaaccgccttgcgacgccacgaataaatccagaagctcatccacggtcgcgataagagccttgactgccgtggcaagttcttcatcaaacgcatcgcaaccaacaaaacgatcaagcagctccccaataaagagcttctgaatcacaccctcgctcatgtccttcgtcttgaaaagattatccagacttgaaattatctcagtttcaataaccgagagatcatgattgagatcccactcgctgatgatcatggttcgcagaatatcaacagccacaaggcgcaggccctcatggacactaaggcatagctcaataatgggggctacaaggcccggcacgtattggacctgataaccgccaagtctgttcaatccgtagcgttccctctcatcttcagccgtttcccaacctatcgcttcccaagtagagtgcaataactccgcaccttgttctcgaacatcgccagcgattttccagatagtgcgtcgtttttgttctggaacggtctccaaagcaagggcatcactagacacaaccttgagtaacgtcatgaagaaagtttcccacagcctcgtgtcaaacaattccgcatcgtctggagctggaagcaacttgtcgatcatcagtgatgccagatattcaagactcttcactgttgtccggtgattgtagacatggatgctgaaccagctcttaggatatgcctcgcagtttaagatcgaggtatgaacctcgaatgcctgagaaaggaagttggtgagttccaagcctttgaccgtaggcgcttaggatttggtattaacgcagttgcagccattatagccgacagttcgacaaggacttcgt

SEQ ID NO: 14498 - DNA, 485 bp, Emericella nidulans
agaaaatcccaacaggggtacacagagagaaagaataagtgtccaacacaaggagtggtttcccaacctgactacaccatacggatgccacgatttagaggcaacctccctcagggtacctgactgagaggacccacactgactaggattgggcgaacggcgccgggacactgaagctagataaacaaggagactacagcattaacgaccggcatccgagatagagtgagacagcagccaccggcgagaaccgtcataccaggcgggagtggcaaccaacatgcgtccaaacatgtaatggacgctgaccaactaaggtggcactacagtcatgatcaacaattgtacacacaacagaatactacggagaaagccgcacacccatacacaaggaggtccaaccacttaatagcagaggaacccatatgcgcagcgaccactgtggcagccagatactatagagaccactggctgagcaacagatg

SEQ ID NO: 14499 - DNA, 2062 bp, Emericella nidulans
cccacagggaatgaggaccctttgggtataatgctttagagaatatgttcaaagtatactgcagcggggggctgcaggggggcattggaagacttgattcgttaaattacagtggaagaaagtgccgtgctgcaccccatacgaaaggcgatggagccgaagttggggtcatgcgggtctccttctggtagatggagatgcgcctgcatcttggcccttgctagctgcttcaaatttttgccactcgatactatcgcgctttctccgcgtgcgagtggctcaatttaaggccaccgtacatcggatctccacgacgaaggagtctcctccgtttactttaggccttgggcacgcctctaaaaggcagcaatatgccccgtagcgtaaacgctaattggcacgaggttgaaaatacggtgaacaagtgttcgggcaatatgggcaatattatacgagagcgactacgactattgtcttagagcttattgttgaagagtaaggcctggtctcatcaggcaaatcatctatcggaagctggatggtgtacctgtggcattctgcgccacaatgtccgagctccagatcaaacacagtaggagattgtgtgatcagtcagggatcctgacaataacgcaatgcagtgcaatgctacctgatcacggcggtcctgagtctccagctgcgacagagcgacaagagcgacaatagcctgataaacgagaggaccgggcggcggcttggaatgggtcagaacgatccaaggaatcgctcatttcttctgttgtccttttgcagtatcgtgatgagctgttgattgtggatttttggacagagcgagtgcatgcaggtggcccatgagtcaatggtcgttatggcatacattattgtgcctaggtatgcagatgtcctgcaacaggaccaacctagcgctccgaaaccgacagtagtactgtactcctgcgtccaataaaaagaccgcgtcttattatgtgacttcatcggcggctactccgttgtaggctgaaagcgcggacgaactcaagaatgcgcatgccgtgtcgtgtcacatcgccctgcccaaatccagggaggcagcgaccatcgagagcgagtcgccggtattctaggtcgctagggctcaggggtcaacaaggccttgagagggggagcaatcagcgactgagtgaccagtgatcatctaccacatgtgattattgcttgtcataagcgctttagccttccccgacagaggcggcaaaacctaacagatcaatctctcgttgaaattccgatgatccatcgaaggaacccaaattagggactgacatgccgctaaagtaagccaaatcgtttagcgtcatattccctttcttccttttaccaggataatttttacgggctggatttttccctttttacctgacgcttgggcctgaactgtacacttgaatgtaagtttgataagcatcatatcccgagacccgtcgatgaagtctggatggtggacagaaaggcggatgcaaacggcataatggggcgatggaaaggatccgagcatctccattccccctttctctgtgtagggtgtgtggaacatccggcaactgcagctgagtgagcgttgctgctatgtttgggccgatgcgaccatgattctccttaacaaggctaatttttgtctcttaacaaaacaaggatcatcaacgcccggctgtgtctgagttgttaggaatccttagttttgtctgaaggtcgcgcctcttggagcgcttctggaccccgaagctgcgctggaactagtcggctggaacttggcgggctggttgtggctgcggtgactgacgtctgtggaaactgaccgtctccgaggttccagccgcacaggtcactttgcagaagcagcgaataaaataatagatcccgttggccaactttggtggctgcatgcatgttaaggctgtgcttgaggtaaggatggagctcatcctcatttgtgggctgtgatccttccctgttggcctctccccttgcccacttaggaagccaactatggctgcggcta

SEQ ID NO: 14500 - DNA, 331 bp, Emericella nidulans
ggccctggctgaaaaaaagaaaaactaagcgatcgcgcaccaaacgttctcggtatcaaaacgcgccgacgccccaaaaggggaggataccgtacacacccccgggccggacccacaggggcagcgccagcaaacgacaccagctcagaaccaggccctcgcgacagccaaacgacaaaacaggccccccccaaaaaataaaagctgcagcgcacgcaccagggcagcctttccacccaacacagcagaaatcgcacagggcttcggcagctggaccaatgcgagcgcagcaggcaccgacgggcacagacagacccaccacagggccaca

SEQ ID NO: 14501 - DNA, 494 bp, Emericella nidulans
gggccagaccggagggcgaccacgactgcacgctcagggacagcggcacgggattttgtttaagggcaaaaaccgggaacgagccggcgccaacgagagaaagacgacccgcaccgacgacagaacgagcgataaagaacacagcaacgaccacaagccagacggggaccagaggacacgcgacaagcaccgtcaaaacaaaacccagccggagcccggccaaccaagccgcccgaagacagacccgaagcaaaaaaggctacgccaacagcagaacccaacgcaaggaaacccaagaaagcgacagaaaaggcacaccagccaaaacacggggccacaggaacgtcaagaccgcacagaccgagccgagaaggaacgacaacccccagggaaagctaaggaaaccaaccaaccataccagaagccccgcaacatagcaacctgtgagcccccgaaagagcaacgaacccgagcacccggagaaagaaaccccc

SEQ ID NO: 14502 - DNA, 605 bp, Emericella nidulans
  unsure (1)..(605): unsure at all n locations
ggcccgggcggggccagacgagaagggcacgcccgggcacagcgccttatgattttcagcacagggcacaacccacgaaagggccggagaaaacaagaaagcgccgaccagacccgacgaccgaacaaccaagaaagaaaccagccaggaccacaggcgaggcgaggaccacacggaaaccgacacgcagccgaaaaagaaggaccagcaggggacacgcaacgaaaagccgaccgaaaacaggacccgaagcacccaaggcaacggaacccggagaacccaacgcgaggaagccacagaaagcgacaggacccgccagcgcaccagcagcgggggcaagcagaccggcaagccncaaagacggggcgaagcgcaacgcacacacaaagcaagcaaccacggagccagcaaaccagcgcacgcaaatacacagaaccccccgaacacgaaccaccagcgagagagacaccgaagaaacccgagcgacgacgccgacaaaagaaaacaggggccacccacccccggggggagaaaccaacccagacgaggcgaaaacaccaaccacgaggaaagggggcccagaaaccggaccccaaagacaaaaa

SEQ ID NO: 14503 - DNA, 464 bp, Emericella nidulans
aaggccacggccccagcggcgactaagaagaactgaacgctcgggcacaacgcgttttgatttacaaaacgggccgatgacacgaaaggagaggaaaaaatgagaaaacgccgaccagaccggacgaccgaacgggcgaaaaggagaccagccaggaccacggccacggcgaggataccaccaaaagcgacacgcacccgaaagaagaaggaccagcagggcaccagacaggccgacccatccgaaaagacaacacggatcacaaaaggctacggaagcaggacaaaccaatgcgcggaagaccagagaaagggagaacgcatgccagagcagcaccaaaagggactagaggaccgacaagccaagagagcgggcaatgacaaaaggaacactcaagcacagctaggacggaacacccagccagagctcagcaagatatcacaaggccggcgacaagcgcacca

SEQ ID NO: 14504 - DNA, 407 bp, Emericella nidulans
aaggacaggtccgctataggaacatgagatagctaaaggtaccaggccatccgtttttgtatatcacgccaccaccgtcaccagagttgccagtataagcaggcgtaccaggtgcatgtgtggcatgcgctagggcttaataggaaatctagctgggaaccggactctgctatagtctcagttattgcgccatcagctggaaaatgaatgctggccatatccccgaaaatatcaacactgactgcaacccatggaagtaataccacgggtgcacgggtatgatctgccttatgtactcagagagatcgctcaccaaggaggtccattgaacggcagaaacggatgagagctgacaaatacgcatacatgcgatcacgacgaaaggcatagcatatacacaccttgaa

SEQ ID NO: 14505 - DNA, 417 bp, Emericella nidulans
aaggtcaggttcgtcttgtcgatctaggagagctatacgctcttgccgatcgctttattgttttcattacggcacaatgacacggaagggctggaaaaaccggcaaaacaccgcgcagtctggactactatacgcgctaaaaggagacatgcctgggcaccctgcgcggcgagggttacagttacatcgccatgcacccgaataggaatgacctgcaggtgcccagacatgctggcccttgcgaaaacacatgcatagtaatactagggttcggcaggcggactctgtcaattcgactcagagagtgcacccggcaagacttgccagtgcaacgctattaggggtctgctcaccgtcaatgcggatagatcggtgcacgagaatatgacttctgatggagagctaggacgcgattta

SEQ ID NO: 14506 - DNA, 469 bp, Emericella nidulans
aagggttcctagctctgacgcggcctaaatacatccatgcatgtgctccggcgatttctttttgtcctacgctaacccgtacatgggacgcttgcatcattggtgggggtggacagtgctacatgcatcaggtgggtggcattctccggcggacctgaaggggcgctaatttctatcatacacgctagtaacttaacagatggggggacgctttctggtgcgggcatcgatgatggcaatagcacctgcacattgaggtggacttagaccggggtatatttcggctcttgggggcttatagctcggattgcaatgtttagcttgacggtcattatccgagtgctgattaacgatatagttatatgcgatcatttctgcctacggcactgtatgttactacgcagggagactctatgagcttgttctgacctggcaaactccagctccatgtcgcacactgttgtgacca

SEQ ID NO: 14507 - DNA, 679 bp, Emericella nidulans
tcggggacattatgaagaacaaccgggagaatatgcttgcaaactgggggtgctgactcttggtgtagtttcagtgtaccaccaaaagagtaggcgggggggtatgcatatgtgtctagggtgtcaccaccagcatcaacgctgaaattttcatagccgacgcggatatgtgtggccttttcattgccatccccatctgcactcacggactggtccgagaaggatggtgatgaaggctctgtgatcatatcacggaatgcagatattcgtacagaaatggacaggggccagttcatgccctgaaaccaaccctgggaaccttctttttggccaggcttgtctcctaccttaaaccttgtcgcgggaggcccctcttttccgggctcttggcaaaaaaaatttttggggccctcccccctttgctagtttgttctttttgggtccctcatataacgcccaaatttctttttggggagactcccctccccgcccctcttttttgttttatcccccgcgggggggaaaaagcgtcttatcccaacttatattcccctttttttttctttatatcccgcgttatatattcgtggggggtaaaaaaatatgtttttaagaaccaacctcccctcctctggggggcctctctaaaaacagaacgcaccccctcttttttaataaa

SEQ ID NO: 14508 - DNA, 597 bp, Emericella nidulans
agccaaatgcctcatcggtcttagtttaaacacaggagatcactgcctttcctttttggagcctaccaaacaacaaagataggggagggggtcctcccccgcgaacgagtacaatagacagcttgacttggatagtcatcaacagcatcaccttcgctgagccgaaagctcttgcatctgatgaccgagccattccatatgaggacgcctcactccgctcttacataatggtcatcatacgctttgttacgataagatttacactcttcatctgacccgtccgatgtatcactgccacttgttatgtgagacacctatacatggcctgaaagccacagcccttcaactgaatcaataccacagtcagcctgtatagccttactatcccccatggctaccaagctctctttgctatgcctgtcaagagctatcagaacgcataagccgttatacaatgcattggtaaacctaaggaacctccggtttgaatggccttccagaccttacaatgtcacctctatcagatcacagacgtagcttggtaacgtctgtgccataccttctactccttacaaccacctgcatgatacacatctt

SEQ ID NO: 14509 - DNA, 704 bp, Emericella nidulans
  unsure (1)..(704): unsure at all n locations
ctgggatttttgtaagtacatgcgnggctcccagctcacagagtccagtccctggtggtgagattttcttctgcaccgaattcctgcaggttgaagggagggtctttagatgattaatggttcgaactgaacgggcaggctgcagcatcgccagcaaataacattaacattccatacttcattccccggtggagccagtccactcagcgcctgcacaggcttcatcgtggacagcattcattggtctgggagtcaatcccgagttctgcccgggccccatatcggtttgagcgttccaacaaggttcgagtcgctcttagcgtgcagactattgaaacacgctgccaattaggggacaccgggatgcggaactggggccgctgtcaaattcccactgccgagtggcattcctgttggattttgatcatatcttaatcgcattttatttttaaccgaattccaatcttttatggggttagtattcgggcaatatatttaatccccaaccctatcctcttgttcttcttagaggccctcctctcaaatagttagaatcctctgggttattatcttgggaaaagggacacattcctgacatcatgttttcctagttaaaataaagggaaaatattggcctcattaatgagaaatctcttaaataaaatacactcggggtgttcctataacgcctcttatccttctcc

SEQ ID NO: 14510 - DNA, 518 bp, Emericella nidulans
aacggcgttcgggatacagcctgtgagggggtgactgtgctgtacacgctgttacccatacagtacatactaagttatgtgctggcgcggattgatctggagccaccgacagtgtatatggggcatgtttgatcatagagagcaaaggcgcgagcgagacaggcacgaacactgacggcccagggaggtaggccagcagacacggcaattccggaagacaggcatacattgtaaatgggaagggggcatatgcacgcaagggcctctagtatatattgtcaagcgccattgtttactgaaccaaatttgggaatggagcaacgatcagccatacacaggaatgtcagtcaagctcagaaaaggtgctagagggactctggttgcatggctctgtgacatgacatctgagagcgtgcactgaactaagacatgacagcgtcatgctggactttataactaggagacagcggcgttactgctcatgggtcttgagacctacacacactccaagacacgtg

SEQ ID NO: 14511 - DNA, 260 bp, Emericella nidulans
  unsure (1)..(260): unsure at all n locations
gcggaggccgancccacccagcgggaccgcggcccccggaacgagaaggacgacgaggagcaccggggcaaggccgcgaaagaggcccagcaggcgcgagaacgagaggcagacgccacgccgggcaggacggcggcacgcaccccccgggagaggacgggccgggaggacgaacggagccgggggagccgccgagggcacacggcgaaacggccaggcgcacagcaggagccgagaacgggggaggcagaaacgacagg

SEQ ID NO: 14512 - DNA, 1597 bp, Emericella nidulans
acggcatggccatattacaagacccatcaaatcctcaatgaacaaggtccaacaattacttgttagaccgtcatcagcagtgaggcaggtcttagtgaaaatgttggttctgaatgtataaatgcgagttagggcttccagcacgaaaaccaattgcgccgcgacctgggcaacaaccatactgagtaaccgggcatttactaacaagtgttggcaactgtgtcgggtaataattaccatgaatatttggcgcggtctggcgcttccacaaaagctagccgcgcttaccttaaggttgcgagtggtgtattctgtccctatccagaatccagaatcatgttatagcggctgtcttcgagcctgttaggactccataaggcgctgaacccagcaataatagctagtcgcagatcatcgagtggttgtaaatggaggagaaagccgagaaagccgggacttgggaacttttcgacgacgccgcagttcatcaaggtcctataatagatgatgactcgaggtctggactatcggtgacagatttgtaaatttgccctcgtaataggaaaacgccatcagaatggaaaggattaaaaggcaggcctatcactcaatgtaggctgtaaatctgtcgaatagcacaatgctctgcgaatcagcaatagagccgcccagaattgtgcccattacctgtatgaaatcaagcctgaaaatggcaaatagacaacgatagagctgagtattattgtgatagagcagattgataatccgtttgtattagctggtctttccggcgccagtttctcgtcattgctgatgtgccggggcacatatatctcttctacgcgagtctcgccggtagtggcagctcggccttgggttcggagacgcatactgctgtcagaatctgaaggccgtttcaagatagtgcatgctattaagtactccttgtaagtccccttgatatgaagccagctcacaattgctgatgcttcagtatacttcgttttgagccctcaatagccgcttgcgaatgctgggtgggagggtattggaacagtcattgcttggcccaagaaggatacatctcagcagcggtcgttcagtccatgccggagaattctcggtagtggtcttggtttaaggcgcagaactagctcagatcttggactataacgccacgtcagcaacagtttcctagtaaagcgcacaccactcgtcacaccttgaccatgcaattgtcgaaacacgtcttgatgcataatgcgaacatgaaatgcaactctctgcagcgccctgagattgtctgacaaaccgatcagcaaggatcaaattgaagggttacaatgtcaattcagttaccagtgtccaattccctaggatcagcgttaatcgattgaggatatgctaagcttttcacgatcgcagagtggcaagggaagagacgacgtgtcaatggacgcgaggggcaggtaaagaactaattgagcggggccctcaatggtaagtagtggatccagttgactgatgatatcagctcgcatagtcgatcatatgtccgcccacagttaggttcacatcctctagctaatgctagagt

SEQ ID NO: 14513 - DNA, 513 bp, Emericella nidulans
agactggttgctgtcaccggcgctgcgttacgggatcaggctactcatggtgcaagaggcttgtgctttttgcggatgataggcctagctcggggcagctctattgtccgggagggggcatcacatctataaatttacgggcactggatggggcctgccccttgtctgcaccgtatatagcgccaccggaaaccagaacataccctatctgtggagaggggcttactaactgccggggtgactggtgccacccatggtgcccacgggagatcaagacagtcaggctccgcggcgcgcaataaccactgagaacagtccccgagctgccctcagtgccacgagctcccatgtattcacccctggagctgccgatatagccatgaccactgcggccacaatctgctcccttagcctcagcccctgcaaccatccatgtaggatgagcagtgacaccacctccaagtaatacacctataggagttggtctccataccatgccccatcatttatcat

SEQ ID NO: 14514 - DNA, 427 bp, Emericella nidulans
cgtgactgcctgagactaagacgctatatagccagtttgtttgtgagcaacaactcgaacatagggtgggtctacttatgcatgctgggcgccttcatcccaatggatgaacatggatacgggttgggcattacatatgcaagcggccagttgtgtatgctagcctgagagccccctttcgtattaccttagcgcatattgatcacttgcagatcgatatacgatgggtgctctggcaaggcaccatagatctttgggaccatgatcgctggccatacattgatgcagacacgacgagcacaggtttgttggcaagaaagtagatgacttcactacggcaactgaatacaccttgcatagacacgaatcggtctgccgggacactccttacagggatcatacaccaaccgaggaggtattcgatgct

SEQ ID NO: 14515 - DNA, 414 bp, Emericella nidulans
acgaatatatcatcatgaaatacgcgcctggaggcattctacgcgagagatgtcatcctaagaatggcgtttttagagcactgacgatcattacaccatacaccccaaccagggatgtgccggattcggaacatcaagctgtcgcgggcatatcctcagcagatactacgggtcctgcgagcagacatccagtatgtgacaagttgtgagcgagaactgactgtgctgctagaactctgaatgctccaacgggcaataggtgacataatcactattgtgaataggaacacttgaccatgcacagagcatcgacgctcccgttgtgaacttataccaggtaccactactaggtattctggctgaacattgttacataacaggatggtgctattgactctagacaagctccatgca

SEQ ID NO: 14516 - DNA, 501 bp, Emericella nidulans
ggacagaacacacaaactgtttagacaccgacagtattgttacaagagagccccggaacgagcaggggggaaactattgaccgtcaggggggttcatgaaagcacaacgccatatctgactggatatatttccccttaccggcaccatgtatacaaagatcgcgaaccaaaccacactgcaactggctacacggaagagtcaacagctcgcgggaaggactgacccagctagggctcatgccagccaaataaggtgatctctgggggcatgataaccacggatgggctcacctccgatacaacaagggtagaacttttatgcttcaagcggagagactgctctctggtgctggagactaaaagcttacaaacgcacctaacccaatatgcagtttttcgccactaccgcttaccaacgatatcccttagacaaaaccggccttattcattgcgaactcacccccaggctacacttattaccaaaagaaacaacggacatca

SEQ ID NO: 14517 - DNA, 622 bp, Emericella nidulans
tgagcatctccggacacgcctaacgatggacattctgacaccggactgggttcgtgagctgtctatattggatcgtgcatctccggctggtaggactccctgtcctttagcactggggcaggtatagcgctggcttgatctcatccttggtcgcatagagggccataccgctggtgtgaagacgggtcaaccgatacacctgcctgggggaccaatctggcaggcgctgttcttgtgcttctatcgaaaggtgacacacccgcgcaaaatagatgggtgtggtataagtgtgaaggttagggcgaacgaacactgtaccatctgcagagaaccggatcttgaggtgtaacaagcagcctgatgtacaacactatcatgtgctacaagttcgaaatctggtacagtctttacacttacaaggctcacactgttatgtaattgaggaagttgtctagcattgtgtgcaactggaggaactgggcgggcatacagctagacaacgtgtgacggtcttatcgaatgaccatccgcacatactgatgtatgtagggatgcactgaatcagtgcagagccagaggatacactgacaattcgcgaatgaatcttacccttgcgacgttg

SEQ ID NO: 14518 - DNA, 379 bp, Emericella nidulans
  unsure (1)..(379): unsure at all n locations
agtctaatgacactatcngaggtagatgaatcgccatacatatttcctcatcttcatattgctgtttataagcctttttgccgtcaaattcaagtttagtattatatgtttttcacctgttcggaagggatctgagtggcaggtaagttattagctaccagtagcgattatacagaacagtgatagtaccctcactggtcctattattattgaaccaactgtctaatccactaccgttcccagattcttttcacttccacataatctgcgtaaccccattaaacaagggaatcattgtaacctcaacccttttgtgcaaaataaaatggccataaaacgatttattccattcacaatctttaaatacggttgttggata

SEQ ID NO: 14519 - DNA, 552 bp, Emericella nidulans
  unsure (1)..(552): unsure at all n locations
taangtgttctttcgctagtagtcacacacttgctcatacactcggtactagacatgagttctgatccttgaatgggatacgagggacgccttattgagaacatgactgtgctgctcgctcgtgtgacaggcacggttaccggttctggcctgcgatgcttctgtactgccagtcagacaactgccaatgctctgacacaggctgtatgtcgtaagcaggccggagctcatacaactgcatctggcacggcacgacgtgacaagattctatgctacaacttgcatagagctttgagacgactgacaagctaggattcgctgctgcacaacatagattgagatctatcaactataggcacacccttagtggaacaagtctgaaccacgcagacaggacaagctaacaacctgctgtgctacctagaccatgggcacccactgctataccgagacgcattacagtgacgcgaaacaccgtgcctattgttgctacgctttaattcagactctactaagtgatgctaacactgttcccgacctaataatcttgta

SEQ ID NO: 14520 - DNA, 302 bp, Emericella nidulans
taaaaccaccagatgacgcttcttttgacgggctcgctatgatacgaatggctttcttaggtcggaccgacgctcagtctgtagtgtagagtttcaagggaatagtaccctccgatccgaccaacggcgtttggcacggtgactagatgctgggagctgaaaactccagggggacaacattggcggcagcgaattccacaggatcgcagctagatagcaccagcaagacagctgagaccatgatgaccatacaactcttgttggtgtgcgactgagacagacgcacctgatgctgactctta

SEQ ID NO: 14521 - DNA, 1526 bp, Emericella nidulans
tgtttgggcacgggataaggagattagggctggtgcgcgggtggaatccagaatcgagacaatagatgattcgctgtagtctgtggcatggatcgtagtattgaaagcgtcgaggtgtttgtcttctgtgaggtctgtagaaatgagtccagtatctgaattgatactaagggaaaaagaacggtataggtaagaggggcagacctcccgcgtcaatagagccacggcaaaccgcctgtctttcaccagctcttcgtgaagatagcggccgaggtcgccagttccaccggctagagcaattgtctgtactttggccattgggtactggttgttgcttgggactctggaaagtgatgttgatgaccgggtgcagaacatacagtgcaggtggaagccatgaaccagtggatatatttctagctagcatacgagacaatttacttgaattgatgttctggtctctttaggtgactctccctgctgtatcacgtcggtagcagtgatacagcctataagacgctcaacactggtcacacacctacaattcagctgagcttgctatgcagcctgatacaaatgccggactgactttgattcgctgtgaaagtacatgttgcaagagtgaaaaaagcaacaacacctgcgctcttagtcacacagacatggaccaccgatctagtttctttccaggataatgcacgtcgcaatcccggtgccgacgcagagcaccgctggaaccacaggaagagccatgattagcgcatttcccctaatgtctgggcgtaatgttgcttaccaagaaccaagttcatcgcataatagccaactgatttggtcaatgccccggaaaccaagggccctagaaacatgccgaatttccaggtaatattcgacagaacgaacgcacgggagtagagagagatacccccctcagcaaagccgggaaactcggtcgcaacctcgttcgcacctcctgtacgtccgtaagcgctaggactgttgtctttcagtgagccagtaatgttgggtggactcactcaacacctcaacacccccaaacccaagcaccagcgttctcgcaaccccaattgctaccagcatgactacgtagaggactttaccggtctttccagccgcccactggaactgcttcgctcccggaacccctagtaaccagagtgaaggagccatgaccaaaaaccccaatgacacaggaagccgcatgccaatgcgatccttgagccagccaatcggaatgacgaggatcaatgtcggggcctgcagaatcaggaaaaggattccagcttcaagactactccactggaaggcgtctctgatgtgcagaggaatggtagcttcgaaactggcgattagcgccgccagcagcgtctcggctacgagggctgtgacgacacgtttcatgcggagcattctccgatatatggttgtggatgtgggcagataaagcaaatgagggtccgaaaaggtatagtaaccagttgctccagcttcagggcctcgcccgg

SEQ ID NO: 14522 - DNA, 1801 bp, Emericella nidulans
ctaatgatcccacatttgttggcaaaaggacttcatcattcgtagaccccagatgacgcaaagcatctttccaaaggagctcggtgatgctgtcgggcgactgtgttggtgatttcatagcaatcgatacagcagccattttggcacttctgttattcctgactctgtaagggaaaaaggaatgatgaaaagtcaaatattgttaagcgtcatcctggaaccttcatgagcaattgagagaagccaggagatggtgtctcagaagactgtgtctaggacgaacgagtcaagtacaaaatgagatgaaagactcagctagacatggcgcatgagattgtgttcctattgggctttggtggctggcccagttctttgttcagtctggatgagttgacttcaccctaggcctgagtcgttttccaccaaactaggtcgtcaatggcttattgattccgaaagtggaagaacacatcttcgcttaactagcataaagcctccgacatggacgctcgctgatgtcttcgattctttcttcaaatatcccacttgttgagtctcgtttccttcacacaactcttaacgtacttgtgttgtttatcagacacgatcgaactacaatcacctgtcaatcgttcgccataatcgtctatagctagaacatcctcagatttctcgacgcatacattggaaatgccggtgtccatctgcgcctgaggaaagggggccaaaatagcagcatggtccgcgtcccactgaaacagctaccaactcatggctcaagactatgctccttcaaacggttgcaaagttctgtatgttcccataggccttataggcttcattgaatgcagaagcttttcgtccgtcgtcccggcaccaccctccaacgatcgtgaacgatcattatgttagccagctgctgtcgacttcgaaggctgctcaattgaacttctcagaagaatcctcaatttgggcatcataacagggtttgcgggcgaagaggtattcaaaccgtatcaagctcgccatggaagaaacacagatgaggatcttgcccagacaccagacaatatgattaccaccatgttttcagagctactcaaggagtatgacctgatgcgagtcatccaaagtaagctgcccgggaaggagtaggctcgacggataccatatattagattggagacgggaaatctagctcatatatttataaatcaatttctatatgcattaaacatagagtcataagccatgaagctgatacactcccagtagactctaccctcactgggtatcatctgatggagcctcctcctcaatggcatcgtcagtatccttatacggctgcgtttcaccagaatcatcttcatcactcgagtcatcaggtgactccggagcaccatgggccacagtagcaccacccatttcgtctggtcgcttcttgcgcttgaaattctgcgcatgggcggtgggcatgatcgttcaactcgagtaagggttctcggcaagccgagcagttcccagtgccgagctgtttttcagatctgcgttgcaagcccttgaaaagctgacctctgaatttctgcttttgggagttgtattgatgtgtgttgcttttccctatgttgatttttataaataaccattatttaggtccttattatacctaatttaccttttttagtttgtgctttaatttggtgttttaaacttattatcctatttctttacttctttttattagtttactatatatatttttttctatatttttttgtttttttaataattttattttatt

SEQ ID NO: 14523 - DNA, 1440 bp, Emericella nidulans
agatttgtgaagtacattcatagtcaagaccgtcataccttcttatactgctccatggcagcctccctttcccacaaagccttataggtctcgcccaaacggatgcaccaggtgcaatcgacctctgatatacccagagctttctttgcccagttttcggcctggaccactttttccacttcggagtcagtttgactaatcattatttcatcgtcttccccagtcttctccactggttgcgtctttgtcccagcttcttcagcagccacatcgtcttgctttaaggcagaattggccccctaatccagtcaaggagagtggtaagtcaaggtatagagaaatgtaaagtgccagtaaaacaacataccaagctaagaaacccactgagccattcaaacggcgtttgcacattccattctgtcttctgcagccagttccgggctaccatcgtcataatcggagttagaagactccggttagggtatttatccttcctgatttcgcttagccaccttttatctcgtgctcccagccgtgcaattgctactggattatccaaccatttccagaaaatttccatctcgtgatccatgctataccagttagtccatttgcacaagtcccaattcctctcaatcaaatcacactcgttgaacatgtcatagacgcgggaccaatgtactgcttgtccgccactggaagttcatccagcccctgggcattgtataacgcttcgagatggcctgggatactgctcaacatgtacatcccgataagccttcccccttctttctcctcgccctggggcaacaggaagtattcaaatgcccttttcacaatttcaaagtgggcatcaaccatgtacacctggaatttcctgttaggcacctgggaaaggtccgactcaggccggaattcaaagccgttggcaaaggaagaatgatgagtcaagtcccagaagaaacgctgcactgcctttctatctccgttggtaattgtgatggttgcagagatcttgggatcgtcaactgactgccttggacggactcgttcagcgacgacgtattcctcgacatggtccctgagtatgactgtgtttcccccgtaggataaatcaaagatctttgagtactttccggctatcttttgtgcaagtggttggagagaaacggttttgaagcgcaaatagagagcggacgccagctcgtcgatactaagataaacattcccagcgataacccaaatcaacaactcgttaacctcttcgatctcccttggattgagcactgattctaatgtttcaagttccgaacgcaccacagcctttgggtctgtgctggattcctggaggacccggttgagctcctcttctgtgccgcttgatgcaacaatcgcctttatcttgcccagatcctgctgcacggttgtgtacatttgttg

SEQ ID NO: 14524 - DNA, 2304 bp, Emericella nidulans
gggacgcggagtccactctactccggctctgttttgaccgctactacaatcttcagacattcttcctgaaacttttccgttaatttcccagtgtttcaccaggctttggtcttccggaccctttgtcttcacctgtttccccttttcgagtcactctgctttcaatacccgttcttggtccaagatgtctgcgacgcctcgcaaaactggctctccagccaatgccaacaagacctccgccacagaatccacagcaaatggcacgccgtcgcgaggtcataataggtcaccgactgctacatcaacaaatggcttatcccgaagtccgtccctcaggggatcagctccggtgtccgcacgagcggcagctcggaaacctggccggtccaatctgagcatgtcaagcgttcctaaaatcaccgcggacccgtccgaagaagaagcgcgggctcagaatgcggcgcttattgaagatctaaaggagcagttgcagaaggctgagacggcttccgagcagtatcgcaaacaacttggcgttctgcaaatgcgcctcgacgaagccgtgacagagcaagccaagctggaggaccaagggcatgagaaggatagcaaaatcgaagcactcaacggcgagatccgtgagcatgtccggcagatccgcgatttggagcaagctcatgaactagaacggaatgccatgctgcaggagaaggagcagcaagccagccgggaagaagagatgcaggccaccatccagcgcctgaaggaggccgtcgctcagaaggatatgcgcatcagtgctgacagtgacaagaacgtttcccgctcttgtaagtgccgcgatcccgtatagtcgatttccgtgaatatgagaactaaacgttttctacagccagtttccgcaatcgagcctctccagatatcgatgggcaatttgcgccttcgtctcaaatcgaacggagcccgtcgcgaaacaactccaaattgctcctgcagaaggataaactgattgagtcgttgcgactcgagctagccgaatcccagatcaagcttgtggagatggaaaacaaaggtggcggccgtcagagagagctggaaaaagaactccttgaagctcgaatggcgaatgctcgtctgatggaggataacgagagctatcagctgctccttagcgaaagaactcttaatggcgacttcgccaagggtgactttatgcgggaagcacatcctgagtcctcagacgcgaaggaaagcgccggtggtttgggctccttggccgatgagttggagtctgcggatgctcgaccagaaccagacgacagccgcaggcttgagtcagagcttaaggcgctcaaggatcaaaataaagccctgacgttgtatatcgagcgcattatcagtcgcctcttgcagcatgaagggtttgagcatatcctagacaagaacgacaacgagccaccaactggaaaacaagccggcagtgataaagaccttccgccaacgcctccggagaaggaggatcctaaccagcagacattcttgcagcgagccaaatcagttgtctctggccagaacaacaaacctcaaccacgttcgcgtccgaccagcatgatgccgcctcctcccgcccctggttctgttagcgcccacgagaacccgcaaacagcacctagcattcccatcaaccgtgctcagtcagttcgtggccatcgtaggaccaggtctgagcaaacgacggacttgggtgctgcagttgttgtcggccaaatgtaccgcgggcgcaactccggcggccctatcagccccactatcatgggacctggttcacgaaacaccttcactggggcaaactatgtgccaggaggcatgtctgtcagcagtcgtgccccctcgttgtctagtcagccagagcgcggccatttaagcagttcgggaagtgtgtcaagtgaccctcccaatgacacagcgtcgactggtgcgacctctaattctcctcgttcaagcaacggtatgacgaactatacgggtgcagttatgacccagagcaagctacgaccgctacgactggtcagcgagacaaaggctgctgaagaagaggaagctgctcgcaagaaggctaacagaggtagctggatctcatggttcaaccgaccgggctcgagcgaatccagccagcactgattctattttcatgacaagcctttccctatttatactttcctttcttgtattgtctttaaggctcttaagatatttcttatactgtgaaggcgccgctgttggatcctggagattggtgtaatt

SEQ ID NO: 14525 - DNA, 7819 bp, Emericella nidulans
aaaagcctattagcatgaagagttcgacccagtgacttgtgcctttggggcctctttgtgacttcacatagatctcaaattgatggcaggccctaatagctgtaggcctgagaattatggatcttagatatagtatatgatgggaagcgccactgtcctctaaggggttaagccaaatccaggctgccttctagtttacatcagggtatttgtccgtttattaggaattgcatgccgtcagaattgagtcttattcgggtaggcgagtataatctctcctcaacagacattcctactgtggtgactgtactcgccgaaaacgctttcaaacgtcctcgtggagtagtacagtcatttggccggccgtggctatggtgctgataagctcgctctcaatttgagatatataaacatgttgtcaatacagtacctggagttatatctcatgctatctcatccagcaagtttagcagagtatcgtcagtcacgtattagacactcagatacgaattgtttgcttatagcaagccttcatatgaactagttatcggagagccaaaaacttaataaagtcagcaccatggcgccaactattactgatgtcgctttgatactctgacgaatatattatagagccgctaaaaggtggttgtagaatagaggctatttaaagatggacataagcaccggcaatttgctaaacatagttctggaaggaaggttgtcaccttactttgaagtgaagaaaactggtgtatgattctagagcaagcccctcatgaggccgagaataagcgcctagcccaatcatgtcatgacactagaatagtaccctggaaatatgctacacgatgtctagaatgccatgagtgaaaccgtcatacaaatctttatggatcgtgaaagtgatgatgcagcgaaacactcaagtgagcaaatatatatgcctcgcgtttcagcctgtaggccatgaaccgaacgcgtggaagatgcattgagaaaaaagaaaaattcaaattgaaagtacgcaacgtaaaaataggcgctacgcagactcccttatcgctatgggccatttttagattcggagaacaacgagtggcttcagagactgtgaccgaataaagcaagttttcttccaaggggacaatgtgcctgagctctcaccccgaccatcgtaaaacagctgtctagggccttgaaagcgcatttgaaaagttgtagtactcaagtgtcgggggagcagtggtatggaaacggtgtaatctaattttccgcacttaaatctagtgctgattttactaatattgatgatttcattgacgttcaagcactataaatcctatattcgtcccctcgaaggttcagtcgccattggattaagagcttgctttattggctgcttatgtatggaacccccgatctactccaaagcctcaaacagaactccctgctccggcagtcaacgcctgcatggatggatgtaatacgaacacctgtgaagcttgtggctgagttaggaacttctcattgaggtttagaagtcataccaagccgtgttcgcagagtaacaagggggaaagaagtccgtcccagaggtcctagtctaagtccgaaagggtgagcacgtcaatacccgccatggaacgccaggggtgcagagaaaattggatacatgtcgacttttgcatattgtgctcctgataatgggaagacatctcaattgaaagtggcggtctttgagctgttttcgttaagggtctatggagtcgagagtaatggttctgatactccctaagatgtgctattccggagctgagggtatcagctccggttagtaacttagtccgtctcatagctgtcggctacaggtattgccaaggtttagtacgtaaatcaggggcagggcttgcttctctcccaagaccgggttctcaccgataaagcccacacgatccttctcgtggataggcatagccaagccgccgggcgggcgccgatcgacgcgccagagcagatgggtgttcagctgctgccgtcagcggattttgagctaaaatctagcgcagcgattgcgtgtttgtttcagagttgatagccgggcaaagcctgtcactgctgggtagcagttcgaaaacattgaacagtcagtaggggttggagacactccaaatccgagatgacgtgttattctctagcccaaagaatttctccatctggagctctgtatcatgccgaaaatgtgactttgtggcagagtgttacattgtgcaatttgggacgcatatgcagtttcacgagtggcatcttgaggccttgaacagacagatgattgtgattgcgatgttaaacagagagacttagccatgctactcatctgaatgaccattatctgcgcagccaggaatggtggacggaatgcaagactggcgtttgcgtgtggaatgaatggaagggtgagatttagcccgacagccataaatgttggccgtacatctagcaactatagactttcttttagcagaattatggatgaaggatggtattctcttccaaaaccatgttttagatcttctgtaaagtaagggagtgactctaggtccctttcggacctaccctaaaccggctatttgtttatatagccttagtaataggcaccgatgttcaaaaaatgtatctacattgcggcagagattgttcagcctttcagaaatgtggtaggttgcctataacctttgatacaccaggccaggtctttttttatctttaggtatatcccgcaagggtctgtggtgatccacgctgattctaccggagaagtcgatggtagcggccgtcgtttgcttgccttctttagaataatggctgtcaagttcattctagctataattttgcaagaagcgggtactctatgtcatgcaacaactcttcgcgaaaacttggcggtcttggtcaggcaaaggcgtactagtctctgataaggcaacatctcaacgaacaccgagctgatgctgaatatattgcacttgaaagcaccctactaatggccggataatctactccgactgcccaagtactcagatcctggcgtcctttcatttcttgtgctatagaaaatagtcctctcagcagtgtataggtcactttgaggttgcaggcattagatcgcattccggaccgccccaaatgtgggtttgaacatggttaggcatgtcttactttatatcgccgccgttgatcctggtcaaagtatccaaaccatactttcacaactattggaaccacttctatcacatagaagtaccactgagattggccacttaaaatctgaaggcaaacctgccataactggcaacgaataatagcaagaatggaataccacctggagacaaatttccagtggccataacagcacaaagaccctcttgtatattctgacattcgttacataatcggagatcgtctgtggcttggacagaacatgaacccctaagcgtaggaactaggaatgcgggtcctgtcagatccacaaagtatgtttcatactgcttcatatatcagcaccgcaatcgaatgctgcctagtttatggtctcgtattcgtcttcttatagcttttcggacaactaatcccacagtcagatgtcatatgggctgcatggacgaccgattgtggagttcatggaacatagccacaaatgctggcttgtatagcttgttaccaatagatagctagtacatgatgcgtttatacatgtcctatcagcctcctatttgagcggaaagataggtttatacatttgcccgggcaagccatattctgctaagaatcagaattcctcaattgcaacaatgcctctacttttctcatttttcctcttcgtttacctgtacatcagcagctcgctattttttgacatcgttcacttttgcctgcaccaatggtcaagctcgcgatatgaagccctgcgatggctctctcgttgtcatcagttccaccatctatactacaaccggtccctaaacttcaactccagatatcggtggcagaattcatggtttgcattgcctcttgaagcggcctgcctgtgtatcggaggcctactgggctggttcttcctcatgctactcccagtgatcgaacaaaagcacgtactacgtactccactgatcgctatccttgccgtacatatcatccggacgtcagtcgttatctatatgagcggccaagattcgaatcacgtcgtctacaagacagtcccgaaagacccctcctggctgtttgttgggccgcagttccacgcactacaccatgttcatccggatcggtacatgggctcggtggtcaaagttttcgactggttagcggggactgcatactctctgcgtaacaaaagcgtggtcatcacaggagggtcaggagcgcttggatctgcgataattcgccggctacggtccgaaggagttcggaatgtatattccttgaaattcggcgagcattggactcatggcgatttcaatcgtgttgggcccatcttcgaccatttggaaccagatattctcattctagcacacggcaccaagggtgaggatgcaatggatgcgaattgcaactcaaccatccgtctcatacaactctaccttgagcaacgggctggccgaaccccagcctagcgcaaccaagaccctccctgaggtctggtacattggtagcgtggtcgagctgcatcctgcgtttggaggcgccgaaatgtaccgctatctcgactcaaaacgggcgtttctgccctacgcccgtgcattatatgacgattcgggggtcgtttatcgccatatagttcctgctgcgttccagtcacggatgggcagagccattgtgtctgccgattgggcggccggggttatgatgtggtggatacgtcgcggcgcccgttatgtcccagttacctatacggggttcgcatattcgaacttcttcaagttcttttggtgggtccgtccacttccgtctcgaaattgagcgggttgatgtttggagtgtggccatagagtttgtattgaaatcctttaaaagtgccatagaagcatatagcgtgctagatggcgattcggccatacttatcacaatataccaatactaccgcatatttagctcgcgaaatactatagatggtgttccagtggactcggcccgagttcggccggatcggagcgggatcggagtcggccggcaacggcatggagcatcgtcatcaagcgacgtttgtaggattaatccagctttgtagctagctttagcttctgacaagcttattcgattaccgagttctctaacgcagtgcagacatgcccgagccccactacccgtatgacacgactgttgtgagcgaactgctgaaacagaagcgtaaagcccgtggcatcaaagcctgcttcccgtgtaggcatcgcaaggttcggtgtgatgggcatgttccttgtgcaagctgtataaaacggggccactctgagttgtgtcgcgtgccgacttcgagtactagcgctgcagggttcatgcaggggcaggggcaggggaataataagtcgacctcagtcttatcccgaccagagtcactgtcatccccgcaggacgatcctgctgatgagcagcaggatgcagctgcagcgtaagaatgattgatcactgatcaagtgacgtccggactggagtgctaatctttgcacagacaaagcccggtctgcgacagcccatccatccagtaccgagcccagccaaacctggcatcgctgctttcgcgcatggaggagatcgaacagcagatagtgtctttacagaaagacctgcgcgcaacaatctcaattcctctagctggacgtttaagttctgtcgaccaacctagcatcggccattctgctgctcaagccggtccgcaagcaaatctcccggccgtcatgtcgtcgaagaagccacgggcgcaaccatcttcttagggagtcattctgatgccccattagccctaggctgtagagagacatcggcttcaggtcttggcagcaggatgctcgacgaagtgaccatggcccagtttgtaccccgggcttatccgtttacaagtctttggggcccggacgccacggtcgaagaggtctgtgaaacattgccggaggaggctgatcttatcaggtgcgtctgattgcaaatccgataaagtggtgctccgtattactgacagcgatagatattggcaagcgtaccagtcaactgcgtacccattctacccggtgctagtagatgtcgaaggctttgggctatcggtctttgaattcttgaacaccagagcgtctcagaacgcaacggaaccaaacccgtcctggctggccttgttattcgcagtgctagcctgcggtgcgcagtttacgcatgatcctgtgcaagagagggatctaaggtcgaaagtcttcagtatgctttgcgctcgccatccctgtctgaccctatagggtgattttgggctaatgtaacatcagcctgttcctcctttcactgtctccggatgtccaactttttctaccatacagatctcgatcagatccaggccatggcgttgatatgccattgtttaaggaataatcttgacacgaatacggcgtggatcttaatgggtacgtcctgctcgtactctggatggcagagatcttactatttgcataggtacaacaatgcgactcgcccagagtattggcttgcacgagatttcgccaaccttgccaccaaaagaacaactccgacagagtagactatggtggactctgatatggcaggacaccttcctctcattcacatatgaccggcctcctagctcctcgacggctgaatgttgtactatccctcgtatctcggaatctcctggtctctcgtttcaagaatgtgtcttcaagatatgccagatcatcagcaatcagtcacagctcaagggcgagcatagtgctctagactacaaaacggggctagagagtgtcttgaatgaggcaagccttttcctaaccaataaagttcactgcaggtctctccaggaccacctggaacgcctggcgctgagtattcatgttggatatgcaatctgccgtatgagccagatacatttggattcgatgccagaaaattcgtcgagcgctgtggcagctgattcccaacgccaggctatgcaagttgtcgagaatttcttagaactgcatcgcctctgcggcacggtctgccggtcctgggcatttgtccacaatgctgtcagctgcgccattaccatgcataatcttgcctacgtaacaggggatggactagcagactccaataccctcgctcaccggctgatgaagttgctcgagagcgaggcaagagcgtcggaatggtacgacgcagatacaaatgtgcgttatttcgggccatactctcgagcacttaaagctttaaaggagatatatagcgatgcttgaatttttgttatctcaacctatagtatttaccattttgccgctgcaaatggtcaagaccttctcttcgccctgacgtagaagttcaacggccgtatcaactggaactctggatcatactcgatactttccaccccgtccctcacaaactcataccgacttaccagctccgcaaggattattttcacctccagaagcgcaaagttgaagccgatgcatccgcgcggtccggtggcgaagggaacatacgcgcaccggtgcagatttttcacctcgtcgctatcccaccggtcaggattgaaccggaagggatccctttagtagggttaatt

SEQ ID NO: 14526 - DNA, 2393 bp, Emericella nidulans
agatggcagtaaaacctgacatgcgttacccggctagaaattccgatacacatttacataccctactatacgcccagacgatcgccatcagcgccacgacttgcgagatatccgtagcacagcctgcaggctaaatcaaatgtagactgtagagctacgtgtcttcgcagtgatctcctggatcatattataaggaagctaactaaaactataatacgtcgaagcataggaagatatatcacgtgactcaggcacactccgggatcggatagcggtacaatacaaggcttatcacacgtgctttcaatttttatcgtctccgccttcaactacgagtcactatcagtattatcagcgttattcatatttcttgccttctattagccgtgtctcgtttgcagattaggctggccaacgcgcagctgctcacactatcttggttcaaatgctatgcttaaactcttccgcgccgcgatgacttcctgcccgaaacgagttcccatccccgccaacggcgtcgactaccgtggcaaggtcgtgcttgcaccgatggtgcgctccggcgagctgccatcccgtcttctagctctcaagtatggtgccgatctctgctggggtcctgaaacgattgacagagcaatgatcggtactactcgtcgtgttaacccccgcaatggctgcatcgaatttactcgtatgccctcgaatagcgtcaacaaagacgatgccaaagaatccgtcatatatcgccttgatccggcacgggagaagggaaagcttatattccagatgggtacggctaacccggaattagccgttcaagctggcaagctggtcgcagctgatgtgaatggaattgacgtgaactcggggtgtccaaagccgttcagcacaagtggtggaatgggagccgcactgctacgtactccggacaagctggtgtccatccttgaggctttagtcaaggaagttggcgaaccgtatcagattggaatatccgtgaaaatacgtctgctcgagactccagagctcacggagagcttggtgtcaaggctagtacgcacaggtatcacgggccttaccattcactgccgaacaacacccatgcggccgcgcgagccgtgcaattcgcgaccaactccgtatgattgtctcaacatgtcacaacgctggcgtcgcctgcatcatgaacggagatgtaacttcacgcgacgaagccctcgccctcatgcaagaatatggtgcagacggcgcgatgattgcgacagccgccgaagccaactcatcctgctttcggtctgaggcagacggcggtctcgctccctggcgcgaggtagtccacgagtacgtcaaactctgtatcgagtgcgaaaaccgctttggtaacaccaaatatctcatcaacatgctcatacccggcaaagacaaggagttcagagaagcaaagcaggctaaatgctacactgacctctgcaccatcctgcagcacgatgacctaatgcctgctgctcaggaagtagacgagattctcggcattgcacataagtcgacggcaaggagcaaggctgttgaaaatgctatcgcgaacaacgatactgctagagccgcgggcggcgtctcaagatcgaaaaacacctcccctgctacaggcggaattggacccatccgcacaaactccatccctaaacctatgaaagcagagacgaaggcagagtcgaaaccagcagcaacggatgtggacgtttccacgccagctccgcagccttctcaaaatgaggtggccgtctaggttacagcattttgatgtcttgttcttatatgatgaagggcatatttggcgttaaaaataagcatacttagatttctgtgctttggtcatcggtggcatttgtacgtttgcatttcttggtgttgcctactggcgatgttttaaatgttcttcgaggtttgagattcccttttttgccgatatgtactcctcactactcaattataactacccaagttcactagacactagatggttcgtccaatcaaacctcaataatataggttgagggacaatatattcacaccgttacttcctacctagaatacaatagcccatatggtcatgttgtcgtgattctctccaaccgcccatcagccccaacctgaagtccgaaccgctcgcgcaagaacgcagccgtttgatgagatggcgcataagtggctgaccgtcgtaccgcagaggggctgtatcgccattgatcccgaataacattccacaaccccaagcgcactataacggcaccgccggaggagtaagcgtatagggcccgttgacccttggtgtgacttcccccattataggacggaacggctagtaatcgggtgcgttcgagctcttcttc

SEQ ID NO: 14527 - DNA, 404 bp, Emericella nidulans
ctcgtacgctggaatagtccgacatacgaatgctggcatactacgcctgggctagtccagacggagcgggacttagtggcctggcaaggtatgacgacacgcggccgaaacatgttgctgcgctgggcggttctctagagcgtgcgaacagaagccgcacacagataaagggtgataccagctggcaccagttctttactcagatgtagcatactgataaaccgtctctgggttgccagcgcaactcggatttaacgctgaggcacacggacaaacaaaattcggtgcgaaggcaacgataatgccagccatgtatcgtcatgtcgacgatccggtacaagctgtagacatgaaccgatgatgaattattaacaggcggaaaatgggtacagccataaacgatc

SEQ ID NO: 14528 - DNA, 522 bp, Emericella nidulans
ccccttgaacactgctgcccgcagctccacatcagacgaacatggtctacgcgcagggctgcttttctttttttcagcccaggatgctgctcgatgtacccgggaatcacaagcggtctctggcttgaacgcaggccagctgtgatggctgctaagcgtctttttgagagccaccccttcttcatcgtcgactggggtattgaatgcgctaaacagctctattggaactggcgcacaggcattaaggctccagacttgcaattcacctgctgctagggaagacccgagccatgactggggccgagcaggagcgacccgccggttctcacacatcgccgacgcagtcattgcaaggaataaaaatggagattgaactggtcaacacgagcccgaatagacacagtcctgaaggttattatatcgtcacacaagagtgtaagagagcgccactggctacggagatatactcactggcacactctactcggttagcgtataactgagatgcgactgccacctaca

SEQ ID NO: 14529 - DNA, 4502 bp, Emericella nidulans
gaattaaaatgttcaagcaatgccaacgatctctgctatgtaagaaagatgtcgtctagatgtcatgtcccgattcatatagagggcgcccctggattcggctgcttcaaggagttgaaaagatactccggagggagccggcgcatggacgtcggtcggtccgttccggttgattgaggggctgccatataaccttgtcggcggcgctggatcttattgaagatgacaccggcaatgacaattaggaacacgcagccaagcgcacaacagaaagctaccaaaacaacaattccgttggagtgatgcccacctgaagaacgttagcagtactcgaagatcctcgttcagaagcatactcacttcctcgagcgtaggggttattgttctcatagaacatgcgcgacatacggccaggttgaccatcagatttagaggagatgacaaagggaatcaaggtggtgccattaaacaacgcagctgaggcagtgccaaactctgggacagcgatttgaccagtaatcataagagccaggtcattgttcaaaagatcactgtcgtcatggtcactggctagagggataacgtcgagtccacgaatgatcgtcccatcgtcaaagatctcttgggccaattggaacgaggagccgtcataattgacgatgaaatttgatccattgctcgactgacctgcaagccaaaatcgtgatgcatctccattggctgggctaaacgccgtcacagtgcctgggatagacgaacttgaagctccatcgaagacttcccatatttgttctttggcggaatagcttgcgactgcggtctcattgcctgcaacggtcagattgccaacggcgatcaatgtgttggcgttgccccatttaagcgccaggacactcccttccaggccaacacccggtcgattccattgctggctttcggtgtcatagtaacaaacacctggacaggtaagagcccctgcggcttgaaaatatcctccgacatagatttctttcgaattgggacgaggtgcaatcgcattaacggacacattatcaccattgaatttggacggctgctcttgtgcgatcgttccattctggagatcgtaaagtaccagcccatcgatctcgttcttacctactgtgccggtaaccctaccgccagcgtacaaaacgttgcttgtgatggcaaaggccatgaacgtggagttattctcaacctcagtaccgaggccactgatggagcctgtacctccgtctatgaaggccagatttcgtacttcctggccgccagttgagaggttgaagtgacctccaagtatagtcaagttgcggctggagtctgtgtcgtatatgccagtaattatttcaccagttaattgggtgctgttcaggaggggtccaagctgaagcccatcttcttgaagtagcgccaccgctccaccagcagccaaacctccagatgagagacttccaccaagaatagttgtgccgttgaagctcgcgaaggatgataaatggcctgcaaattgtgtttggctgacattgaggttttggagccagttgttgcgtgacggaacccaaacagcaaagccagacacggctacagcaggatattcatcaaaaggcagcaattcatcaaagtcaccactaacagcgacgatagtctcattaatgacggtggaaacattcaaaggaagcgcaaagactcgcttgacatggccattaaccccacccccgagagctgaccaggatttagagtcaattgagtaggaagcaacatagctgagactgtcagttgcaccctcagaagtcccagtaaagtttccgccaacataaagcttgtcgttgagaaccgacattgtagttacctcggagttcaagcctccctggggcagagccgtggcattggcgtcttgttccagcgagaataggttgttgatatcagaacttgagaagttacctccagcgtagataacgcccctatgcgtcactaagctcaaaactgaagcatcagaatccagctgcgtcccggagctgttgatggttgatcccagcagattggctgtggcattcttcgaagtcgggtcatactcgaataggccattcaattcaccgctcgtgtcgtttgaagctgaaataagctcaaacctgactcgagaggccacaacagtgaggtctccctggccagcaactgggctcaatgtcacacgaggacggaaagaatcgtcgctgacgtctacagggccggtgtagatggtgtcatatttttcgtagttgttggtctgatagatttgcttctcgatgagctcttcagagtcagccctgacagtagccgtcacattaacgattcctcgagaaccacaggttccgtcctgaacacatccgggggtgtaaacaaggatggaatagtttccggagcgttgaatattgggctcaaaaacgacagatgtgcttgccgcgtcagagtcggatacatgtgccgtcaggtagtcggaaggactgtcgttaccatccgtcagagtccacgatcccgtccgagtggaagtggaaatgtcactgctgttaccacatgtcggctcgttaaagtcattgatggcataagtgaagacatctagatccgttagcacgtgcggcgccgaatcgcccaactataaactcaccatttgtaaacacttcgataccattcaacccggcgccagtgccataataatcccgaatctcgaacatgaaccccgtcataccaacctgattgacaaatcggaagtcacggtactcctcgtctgggtcgtccgagagcgagcaatactgatcgcagttgacatcgtcaccagtggagggatccgtataagtcaggttcatgattccgttatctggcaatcgtctgaacaagaaggattttgtgcccctcccttcgtaatgcgtattatagaccccaagcttagttggactgaagttgtaacgcatatccgcccgccaatatcctagggcataatctggcaataaccatgtgtgtcccgcaccaccggcaccgctggtttggcaaatgatattccgggggtcagtaaaaccgctccttgtagaagtggtatccgaagtgattgttgcattcgaaaggttgatgacctgttcaattttctttgatgaagacgttgagttgccgataccgtcaaacgacccaccaaacacgatatgcgcatcgtcattcttgacgatcgagctgacaggtccgttgagcccaccaaacgatagatctttccagccttcaccgacaacccaagcagccgcatttgatgtatttccttgtttgaaggaaccaccaacgtagacggtattggtttcctgatcgcatagcaatgccgataccgagcccgaaagacctggcaaagttgttaccttgttcgaaatcggatcatacaacgcgacgccattggccttttcgcctccgagactagtgaaattccccccgacatatattccagagtgcgatccatcctgcttggagaaggcgcacattgcacggatatcagcgtcggaggttgacagcgtggtgaggatcccgtttggaaggggggcgaggatagactgggaatcatcgtctccggctttcgcgttcttttgttcggcgtatgagtaaaatgttacggcgtcgaattccccggtaagagcgacgtgcccgaggcgcgagagatctagctcagggcgagaaactggttgaaacgataacgcagaagcacctgacaattggctcaaaagccacaactgcagaaatgctgacgagccagccgtcgcaggcccaaacagtgagggaagcctcattgttcaggagcgcgacgacagtccttctataaggggagttccagcgaggatataatcgcacagggcattcagagaggcataggaaggataaagaagtcgagttcagccgagcaaataccaaatcacgctgtggttagatgttgacgtatagcaggcgagaacacgagggaaaaggagtgatcgaataaggaatgtggaaaaagaaaaccagtaagatttgaggaaagagagtataatggaagaaaaaaaaacaataatcacaaagtctacttgcgagtaattaacaatggccagaaaaagagcgaatgactggaagaagttggatgggccaaacgagtgacatggcaagggcctttggtttgctgaagcctgaatgaagcctgcttctcctctctcgcgctcttcaggaacgggcggcgggcctcgatggaaggttccttggaacggaaccacggagggcagggaaatactttgatccggccgatccagccactgccaatcagacgtgattttccacgggtctgatccagcctttgcgcgtcaaagtggagtgggataatgttccacgctgaaacctgagaacacactttccgaacaccagtgttcaactatgacaatgctacggggcttatgtagttctgagtccttttccgtcatgacttgtgagctgaagaaacacaacag

SEQ ID NO: 14530 - DNA, 409 bp, Emericella nidulans
  unsure (1)..(409): unsure at all n locations
cgcaagtgctctgagttgagcagagatcttttgttggagcgcaagggacaacttgcgcgaattacgtcgatatggagagacccggtcggactgtacaaacttcgggggatgacctgacctgaatactngttacccccttttagcactgggcacgccctatcattatcctctctcaaagtaccgtgcttttatcgcactcttttcacctccttccacaaaccataacctaaattttatccaattcacatatggtctcatagacctgtacagnccctattagaccctatgcgctttctgtcgggcccgtacaccataccgtgcagttcctggcggattacgattacccagaccgatgcaccgggcccgtggccatgtacaacccggcgatctgaatggtagacgctacttg

SEQ ID NO: 14531 - DNA, 553 bp, Emericella nidulans
cgatctataagaacatacgcttttacatttggcccgaacagtgcctttcctggacttgcgcacagggggcacgatcagattcagttatccatgcgcgagaacaagcccaagggcaaccgtgtcaactgcgcgttgagatgccttaaccaggcagtaccgaaggatttagcgcctgagtgagagcatcttgagacccaagtgagggggattgaccggcacaccaaatggcacggtgagccctagacctgtgacggacatcattagtgttggcggtcatggcatagtcacagaagacagggcttagaccctcagaaccttaagctcaaccgaaactgaaaaggacagccacgtggcccagactgtggcccgagacaacgagttttggggtgctgcactgacaactcccattcagcagaatcgatcctagcccttgatctagctatcgatcaatcgtgattaagagctacgggacaccctgttcgcctgattttggagctaatagggtcgttcaacactggacttgggaagccgccacccaatttcctacgggtac

SEQ ID NO: 14532 - DNA, 1330 bp, Emericella nidulans
ctctagaatcagaacaatccgccactggcacatagaaacgtacacggccgcctcaacccgcccgggctttgacaaattcgcccacgacaggatgtggaacttgactgtgcacatgataaatatgctccgcgcgttcgccccaagaacagatcctaatacactggccaagagcttcctaaaaactgtcgcgaaacccgcctgcgacttggcccgcaggttccatctctgttttgacgagtatagtctcgagtggtcagagaaccatgacaatgagagtttggtggaggatccagctggagcattccaaagggtaattaacgaaggacggtttggagagtatgattttgttagggttggggaggagaggaagtggctgagggatatgccgacgtcattatctagtggtaatggtgaacgtgaaggtaaggatggggatggcaatgagaccaaggtaacggtcaggtggctcttcgatatagcgcccaagctggtctttcggaaactcaaggtcgattcgtggggtgagaaaaaagtgcttgttaaaccaagggttctggtgcgggttagtgagcagaagaggacaggaccaacgaaaaaggtggtgaagaaggctgaaagggttgagtacaagactgtcttaggggctgtgcaagggtggctgacggggaaggagcatcttattgagaaggagaggaaggataaggaaagagcagggagacagctcgcggggctcttaggaggtatactctgaatttggtagtcttcaacttatgaattactcaatctgatgacattcatgggaaatatgtcaatctggcagattatccgtatgaaacttgcagctttcccgatgcattgagttccccagccggcggatctcattgtaatcgctcaggcaggcccagcagaactgggcgtggcatttgataccttcatcaacatatcatcagcaaagttgcactaaaagggccgtctgcacctgcgggtgtgcgaactccaaccacccaggcagatccagcagaactcggctctgcattttatgcctgtaccggtcaatcccgtcctgttcggcgataggccgaccaacggcaaggattatgtgaaggcagattagacttacaggtcatatggtcacatccgtcattcttctcaattggccattggcaccccgggcagcgcttggttgtctcctcgacctttttcatcgacagctcgacttctctcatcctcctcttcaacatctcaattttctccttgaagtcgtctttgacctcttcctcaattggctcatcatcctcttccccttgtccttgtgctgccttcggcctgc

SEQ ID NO: 14533 - DNA, 675 bp, Emericella nidulans
tctggcggaggacgtcggttgcatgccggcattgtgtacagatgaaagttgttgttccttgtgagatgagaggtgaggccgcggtgcggcggagggttgtgtggagagacattgaagctgtggtattcgtgcgaccacgttcaatatatgaaggaatttctcacgagtgagactggctcgagtgtgtggaatccaattgccttagctcgagaccgttcctatgcgattggacctgagtctgctttgtcgctgattgcttgaatggattatctctaaacaaacattgcctggaattttagcttattttatctttgtccttaacaactttttaggagcggatactactctcccagattgtagtaccccttctttacccctcgcatgatgatcttctattcatctttcattctttcccctgatccttagtacctttaccctggctacaccttacactttctctccacttttgctattcttttaagattaaactccttccttccactttttttatcgcttcgtttactctttcttccatttctattactcctccccttttctttctcttcactactatccttctattcttttcctctcttctctcatctcttacatctacacttgcccctatcctatctttccctctatcctcaattctcttctttccactttcatctc

SEQ ID NO: 14534 - DNA, 1087 bp, Emericella nidulans
gaactataggtacgaagaaaattcaagtatagttcaccacaaagctgtcttgacaccatgacagtccaaccactcctacttctggccctgagctccctcgcgataggcgtagtctccatcgtggacccttgcgatttcgctgatatcgcagcggatgccggggacaatgccataatggccgattacatcaccgacaacggcggccccatgtacctggactataatatcaccgggccttactactacgccgacgccgacgtgcaactggtccatgaaaccttgtccgtcgacgcgaacgacaccagcgtgctcgttgctacagacagtgccaatgtgaatctatcccacgtcgaggtgatcaagacaggatactgcacctggctgacccaggcgagcttcttcggcgtcaacgccgcaatcaatattgccaatggctctacggcatatatcgaggacagcaacattacagtccacaatggagcagccaacatctttgcctacggtactggaacagtcgtttatgttagcaacaccgatctctacagctccggccccgtcgcgcacggtctctacgctgccggcaacgggacaatctacgcgtccaatgtccgccattactctggcggaaatcgctgctcctccttctccggcgacactcccgctggatatgtgtacgtggacgacgcggttgcgcacacggcgggagtgggcagtgccatcttctatgccttgggcgaggtatacgggaccgacgtcgtgggacttggccgagaacgcccccgtcctcttcagcgatggagcacaaaaagcggttttcaagaacgtcgactttactgccggtctgttcgcagggacttgtatgatctcgtctggcgagtgacaagactgggaccgtcattttcttctaagactcctcgtttgctacctttaacgagttcatgtctcaccttttgctctgtacattctcatccccgatctctttttgttccaatctcctttattctttcgctctgggattttcgtttttgactcacgactactctgttctcttgcccttcacctctttctctccttttggtatccattc

SEQ ID NO: 14535 - DNA, 2071 bp, Emericella nidulans
aagtatgtgctttttgcggaggactccctaggtcggtatcagaacatcttcagcaacgctcctccgttaccaacccctgaaagggtagattaactgagagaacatcttctttaaagtccgccattggcagtcaggagtgaccaaccgtctagtgtcctcgggcagacaagctgcattgtatgggccagagattaacctaatcaacaatgttaaatgggtaacggctattgactgtgtcaattggcctgtgttctgccaccataaggtccatctctgcgccccgagggaattgaggcggaagaggccatcgaaaaggacctggaagggctacagtcaattcactcgaggtagcgcacatctgaccactgggtataaatatcaggtaaagcgcaagacctctggaggtagacacttgtagaaggtatgcccagaacgggcgaatccatacgtcgcgcagcagaatttgaacgtataacactgtaccttagtattggttgacaatcgatggagattatcagatcacgggattggcgctcgctcttcgatcaatgtagggaatctctggggcatagggtctgattcagaggaagagagccgggggatgaaagaaggacttccgtggtatggcatgtgcttcgtctcgtgacctgcattgaagtagggaatggatgcctccacccagcctacccccacccccagaacttgaaagtgccaatccccgagtccagactctagcctacacagaccgactctccacccggccctacagaaggactagctacttcattcgtgcatctcaccgactgagacggactaattcaggctgatatgagtgggctgatatgccagattcaaggattggtggagcatttttgattcctctacttgaattccagctaatgattcgtggaaacagaaatcaataaccacatggccccgcggagatattcctcgaatgtcaaccccagacttccccgggccccagtcggaacacctgaagcaggcttcatcacagctcccggttggccagtaaccggctagcctgccactagggcatatggaagcttggagctggcctggagaggcttgttcaggcgatactggtcccaccatgagacttccccgtgggagtctcttatcgcggtccggggatgcagctattcgaatggttaatctaactgctggatcttactgctggggtttcttgttcccgtcctggtttgcgtactctatatataccagcccagtgccaccaaattttcgaactgttcaagcgctcagctcatctcttagtcttcctgggctgctctgggcagatacttaagcatcggccacatttcctctctctgaacttgttggtcaagcagctgaggcctgcaaataagcatcgggatgggatttaactttcttggctccaagagagcttacaactggtttgtctcgaatccttgcgtactgatcaaagctgacgatagaatcttaggtatatttctcttgtcgcggcctcatgcatggtgctttacggttacgatgcctctgtatacaattccgtccaaggttccgacaactgggtcgcatactttgacgatccggacgcaaacctgatcggcgccgtcaacactgcctatactgtgggtgccatttttggaggattctttctgggcggtccatgtgccgactatctgggtcgtaaaatgggcatgggcatcggctgcgttctcgtcatcgcatctacattcatgcagacctgggctcctcggcacaacctcgggtgtttcattgctggacgtaccattatcggtgttggccagggtatcgcattgagtaagtcaccctttggactttacactcccaaattcaaactgacgatactcttcagcgtctggtccgatttatatcggcgaacttgcccctccggagattcgtgggaagatcatgacgttctggcaaatgttctactcagtgggttctttcatctgcttctgggtgaactatggatgcaccaaccacaaggaaaacctcggtgaatgggattggaaaatggtcgtgatctttcagctgcttgttcgag

SEQ ID NO: 14536 - DNA, 903 bp, Emericella nidulans
ctcccttaccgaaatcaaatatcgtatatgttgctgtgcagtgtcagcctctcgataacaaagctctactcaatgtaaaccaaccaggtctgtaacatttcgatgacgctcaaactccgctcgagcataatcgcgcactcactccgagtaggagaattgggaatttctgccctcaacaagataagcactgaacgtcgagaggacatgttggatgagatatatcggagcactaactgtttaaagccctgactatctcgcgccacagcgcaatgacacgctgcctttgtatgaactgtcatacggtgttagcgcgacataatcagctcttttgagtatatcagacttacatggtctagactgattgttggctttctaagcttcgacggccggactgaggcaaacaatctcagcgacgtccgcatcaggcaaaatcatatcacgacagctacgactgggggcgcgtagctatccgagtgtcataagttcaaggttatgcgataaactagaatatcccatatacccttagcgcgatagtatggaatttagtggcgccatgaaaggcggtgataaaggggtcgcaacgtattgtaattacagcgcattacatggggatagctcagcacgacgtacgggcctttgcagagtagaaaatctcaatcagtgctggggccaatctgcgaggtgcataaaggcagcttattattcgcaaagcgaggttatatctcgttcgattgccccgttgctgttcgacgaatggcctccgagtgtttaccgatttccttattcatcacgtgacccgttcctggttccccgtactttctttcggagcaggaacggagacagcgctcttaggagcaagcatcaacccttgccaatccctggtgtaataagctggcagtcatg

SEQ ID NO: 14537 - DNA, 1891 bp, Emericella nidulans
tcttccggacgactggaggccggagttcctgctttcggagttcctgggccgagggatgattgttgtgttgttggaagaggcagcaggaagggagccgagcgtcgcgtttagacgacgacgcttgctatcgatagcgccggcagatgattcacgctgacgctgctggaagtgcgcggttgcggctggggtcgcgggcgcggagctgcgtgcagtctgagatagagcggccgcggaatgagggcggttgagggagaggctgagtcggggtgtcgggtttgcgttgccggaggatgcagcgagaggagatgtgtaggaggcggagtcgttggaggagtcgggaaagaagatcttgggcgggtcgcggtactggtctttattgttgaagagagagggtatgggaggatcattggaaaggacgccgtcgttttgcaggtcgcggatcttgatatcgagtttcttgatctgccggtccaggaggatgcacgccttctcgctcaactggatcttctcatcctgcagctggcttgacttgtcgagattctggaggacgatcttcgagtattgttcttctttagggttcggggtgagactgccgttaagtttgatgaacttctggatgctggcgtcgcgcgagttaataatagcgcggcactcctgaatgattttgtcttttgcttgaatttcttccatcaagtggttgatctctagaggaaggttcgcgacatcgtggacgaactgctccagtacggaagcgcaatcttcctggccgtgggccattttgtatgatcaatgttccaggccctctcggcgatataacctccggtcgtcaagcacttcgatacggcaggcaggagagcggttgaagcgagatggacagccgacgacgggttttgccgttggatgggttggttaatcatccatctgcgtctggtccaggatatctcgccgccggagcgggtgcttgattatccggccgaccactcattggtctgtatagcttgcactacaatacggtggtacgccacaccggtcacacctccgcaatcgtccttaccgtgtaaacataacgattcaagtgccagggcatgggctatcctggattgaagtctattctgatgactaacgggctacaggctactgcggctactgctgctacaatttccaggcccgcagtccgtatggcgggcgatgattagccaggctatcatctcggccagcaaaagtacacaattctcgactttcaccgatcaaagaactacttctaagctctttcaaactctaatctggttttgtaaatggctgctttttgttgaatccaggcgactagggcatatgctttgtatatgatttactggatgaggctgagagcccaagagaggtggcccacatgtcctcgaattttcatattctatacattaacggctatgatatacagttatctcgggtaaagcggcgtattagccgtacgggatgacgcgaaagacgtcactcaaagagtgtcgccgatatgctgctcggtaggaagacgtatgattataggaagagatgtcggcgtgggcaattgccagctccctgttgtacaggtattgagccagatataaaaacgtgcaaggtacccagcatgcgcctggatggtagctgctaacgagattggccacgatcagtgtgcctatcttttcacaaggcagaggccttgacattttcgaatgacttgtttgtttatcgaggtatgtccacgtagaggctgggttggtgatacatcagtcttttgtggctgtcagctaagaacagaatacaggtcccagaggtctgattagtgtagaagtatacaaatgcggcgcaaggtgtatacgggacacataaatgtcaacctaaacagcagagtccgttg

SEQ ID NO: 14538 - DNA, 397 bp, Emericella nidulans
tacgcttgggacagggttttggagggccttgcatgtattcctacagtaggctcttttgattgtgataacagaggcctaggttctgatgaataggggtcggcttgaacaagagtttggtcatttgaacgttcaacatggtcgagtgggctaaagttgatcttatatgatgtatcggattgtatccagccaaggagcgcaaacgcaagacttgatttggcagcatcgattcaatgtctgcagatctttctctttttctgccttctaccgcgagatccggttgaatgaggtcgcggcgaagtggcgtcatcgggggtgatgttgccatgatgcagggagacgagctactaacgtgctttggaaccgggggtattgtcgcaggacaacaggtgtttttgga

SEQ ID NO: 14539 - DNA, 421 bp, Emericella nidulans
aagagacgacatgagaatcactaccattcacttctaactgtcctttctccaccagccttacagcgccactctcacttacttcaccgaatttcgactcaagcaacactcacacttggccggcaggcaggcctatccgaggctgctcaatacgacctagcccatagtaagagtggaagccatatttgtcaaggctagtcgagaaaggctacgaatccatatccatgcatgttatgatctttgcatgtagaatctaaacggaataaatggtacgtctacaaagaaataacgagtgtgaatgctaccaggaggcggttaattctgtccaaggaaggacacctgcaggagctaagccagatctccaaccgatggaaacgacgcgctgatcgaccacatcagaatgccacatgctatagcagtaatg

SEQ ID NO: 14540 - DNA, 2661 bp, Emericella nidulans
ggaacgcgaaccggatacatacctcgccgggagacgaccatttatttgcacgtgcggccgttaatgtaaaaaaatttaaaaaaaaaaaaaaaaaaaaaaaaaaaaaaaaaaaaaaaaaaaaaaaaaaaaaaaccttttaagctctcaccaggagtcattgttctagcggagcacaccatgaatctccacgacggggagctatcttagactcccgtggacgccatgagtccaagattcgtgctttgatgagtgatgcccagtgaattgctgccttaagttccaagttttcgacccttgaatctcgattagcaatcgacgatgcgaaataagtggctacccagtgtatgccaagatgttctgccttcttgagatatcaattatcgagatcgcgcggattacaagggctgaaaatgaacaatgaatcttcgaggtccgcagtctcctagccacacttggcgggcaggcagcactttactaaagatatcagccacataccagctgtagacatgtgctctggactcactgaatcactccacctcaagatatcttgggagagatataagtaacttcgggcaaagcccccacttcagtctcagcacaccggtgagcgacgatctgagccaagagcctagcgtatcaggacagactgtgaaagatagaatcatgcaggatatcaatgcgtgcttgtaaagcctggacaactgatatgatcgtacagccgggcgttgaaagtcgcagggttgcattgtgttttgcgaggcaagagggagcggaagagactggaggccagtaatgatccaggatcgaggcatgtgactcacatttccactcatccaaacttcttcttgtgcggctttcagaccttctcttctataaattgcatcagcccgtgggccagacgcgcagcgtcaaagcacctgagagtctcaggctttcatcattctttagtgtaaacaccgtgggatccagttccacctgcactctctagctatctatcacattcatttctgtctcaccatgacttggctgctctactgcctgtgatgtgactagacgtactatgtctaagccactgccgagtttctgggcaacacgcacggcaacaacatctatggtctatctcttaacttgtcgtgaaagtcgagacccgagagacgagggctggaactgtctgcctcgatggcccacatctccttccaatatactccgagatatggcatcacagcttgctcatggagtatctaactgcagatcactgctccactctcttcccaggcatcagaattagccacacggtttgcaaaacagcattttcgtgcaagaaggttattgggattatgccttgtcaagattttcactgatttgtttacagatattgtttgtcgaactcgttgaactcccaaaccgatgccgaaacagatacgcggcctgtctcctagttttgatactaaaagtcttgggatggaatcatggaacacactatcggtgatgcgcaatcccgataagacggcagcccaaggtccagtaacgccgtataaaaaaaatacgggcatacattgcataagatcaggcacgctgctagagccccactgggcctggcctagccctggtgatagtcttcagtttgatcgacgtgctggtcccttggcggagatgtacctgtaccttgtttggtccgcttttctacttcgccatttcaaatctggcgtcttttacccctgtgaactatgctaattgcgtactctcctgtccctgcgcctccgtagtgtctacattgacctcactggcttttacttcttctacctgcctcagcttcgaatcccgactcgctttttgacataaatctcctacactcgctaccgttctttcgttcctgtcattcttttccatacattcttcttatttccatagatctcacatcctttcattagatctattccctaaattgcgttcctattctgaattcatccgttcatgttgcattgtctttattttattcagtcataatgttcgaaaacgtccccttaccccagtctcctcgatccgagacgagtacaatcgtcggagaggaggtcgagatgaaaaagggtgtccaaatgactatctgcgagcggttacaccactttacatgggcatggttcaccctgaccatgagcacaggaggcctggccctcctcatctctaaccagccctttcagtttcagggactcagagaaatcggattggcagtgtacatcatcgacctcctcttcttcgctctctgctgcttccttatggccctccgctttttcctccacggcggtttcctcaaatccctccgacacgaaagagagggcttcttctttccgaccttctggctctctgtcgcgaccatcatctcagggttgtacaagttcttcggcgaggatgcagatgagtcctttcagctcgccctcgaggtcctcttctggatctattgcgcctgcaccctcacccttgctgtcgtgcaatattatttcgtcttctcgtctcacacctaccaccttcaaacaatgatgccctcctggatccttccaatcttccccgtcatgctttctggcaccattgcctccgtcatcgctgagcagcagcccgctcggtccgcaatccccattgtctgcgcaggcattacattccagggtc

SEQ ID NO: 14541 - DNA, 517 bp, Emericella nidulans
caatatccacctgccagaccagcactgacggttaccgatgtcctgaggaacattcttggccacacaggaagaaataccacacgcgctggctcggccgatggtggagaggctatcacacgggggatggccaggtaggagttatgcacgtgagaaaccgaaggggattaatgaagatgacgactatacctctggctactgacgctgtataacaatacgcttcttcgacctaaccggcccacacaggcggttgggtatgtatatatccatattattcacagtacataatgtttgaacatgccacatgatgcaagcgtgactcgtgagacacactgattgaagatatactcttttcagcgagagaatcctagccccatcctaggacgggctacttgaggatatcgtgtgtacaactcgcaactcgacacttcatagcgcagtggcgccctaaaagtgcacacttattcccatagtcaagttcaacacggcatctccttccaaacccaaagactgatatacc

SEQ ID NO: 14542 - DNA, 1973 bp, Emericella nidulans
ggggtagggcgaaggacctaacccccccctacgggctggccaaaaccacgggtagggatccgtcagtcagagtttggtttggcaaaggactattacgtatatctggacccagaatttcagggcttggtgtcacttcagccagtgtcaaagggttactcccgagcatgtgagctcaaagtaagtcttaccacctgctgtgacataaagaacgctcttgaaggtattctgcaaaaatctgttggtcaatatcgcacggaggattccctccgaacccggtcggatggtaagcgctccgaaatcactctggaaatactctattaatctttcggcagagagaccgaagacgaatgcgcatctattctttcaacgtattaatgtcaaaacatacttcacgcttctacaaatcctcttggctgaggttgaacgatttgtcgttgaggattcaagcagtaacaacagtaaaaacaaagttggagctgacaagattactgtagttgttcggcggatcttgccggctctccgcaattacagctcttggctattgacagtgagcaactacttggttgcctataaggaaaaggatacccctttggcagtccaactcaccgaattctggaagatttatgccaacactctaacactacttgcatccacctttgacgtggtgcatcttcccgaagtggactacctccttgaggaagacgaagagactttgtgtttcatgccattaagcaaaggcgctacgtcgcgcaggtatctagatgtgaatggacagcgaaaaccttcaatgaatgatccaggcattgagaggaatcatcctaatattgagatgctctcccgcattcgagaattcgtcattgatggcttggatctggtcgtgggcaatgtacgatgggccaccccccgagtgtctaaacccctgctaacctccccagaaaatacccgttgcccttgttgatgatgaagacaagaaaacgttcatctacaaggaggatggtcttccatctcaattctttgctagtcccactggtcatcaccactcactctccaccgccagcattgaacgagaggatattcgacaggtcaaacaggaagcaaactaccaaatagatgccagaagtacattcggaggctcccaatctgcgtccgtgtccatgtcagctgcgatgaacggcatcgttgaaggagttgagcgcttggtcgaatctgacacttacgaaaatgctccagtaatccctaatcggtcctttgatgcaatctcgaacactgttccaagggatgataaactccctgctcgccagactcctgttgcacctcctggcttgggacctcctatgactagctattctgctgctttgcctcaggtttcgtcatctcaatcgttcactccacaagctgccatccccggccttcctaccatctggagcactggtaccttttctcccgaatttcgcgatgtttcttcgcacactgcatcaggacttggattactaaacgcccaggggccaaaggtcacggggaacgccaacagcccaggtcttcaatacgtgcctgaaagtgccgtcaaaagcgaatcaatttcccgccagagccttttcgcagaaagccagctagaaggcactactttcaataatggacctgtatctccgttcctcgccccgtcaatgtatcaccaacgcttttctggctcctcatgggatcgagatggcataggcgcgccggccagtcaacaacaggcgttgcctcgttctacaggcttcggactcgccagtcagcccatgtcgagcggattcaccaacaatacgtgggccaataatgctttcataggcagtacgatcacatcaggatacggttcttatccggggctagacgacgctcgcaaaacgccctcagctcagtatggtgccattggtcaatcccccgtctaggccaaagtggctgaagtggatcacgagaaaggattgtttcaagtg

SEQ ID NO: 14543 - DNA, 1906 bp, Emericella nidulans
ggaggggaactgccatccgttcaaccgcaaagttaagaagttgaaaaagcctttttccataaattcaaaatgtgagggagttcttaggaaagggcaaggaacccatgagcggttgaattgggctagtccaacgtttccaaggggtccacaaggcccctatggagtgaagttccagatcagccgtctgcccagagtgccccagtgttcgatattctttataatgcgtgaatgttaaccctggagagaatatgtagttgacagactacacgtccttctagtttaaaacgcaatatgttgtagctgcaccagaattgctcttttaagaagctaatcattaccgtggccccttagactcttgaggcgtagacgtccagaatttataggcgagtaagatcacgagtacgactcttcatgcagattcacaaatgagggcacaagaaaagcttttatccaaaaaaggaagccgccttacccatgggccgtggataccagaccacccctagcccacgggatatccccaggtaagatccaatgcgtcaagccctttagtggcatgattagtttgccctggaattcttcgttgctgacctatctcaaaggtatatagtatactgtaggagctcccttaaccaataaccaaggtagaagttcgttcccatgatgtaactcgcagtgatcacaaggtggggagatgcctcaaccctgagaacttactttgatatgtgacttgggaaattgatcaaaaaacaaataaaaccggccatatggaacactatatagattactgacaaaagctttcagagattgacgtgctgaataagtcggttgccatttgacaccaacgattgatgcttttgcgaaatggacttaaagtcctggactgacccaccatcacatgtgtggtgtcctataatcccttcatatcagagatcccctgttgtctgacgatgataggttgtatacgccggaatctctgagctggtagtggaaggatcatgtgcccggctcgcgctcgtcgtgcggaatgggtctgatatcgtcagcttcttccagtacgagcttcccctcttgccctcacacgatccgtcagacgcagttccggaccttgttttgcgcaaactatttgagcaccgaagcttgtatgatgagaagtttgcggcagttgcgtttccgcggtccctagcggatcaatgcccgtcccttagcttacagctttggaaagagctcgatgcgatcccgtatgtggttgcacgaaaaccgcaccagagaacgcaggatgatcaaggcgagttggcgacatttgccgggtgggaggaaaaacaaattgacgagaaggcggattcgattgcgaggaagtgtcttaggtctgcattctccatttcgcaggtcattcatatatccagccagttctgatcagatttagatccttcgggatcggccatgtgccgcccatccagctcgatctgcatggaatggttgcagttgatatgaactttagagcgccattggtaagcgcggctgaatacgaaaagacggtcgagagccgcacatggtctctagtgcagcattatgctagtgatctgcgaaagagacaagtaagagtcgccttcttcagtgcgactgcttatggaaggccggatgtctatacccggcatgccctcatccgactatcgcaatgcttgggcgtcgatgttcgatggtgggccatccaaccctatatacgtttatacggctccaagtactgtatttgcttacttactaattactgggtaggtatgttcctcgcccgcgtccgcagctgctgtataccatccgaagggtgcagaggattctgcactgcgttgaaaacccaacccagccccttaccgcggacgaagaactccgcatcctagaatgggtttcaaga

SEQ ID NO: 14544 - DNA, 1836 bp, Emericella nidulans
ccccctccccctcctcccccgggtggttttggtgacccccgccgcctccccctccacctggtggttttggcggtccacctccgccgccgccgcctcctcctggcggtgcatttggcgtgccgcctccacctcctccaccaggcacggttatcggtggatggagagcaaattacttggcttcccaaggtgccccgtctcacgctatacctgtgatgtcctctatcagacctaagaaaaaactcaaggcccttcattgggacaaggtcgacaccccgcaagttacagtatgggcaactcacggcacaactccccaggagaaggaggagaagtacgttgagctggccaagaggggagtcttggatgaagtggagcggctattcatggccaaggagaccagaatcttcggaggtggtgtggcagcaaagcaacgaaaggacaagaaacaaatcatctccaacgacttatccaaaaactttcagattgccttgtccaaattttctcagtttccggctgaagaggttgtccgaagatcatacattgcgacgccgagattctggacaacatggttgtcatggaattcttgcagcgagatgaaatgtgcacagtaccggaaaacgtatcaaaactcatggcgccatacagcaaagattggactggccctgatgctgccaataccgaacgagaacaagaccctagtgagcttactcgtgaagatcagatttacctctatactgcctttgagttgaatcactactggaaggcaagaatgcgtgcgcttgcgctgactcggtcttttgagccagactatgagcatatttctgctaagctcagggaggttgtgcgggtgagcgaatctctgagagattctgtttccctgatgaacgtgcttggtttaatcctagacatcggtaactttatgaacgacgccaataagcaagcgcagggtttcaagctaagctctttggctcgtcttggaatggtcaaggacgacaagaatgagacaacgtttgcagatcttgttgaacgtatcgttcggaaccagtatcctgaatgggaagactttaccgaacagatcagcggagttattggcctccagaaactcaatgtcgaccagctgcggactgatgcaaagaagtatatcgataacatcaagaatgtgcaggcgagcttggatgcgggcaatctcagcgacccgaaaaagttccatccacaagaccgtgtcagccagattactcaacgcagtatgaaagatgctaggcgaaaagcggagcagatgcagctttaccttgaagagatggtcaagacctatgacgatattatggttttctacggcgaagacaataccgatgatggtgctcggcgggatttctttgcgaagttggctgcgttcttacaggagtggaaggtatgctactaagccagtttttcttgctttttaatgctaatcgtgatgatagaaatcaaaagagaagaacatcgccttggaggaagctagaaggcgcactgaagcatctttggctcgcaagcgcatcaatgtcggccttgcgaatggcgcaggcgcggcaggagatgccccagtttccccagccacaagcggagccatggattcgctgctggagaaattacgtgctgctgcccctcaagccaaggatcagcgtgaccgtcgccgccgtgcgagattaaaggagcggcaccaagttcgagttgcctcagggcagaagatcccagatcttgaaggcgccgaggcccgggcagtggcggacagaacagcggtgctactgacacaaatgctaccgactctagcctattgagtccactatccaggaacctgaaggt

SEQ ID NO: 14545 - DNA, 642 bp, Emericella nidulans
ggcaggcgcagtcccggcactgacatcaccgacagaaacgttctttgaccacgagcactctctactgttgccgtacggatcattgcacctacataagccgcggacaggccgaggccaagcagtagcgcaagtggtcgcatatcgaggccatcatgcgcgccgttagtacggagctgaacgaggacgtggtgacatacctgatgagcaacggttagcggctcgccgacgccactggggtgtgacgtgcatccaccgcgactaccgcaccgagcagccaggactgactgagcatggtgatggtggtcgaagcgctgcggtagtgtgcgcctgacaaccgagacacgatccgtaactgtgttacattcactgactctcgggccgtgcacactgaccgatgaaaacggtttttagttatgcacaagttacttatacgcgttaatctaattcttatcattccatattgatgtcttagaacattctacacgcctttatttctacttattgtctgctaatttctatctttttcatcttatattactccatgcttttttgacctctcaattttccaaccactctaaataccttgcttctctttagtctcactgtaagatctttaatcttcctccctctaaatttttatat

SEQ ID NO: 14546 - DNA, 458 bp, Emericella nidulans
ggccacggacgctgccgccgactttgcagcgttctcactccaggtgattcggcgtactgctttcgccaatcaaatcaaaggggtttgggcccttgggttcgttgtaggagtgccatattcaggtcaattccaggaaaattccaaaaggttgatgggataaagcgaatgggagacattgcccgatccttttcattaatgtgcctggtgcgacccaaaatatcccgtttcctaacagtactctgaaaatgtcaatcaacaaccgatgatgtcatgcaaaccgcccactttatattctcaccaatgggttcttaacttcgagatcaatgcagtccacatgattccccacaggctgctaataacccgagtgatgtcagccctggatcaaccaacacccttaacttggactaacctagaaagacctttctgcagtacaggccacgtcctcaaggttccacgat

SEQ ID NO: 14547 - DNA, 628 bp, Emericella nidulans
  unsure (1)..(628): unsure at all n locations
aagaaaaacacacacaacaccacacacgaagaacaaccaaaaaagaccgaacgaaaaaaaagcccaaaaaaaccaaaaanccagagcggggcgagataggggaaacccacaacaaacacagagaacaacgaggaagaaaagcgcaaaaccggcatttatccacacaaggccaaacgcgaaaagcacggaggagagagggacgacaccacagcagacagagccanaacaaaaaggcaacaaaaaccgggggcaacaggcaggcgcagaaacggaccaagaagggcacaccacggccagaaagcaaaagagcaaaagaaaacgggaccacgaggcaaggagaaaaccaaggcgaacaacgagccaaggccgacacacaaggcgaacgcacgaaaacaaccagagggaagccaccaaaaacacggaacaacaacccaggacaaggggacaaaaggaacaaaaacggaaagaaaggcccggaaaggcgagagcgacacaccaaaaaaaagccccagagaagaaaacggaaggaaaaaaaggacaacaccgagcaacaaccacaaaccaaaaagaaaagctcgaaaaaaccaaacccaaaaggcaaggccggcaagggccaaaaaacaaggaa

SEQ ID NO: 14548 - DNA, 1820 bp, Emericella nidulans
gttacttcgcaacaacggcattcgcatccttcgcaatcttcgtcttttcgctccggaaatgatggtgcaagagcctcgttaacaatttcggcgggatgagcggttccgatgagaggacgtcttcgtgctcgggtttagcgtgtgtgatttcagcgagaatgtagtttgcttcactctcgtcgtctgaggccgaagcgggcgaggcgcggcttgaatcatctgatgtggaggaagtctagtcggtgcctgagtttgtaggactcggggaaggcgatggcctttggcgggaagtggtggcttttgcgggtttattattcgagaaaaaggtggttgccgcgttagtatttttggtctttgttgctggtttggtggctttggctttggatgagccagctgttgatgctgacacggcggatcctgacgctctacttggtggcttgaacggaagtgtgcggcgcttttggggagcttggcgttcaactggcatggttctgcgctcaatttgtttctttcttgtgctctgaagttggtagatgtgaaagaggtgttggcggttgaatcggcgcgcatcgcgactgccagacgcgaggtcaggtgacttgcgtacaccactttcctttcctacgaagtacttcggcacattggttaaagagtacgttggcggaataggatcacttgatcaatcgcaccatctctacataaatcacactcgaaaagtgctagaggcatgtctgcttgaatcttactgagaaccctggcactctacttctccccgggcggacgaacaacaataatttccaaccccgaatcctccaaaatcctcctcgtaagcgcccaatccactccaaaaagtcccgagttgaaccggcaagcttttaggcccttaatattagcatcgtctgctttggaccacatttgcttcagctcatcaagctgatccttcaaatccgcaatcgccagctccgtattttgcagaatgatatcgacgctgctcacattgcgtccatatccacgcgaagtaaagaggcagatgacccagtgctttttacctcccggcttttcgtagtcccgtttttggggcgggataactaatgtagatccctctggaagtcggatgtcgcgggcgggaatctggctacttccagtaacagtatctgttgggttgatcttgcgatattgaggcttttcgaggtacatacggcagtaagattcgtagatctcgtatgccgcagggtactgggtaagaatgaaactgttagcttcgtggcttcctcaggccggtgtaagaagggatatctacttttttgcgaaaggcccctgcgattcctgcaccccatgagccgaggcaattgcaagcgtctgcgcaagacggcggttagttttggcatttgtcacagtgtggctctacctgcgagtacgataacttacgtatcaaagctgtgccatctggagcatcaaaaaggtcaccttccacttctatcaccttgctggaaatggagtctgtatccattatggtatttgtcttacgatagtgtgcagttgtttgtcggggcggagttgcgagaaaatagatcctgatggatgctctgcaggcggttgatgtgccataccagtggttattgcgctgttgcggaagcgcgacaaggatcgtgcgcagcaaagaaaggttaagcctgcaaattaatcgttcaacaacaatgctccgtataaggttggcggaagatatgctctattcgccgcttacggtatttcgggtccgactgagtagttgactcaccgtcagctattttaagctttctggccatttgcctgtatatcta

SEQ ID NO: 14549 - DNA, 3638 bp, Emericella nidulans
gactgcgaggcattgataggagaaaaaggaagtgaaattataataacaaggtttctctgtgatataagcgatgagaccatagtagatagtatatgggtataacaagttataaattgatctaaatgagagtttaaatctatataatatatagtatgtagaagatgataaggggaggcgaatgaattagtgtaagaaggaatatgacatacatttggaggagctcgatgaaatgatgaagtacggttgtttacaaatagcattaagagatcaggacgatacatagtatacgacagtaacagagggaagatgctgataggaggagaacgatcgaacatatatttagtatgtgtgatagtgaaggaatatatgttggtatgggatatataatgtaggacagatacgacaagaagtaagagcaggaagcatatagagaacgaagaggatatgttctatagcagcgattgaccaggatgaggaggccggataagagttcgtgtgaacatactatataggaatacctaattagcttaacgaaagtgaatacgtagaatgatacaagggtatgtgtaccatacaatgtacggtccaagtgtggtaaaagtgtaaccgtccaatactttgcaaaagattagaattagggagcagagaagaactctcccgaaaaatctttccacactcgaatcataatatcaacggcgagctgcggctcatcggtggagagcaggatctcgatcagatcgaatgtgctgaacaggagggctgagtacgtcggagaattgggttcagcttccaacgtatccaagaatgacaggataagatttcgcaagatctgtgaagggactcgcctagcagaccttctcaaagcgtctatcggcgggcttaacgctttttcgagcttgtccctggtctgagatgcaatgaaactctctgctagacgtatggggggataccgcggacagtcgacgtcaggaaatcttgctcgcaggatcccccgatctttggtatgagtgtctaaaaacaagagggctgctaagacgacagattcttgtatgcagtgtgaagagccttgactagcttttgcttgtgaatcggaagcaggcgaccaaatcgagagatattcaggcgttggttgagctggaggctttctggcatacacgtaggggaattgtgagggtatgccctttccatgcggcagttgagaaccgtgcaaggtattttgtctagagtctctttcatgtccttgaacggcttcttcgaaggaggataatcgccatcctggggatccccatcgatcatgtctatttctgatgctgagggaaccgcggatatcctgggcgtgaccgccaaacaaggaccaggtggctgaatagtatcgagggcctcgcctatatgctcccgatgccgaatcccagcggccagccagtcttgaaaaagaccaagatagtctggatatggcttcaaaatctcagaataatgctcccacacacgcagaacatcgcggtttctatctgcaggattatcattcgcaaggagagcacggacgatgaacccgagacagtctacaaatccatcaacatgcgcttctttatcttccatggcatgcataacggtgtcggccgctccaaaaagcacctcgttggctctggacgaaagaaatggcgcgtgatctgggtgtttcattacctgataaagccagtccgaagtgtaaactagatgttgaatcgctagcccacgcggcaaaccggggctgagcttaaccacgtctggatcatgttgagaccggtgttgctgccaaaactcgtctcgtgcttttgcgagtcggtccatgaatgacagttccagaagtgtaggcgctctaggaaacaggcaaggcgataagagcaaaccggttggaccactccatctgacatctgtctgaccctttatgttgccttgtcgttcgtactccatcaggaccgggattatcgggtcgaggagtatttcagccagttcacactcagtgaatgactcaccccgggccaggtctcttaccgattccattctgcgactaacaatggcagaaaacatgttgcagatccgtcctgtaattctcgatactgaagaccgcgcccatggttcacgcagtagaagcaaacatgttttgaggagaccttccataattttatgcccagtctgcgcttctcgttccaggtctgacctgggcacagatgcctctccttgtgtagcagctctgcaggagagcatcaaagggcagcggtcgatgatctcgtacatcaagtcaggaaatacaagctgtgcccacgggttagtcagaagtgagccgaagatgcataagattgactcactgcgtcccgtatgtatctactagtccattcaactatctcggcaaagatatcaatggagctcgttcttgctgccagtttgacagccgatattgcccaacgcaggcgctctgcgggctcgcgcgcacgtaccgatttctgcttcatgtcgcccagggctaaatcctctcagtaaatgggaggagccgcaaggagggcaagatcctgcttacctttgagggttatagggaacccgtttcgttcaggactagctgactcccaacttgcccagagtagacactgtgcctcccaggatggcattttcaactctggatttctgctgtcaaaacttggaagaaactcttcgcagtgataaatatggagtgaccggccaaagagggactcggagtcgtcaggtcgtagcctatccaagacatccaagtcccagcaaggcatgagttcttgctctctctgggacggcggccaggttgtgaggtcaaagtccatggttgggcaatgtcggcaaagtaattgaaggaacgccttccttcctctgatgtttacgagacgaataaggctgttgagggtttcagagaattgtcgacgattcttaccctgattctgaaagctctcatcctgcacgtgcagcaccctcttaatcaaacagtcttccagttcgatctggtatgctgacaagtctttcaaccgccgcctcttctggcactgtgctaccaggccctcgtgggtacctttcactcctccaaagcgtgagatcgaccaaaactgaacgatatcccgtgaaagagcgcgcgaaagctagccagaggttgtactgaggtgcctcattgccctagcttggagaacagcaaatccttgattcaagatccgcaaaagtgatccaaacggcagtttatctcggatcccctgtctcgctgttgcctccactaaccgctcaagtacatggcttctgagaatttccggctctctttccagggccgtcaagaggtccatgccaaacagtagtcccggagacaggttaagggtgagctgcacgtcctgataatagatggggtcatatggttctttagaattcagcaatgcggtttgacactgctggagggtcttgcgccgcacttcctcgggcatgtctactttcccaatggctattcgccgtagaagtggagtatggaagcgggacgtatatttgaggagctccggacactttggcgactgagaccgaagcatatcttcgactctttcagcgctacagtacgcgtacaagtgggacacatggggcaacagcgacctcgacaacca

SEQ ID NO: 14550 - DNA, 2316 bp, Emericella nidulans
gcacacagttatcatcgggttgggtatcaggagcaacaactctcgatctgtcaccaaattgcgtctagactcagcaatctattgtgtactcgacatgatcccgttttcagtaaagcctttgatctgcgacatgatctttcctctcgcgcagggtagatcaacggtcctttcaccgctgttgcaagactggttgaatggggggaacagttgctcgggctggtgctccttcgggtgtaccagtgccatttccgtcgtcaaccccggatccttcttgaatttcttagaagcggttttggaggaggcgcgcatgccagtgcgctagccgagtttaggggtttcttttttggtcatcgacactggcgaggcgttggtgttctggaaattattcgttaactccgctttgtgtttgtacagtagcgcatatggttactgacttacgttttcctcatcttctgcttcgatgccggatacatgctgctcatccccgttgtcgttcgcttcattcatcgctgcattggcaacttcccgtccgtggtcggtgcggatatttatgggggtgaactcaatggaatgggtgtatagttctgtactgatgtcgaagtccatacttgaggtgatgagaagctgatatcctcttgtcgtggacgttaatagctagtttcgactaaggtatgagaagctcgagggttgagtgaagatgagcgagcggatacagaaacccaggcttgactgactacaagcttgaatgagaaatcagggaagtgaattgaatgactagatggaggtcacggtttggtgtgagggctagagatgaacttgagttggtgcaggaagatgaacgagcaggatgtaggagggtagaaaaatggcagtatgattcctcacttggagaagaggaagagtacaccatgaagtcaagaagtgttgctcctagttgaggtgaaacgctgggaagagcgaggagacttcgtttgtgttggtgatattgagtgagcatcatcaggagctgcttcttggacatgccgcttatgtttacgaaataaagagataaatatactttaatgatagactcagactctggtacatactccacggatttggtaacattgaaactatactgaacttcattcgcgtgccatgattgtcattcgattccaggtccataagacgaaggattgctagtaggctacaggaactagtcataatagcagcggtctgggctctggttacaaagactaatgcgttatttatacaatacagatctctggccatggaactacgctgcactgctatcagcttgctccatgtcttgggaaacataccctaaaggctctggctgagtgtaagcgcggtactaacgccttattaatgctctatactccaaccagcatgattggcactgacaagatgctgacggtgaattagcaaagcatgaaagcttgcttgcttcttcgtatacagtttgctgtttgatgattcgattctcgactaaaaaagtgaagcggcatccttcagctctcgcccgagttgcgattcattaatcgcacgattgattcggatgctcagttgttgtgtcacatggttgaagataatcactgatcctcatctcgatcaactccatcgccggctggaccaaactgctcaatcggtttctgaggtcagtgggactgaccgttgagacgatcgatttgtccgagccaacacacatcgtgacctgaaatatcccaccttggtagttacactaaagggctcggcagcgctcagtccatagactgacaagaaagcattgggaagaagtacctgcactaaccctgagaactgacaactctgcatgcaaaccgggcaacgccattcgccagctgtgctccatcgtccttagctgcagtttcttctgggaacttcgcgatcagcgattcgtgtaacaagattccagattttcggacggtctctctagttccaatcccgggtatctctccggttttgttccctcagtggagtgcccgttgttttgctagtcctcttgcgcaaaatgcttgcagcgggactggaaagaaaagccggtaggtgatcggctacttcgcaacaacagttggccgttatcgacttaccagtggcacagggcttagcgtgtacttcttctcacggaaggcgctgtaggaaaactcaccggggatgcgagccggggtaccgtaaaaatcatcatgaactgtgcgttgcctgggcgtgagttcgggcccttgcttagcatgacgccaggtcagttctcaataaggcaagaagatgcccaaaggcccgtatttgggaggattacacaac

SEQ ID NO: 14551 - DNA, 572 bp, Emericella nidulans
ggcgacacgccttgtgggccctacgaccttgtataccgttgattggtggcagcctgctggtggcctttaccggcggggctcagacctcctgctgcagttgaaccaacgcaacaccggctctgcggactggactgcagagacggtggtgccgagcgtgctcacgcatccggatccgacagactgaacccgcagagtaacaggatgggtgaggggcgctaccgtgccgaccagggtacggtcgtcataccctggggggcctaaggtataggggacgcagtttctagccggcctgacggaacccctcaaagttcgacattggggtggcactctccagaagcgaccatcttgactaggaccctcatgtcgtcggtttcatatgagacgacttcatctttgagctccccgtccgcccctgaaaaccctctgtcctgggtaaaaattgttttcactccaagcttattgacttagactcgctttgttgtctatccttttgctaccgcttaccttccctcttttcctttttgtacggggtcttgatttccatcaagtctataataacttgtcggctttgc

SEQ ID NO: 14552 - DNA, 523 bp, Emericella nidulans
acggggaggcatgggacccccttgattaaaccttcgcagcttttgttttaatagcgagcttgcgattgccggttggtgaaatttcatacgcgtcgaaccacatgatcatgggtgctatcatgaaccctcaatgcatacgggagagagagcacactataaaagaccgtcgtggcgggatgctgcccaggtaccagtatggggcaaaacctagggaaattagggaacttgctagaagacagtcccggcccaggcgcaagctggttttaacggcggacatacttcttgacattacaggtgactggtatggggaacgataatctttttccggagaacgaatatccaattgaacaaccgaacccaaatcgacccgttcgtttagcaactacgcccactctctgggtgtggtgtcagaagtaatgcccttattgggaaagggtctacccctgaaacgttttgactgcgttccaatcattcccagattgggccaatgaaatggccaaaccccggaaaaggatttctactt

SEQ ID NO: 14553 - DNA, 1915 bp, Emericella nidulans
acctgatgctcctgctacaatctctaatagcctgcttcattctctgctgttacgactccatgcctaaccaggaaatcaataacagcgacggcgctattcagcttgaactctccttcccgcaaagcacgcataacctcctctaccgtccacagatagaacccctccacctcgccatccccaggaacaggcatagtactcggatcaagacgtagttcatacacgtactccacctccggctgcaatggcccagcctcacagcgctcactgggtctttttacatgatagtaagaaatcgcaccgccaccacacaagcccctcctcactaaatcctcgtccagactcgcctcctcgacagcttccctcacgaccgcctcaactggcttttcccagaaacgggtctccagccccccggcagcagtgttatccaggagccccgggtaagtttgcttggtaagtgatcggcgcgctatccagagtagcagtccacgatcaggatcgtcaacgaagcaggtcagttgtacgccagacgtaaagattccgaagagcgtactggcgctgcgctcgatctcgagaagtaatttcccggtttctgggtggcggatgggaaacgtctcgtttcgccaggccctggagagcctagacagttgaggatgcggggactgtgacatcctatgtagagtcgactccattaggaacgtgagtgtttccgtcgtccatgtacctgaagacgtagtggaagtggggtttaagctggcaccgagtatcagttcctgtgtttggtggttgacagtccatcctgcactggaaaagtcgaatgcatgcactatgtcgttcgggacatggccaagaacatgtggagaatcagacactttgaatgcatagtagctctgcagggtttctttatatagggctagtttctcggtggggtaggggaaactgcgctcggttagtctggactatgggggttatgtagaggcgggagaggggaggttgaaggattcagatacttatcgcattctcgaacaatgtggaggagggactgaggcatctcggcaggtaccttactgtgggaaagctgtagaaaggtggattgcttgagtaagagcctgacgattatacctaggtaccgtacgctaatgaggacagatctgcagttgcctaggtgacaggtgtcattggagtaagacagtcaagtgatgaccacaagaaacttgatgtacctacttggataacttccaccgattgcaggcataatggaacccgtaacctggccttacatcaaggcaggcctgtggtataggcccataattgagatacgtacctggcgcttacaactcacctacattaccgcatccctcccctttttccaatcagagtacgtaactgcagattcgatatatggaggatctctgccagctggcctcgtgatctgacttctcaacttaaaggtagaggctgcagagcattcgcgtctgcatttggctttcctcagattacaattgaggtcgccgtactataaccctcgtcatagcccttatcgccctgcatcgctcttccagatatgggcaagcggtacgcctattgctgctggtgcatggctggtactccgatctcgcccttggtcagactatattagttccgttgttcctgccttgacgtggccttttgatggtcaagtcaatgtgatatggatggactatgaagataggctggcaatgggaatgttgggacaggtattactgttggaaataccccacaagggtacggattgggtggcctacgcatcctgtcaagccgagactacgatgggcagcagagacaatgattaggataataaaaaaaattataccggtgcataaaagtatgggatggaaagttgattggttagtttgatctaattccagtaatccatgcg

SEQ ID NO: 14554 - DNA, 900 bp, Emericella nidulans
ggcgcgcgtgaggggtgctgttatctgtcggttcaacggcggggattagaaacatcatcttcctcccctgtccttggtcgctatccgcaacatggttgttgaccaccacctacaagatcgcggggagagctgccgcctctgccgcttctttctcacaaccataacaacatatggtggcgacactttctggaagcgggcggatgacaacaccatcatccagcaggtgcttggtcgccacctacttggctgctccatcctcggcgccagcgacgatttttatatatccgagaaccgttttaactgggacaccgaactcagccggtgctcaatgaacggggaggcgaccccttaaaaccaaaaatgaatgacctgttcgagccgcaccacgaagaagcatcttattcaaacaacccgtgatgagtgcaacagatttattgcacacgcaacatacctgaagaacattctgcccagaagcttgcggcccaccttccggaggccgtctcgcgccattgacggcaccatagtcttctccagtgttgaaggcctgcacacccatgcgttgataccttcgccaccactacgggtgaaggaatcttccttgacgaggggaatgccccaaaggggcctcccacgtaacaacttggggcatgctgagttcctccgccctccgcgagtctttttggtttcaataaaggcggtgggaggcacctaagctcccccgacgacatgcgacaacctgggcactttttggtcacacgcttttttcttggcgggggggagcccgggaaataagcccccttccttttgggggattttgggctttcgaaatgccctaaatttccaaccgttggcaaacctctttcacccgctgaataccactttctccttttcctcccacac

SEQ ID NO: 14555 - DNA, 876 bp, Emericella nidulans
  unsure (1)..(876): unsure at all n locations
gaactgagacgaataactgacggaagaacgttaaatacagcgtatactcctgaagctgaggagttcaggcgaaggggttaaagacggatatgtagcgcagctgagtactgactctgggttctatacacaggcaaagttgataccgagtcaatatcgatagcagcccgggggctcagagaaacgcacgaaaggaataccttacctggaacgacagctgtatggataggacactcggaattcgttgagtgataggtcaccatcgagactctacgtcagggcttgtgacggttccgaggggggccacaccgtctactgaatacttgaggagtgccaggaacccatctgaggctggacaacttgataatcctgtgcagaagttggattccattacgaaatatttatcggcgacaaggggggatagcggagcgagttttattcatggcaacagcccaaatgtcccagagggggttcttttgtccccaacaaatttccaaaaatcagggggaaaaacaaaacacaatcgggcccattcctgaatggccatcagaaaactacagcggttcaaaaatcggttaccctttcaaaaattagcagctcttaaccaaacgttgttgaattatacaaaggccaagggagattttgcccttgatctcaattgggaggagtttggggaaacccttatacaatttttggggggaatctttaagtcttaaaaagtatttgttgtttcttcctcaaaaaagttttcaacccgtaacttggattttcccccataattcgcccatagggaaagcttttattttatgttctaaggtgtttttttntttaaaatagattggtgagggggcccccgggcgagacccccccccccccccc

SEQ ID NO: 14556 - DNA, 681 bp, Emericella nidulans
gctgggcttggagtagtctattcgaagcctgataaactgtgatgtctcgaggcttccaccttgcagcttggctcggggacaacttgacagttatgtttccgtatccgacgcaacagtgccattcactgcccgaacagaccgtcgataggcaatcgctccagcatcgctccgaataacagttctcgtatccccggaagaagtcgagttactattgtctgccgtcgactgataagacgattgaccgcattgcgagatgtccaggtgtcatgggcccgaagtaaaggtgtaagtagaaataccgggtacgccactcgggtcaactctgagtcccctccgcatccaagcgtcgatggtgaggccgtcatctaagtcgccgaaggttgtatttacagtcaacggataatcaaagctgagttcgtcgacgtcgattgcaaccgccagtgggccgaacaaaatggacgatgatgtacgctgcacattcttgtgagtaaggccctgttgattgtaaaggcccacgctcgagaaagaaggttcctgcttcatacaagggcggagacctgttgcaatgaattttaccccagtaccgatatttcagggccgagttccgcatactgttggtcaaattttcgaatagtaaaagggcggggcacacatgcaggcttgcccggccggccgatagca

SEQ ID NO: 14557 - DNA, 3356 bp, Emericella nidulans
atgcagaagaccccatggaaggatgtatgagtgcactccgggagtggcatacatggcgtgggtgcctgttgctgagtatattacaggctgtcggattggaccaattattagcgttccaatatgcctgaaaaccgcctgcgaatttacttactcgtcggcctatcttctccaaggcttcgtagctgtatgcttcgcctccagaatgggcgctgaagaaaagagccttggggattccgtggtggaagcgcacaagacagtgttcccaatctccaatgtggtttccgaaccgcacattgagtaccacatttccaagattgaaactatagaaatagaaccagaaagcatccacaatgccattgcccttgtcgatgacgagtagaattgctggcgcctcgcttcgcccgcctaccgccttgatggatatcggttcgcctccataccgcttgcgcagttcatcacgtacggtatcttcatcctgcatgagatagccgagctgatctagcgagatatcttctgactccctgtcctgcagaggcagttgcgtatcgtacctttttgctcgattctggggcgtatcatccgcgaaagcaccgtctatccgaccatcccaatcagcccaagctggctccgggtcatcgtctggggggcttgggacattcttctccccttccatccatggaggacgttcttccacgtcatcattgctagtaaggaagacattgcgcccggcctcccaacgattcagttggtcaagatttcgcaaggttgggtgatcggactgcgactgaatcggagtataattcagcatgggcgtgatgtggtagagatgctccgcaatatcgcagggccagaactgttcaccagaaaagagatgcaccagcggagcatagtccaaaacataatctggaatctgacgacgagaccgttctgcttcgtcccaggtttcctcgggatgagcggttttgttctcccagtactcccgccagggtgactgatctgcttccccagggagctccatcagtgactcagccttgcgatggccgaagcgtgaatgagacgggcgaaagtgagcagcaccgcagatgccgaaccagcgacaagctttccgatcgagccaatgatgcgaagacgcaatccagctcttctcgtcataatcctcctcataccagatgaagaccgacggcttgaccgcccgaatgatactgttgagcgtcacataggcaatgagtgatgaaagagtgacaattgccgcggtagtcttctggaccatctgctcataggtactgagagtgctagggagtgctgcagcgttggagtcggtacgtaactcagacttaggggcgactccaacgtctttacgaccggcagcactttcggaggttaagggagaagcggtggtggtaagagtagtgggggtgctgatgtatgatttcccgattgggatagcaccaccaggcggcgataagatagcggtcaacggagggtcgtcggggggattgacaatcgctactaccgcagtagcgaagagaccgagcaggatgaagaaggatcgaaggcgagcatttggattcgggggtacaggaacaggaacgggaggcactataagaaggaaataaagcattgtcctgtcagcgggtggccgaatatccacagggagcgatgacggcggcacggaatcgacggccgggaccagcaacagaacccattagcagggaacggcgattggcctaggcagaaggaaagcccgggaacgacggaattcggcttagataatgggcattgggctgacgagcctgagagggaccgactggcctggaagatgacggatgcattgcgctggtgacctcccttgcttccgcgcaaagccggatcttgcaggaacggcggccataattggcgcgtctaaccaagcaaagagcgccaggacttactggtggatgttttctttatgcttgttcaggaaactgagcacagggctgaggtagtggggtcctggaggggttcatctgatagaggatgagatgcttatgagatcattcaagagacctgatcagtacgagtttggtgtttgtggcatgcaccgctgccatgagtcaagcacaaatgattaatcagcttgaaagattgaacctggaacttggagtctgaagctttgatgacaactgacaacgaatgcaggaaagccggtatgcggcatgctgagtctcgctgctggttgcagggctgaaagatggagctgggaggggcaagatgccgggctcggagcgagttcccgtgatttaatgacaatacgtgacagcttccgtttacttcctgtccaatcatgcttctttactgccgatgctatactgtattatcaatccgttacagcagactccgctgttgatcttccaaggccgaaagcccggcactccggaggactcggccttgaattgaccagcacagagagctgagcctggtccatcacgccatgtcggtgctcgatcctgcgctgctcagcacttcgcctgaaaatggtgaggattctgagtgggaatacgaatatgacgacacggaaacagaggtaggtatgatggaaaaacaccagtcctgcgtttccgctgctaatcgctttccccagactttctttctcaacctcgacctgacaactaatcacggacccttacggccgccgcgccgccgtaatgatgcctccgcttcagccccaatcagtgcagtgaataccgctaatccaacgccggccccttcgcgccctgacgaccgagactccgccgtagtcaatcctgaaaccgacgacgcgccctcggaacgcgtgcaagttctgggacttcatactcgcaacccgatcatctcctaccagaaccaaatctttagtggagcgtgggcagatcagattggcacggaattgttctttgcgcggcctgacacgactagtactgaattcaacgagcccggtaacgcgcctgcggaggtcactccattgaaacacaccaaggatttcgacctcattgctgccaatagcgtcaagattcttggtcgaaaagccaatctcatctcaagctcaagctcagcggcagaccagcgggatggtttgacaccagagacgtcaggactggtgtacaagccagcgcatcaatcgaaccaggcccgcttcttagagcgtctaaggaggtcaaaagaagcaaaggcgagacggatacggtacgcacggtgtttagcacgttcagaaagggtccgaatctcgaagatcgactacgcggatgggtacagacggaggaacaagttgctacgattcagcagctcaatgaccgagccggtcaaggcgactatgatgccatgatcgatctgaagaatat

SEQ ID NO: 14558 - DNA, 647 bp, Emericella nidulans
  unsure (1)..(647): unsure at all n locations
gagaatacgtgaacaactattgtcacatactaagccatgtgggattacacatcatcttttgcaacttgatcattcttgcagaaaagccgagtgtcagcagcgactgtgcacaatggcgtacaaaccatcaccattctcgccctgctttacctcggcctccagtcatacccagcgtaccgtagcagtgacgtctacctaaaaattcgagttccgttccaaggtcggatggcgtggacaatgtgggctttgtctcggttttggactcttctcgccagccatgtggggatgctgtcatacaatgagatcgatggatttttccacagtatggagtcagcagagcgaatagcattgcattgtgcgaaagaaggttatgtaaggtacaaggtttggagcgtgattggcgtggtatcgggcggagtctaactttatctgatgtacattgattggcctcagcaatgtctgngttgaagcaatatagatgcatggatagcatattcttctcctgagtggttcagtctaagctgggtggacaccagggaaaccgggcggatgtgaacactgagtggtgatatctagatgtagccaagtgcggctgcactgcctgctctcgcagtgtctcagtgagagctgaggtgcttcgctgcttt

SEQ ID NO: 14559 - DNA, 441 bp, Emericella nidulans
tgattacagggccctactttggctctccatctactggggggtgcctaacgtcgatggcaacacacttcaagtctactggtgtctttctttctgagcatccacagagattaggactgcgcacgactgcctggcggggtttccaacagccgctctatcaacacgccaacgtaagcactgctgagcaatgagatcgcccagaaaccaattcatgaactggaaagggacgctccatctacgacattgagacagttctgtacttctctatgcacacacatccagaggtcctgggacattggggattctccaaagtaatacctcctttcggccgcatctatgatgggtggtccagcgagagttaactgtgtactcacggaccttatatggggcacacatgctgctgagctaaatttcaaacgtctgtatgcatggagatatacttca

SEQ ID NO: 14560 - DNA, 902 bp, Emericella nidulans
tgagcgaacaaatacggggctgcgcccatggactcaggacacggagttcgaccaacggagcatgtttgccttgggggtaagccagaacaccagatccacacggggcggtgctggcccttcaccacacactactgttgggggagttgtacaccctaggattgtgataggggatcgataacactggcctaggagcatgcccggcgcccgtgacataagaggtatttgcgaggaaggtcggaagccggtatgacaatggcaggctgagatcaactacaaagcttcacgaaaaaaactgagcaggaagttgacaggcgtcacactatgtccaacagaatgcgtttcatatcacccaggaacgtgaagctcattgaccgtgcatgtggcaaataaacaggcaaacttaatgcccgccccttacaatacaaatggagatggtgatagcgcgagccaggaacgtgcgatagatatcgcggatccagaattttgtaacgatctaagaacagctaactattgatcaacagccttgccgtcaaacaaggaactgccaataaacttaaaagcgggagcttgcagaccttcgcggtgaaaacattcagtgtcaacgctcgaggggcactgatttttttccaagccccagcaagacctgttgagaagaaccctctaaatcagatcccgagtggatcgttcctcaagattcgttaccctggaaaggggaaggaccctttttgtattgtaaaacgttccggcggacaacccccccttaattaaagatggttgggatgcactactttttggagagaaactcccccagagaggggaggacttgggttcccatacgacccgttttgggcctcctcaccagagaggatacgggtgtgttttaacttatattcactatgcct

SEQ ID NO: 14561 - DNA, 2236 bp, Emericella nidulans
  unsure (1)..(2236): unsure at all n locations
caccaccggtagaaacgtggctaatcttgtcctcagcgccgtacttggcggcaacggtagcagttcaccaccaccaataatgacggtagcaccgttctgaacagccgccacagcagcgtcaagagtagccttggtagccttagcgaagggctccatctcaaagacaccggggggtccgttccacagaatagtcttggactcggcaatggtctgcttgtaggactcgacactcttctcgccaacgtctaagcccatgtaaccatcagggataccctgctcatccagtgcgtagccagtcttcgcatcggcggcaaacttatcggcagtgacgtagtcgacgggaagaacaaccttgacgttgtgcttcttggccttttcgatgatgttaccgacgatcttgctgccggcctcatcgaagagactgcttccaatcttgacgttctcgagagtcttcttgaaggtgaaagccatgcctccggtaatgatgaggctgttgaccttgggaaggaggttgtcaattagctggatcttgtcggaaaccttagagccaccaaggatggcgaggaagggccgctggggctcctcgagggccttcgcgaagtattcgagctccttcttgacgaggaatccggaggccttctggggaaggtcgacaccgaccatggagctgtgagcacggtgggcggtaccaaaggcatcgtctatatagcagtcaataacggactcagttgcaagagagtggtttgaaggctacttactgatgtaaatgtcacccaaagcagtcaatcccttacggaactgcgcaaccgcgtccttgtcggccttgaccttgttgccgtctgcatccttagagcttccttcctcctcggcgtggaagcgcaggttctcaagaaggatgacctggccaccggaggccttgttaacagtctcctcgacctctgggccaacgcagtcctcagtaaagatgacgtcgcggccgagcagttccttgagcttgggcacaacgggcttcaagctgtacttggggttcttcttgccatcaggacggccaaggtgggacatgaggatgacggccttggcgccgttatcgatggcatacttgatggtaggcagagcaccgacgatacgctgagggttggtgattgtggtgttgtcgttcttgtcgaggggcacattgaagtcaacctagttacaattcagcgttagaggggtcattagggggcgtttataggctcaacgtactcggatcaggacacgcttgtccttgagatccacatctgtgatggaaagcttgctggtgagagacattgttgctatagctgtacggagagagatggacgggcaggaacagctagtggggagagaccagggataaataaagcgcgtcaggagaccagaccacctcgcaaatgctgaaattgtatcacggtgagtggcggggtatcagaatcgcagagctaccatttgctttggcgacatggtggggctgccggtgaaggaggagggttcggcgggagtcggaccactgatgtcatgtccacgacgggatacttcgggcctcgctgcttcaggacatcaaccgggggaacattgaacctccgctttctcattagcctcggatcagacagtacaaaatcacgctccgttcctccatggagttatacatcgccgtcccattttcgtcctcaaggtcctggagctcccccgctacacatgacgccgggccgacctacgtgctctgccggaaactataagtggtaacgttcgctgcatgataaaactcaagatttatctgcatctctcttctgcctcgtttgaaactcgagaaaatttgacccatgcattacacctcaaaatagcatgatccgatccagattcacaacgcctagtaagaatttcaacgacacaaaaagtagtaagacaacaaaaacaccaggaatagcggataagacaataatgcagagggccgataggatcaaccagtgatgtttcgtacccatgtttcaaggaagtcaattgggtcaatacccacagccacttttcacgaaagaagccaggtagtcgccatagtgtaccaatctagtgttgattggctttgattgccttgagggtgaccgtagtacaatgagcggcgatggtcatatttgtgtctataccccccaatttaaaatcttcngcagagtttgtaagcgagaggttagaagtccaagcaataccaaccgaggaancgnatggc

SEQ ID NO: 14562 - DNA, 977 bp, Emericella nidulans
tgtcatataagcaggccctctcagtgtctttcttgaccccaattcgttgcgttgtgatggaataccatcaccacttccaccaaaccgcgacgatccacgataacttttcaatctcccagaacgacctgttgacgtttcagcagggaccgggtaaccctggcccgttgaatatagggcccttttctactataccacatggtatatactccccgttcccggtggggaatgatggtgtgaacaacccggtcccgacgggcagtgtgggaagccgtggacatggtctgggttaccctcatgctaccccattggattcaagctatcagccaccgaatgaagatagttgtgggagtcgcaatgactctgctgagccggtggcctggttaaatgcgagaaccccgctcgatcggcccctgcaggagagcgcggagccagctcgctcccccaatggcaggggagcaccacagcgttcgatgaggagagccgataagaagtcctttgagtatgccaagtatgccttgctcatccggtcatttgattccttctgcctagccctactcccgtctaactgattcctgtggtgtagagtcacccctgtctatcgatgcaaatggcaaggttgccctggtcaaaccaacttccggcgctcggctgaccttctccgccatttgaagacgattcacatcgatcctgaggcttatccttgtcctggtcctcggtgcgatcagtcctttgggcgtaaggaccatctcgatcaacacgtgaggcgtcgccattgaaaccgagtcgtcccgatctctttgaccctgctcgacgaggcccggagatgtttaatatatccttcattttctattcattctagcgtatcttataacatcatgccacgccccgttacactatacataactaggtcattgcgtgctcgcgatggcttggccatgtcacttagcctgcgtgaatattcgtactatatagtctgt

SEQ ID NO: 14563 - DNA, 544 bp, Emericella nidulans
gcaaaaggaacgggaggcgctggatgttcacaaccagcacgatcctaatcaaggtaaggcggacatttgtttggacaacagcaatgacaatcacaaccgggagctggctgctgccggctatgcggcggccgcttccctgcccttaagggcagcgcgcacgacctgagaccggcgtcagcgtactatatctgtgcacagcacaaaatcatgtcccacgcaagtgcaatagtgacaacggtggcagcatgacctgctcaagccttatgtctaggcccagggtataagagctggctgcccgacccaatccgcaactgacaggaccctgagctagccagcgagccagcccagaccctgggattgatgaaccgaaccatgattgactactacacacgaatccgttagcttccttcacgtacactcacagagaacttcttaactcccgggtagtacatccggacttggccccctgctgagacacacgagtcgactcgaacatttgcctgagtggatgaaccaggagcgctacatatgctccacctgcaac

SEQ ID NO: 14564 - DNA, 584 bp, Emericella nidulans
tgtagtgaaaacagccggaggaccatagggtttcatgtagccatttgtgcctgtaggtttttttggtgaggtgaatgtaaatgaacatgaggcccaacgttagggtgatgcgcggtacacaaaaaactcagatgtggacgactgtttgggagtcgatgaagacaataatgatgtttagcactaatcatatctatgggtttatcataccatacttccacaaccttttgatggttgtgctcagctcatccaggactgacgtcaagacaacctgactagccaaaaccaaagccgaaggttctgactctattgcgtaaccatcgacttagggaatttgttgattttctacatttacaaaaagccatcaaatcataggctttggcacgcttaacatttagtcatcacgagaccataaacattaagtttcctgcttccagaacgggaaacctcaataccgcatgtttatcacatttgcctttattagcatcataaacctagtttgacttaaacaaacccgcttatcggcaaatcatcagaaacttttcggtttaattaactgaaatggaatggaataatggctcgacatt

SEQ ID NO: 14565 - DNA, 1159 bp, Emericella nidulans
atttacttcattttctcttggttcgcagcatatacattttcatatacttgatacatccacatacccctacgcgctgattcaccttaaccaggccattattgcaagcggaacctattccggcttccacataactacttagtctgaagtcaattagctcaaatatggaagtcttataacatgcacaataaatcagtatgccgtagttctcaacagacgcagtcacctgcttcgtacgggaattgatgcaatgcaaatgcacgggataagtaccacatatcctagacaggtctgtatcttttgatttggaacgcttgcacgtcatccatcgctcctccgaattttccacacaacgtaggtcttggcaccgcttcgctcgtgacgaaccagacctaaatcgaccaaatgaatgcatgcactttgacacggtgattgttaccttactctgaactagaaagcagatcctaggtatcgcatgtcatatgccaaatacgtcatcagttatagttgtgaggtgggtatatattatcatctattcgtatagctccaaccttgcagccctactaatccgataaatccactggtgagtccgccgtgccatttcctgccctagcttcggctccatcttcgggttcggatctacacgtggagttggtcctggacttgggcgtcgccccggcgccatcatcggccgcgaaaggcgtttgcttcacctcgggctccgtcgacttcttaaacaaaaactgcacccggttctcctcgtctgttaaaagagaacgcaagacctcatcccccaggacttgatcaagacccccagccccaaagttttccaatgtcgatgtcgatggcatgaaaagagaggggtcgatgtgtacgtagtgagagaggctttcttttattttctgcttgctgctgttggtgttcccgctgccagagttcttactcgtcaatactgacgcacgtgggcctctgcctcctgttgcaaaaaatcgttcttgttcttccatgttcacttcagtggctttcataagggttggaaattttaggcaggatatgtctgactcgtcatcatcttcactgagtccttccggttcttgttgaggcgtatggtcattacctgaagcggtggaataccctttcccaccgcagccgcaggctagga

SEQ ID NO: 14566 - DNA, 1886 bp, Emericella nidulans
aagtccataggtggcaaacggcactcccttggaggacattatcggcttcatgaagcgcgacggggttttttttgtgcggcagctcgtgtccccagccgacattgatcaagcatacgaagaaattcggccttgccttgagcaacggacacggtggaacggctcattttttccaagtacagtaccaagacaagcatcatgacccctctaaccctatcagaggaaacccagcggactccgaacttgatcgccattagcccaacatacacgcggacgcagatgatgaaccccctgttccatcagctgtgcaaccatttcctgactacgcgcagctggaactggtggggcgatgaatggtccgagactgtgtcgcggccgtacatctcggcgacctcggctcttagggttgggcctggtgcgaaggctcagccgctacatcgcgatgactatgtcagccacaattacatcgtcgagtcccctatgtttaactaccgccagcaggtttccatcacgatgattgtcgctggctgcaaggtgaccaaggagaatggagggacgcagttcattccagggagccatctatggcatgtccccactaactacctaggtccagagcaatttgttgacatgttgtaggggtagcgacagacctaacccacccaaagtgaccgactgcacctatgcgtctatggaaaaaggcgatgcactagttttattttcgtccttgtaccatggagggggccataacacaaccacggacgagcatcgccttgtgttcactacttgcgccatccggggctacttccggcaggaagaaaatcagtatctggcggtgccaatgcagcgtgtgcgtgagtatgaccgcgatacccagaagttcatcgggtattccatgagcgaaccagcgtgtggccatgctgatgagatggatccaatctaccttgtgcaccctgaggagttggagacagcagagccgattcaattttgaatcgtacttgatcctgactgtggatatctacgaaaagcaatatttaagttttttcttgaagtggttgactaggttggtatgtagtaatatctaacaccctctgaactcaaggttccgtaaccaccgtaaaacctcattctcagtgctgaccagatccactcgcctgttgattccgtaatcgtccatatcttgcccttttctgaggcaaatatatcggctccaaggcccaacgccgctccagggagtgagaggcgcctagtctagatctgtttgtacaagatagtccggtatttttcttaatcattttgcaatgtgtctagcagcgacatttcccgtattatttgcaagggaagtatgctaggttaagttccagtaacagaagaccaggactgggttatagtaaattgaatcttataaccaaactcctgctgtaaatgatttaatacgtctaattatggtgataatcaacacagaacacctccataatgctcttcatcgataaccctggcacttgcaagacattgacacccgaggcaattgccgataaggtccagaagccgctctgtattcttagtgtaggagagttcgggcagaacccaacactgctggagcgaaccctgaaagacgcactagagctttacggaagaatcgaacgccatactgctgtttgatgagttcgatatatttctccagcagaggtccgtcgagcacctcggacatagccaagttgtcgccatcttcctcaggccgttggaatactatcacggcatcttgaactccattgtgtaagatcatacagaatgtttcctatgtaattagaaaaaggtctgatacacaggaaagaatgtctcatttccatacgccgacccgccataagtgaggtaccctcaaaaattgttcc

SEQ ID NO: 14567 - DNA, 1949 bp, Emericella nidulans
cggatcactgttggctacacacaacaggacaactttgtcgttccttggcgagtcattggtaaagactctgaagtatttggtcttcgctgggagacgaaacctcttttagatcttgggcatgcgatagatcgtctggtcaccagtgccgcctggtcagccggccgtcacgttctgaccaaaacaatctttgcaggccttatcagtgcgctaaccttgcccgttgggcttatgaaagttgccggcatcgctgacaacccgttcagtgtggccaaatctcgtgcagacaaggccggcgaagtccttgccgatgcgctgataagcaaagtacaaggcgaaagacctgtcacgctcatcggttactcgttaggatctcgagttatcttctcgtgtcttcaaactttatccaaaagacacgcgtatgggttgatcgagtccgcaattttcatgggagcgccaacgccttccgatacaccagactggcgccgcatgcggcgcgttgtcagcggccggcttgtcaatgtctattcagggaatgactctgttttggcgttcctttataggacaagttgtctccagctcggcgttgcagggctacaagctattgagaacgtccctggggtcgagaatcttgacgtgagcgacatcatcaacgggcacctccgctaccagtatctccttgggcgaatactccgtacagttgggttggaatgtatcagtgctcgggaggtggcacgagaagaggcagccttgaaggcaaaggactacaagcaggaacaacaacggatccaaaatgagcgccgcgctggaattgagggggacactgaagaggctcgcaggaagctggaaagcggcgagatcgctgctgaggaagaggctattccacagccacacccggaggcccgccatgctataccgcgtcgtcctcttcctgtgagatcagctcaagagaataaagagaaagaccaagcttaactctgtcgtcttggttatatgaaggcggaccgagctataatagtcttcctttaaggatccggactaccatgtagagacggtacttggtatgattcactcgcgatttacttagagaattagaattcatggttattttgttttcatttacattgcaccaaagaactcctttctccgttaacccaattgtaaaagcatttcaatgatatggcggaagaacaagttaggagaaaaggaatgaaagatgacccagttcaagcatacgtaaaggcattgaagagctcatgaaattttgatcgcagaaaatgcaatatcgcaggcacctgagaaatgttgccatatgccaagctataaaatcactcctcaacctcttcaacacgaggcgcgagatcacgcttgactggacccgctgcatccgcactttctgtcgcagttgtagttgctgcgggtgcggtctcagcggttgctgcaggggcagactctgtagcctgaggatttgacgtttgagctgcgctactcgcagccttcttagacttctttttcttcttgccagtctgataaatctttggtcagtgattgttctgcatcaggaacagggaaagcgtacctcttgccacccccataatggcttgaaactgtcaaagaaaccaacatcttcgaacaggttgggaaacagccacagaccaggaggtacagcgaaaacggtgatacaaaagagaataagacggaaaatggccattgcgaagaatagaccgagcagacccatcatgccgacactcaaataccacacagcttgcctcagcattatgggccaaagcggaaagagcacgactgcgaagataccagccaccacggcggcagccatagccttttgcttccattgcgggccctcataaagccaaacgtagtgcatcatcggatcggcttcctggtgctgctcgatcttcacagtccacagccccttcactctcttcgtcttt

SEQ ID NO: 14568 - DNA, 609 bp, Emericella nidulans
aacttcctggccggccagagaagcctggcgcccatgatgtcggggtccacggcgcggctgatttttttgcacttgatccaaagggccggccggtgacattatacagccttacctggtgggacgagataaagaccgactggtcccctaagaagagacgggatggaggtcccagatgccagggaactggggggggaggaccagagcgcgactcccggtggatggagggactggcactatcgatccaacctactgaggagggaagacctgtgtgattcagacttagtggctgacgctcgagacgagggtccaggaactgatagtccaatggcccactatcctcagaggtaggggattgatgagaacgcaatgtacctgaggcgacagcgcttgactttcttcgacgctcttattcgagccaggcgagcaaagagcgaacaacatcgagcgtggctggcaggaggatggtcgcgactcatgtcagcaggcctagagacgacaggtctatgaccaattatgccaccgggaccggaaggcgcgccattatcgatgtgagctccattccaaagctgggcactgttaatcttcccggtgcagacgagctggtcctcg

SEQ ID NO: 14569 - DNA, 1381 bp, Emericella nidulans
  unsure (1)..(1381): unsure at all n locations
ctcattttcgcagcctgcttgcttttttccacgtatatggccgcgtctgaggccgcttgtcctggaccgccctggcactggtactggcactggtactgcaccggtactgcactggctcttgcacaccagcgctctgcactttgcactttggacacgcccgtggatcagttggatcgttggatcgttggatcagtgcatcagttggattcaagactgggctcagaaattagcctagagagctccggccgactcactgactagactacgtagccgtcgaatcgcttcgagctcggggtctgcggattcacggaacagccacctgctccaccctgcggcgcttctgctttaattattctctggcatcgcggtccatcgatcatcgtcatttcttcaccccatgcccatcagcctgaccgctcagaggctctgaagtctgcaccactctgcagtgagcctgtgtccacctttgccaagcggtcgaacaggaactgccgtacgttacatccccgtcgctcgcccgctcattcttctctctcaatttcatccatcgtgncgctcctgcttctcttctcttctcttgttctttctttgtcgcggctcgctccctcgtattctttgcctatcttcttcccgccttgtgaggtcatagcccgtttctctgccgctccgggcccttcgagcctcttccattctcccggcgcttcccagccagaattatcccgactcacctgcgatcgacgctggcgtcatcccatttcttgaagaacagatcaccttgcattctagacggggcttttttttttctcttgtcatttttgagacggtgaaaagaggggagtggcttcttatatcgctcgcccgccttgtctcttgagcctcaagcggtgcgcgattcgactccgattgagcctcatccgttcctggaacccaggtgagcttatttcgcctccgctttcaccaccaccaccactaccaccactacccttctccaacactgtgtatcgagtctatcggcggtcgctccactgatgaattctccaacctgtttctgcccctgcctggccctgtaactcttgatcagctcttgagctcttgatccaaagccgctcttgcacttttttatcgttatgatgtactgcgctttgtaatctcccactgtactaacaccacccatagataacactcggcctagtatactgtttaatggtctaagtgcaagcccctattgtcttaagatcggggccgctgttttggagtgtcattaggatcggccagagacataagcaaatgcccaagagggcaactaaaccacgtccaccgcttagatcagaccggtgctctgatgcgcaaaaaccgcctccatgatgactgaagcaatgga

SEQ ID NO: 14570 - DNA, 2169 bp, Emericella nidulans
aaagcccttccttcaaccccatccaggtcaaataagcgggaagtcccttatcctgcggcagcactgacttccactcggggacgaacccagcccgacgcagcaccattccctctccagtccttagccagaccccgtaactcatcccgacagaagattctccagctatccaaggcataagctcccaccccagggaggtgcgcaatctcccaagctatccgctgatcttcgtcgtcgatacactcaccggctttgacgtcccggccgtcagtcttgcgtggatagttgagtttccggtaccgtctgccacggaaaggcggacaactcagccatgtctgcgctagtgcgatacatttccttgcacgctgattctgaaagccgaggcggtggatcatggataccagctcgtgtgggttggccacggccattgcttcgatcgtggggtacctgtcgaagacctggaataggatgggaagcgcaacgccgccacgtgttcggttgaggaagatcgttgcgaggagtaagcggaatggatcgtgggcgagttgctcttgtactaaaccaaaatttggtgcatcgattggggggaacggcaggcaagagtcttcgttaacgaacggcctctggaaatagcgtgatatccttgttggtttaagacggggtcttttttctggtatgagtatacgatctaacgaaaggtcaaatgggtggggcgtatgctccatcgcatcgcagggaatgacgcatcgtgtaggcgtgacaggttcgcttggaatcccggttacctcctcgaggctctccgtgaggcagcgctgaagtgatagggatcgatcaggagacgcacgggggctattaggaaaggaatcaatgtcgctgggtacatcactcaaagtcgagtcggagagcaaaatgtcagaaagcatgcccatgtcctcggccatgctcaggacatggtctggcatggagcgatgtttgcggaccaggggcgatgattcaatctcagcagctcttccgttttttaagtctccgatgtttgagtgcataaaatattttgacctcacctcattgccggttgtcacccccggcaaatcatcggttcttaaaaatccagcacaataggatcttctcgtactgccccgctatacctgcagtcgcggacctctatcgaggactgcgatgattggcgtctagcagtgcgttgtatcttcttctttgaccaatttcgcggctcttcttgcattttgcccttgccgcaaatcagtggcttctctgacttgttcagagaagcaacctttgcagattcaaggtcaacggtaatcgcagtttttctcgcccccttgtgggcttcagaatagggctggtctgaactttgcctccgttcacgctttcgtttccgtttcttttgaaattttgacagcttcccctcctcggctacatcatcatgatcaagggcgtcacagggagttagcgcagtccgtctggagaggctcgtggtattgacaagttgtttcctcacttaagctgtcagccctagtcaaggcttcgtccctcttctgcttaaaagtctgctgatcactcgagctcggcacctcggattcgtgcgaagctggatcagagtcatcaatctcgtctccgaactctattccctccgaaaatgcagctgcagatccaacactcttcaggtaatagcgcttgatatcaaggagcaccctattaacttctttctccttgtatcctagctcaccagcctcctcatgtacatcccggacgaactgttgacgcgaggacaatgagacagggtaatgtttgttccgcatgaaactgtgctcgcaaatgaatctcaaaagaggcgagtatgtatcatcatcgaaatctgtagagtttaaggggtccgcatcgaggttgatgtcaccaccacgtccttcatgttttccgttgtctgggtttcctccgaaggatggtaacaatatcggcttgggcacggactcgagttccttcttgttgaagttgacctgggcgttgtcactgagttcagccttcgtgatcaagaggttggtcggctctttgactgcgcgattgttggtgcttgtcctgctcgtcgttttcttcctgctcttggtcttaggcttgcaagggacagatttagcgaaataaaagaagggcgaaatccct

SEQ ID NO: 14571 - DNA, 553 bp, Emericella nidulans
ggggggcactgcccatggggctcgtgtgatcggacaggggccgtatagggcgggcctttcttttatgttagcaaaagcgcagatgcaaccaaggtctggtggtttacaggggcgtgataccaatcttcgcaggcctggcccgggttaccggtaggcatgacggtgtgctcgctgcgcacggctgatgggagggatgcaaccggcggtcttcggaggtgcgttagtagcgtgctgagatctctggctgcggttcgtgtgttcggcgcgattagccgtggagtgggatggcaaaactcaggtatgcggtaggggctcctgaaggtaggatgatcttgtgaccgaccagttcggaggtgggggacgctttggttgtaataccacgaccgtacgggcagatgaggcagacgggactacactgctttagtccttgtcgggaatgtcctgacgaaaatggcagctcgtcattctacaaaaacacgatgtcggtgtcccggtaggggtttaccatggtgtctcgacatcaattggataccggggcggtagagtatgagac

SEQ ID NO: 14572 - DNA, 2142 bp, Emericella nidulans
gaagtcatgggactcgcatcagagggggacaatctgcatcatgaattccccttctgttggaacgcttgatatagtacgcttgtgcggttgaccccagtgtatcgggcactcaaccggtcatctattcttgactcggtgaagagagactgcaatcggcagatgctcgggtatcgctaaagaatactctgtcctcttcccagtaaaccccggtacagtcagcgacggatcacggtcagcgaggccatgaccgactcggcagctccttgattgacaccttgcacatgtaagataaaataggcaatctgaatctcaccgttagcttagaatcatggaactgcagaccatactattttcgcaataaacggctccaggatggccagtcacgctgagccaaccaggctcttcctttttggggaccagacctatgacttcgttgcagatttgcgagatcttctcaatattcgcaacaatccaattctagtggcctttctcgaacaatcgcaccatgttatacgtgcccagatgatccgcgagctgccaccaaaagagcacaagcaagctcggactgcgtccttagcagagttactgcagaaatatgtcgatcgaaagctgccgtctgctttccagactgccctctcctgcgttactcagatagggctatttatgcgtcaatttgatgacccgcgtgttctttacccacacgctaacgacagctacgtcttgggagtctgcacaggatctcttgcggcagccgccattagctgcagtacttctttatctgagcttttaccaattgctgtccagaccgtcctcgtcgcctttcgccttggcctttgggcagagaaagtgcgcgataaccttgaaatatccgaaaccaaccaaacacagccctggtcggcagtgtgtcatgttccaccggaggaggtggccattgccattgacaggttcagtcataaaaaggtccgtagccctgtataccgtgctcaaaggtcttgctaacccattgtccacctgaacaggcgctatcgaacacgcgcagaccctggattactgcaacatcagccaaaactacgacagttagcgcaagccctgatatcttgagccagttggctagtcaagcacccttcacgaatagcaaactgtggagggagattccaatctacgttcctgcgcataacaaccatttgttctcctcaagggatgtcgacgacatcctggcgaccacgaatgagaacccctggtccacttcggcgcccaaataccgttcctgtcctccgtcactggaaagttggcttgggtccgaaactaccgtgacctcctacatctggccctctcgcaatgccttatcgaacctatacgatgggacgtcgtcgaggcagaagtgccgcggctcctcaaagaccgtgatggtctcgatacgctgacaattgtagccttcacaaccgtgctttctaaaagtttgtccaatgctctggttaccgaaggaataaagccagcagaacctccgacctctataaataagaccccggagcgatatagccaccgtccagggtctgacagaggcaaactggcgattgtgtctatgtctggtcgatttcccgaggccccttctaccgattcattctgggatctgctttacaaaggccttgacgtttgtaaagaggtccccttgcgtcgatgggatgtaaagacccatgttgatccgagcggcaaagcgcgcaacaaaggggccacacgttggggttgctggcttgactttgctggtgaattcgacccacgcttctttagcatctcgcccaaggaggcgccgcaaatggatccggcccagaggatggcattaatgtcaacttacgaagccatggagcgaggaggcattgtgccagacacgacaccgtcaactcaacgtaaccgcatcggagttttccacggcgttaccagtaatgactggatggaaacgaataccgcgcaaaatatagacacctactttatcacgggcggaaacagggggttcattcctggtcggatcaatttctgccctgaattttcagggcccagttatagtaatgacaatacatgttcctccagtctggcagctattcatctcgcatgtaattccctgtggcgtggtgcctacaatctgcg

SEQ ID NO: 14573 - DNA, 6109 bp, Emericella nidulans
agatcgtgagggcctatcgtggccgaatagaaggcttagaccaacgtcttgatcaagctgcccgccgccgacgatgatacattccttctcggctacctcctctgcgattatacctatattctatcatttctttttcttttacacctactctcggagaacagatcctgaacatcagccctggaggcgctcccttctattgtgcaacccctgctctgaatcgacgttaatcgacgatgatttcttttatccttatccaccccagatgaaaccaagcgttcgcatacgatcatgaaactacgactcccaatgacggctacgacccggacatgaaaggcgaaaaaaattcacctcgagcactccaaaacactatatactgtaccatgtcctcgcggactctgtgatttgagattgcgtccccgttatgacatgatatttatggctctgccagcttacttgttatgttgttgagttttgttctggttacaattaccctcttcgcatggaaactcagggaggtttttctatttgaactcgcttgaagattggatacctgcctcgcggcaattcttggctatttcgctgtggaacaacagcgctgagtcgagccaggaactcagagaataacagtctaattatatttctagcgtcggagtttactcgcgttggacggtgcttgggagtttttactgctgtttgctattgcgtctgtcatcgcttctcttgtctaatctagctcaccttctaaacagacccccttgtcccatattttgctgaatcctcggcaatactcctagaaaacccagaggtcgtaagcccatatgcctccagcaacagcagatgaacgaatagtatctcatgttatcaggaatccttagtggttgtgataaaccatgatcccaaccacgaagggcagggaattgaggttgagctcgggttttggatcctggatgatctgtaagataaaataccctaagctcctggaatctcctctagtaccttatccttcgcaccgttgcgaaaagaggaatcttccggcaataactaaatagcggcctgtcctgacaccccagtccgagcgaacaggctttcgcatacccgacggcagacgaaactggatgtggctgccacagcctaaactcggtaggttagactgccatagtattggagatgcgcggagtatttatgttggtatggccaaggttgcctctttttctgctttcccgtctctcttccgttctatcaacttgcgactccgcttgtctgtttgagggaaccgcttctccgtgccgcaaatgttgcagcgcacgatccgtaccccagcccacggcttcctggctccccggcttggatttctggtctcctctatacaattggttcctggtatcaacaacgtgtcgcagcgtttgcagaaggaccgtttttgctcaataggtagtcgtaactgtgacttttgagatactccgcgcatctgggaaatgcaaagtcgagcaacttgaagcgcgcattcatcgcgacagtcgctacgcggtctcttcgcctttggtgaagcggtattcgcgtctgacatcacctcattctgggttgcgacgtcttcaagcgctccggcagttttagactggaggtatgcggccgcgttgtatagatagttgattcgtgcgcgaacatagctgttgccaccacctccagaaccttttttgccctttgttttcgccattgaagggagtcgccgtcaagcgaagaattggtcattgaatcaagctgagatgtggcgattcaagctaaccggaaccagcaactaaagcagctgagtttctgactaatatagagtcacgtgaataagctgctttcttcctcttatccctcgcaacttcacttcaatctttctcttcatcatcgccgcctctttcaattcatcccgcagtttccataaaagcccgttgtttgtgccataacctctcaatctttcgtcgaaccactgttttcgacgtctccgacaccgctactcagaaatcggcttctgagtttagacgcgtcgcattaatcagcactttcctttcgctttcatcctactcctaatacaactcgccgcagtctctcaacatgtctcacgaggaagatctcattgactactccgatgaggagcttcagaccactgatgccgcagccaccactgccacccccgccgccaacgggggtcaagcgaagaaggacggcgaattgacggtcactggtggccgtgcggataagaagggaagttatgtcggtattcattcgaccggtttccgcgactttttgctcaagggcgaacttttacgtgctatcaccgattgcggtttcgaacatccttcggagggttagtccatcacatattctttcccaatagccttcctccatagctccatgttgcaacgtccgtccatctcctcgggaaagggaaatccatccatagtcgctttctgtcatctgtgtttcgatctttggcgccatgggaaaaacttctttgaagaacgttccacgttccgaccagcgccgcgtggcgcgggaagtgctccacggcttatacctgtcgcttcattgctccagtattcatggtgaaatatcgatatcgccgactttctctcaggagagtcgttttgtgcgattctgggtgagacgatgcgcatccggaatgcggtgcgtcatgccacagatctggacggaatcgttctcgcgcaaggagggtttagatgttaactctattcccggcgaatgatctgtctggtattttagcatgcttacggctcgaactttcgggtcgttagacgaagatgggcccgatctttttaccttgcgtaatcgatctcgggggggatggacggaccttggaacgcggattgctttttttcttttaacttcatggattcgaaacaaagtctaacataccgccgcctcaccatagtccagcaagtctgcattcccactgcaattctcaatgtcgacgttctctgccaggccaagtctggtcttggaaaaaccgctgttttcgtcctcaccactcttcatcaactggagcctgttcctggagagtgctccgttctagttatgtgccacactcgcgagttggcctaccagatcaagaacgaatatgctcgattcagcaagtaccttcccgacgtgaagactgctgttttctacggaggtactcccatccagaaggatatcgaggtcctgtcgaacaaggacaccttccctaacatcatcgtcggtactcccggtcgtcttaacgctctcgtccgcgacaagaagctctctctccgcaacgttaaggctttcgttctggacgagtgtgacaaaatgctcgaccaaattggtaggtcttttaaccctaattcccaaagccggtcaccgctcaccccattagatatgcgccgcgatgttcaggaaattttccgcgctactcccaccgacaagcaggttatgatgttcagtgccaccctttcgcaggacgttcgacctatctgcaagaagttcatgaggaacccgctcgaagtttacgtcgacgacgacaccaagcttactcttcacggtctgcagcaatactacatcaaactcagtgaggcagaaaagaacaggaagctgaatgagctcctcgacagcctggaattcaaccaggtcatcatcttcgtcaagagcacaatccgtgccaacgagctcgacaagttactgcgcgagtgtaacttccccagtatcgccgtgcactctggtgttagccaggaagaacggtaagtatccttgaccgcagaacacgaagtttagtactaacgacccaccagtatcaagcgctacaaagagttcaaggaattcaacaagcgtatctgtgtcgccacagacgtgttcggacgcggtatcgatattgagcggatcaaccttgccatcaattacgatctgcctgcagatgccgactcttacctgcaccgtgtaggtcgcgccggtcgtttcggtaccaagggtctttccatctccttcgtcagcactccggaggatgagcaggtcctgaaggatatcgagaagcgattcgaagtcgctcttcctgagtaccccgaagagggcgtcgactctagcacctacatggcttagacgcttaatcatccgattcttcagagtgctcactgcttcttttactatctatttcgtcagtttgtttttgcttttggcgcgatggttcggctgtgatttgttgatgcgctgggaagggcatccgggacatctgggtcgaaaactgtacttgcaataaaataaaatcattaaattatttcccaatttctcggtttgacctcgtagtctagtctccggtgtaaaatcatctgtttacccaaaacgcttctcggtgctccatcactcattgttaactgtaggtcgacctgccgattgcttgacaagcatccatatccaatctactatccacagaagagcagcttaggtcctaatctaatgtttgcttttctcccctcgattcttctgcaacttcttcgccctctcaacccagttcatcgctgcaagagacactccgccatcgcgagcacactccctccccacgatcgcggcgactcttgccaatacctcctcttctgtagccttgttacactcttcatgttcactcgtactccctgctaaacgaggcccagatgatttggacaaagatatccccccaataaccccaatattccgcgtactcggaattcgcattagtgtctttactacgacggcatcaccagcgtcattcttattcccattcttagcctccctaccagccttaccagcggcgccagtgccagtagcagacccagtagctacctcatttgcgatggcaacgagtttatccgtgaggctgccatacgtcgactgtgaaaaagccttgttgtgagggttttgggcagcgagtttatccttccgcatttgctcaaggtcacctgtttctggattcttttccttttcttcgccctttcgttctttcatgtcctctgagctaccctcttcatcctgtgaatgagtcccgttttcgccttgttgtttttgagggttttgagtagctgagggcctagctgactggggccggaaccggtgtcgcgccccagaaagggaatgtgagcagcagggaatagccagaaaggggggagggtttgcggggttgaggagggttgataggatgggtgtccatagagtaagtccgcctgctttgcttgagatcacgaaggtatctttagggaggttggaaagggaggtactggcgctggtgccagaattagggccattgctctgcccggactgaggttctgagagtggtgattgcatcgaagcatcctggttcttgttctggattggaccttggttttgcgcagcaaggacatccataaagggcttcgggatataaatttcctccttcaaccgttcctgtacatcagtaggaaaaatactccatgtcttcctgcggcgcgcatcaaagccccaaccagaatatccctcgctaatgaggatatagacaagtacaccgtttccacacgcgatgtcaacgaagcctgggaactgccctgagcccacctttgacgttgaggattgctgcttctgttgctctcgttcatcaccaggtacagccccatacagatcccgccacaactctattaagaacgccgcaatgctcaaatcctcaaagacatgtttgcttggttccgtgctctcgatccaacgctcgttcaagttcgctgcgtacttattcttcaggcgggagtatgtatcctgcacgcgatttcgcggaatcacattatctttaatcagcgcatagggcgatgatgtgctcggtctacagggatcgagcctgcccttcgtagtgcggatttggacttcaatgagtttcgtgagcgaccgttccagccgagcagaaatcgaatccacatcgttttcgtaagggaggaagtgtatggacattgtgcccttcggattctctgctattctcggtattgagttctctggtccttcgaattcgccggtatagccaaattcatacacaaatgccatcgatcggacgagtggatggtaatatggcagctcctcttgggcgtccatggactaaaca

SEQ ID NO: 14574 - DNA, 1964 bp, Emericella nidulans
atttcgaagagaacgtaggggacgaagaaaatggtcagcgccgtgttatattttgttccttgggcgatgttcaagtcgtccttcaggcctagagctgccgcattactgatattcactctataaagaatatgccgttaatgctttttccgagaaaactcgattgttggcgctgggagctggtaccggtccaagaaagcaagcaggtacatgatgcacaggcagggaacaacgtgccaatcaaccttggccatcagcttgcgttccgtggtcgcagtgagcagcggaagctcgccaggttgcggcgattccaagcccatctgcacttcgtcagccttctcgcgcgacgggctgcggctgtttttgctgccttcagtttcgcgatctgtatgttagcacctcgatgtttccaccgtgattcagtacacactcacccaagactcccatggcttatgcgaggcgacctaagtcctgtcactgcagcaatgtgatttgaaaccaacagatcaatgagttaagaccaaacccccttcttatgagaggaattcggcgtaatacagaatcacgggacaaatttggagaaagggaggccggtttcggctaatggccgagctcggagacgagccttaggcgggggagaaaggggaagataagatcacagcacgcaggagggctggaaaagaggtgaggagagaaaaggggaaggaacgggaaggcgcattcttatagtgaaataaacatcgggaagatgccaaaaaattccggcgatgggatgagcaaacatctagagatcacgacgctgcgcattcagaagcgggcagggatctcctatcggacaagcgaggcgcgagagcgatccagctgggagggaacccacaccccatcagagagattatgttagactgacaattgtgtgacattacgacttcgactgtcagctcgcaagcaaccctggcgcttcgatgcaactcaattgcatctaggtccaggctaaattcaggctggatccccaggaattggcaggccttaaactcccggaccctcctccaaatccacagtggctgaggagccaaggcatcgaccctgactcaccccgtcgtttctcggcttccccgcaagatctcgcgggtattatgtaacaggcttacaactcctgcgccctacagcgagttctagttggatagataacaccgtgctccatacaaagagtgtcatcgctatttgatacgctgtaattcccgctcctagcgtaggctaaagccagcttcacatgaccatgtataagtggaatcgctgtaatctgaatagccataaaaaatcagacgtcctccaaagatacgtgtcattctaatacaaataatagtattacagtccccacccccttgtttcgtataagaccagactgtagattggatcaagatcacttgccgtcaacgaggatgtctattcaggactggacgcgtctcattagtctacgcagtcgacccaccactcggttgttctaccacagctctcccccatgccctttccaggtcgttatcgtcggcatcctccgcccctggtctaccctcagcaatgccgccttgacggaatccgtcgtcctgaccaaccatcacaggagatgaggcagtggaatctggtaccgcggccaccgcgttagacgtgttggttctcgcgccagcgcccagaagctcggaatcaaagttcgagctgtataccaccgccgcgaaagcttcgagctctcgtacaccgtgatccatcgcatttacataaatgttcggagatgtcccgttgccgatggcatgcgcttgccgagcaagcacggcaagcacgtttgctagctttgtcttgagttctgaattctccttgaccggaatcaccgtggcaacagacgataaaggattgaggggctgtcacgggtccggtggatttgaatgcgtcagtcgtgcattgttgatcaatgtctc

SEQ ID NO: 14575 - DNA, 1572 bp, Emericella nidulans
ggaggaaagatcaagaacttcgtcgtcgcactggtatagaaagcaatggtgcaggtcaaccgacacccgaaacacaactcaacaactctccaactgcattctagagtatgtatacagctttgctatctcgccaatcggacggggacaacacagtgatgaatttgggagaaaatcctgcgtatgccttgcgtcacatttactcctcgtcagggtagagttcctcgcgaagaggaacgccgagctcctggcggagaccctcaagtgcctcgaggtactgcttgtactgttcctggttttcaaccttggccttgatacctgtcatggggtaagtatggattaaatcatgataccgttttgttgatatggttttaagcgcaccttcgaaaacccggacagcggtggggaagtcgttgacacggcgggcggcccggagggcagcagagaggacctcaacggaggggacaaggtcgtaggcgaagcagttgttcaggttgcgctgggaaccgacatttattagtcgtggtcaaggaattcatgcgatgacgacacaagagggagcggttcgcttgacaactgacatacctggagctcgaaaacatcctgcacaccatcgaattccttctcgaatctaggaaggtatatgttagtggaattgttattgcgtcgttgaatcagccgtaatcagaagccagctccaccgcacccggatgagctgatcccctgcaaacgaccgtgaccaccaatcgggcctctggctactccagaataagcccaatggctatcggaatgcatgagcgtacctggcagagaactgctcgtatgtctcatcgtcgtgctggccggagcggagcttcatggaggtgctgaaagccggacgaccgatgagagcagccggagtctggacgcgggcccgaggcaattgggaagctctgaaaaggccggaagggcggacggcgcgcgtcgcgagacggaagacggagatggaaggcatggcgaaggaggggtggatgcagaggtgggaggcgtcaaatcgacgctcgggggggaagacggtcgcgatggttgactccgacgtttgcgctgaaacacgcttcttgactggctccaacctcgtacgccttcctattattcgtaacatgataagtgatttaccttttagtcagccaagacctcccgtatcctatttttccaggccttcattagacggttgatttggccctatggcttagtctgagcccggtcaattcagtacttgctcccgttctccactatacaacctttctatatcttgatacattctaaaggtttccctctctcccatcaaccctgttacgttgctcatcctaaaaacattatttgacccatccaacaggtcttccctttttttaaccttccctgtccctcttagggctgtattaaatatctaccgtttgggtctatttcttttttcctacttattttgttttttctgtaagccaaccggtcccccctttattttataagtcttttagcgttactttattatcttcttaaggtaccctctctccctttccactaatttatttgttctct

SEQ ID NO: 14576 - DNA, 5627 bp, Emericella nidulans
ttaccctcactctaaagggatcgtatttcgagctagattctaactcttgtcagtagtacaaaacagaactgtgtctgtcaacctatgttcgaccagcttttgacatggagccggcggattcgatattctatatacagatgaatcgctaacagcattttcagaaaatatacgtatatgttaacgtattgaccgggttgggacggtatcccttcagtcaatgatacggaatccccagccgcaaaggcgtaacataacctgcctcgccaaagacagccttcacgcccttataatcatcaacttcaccaatttgaactcttttgtcaccaaggagattggcccgttcgtccgcatcaagcgggtcgtattcccgtccagtcaaggatatgtacggattgctatacgtcagggctgccacaggatcaaacatgttcggcgcgaacgtcttgaacctgacgcaaatacctgcaactccaaccccaaagagaagaacagaagatatgataagaatgactgcccacacgtagtcggggcggtagacctccgtgtaacgaacaaaggtggcgttggtagaagcgcccacaaaaggcgcgagatcgttcaacatattcaagagctgttttggaggagcatatacggtatactcaaacgtgtccaaagccgtttgattagccatggcctgtagcccacgtccaggtacgtgagggacaccgtataggcttaggttggttggtagctcgccagaaaaacctgtaggcgccatgaaggcttgaagacctgtgttcagaaggatagatgctctcgtagagaagagctccgggtctatgttggatatattcacttcagcctgtgagccactgatgccagtttgcattaaaaaagaactagaatcgttcaggaagagaacggacgagcctaccccccacatgacctctcgttggggtttctgcgagccgacgcttgtcagcatatctaggacaatccaagcccagtagtcgaaactcgtgaagttcttatcacgaaggtcggttgttgatgggcgaactttggtagcttcgcagctcccatccacacattcaataaatgcctctaccatgcgctgggttacttgacatgttgtgactgtggtatcgccaacagtgttgttgaaccggagggtacgtggctgggtataattcggagtattagtcttaactccttcgtaataaccatcggcaggaaggccaacgaatctttgtgaccggataaaatgtggtggcccatacgattcaaagcagtcgacacagtccacagtcattcctttcccactcacatttgacgtgctgtatgtcgacggttctgaaagcacgacatatgtagcctctatcgtcaaattgaggtcaccttgctttttcatatcggacaggccgacgatcggcatgccgaacaaggacgtgaacgtctcagccccaagcgatttcttgatgggcatccaaccagcggagtcaacttgagactcattacctgcttcaatgcgcggtatcttaacatttccccattgatcaagcggcccagctttagtactaacgctctgcatcagactggcagagtagatatctctcatagacaatggccagctgccatcgttaccttccattatcccaacgttaatgaacatatttcccaacggaccgctatcccagtaacgaagttcggggtgagtttcattggtgatattcgccttgtacagcagccgtatagtactctggcctcctaagggtgacataatccacagaacaagcagcccccagacaagtatcgaggccggcatgctaacgagatggaggatgggatccgcagttgcattggtattcattaaggcccatagtttctgaaacatcatctttaatgagactgcctccctcgatgcgctttgacgggactcaccgacatgcgaacggacctttgggcgcaatatcgcccaatgcttttaagagagcgcgaaagtaacgccgcaaagagaatagggtatatagtagggccctgtaagtatattcttagagctcaccagcatgcaaccaatgattaccatatacgtaccagtctcatggcttgctccatggcagatcccaggctatcgcctgtcggcctgttccgtatgcataatgccacgagtgcaagtgctacgtgtccgtactcagtaatcaagcttgtagtgaggaacgggcgtttagaggtaaggtgagtacctatgaaacacaatgcaatcaagcaaagaaagccttcaaagacaagagcgaaaatagatcctgctggtttcctcaatgtccttcccgagtcctggcgtgctttgactgagatgcggttggagaacgtagttttgaaaggagcctccacctgcagagggactgatgacatatcatcgcgagagtttagggatacagccatgggtcctctcccctttcgtataccgagacagtgcaatgcgaccgggtagttaagctgactgacacccatggtttgaggtatgtctttaaatcctgcgaagcacgatagtcataaggctattgccccataccaacagagtaggaccctgcatttgagtcaagatgtggatttggtgagactgggcggcggttagacacagatagaagcaggcaacacccaatggaattcaagaggggaagggcaatagccgccgacatctctgcagcttgggcgcttgaaagcagctgaaaggtggtaagtctggctcttttaacaaatagacatatccagatatggagacgtatgaagcactttcttctcattgagactgaactgacagataaggtccgtaggtacggtgaatgtatggccgcaaattggttgtatgctccctccagtcttgtggtgggaatctggcaggggatacagtaaagcctaaggacgctgtggtaggcccaggccgagaatccttacccgactgtcttccggttggtgatcatgcaccccgaaaagtatccgcttgatttgctggtttgattgccatctgtagcgccgatgcggggtccttaggtaactatacccatgatactacactgtacggagaatctgaaacgtataacccgcaaagggtctcgcttgtttccggtgagctcgccttttagtcttacgtatgacatcgcttgcatcaaaacaagattgtcttcggtaaggtcctgtaactgtttcaacaaggattgatcacagctgttgttacaatggagcgtggcctcccaaacatgagaaaaccgttattcgacgtgtcgattcactccatagactcgaccgaaccggtcccaacttcttggtaataaggagcctagatgccgatgcggatacgtcaattcgacccggggttcgccactctttctcgccgtggcagtcctacgcggcagtgtttcaggtacgaggtcaaggtttggaacaggatttgccttgccgcttaggtgccctcggctcaatatcattgatcctcatcacggtcgccaggtgagccgatagcaagggcctcagcactccagtcaaagctgaatgatgctgagcagtacatggttggtgagaagtcgttgaactgacggcggtaaaaagtacatgtggttggacttcgttcgccccactgagacccgcaggatcgcacctgtcagccacactggatctgcgcacatcgagatggagcgaaggcgtactcttgagtacaccaactgaccacaacttcgagaaagcagtttgagaatgaagaaaatgtttacccttaaccgcaagaaatgcttaaacagacttccaggaactggtatccatacttgagggaagcgtcgtctctgcacggagttttccttccacggtacgagggaagtgatagagcccaccagcatgaaacacacaaggttttccgtccaggaaatgggatgttgtcagatgtcatatataatgtcagtggctgagccttgggcgaggatcgtctcggtgattccgcttcttccagtaggcacgtgagaaatccattatccatctgccagagggtttcggcctgatagattcgatacatttcaggctggagatgatctggttttgacctggcaagaggcaacgaggtcgctttcagcgttgtcctacctcctgcatctcgtccctcacaaacccatcatagagaattatcaatgaaaaaggagcaagcccagtgcagtagatcctgttgatccatcaggctgtgggggtgatagtctttcttcaagaggatcaggtttcaagtgaaggcgaatataaccaagtatggacgcgaatgcgatggctcactgatggtacctgggggatgtaacacaagcacggtcgcccattcagaatacgacgcccaaagtctgttgcctccttcaggagaaatcaagagttggatgagcatctaaggaagctgattggagacaggttagcggagtgtcggagcgtagtactggaaattatgaagaagcttgcctagcatgaaagaatcaataaagtgattgatgaaaatacttggccttatttttgtcgccttgccctataatagagttcagctccgaaattgcgcgggggagagccattagcaggttgaagcagactccaggttgaaaagcccgggctatcagtgccgatcactgcaaacagatcctagcttctatgaacaggctgtgtatggctagtacagagcacaagtacatacttgtcaagtagtgtaacatgtctccattattccgaggcttagcttcggctccaccgatagcagatacatagaaatggggccaacctggatcaacgaagccgaactacaatatcaaccttgctgccatggatctacaagtccattcatgagacctgatgactgtcagacgggttgcaagtttctgtacacctctatgtctcccacttccagatcatgtgccttatcatgcagacataaacaaggccagaactatccactgcgcaatggtttgtgagatggcaaaggcatgctgcatgaatcctacatctttaccgaagccagtactatccatatactggtgtttggctagaagttccgaatgtgatacagcagtctgcttgccgggatcaaaagtacgccccccttgctgcatttttctctccatctcaagtagcaagcaccttaaatgcgtccccaccattattgtccactcgtgaaaagttattcaactgtttcgacaacgatggatatcccaactgagtgcaccgtgctggttgttggcggcggaccaggcggctcatatgccgcgtcggtgttggcacgagagggtatatcgacgatcctgcttgaagcggatacgttccctaggtgagtacttaccccaggttcaaggtcaggtcaggattgagagacatagatatcatattggagagagcctgctgccgtccatgcgagagttcctgcaattcatcgatgcatacgacaagtttgaggctcacgggttcagacataaggtaaacttgcactacaagcagacagcatcgaagctctcgtatctaactgactctagaacggagcttcattcagcgtacacagcaagcctgcgcatcgtaagcttatcctgactttacacgaataggcccagctgaaccgcccagacaccaactgtctcgca

SEQ ID NO: 14577 - DNA, 535 bp, Emericella nidulans
ccaacaagaccttggtgaccccctgatggatcacgtcctgccctgccggggacttttgtcctatgagggcaagtctcgactggagcgtgggcgcgaccgctcattcttcatctacataccgcccaatcgtgacatagctggccagaggggccctgagccatgagcagccccaggaccggttgacagacaggaacacagtgactgagctggaggctatagccatacgagtattcagacacacgactggccgtctcaagggtctgcagccgagatgcctgatatctcccacctaaccagcttgactctggtggatgcatgctgtactatcgcatgtgcgtcggcaaccaatgtatttctgcataacgcgtgcccgtatgaatcgcgctcatgtctccttcgcgagactgaacttttgtgaagccggctcacatactagtcacgagaaccgatgagcatatgcgaaagcacactcataataatagctcgaccacttacgcgtcatggacatctaccacgacggtgacgagcccgctgt

SEQ ID NO: 14578 - DNA, 1523 bp, Emericella nidulans
cattttatgaacgccgccaaaaaaaattatggaaacaccaggtataagaaagaaaggaaaatggagatgcacaacccaaagaaaaaggaagggaaatgtacaatccgaatgagcggacagtccaggcgacgcgcaggcactagacttagatgcagatagctgtacagtggtggcaatcaaaagcaaaaggtcgtcactgcattagacaaaggaaagtgtgcttgtttcgccagtaggaaagacaaatctccataaagatgcagcagcgcaagaaatgcatcattgcccatgtcttgcatggtctcgctctgaatgtatgccgcccaaccgtaactccaagaatataatttagtaattagtggtccattgacccaaaggtaatccatgtgcctttcgcgggtcaaccgccaaaagggaaaatcacactggctgcatatcagaggtgcagccatgtcgcagggcttgtcgaaaagaagccaccgccggttaggacgatcttgcgttttcacctcaagttgcgaatcacctttcttcccctagccaggaacgggctcggcatctcatcccgttcaggatcccagactgcaggtggatcacggtcggctgacttcatgggaacggagcagccagaccgggaatcactggcacaacgcttgacctcgtcaatgggccggccaccggcacgggcttgcgccagctcgaccagcgttctgccgcccatattgcgctgcatgacggctttgaacatctcgtcaccaccgttcattttcgatgggctcgatttcacgccattcttgcgggtcggcgaccccgcatcggcagcgaggttggcggacgatgggatcttagacaaccgtcggtggggggaccgtgactttgattccctcacatcaggcgccgacatctgagggagtcttgaaggattggccgggaagatgggaggttgggtgcttagcttctgcattaatgcagtcgtgttttgtcgtagaagtgggcgcgagggagctttgaaaggatcgggcttgacctttggtcgagtgggcgatggaagctccggtgtgtcgtcctcgtcgtccgagtacgccagggtgggctcgaacttgggacgctttcgttccccttcggcgaatatattctttccagagtacgttgctgaggtgcggcgaggcgacagagaaagagacgctattgagatgggcgacggctcggccatttgtatgtccattggggaatcaacaaccgtcttagagcgggtgaagggggtgcgtgactcttttttgggcagcttggcagctttgttcgtcggcgactcaagtgacaattggctaatatctgtactcgaagggaagtcggagtcttcgctgttgctggacgacatctgggagctgtgaccactagatacgcaactagcatcctcgcgatagttggcgttacgtcgttacttttcgacttcctgggctacacgatcctgaacctcgcattcacatctctcgcggacgttgtctaactcgttttgcacttgg

SEQ ID NO: 14579 - DNA, 10385 bp, Emericella nidulans
  unsure (1)..(10385): unsure at all n locations
ataggtggcgccagaatttctccggagtgaaatggcaaggacgaagactagcgagtcttggccatccgaatgcaggctagaaacaatgtcaaagccaccggaagtgttgtatgaacacccggagcctggaagctttatgcgtttagggtctaggtgggggttaatttattcttctgggccgttcttcaccctggcgatctccggagtgcgggggtgggcttgaaggattgaatggaatccgtcaattgcaggatgaccccggattctgcaataattacaggcagcgccagtgtttcgcttatcgctctcccccgattctggctgtcaagcatccaagcaccaaaatcatccgggtacaatcaagcatgcagccacacccattctgaaacagcgtccgcaagtcaccccatcatccacattgtgtctcttagtgaccgaaaaagtgtcagttcagagatggcacaggcagctaaattgacactcaggggccagggcgggtgaattgcatgacaggatgtcggctactgccgacagagtgtggtattgcatgttgaatggtccggttcgagcgtcgagacatccagtcactcagtgacgccgttccatgccgatcatttccttatggaacctccgcatataatgaccgtacatttaggcggttacggacggccttgataacatgacttcacgaatcgcaataaacccggatgaggagcctcgtgtccagtggtgttcctgacgtactcggaattaagtcgaaacacttttcaacccccaagacggagtcctcctccgctttggatacagcaagagaaagtaaagaaaccatctgctgccgcaggatggacagttgctctgttcgttttggtcacggccgccctgaggagcgacaacgagcgtatacaggcccctaggagcccaatgccagacagggctctgggtcgttcagacaataccaagccggtatctcaatcaaacaagaacaatgaccattctcatcgcaattagccttgtaaggcgaaggtctaaggcttcagtacagctatgactatccaacgctcagtgccaaatactcgtgtacccgtggcccgtgtacacgtggtgtcacgtgttgctacccaacttattctagccgtatacggctagcgcatagataaacggagccggctcgtgccttatcttccgggattcgagtctcaggaacgaatctcagtcgtcgccgctccttccttctctccgtgtctctctgcttgattctgcgtcaaccttaacgcttgtgcgtctggcagaaggatagtaacaacttgagaccaaccttggagcgacgcggtaatctagccctgatctaaaacatggcttcctggtgcagcgtcgagaggctcccggtttctcttgcggataaccgcttccaatataccctgctcgcagctgcagggatatccttaagtttaggccttttcctacgcgccttatacccatgccaccccatggagagcaaaacatattattccccactcgctgctacgcaagctgcaggtacaaacaataaagaccaccctctaccaattgatgtactgcccgggggccgcgacgtgcagaccccctatggatcgatccgtgtgtacgaatggggcccagagcacgggcccaaggtattgcttgtgcacggcattaccactccctgcatctcacttggcgggctagctcacggcttggtagaccgaggttgccgggttatgctgtttgatctgtgagtgccatggttcttgactggctcgagcttcctactaacttctgccattaggtttgggagaggctactcggactgccccgctgatcttccccaagacgaacggcttttcgcatctcagatcttcttggctttgagttcctcgccaatctcgtggacgggggccggttcaggcaaattctgtctagtcggttactcccttggcggcggtatagctacatctttcgcgtcattcttccctcaactcttgtcggctctcgtgcttcttgctcctgcagggttgattcgcgataagcatatcagcttccgtacccggttcctgtattctggaggcctgccggatcggctcctcaaatacctctccggtatccgattacgtgccggacctatttccacgccgaagcctcaacacaaaaaattgaatacgggtgacgcgttcactgaagagctgccttccaaaaaggaggaagaaacccagttgctatcccgctcataccctcatgtcactgttcccgctgctgtttcttggcaggtgaacaaccatactgggtttgtccacgcctttgtatctagcatgcgctatggtcccatcctcagccaacggcaacgagaaacatgggagcgacttggaagccacctatccaagcaaaaggtcctctctgcggcggtgcagaaatcaaacggccttccgagtgacaaagtcgtcattatgtacggctcgaatgactcgatcatcatccaggatgaactaatagaggatgcgaacgcaactcttggaaattctgtggtcttcaaaaactttgccgctggccacgaattccccagtacgaaatacgacgaagtcgcccagattatctttgatacattgctttgattttgcgtttgcgccggctatattacaagcacgaattcccactttttggcccgtgggcatcgttctaaggcatcccatccgttcccttgctttggaatatgcttttagagatagaccatgtatatagaaagatccctcacgtgacagccacacttgatactcccaatatgaacttttttctccatcacttcctcagaagctcgtccgttgcgtccaattgacttttcagctggttcaagtgctctgaacgattctccattgctgcacgagcaaagtatggtgaatcctccgaggacaactcggcgaatcgctcagcgccgcggccgctctcgtctggcactctcttcaggttttcttcgctgagcttgttgtctatcccgtcgggattcctggcacagtcatattagcgaggcagtgggtgtaagggtgtaagaacctactgcattgactcttggccgttggaggacatgttgtctaatgtgcctggtgcttctgtctcactacgttgaacgaaagagtgagttgaatcttggttctcaacaatccgatgatataggagcaagagtgaaacgatgttgtagaggccaagatacaggatggagggagttgtttgaaagagtgtgttattgttgctggtgagtattcgagtatcgtcgaggaatggatgtcctttatatctcacaagaacctgagatactaaccagtgatgcgcctcaggtgagatggggatcttcgattaccgtgctcccgggtagagacttttacaatattcctgaaaggtaaagattggtattccctctcagtcctaccaagggcgaggctccgattggatatacgacgcacaagaatatcggcttttggcatctggtgcgcggcaatcgcgaatcatacagtcgacagtagtgcttcaggtcaaatcagctcgccccccaaggatatagagcgggtcgatcggcaccctggtccgcgaaatgcgtttaatgaccatgcatggggccgtctcaacctgcgaagccctacgtaacctgatccctaaaggacgataacggggtccagaacgcacgttctggggcttctaagaacagtgggccaagcctccaccgggcacatgagccctaagccaccctcccagactctcggtatacgaatccggacccatgggattagcagactttggcatacaaaccagtgaagtgcgtcgaaaatccgagtccgagcggttcgttttacaagctcgtgaggcgtcaagggatacgcgacgtctatccatcttggcagggacaatggctgaaacccatacgtgcgattcagcttgcgcaagcctagcccaagatctgacctcatacgagccgctgattacaatgtcatcgtaatgagggctgcctcaatggctgcgcgagtacggttctgcggaaactgactactgttaggagttcgaccgttttaaccgacgttggtgatcatatcccgagactaatccaaggcaatgacaagcttccacgcttccgtacacattgggattgcctgcgtacagacaattccatactggctgttctttgaactacaagtggccgcaagccttataccttgaggtgccaaagcttacggtcttgagctggtaagcttgctctaaccactggaattgatacctttggcgctggtcaggtgcagactcatttttcctatacttatcgaatctcacgggttcattcgtccgcgctcacataccagtctcaatttgaacggcttttctatcctcgacgtctcctgtctcagtgtgggagctgggaggtagactccgctggtgcgtttttgctttttcctttccactttttttgctccaaccgcaactcgtagttttatctaatatcaatttctcagtggagttacttactgatattactcatttaccatgctcgaaactgctggtacttacgggtgacggtcaatcacaggccgttcgaatacctttcgctgggtcgcgtccgtctcgcttcttctcgcaccaagcgtctcaaatattgagctggaaagagacatgtcaataatcgacctcgttcttgctccagtcggaatctgcatgattaaatgaatgccggtacggagtatccgccttctgacacgagaaactcgagggaatttacgtgtcacgttgaaaaaagcaatataactgttgactgtgggacaccagatgatctcaacgacaggactgagattccatccaccaatttgcgcccggtgccgtgggatactattgctctctccgcggctcaagcctggtcctggcaattgcatgcaccccgcgtcaccatcaagctatccaccacggtctgtttttatggtcccgggaagatggagtctagcatcgaacctagacctagctgcagcggcagctgcagctgcgttaacggcggccattatgctgggaactgggtgacagaatgtcgggtcctagtcttggatattctcccctatcccagttacccgccaactggtcccaagatgaacccttccccacgccaaagctcattcagtcaatttgcatcccacgagccatcacaatggctgcaatgtgatgagctctatatcgtggctggactgtcaggctttcttctagtcttgctaaagcaacgaggcggcagcatgttacgcatgttattcgtaagcgactgctatgactgaacattcaccagtgattgttctttagttaatacaatgacaattcataatcacaataagcacatggacaaggcctgtcacaactaatgctgcggctggtctgttctcctgatccagacccagttcccaggactgcggagccagggtttaccctgaggctctgcagacggtttgcaaagttatcccgtaacgcctgagcacaaccaactcgtgcttttctctctcggctaacattgcctctcgtgttgccaagaaaacagttcgcggcggcgttgcactgcctcactgcgccggtaatagtccacctggctaaaggatagaatatgccaggtataacaatggccttctcggcataaaaggatatcagagtgcccagcacagatattgcgctggattatggctagtttcatctccagcaatctcagctgaagcatgtttccaattcgcatggacatggttcgtgacaagagtagaaagtacctacgggtgtatgcacgacgctgatctgcttggagttaggtgacttcaagcgcagagccaagactgtactctgagcagaacgctgaacgcgtgacgccaatcattatttcagcttgggcagcagcgacccgttgttgcttctgacatacaagccctactccgcagttcagccgacatgcaggtgaacctgcacaagcccacagacattcttgtcatcggaaggggtatccaaagcgagtaaggcgagttatactcggcctggaacggtcgtgcggtactacgtttgatgagcctagtagctcggtacctgaaccaagtctcactgctcgaaagtgccgaaccacatactttccctctatgctcacagcactgaggctcgaaggtggtcaaggtctcgcactccagacgggtccacgtgctctatacacagtggatgtcaagtccgcgagcgtcgaccgcagaatggccactcacctgttctactatgctatatcaagccagctagcactccatgcagcatacccaggtcaaggtaggcctgcttttcaatttacgtcacagactttacgtacgtcccttgcatatgagaaggttaaggggcacaggaacccccagaactctcatgcacccgcaaagcctccttatggagaagcgcatgagctatctgaccccttgcagcgcagatcactcttgctcgtcacgcgagtgatcatggaactgtacgagtgatgttacaagtgtagtctgttcaggccccttcccgagctctttacttacatagcgtagtatcatccatgttattccactattggccagtacttgtgctgccgggtccaaagacgagctcttccctggttgctgaaggcacggctaccaacacccaccttcaccagggcttggagcctggatatagacaaacttcggcttgatgctgccgtatatcctgcttcgcaggactcatgtatatgattatcaagaacgacggatacaccacaagactaccatggcttgcatacgtacttttcaccgcggaagattcacttgctgggtaaacaaaccaccaaatctatttagtataattgtcaacactgattaaattccacatttcgagccaagccagtgtaattagggcatactgactgcacaggacgtatattcgtacagtaaggccatgaataattgactaatgcagtccgacatgaatagattagctattaaacaagaataaagatttctactctctgagcatggtgtagataagttataatgggagaacgtcctgatatcatgttagaaatgtatatggtggtacatcacgtgctcgtttgtcggaaatgttgcctacttcggacgatggcttccttcactccaaccaccgtcactacagcctctactgcatcctttgattgcttttgcatctctcgttcattgacttctagttactcccagataacagagcccgcagttggtgggaaatgctgtagtctgccgaccgccgtccctgtaagctccatgcccacgggagcaacagacactaacagctactagacaaacacggccatggaaaaagccacattaaacagcatccagaaatccgtctgggagggccagatccctctaaagattgtccttgctccatctgagagccgtacatacgaccagacagacccctatcttgtactgcaagtctgtcctcaacccaaggacgctcgcggctgatccaactccagatctcctatcctcgaatctcatatctaccgtctctcctcccgaggctgaaagccttcttctcttcatccctcattgaccccactgcttcacagccccacgacggctggttttcctttgaagcgtcccgctgaaatggcactaccccgttggcctgctctatgatctatatgcgggtgccgaaccagcgacgaaatcaagcgagactgaggcactagatgacgagcagctcccatggcgacttgtcgtgcatttcggcgactggcctgatgcagagcttgtccggcttgatgcccaaggaacggtcatgcacgatgcatttattaacagtgttaaagaggctgattttgtccgcaacggaacagcgaaagggataatgacactttcgaaagatgactcgtcgggactgtggaaggctgtccaggatggtacctccccaacccggtccggactataaatctcttatcaacgaagatcgctaatggctcttgttttgcgccgaaagtcgacctcccctctttccagcgcataatgaacattctccttccgccaaacccacaccagccgctccgcaaccttccggtccggctctttctccctcttccaccgaaaccggactcgaactcggactctccttttctcaaggtcgtgcaatcgcccatccccccaacaatatctacaaccccgtcacagctgcaacgacaaatggcgcagtcaactctttcgtcgtcgggagtttcaggatcatcaccgggcgcagcgcaaccgcaaccgcagacgcaaacaattggcactgcgctccactccatactcccgaatttattccccagtcgccggacgcctgtcattgcgaaaccggtgctgcatggagcgcaggtgccgatgtccgcgcctgtggaggaggtggtcagggcggcggcttatggggatggttgggtttatatcgtgattcggatgatggggtgatccgcttcagattcattggttctcggctctcagaacttttttctctttcaaggttatactgccgtggtgctaggatagacaagagaagcacgccgataagcggggaccggtgtctcccatattctgtagattgatactgatagtagatatctattgaacacaaactgagaatcagtataagtcaccgaaattgctacctttgatagacttgttaccctgcctagtgacaaaattaagcttcaaagatagatttcacagtgcagacaacatatgcatcctgtcggctatcactgattcccctaaagccaggcccggacgaaagccaaaactgttgtctctgttcatcgcagtgattatcggggctgagcgaggtgatgctagatcattgagctcagccaaccgcagcccagcgtctacggtgaagagctccatagactgtacccttgcgctcttaggtagattcagtaccttcaacgattagcaggcgccgcaataccatacattaccgcgaagctctcgactccgaaagtaacccttgatcttctctatttatagttactgtccggacgggagcttgaactctggtcctggagattgaggtctaaaaggagtaggctgatctggtccagactatctcctgtctataatgatatagggtgcatagtccctgcctacgatacaatatataactggatacaacaccgccaattcataatatagggacggaatggtcgtcatgagcaagacggcactcgcttcactgacccgaggtctagtgtatgcaggcgttctgacaacgccatctgacgctagacttattgcctgaaggatcctgattggtagggcaagccacaaccccagccgttgtgaagggaacaggaggttacctaggtagcaaaccgctgcggagcgggaaacgttggcgctacttgatatgggttgcatgatctgcaggccctccagcttcatgtgagcggttctcccggccgtcttccttgtaaagtgaatgtgaagaaacttattgccgcgggctaacgctggattgcgccacagcgtcgcttggcgcaggagtgaatggatagttgaaggatagagttttaaggtgatgctgcttgtaatcatggttaggtccatgctaagcaagctcagaatgagacacaaggtgaatgagcccttgaccatcagaacagattccctactaggccagaccgggaatataagtacgtaggtgcctgtcgtttctggactatgggaacctcctctcccgaaacaacttgagcatttcgcctgaatctggaactgaatttgaccttgaacgatgagtcggagccgagcttgatcgactataatgcctcccgatccaagctaagcggttgtcattgactattggatctcttccttcccggccagtcctgcgagtgaaagaacttagccatatttttgaagaaaatttcttcttgacatttgtccgtctattaatggggccggtgatcgaaacgaggcctggggtggcttttacagatacttctctgtgtggccgccttctgttttttgaaacccgggcgacaaaaatattttccgttcggggggggggcgcgaaaaaaaaaagtgcgagtgaggtccttaatatttctttaaaaattggtgcttaaataataagaatatgcgaaggaaggcttttttgggtttttttccccacaatatcaatcgagaggtttggtggcttttacctttttctgcggggaggaaacatttttcccatgtgtatagtggtcttttaatttttaaaatatatttgtgttatttttttatatattttatacatatatttatcttttatttattatttntattttttataatttatttagnnnaaatgaattatatatttatagttttctttagatt

SEQ ID NO: 14580 - DNA, 5534 bp, Emericella nidulans
acgttacctccggggtgcccgcttacaacccggaatacgttcttggttctggcaaggagcctggacgacttggccaataccttcaggactgtgtcacggcgccttcggatccgtgtggccagactttcttcatcggaccgcttgttggtagtgttggtaaccgctcttctgcagctgcggtcccttcaggctccagcgcctctatcactccatctatttctcccactgcggcggcgagaaggcgctttggattctgagtaaccactgatggggccatctgaacatcagcgcggtgtactcatacctcgaccattgagacatttaaatcactggttggagcgtactattgactacgatgactggctgttggcggagcgacgtgtaatatagtatcgtagatagtcccgttaacagttgttagcccactcaaatactcctgattagttagttaatgcaagggttgaaacagtgcatgcgatgtttacccggtagtttcagatgcgttcgggtcatgtaaggtttttactgctagccctaatgcatttctctagggatcttggatagttaaaagcagtgtgagcggctttgttttatgcctcatgcttaggccaaacgtaggctctattatgggatagttcactaagaatgcactgtattgtattgaaatataccattaggatggcatcaggttcaattaagctcaccttggctggttggttcggtttagctaccgtagcccgctcacttgattcagagcagttggatatactcagcttccaaggctggcttcagctcgctatgaattgcatatgcctaaactttatgattaataagtgctttgatttgagtctcacctgttagtagttcagaaatgctctggcctcatattcttctatttctctcactcactctactatatcagctactctaaaggctctctttcccttttggcgaacatatctggctatctttgacgtttgcggttatagatatttcatctactcgaggctcgcgaattactgagattcccaatacgttgagtagccgccttcatatctcagacttaaatagcattccagagcattgatatcacgactatagagcattaggaactatctagtaattgacttatcaattattagaatagaatatggataatgggttcaagttggtaatattgataattgaataagaggataattatatggatgatattatagcattgcaagcgggaattgcaagcgggaggtgaggaaatggatcttctacctcagtgttggcgagttcgcatacgtgacggccaggtggaatatcgttagtccacatttccgatacggtaggtacggtacggtaaagcggcactggctgatagcccaagtcggaatattagatttttgctccgccgatcccaaattatctggactggttaagctatatcagtctatctcgttttcaagttcacaatgtctaataatgatgatgggttccatactgctaagcggaggaagcttgacacctcgcaagaggctgcagactcctctgccataacgtcacatacacagctacgatcgcttctagtcttccaacaaaacgttgtagaatcaaagcaaggtgaatataccttcaaagttttctgggatggtagaccagactgaccgtcttaaatataggcataaggcgattcaaagagttcctcacgtcaataggacagactaaccatgaaggcgagaaagccaaaaaattccgcatacttaaggcgtactgcgacactcaaattactcgcaacacagaagaagcaatctgctttccggagatcatccagacgtggaacttcgcagacagcagtaataatgaatcattacttacttctgtgccctcagttctcgcaatcttcctgaagaccgtctccagcaatctggattttcgggaatttggtatcgctctgtgcaagtatttgctgcagaaggaccagctgcggcttttcaaccgtggccttactgcgaacaaatctaaagagcatctgatttctccttgtcttcgactcctgacggagatcgtcagtttcgacggcggtgctgtcgcccggcagctctacatcgcgcgtcacattacttttaagcgcatggacgtgtttctgacaccgaacaaagcgcagctggaagacaacgccgatgatcctaatgcatctactctgaggcggaacgctcagcgatatgttcttgcaaacttgaaatttcagaacactgccaacaagaccgatatcatcgagcaacaaaaggtcataagagcttttcttgaacatctaagaaaggacccgcatgaaattgtcatcgatatcgtcaaagcaattgaaagagatgtaatccaagatagctccctctcccgcaacaccaagaccaaattcttcagtcgatggaaccttgaaagactggtcaccctttacggttatgaccgagaatccgaacaggaaaacgcgaccggcttgtctctcgccgatgaggcacataagatcttgttgacagtctgcaccaagactgagcatggcgttttgctgcctcaaacaggatggtaccctgttaacagcgatccagaattgcttccaattgaagacgatgcttcgattgatttaggacttgattccgcagtctacgtggataagtaccgggaatcggtacctgtccgcaatggtacgctgtcttacctcattcaggtcctccgtccggaatccgatagtctccagattgcgcttctcttagctattttcaaagcagcgccggagctaattgctgattactataccaagaaagcgctctttatggcagatccaaaacccacaccttcgtggatggcggaatcaaccgttctcttctcgacagttagtttaccggttcctgccaattgtggttggaaggataagctgcccgccatgcctccgcctgtttcggtggtcatcgagaatattcttccccggccacttacgcagaaagtgctgacgcgctgtttcaacttgaatactgagatcgtcactctttttgcagttagagtcctgacgatgtctttcaataaattgcgcgacaccctgaaaatcttccgtgctgatcatggcgccggccagcatttgtggacccaagctgcagacaagttgactgttgagtttggtcataggtgccctcagatgaaggacgttgtaactttgtttcggagaacagctaaagatgacttgcagcagctggaggcggtctccgagctacttgcttgcttctatgaggttctgacaaatgcggctctggaagagggctttgacgtttcccttgttctcgttgatattttaaaacgactggacgaaggaaatctcgacgcggagagcacagaactcctgataagccaattacaaaacattctcaaaattgctcaacaatctgcatccctacgctggtggaaccagccaggtaatgtccctggtgtcaagttatcatcgttatctctaacattataacaggatccatgcaattttctgcgtttacgtccatcttgagagtcttaatcaacacgtcctctgaaggttctttcaaagagatccactcactcctcgcaaatgtgctgatagaatactcggtcattcgctcctccagcttctcggctgtcctgtctagctttgggtcgtccgactccgaatctcaacaccagttggccttcttcgataattgcgcttgccgtgtgaccaagaagccggttcactatcaagatctactcggatctcttgtccaaactcccgagctgctgagtcctctagtggctgctgttattgagcaatggcctttcgtactcaaagctggaaatgatagcgctaagacaaacgtgagcgaattcatcgttagattgctcagaaaccttcatccagccggggagagtctacaagggctgaaagcggctcgggacgaattagtcaacgctacggaggatcggaagctgaagtcacgcttcagaaaggccttgaaagggtgtgaagaggacgaaaaagaggatcagaacccagactctgaaccaagagaacaaccctcgtcagccccgaaaaaagaatggcaaaacattgatttggaagaaatttttggctctttaccggccgaggggactactcataatgagctatatagatgggaccaaaaagaggtagcggagtcgctggaggagggtcgaatagcagagcttttcctatgcctgtgctccgagcatgaagaggttcggagacaggcgcttccgaacatttcgcgattcatgatgaagctcaaggtaatatcctcgttgcctgtatgtctcagcgtcatgagactaatcaacgcttgcaggaatccaagtatgccgaatggcgcagcgcctacatcctaactggagaattcctcgagactgtcaaacaaattggggttgaatcacccgtgccgtggattgtgggagaatgtgctgccagctgtcttgcaattcttgtggacccgatgcataaactctatggaaagatcaataagttccttcagaaagctcctgcttgggaggtggaaaaaataccgtcttattggattgacaaaatcctgttgcatgagcccgagttggatgacggctactttgaggaaaccgcatggctattggatctgcttgtcaagggacttcgaacggaacaggtacgccctatagccctccatagattgtcccgcttgtttaacatttatcaggatatggagatatatcgccgggccaacgtttttgagagagtcctgtcgttctacgattcaccaggtgctggcttctctgcgaagaagaaaattttgcacttggtgtaccgctcaacacaggtccagggcagtacaactttgattacaagagcaggcattattagttggatacagagccaaatcccatcagtcaccggcagggatgcgtccacccttacagctatggcgcagtcattacttcaatcgtcggaccatgatcggaccgtgaagtggagtgaaggcgctgtacaacgagcagttgaacagattactgcgtagaattggacgaggtgaggataactttggaccatatacccactatatagcactggaataaagttgtgttttattacgtattcggccttctgcctggttttgcggtcaaaaccatgaaatatgttgatgcgtctgcgaaaggaagagaaaacggtgtgataaccacagagaataattgatcaggtacgcggcgagaagtcaagtggcagcaatctccagcgttgtggctgcaaaatacgtggaccagctgcagagtagtgtgttgttccagcgagctggccgtttcctttcctttttgggcggcgcgaaacttcagaactccgaccttgggctcatcgcctcaactccccttaaccttttcttcttccgcccgatcacgctctgcgaaagctccaaagtcatatatctctttggccatccagtaccaatatcccaactattagttaccccaatttctctcggtcacactcgctcctgctgattcggcaaatctgc

SEQ ID NO: 14581 - DNA, 2279 bp, Emericella nidulans
cctatacttgcatgcgctattcatgaactcaaacgagtcgtttgaagcccgacttctgaacaggcattgactagaatctttcatgcgccgggagtgtcccagttgtacctccggacagcatcattaggacattctctcaccttcagcctgaagacatagacctgatcatcacctccgacgcagaggacttgagcacaggcagctttgtgcttaaacagggcgactttgctcgcttcttcctcgatacatggttcgaccctctgtatcgaagctataattttgcgaaggcagagactcacagttgggtacgatatccttatttactcattttcatcaattttatttgattacagtttggttgacgattaggcttcaacaggaacatattgtccaatggcatccaactgttttggctcgaatggctctggttcctcagcgagttatgaattcctatagcaaggaatccactcgcgctgcagtggatggcacatacaaagatggcgactcgataatccggttctttggttgtgacactgatcccaatcgagactgcgaaagagagatgaaaccttactacaatctgtgggcaactaaggtggagatcaaataagcatttctgttggaacgcgatggcaggcttacctgcatagggctcgacaaggcagcatgttggcatcatttctactttttataggtgtctagcgaagagcatttcaatctttatggaaggccccactggccagtaatatagtctttattatattcatcagcgaattgtcttgtggtagaagtagaacgtcctaatagaccattattcgaaactcattggcggctccggcctgcaccttaccataatcaacccgatgaaaaccaccgtaacatgcgtgctgcgtgccacccgtgttctttctctgacggcattaggtgtccaatttgtgaccctagaatcccggttccaatagtctgagccctaaatcaaaccggggatcatggcatatctctttcgcttgtacttatcgccaaactctttccggtagttacgctctttcttctttgcccaaagagccatctgcccagctgcgacggcgataaagaacaacacgctccaactcagcccactgacaaggtaaacgccaacccaagagacaacctcgaaaaagtagttcgggcaagtcacagcgctgaaaccgaatccggaagggataccccgttcggtagtacctgggcggcggaggttacgtagcaccaagtgagtgttgaggtttgccagttctccgaatacgtagagggcgagaccagtgtagactagggcagggctgacgcgcccagttgccgcacttgaatcaggtcggaaaacccagtaggcgatgttgcagccggctagaagccaatagtgaccgctgttcttgacgatattgcgcgccggcatcgtagcattgctgaagcggtggacgaagacggtttcgtattcgcgcttcaggaagtgcacgacgagaagcgcacagacaagacgttgaatgtcagttggctggggaatattatcaaagttgtaatagaggtacgggcggagtgggtagaggaaaagaattggaatcactagagggccgaagtattcgacaataaacacagtgcgccaactgatctggggacctagggacgcaaacagtgagcaagagtaatcatgagtcgatgcaacagctagaaatatcgggcatacctaagtccttcacatgaagaacggtcttgtcattaagtccaatttgctcgatagtgctgtccttagaactgggaaccacggcccggtcggctgctttggtaattcgcagacgatgaatggaatagccagaagctatggctagttggctgtaaagctcctgagtcgaggcgtcggaaaggatctggacctccttagggagcttcctgatcggttttccttcaccaataagtcagttctgttctatgaggtccaggtgcatgcgccaaaacttaccccgtgactgaacagtcagtgtgactgtggagggagccattggagtttacgtgcaattgaaaccaggaagattgctcactgagaaatgctcgagtacgtttcaattgatctcgaaattgaagaagagaagtgtaaaattggaagacaggattctgaagaaagccaagacccaaggaattgtcttcgagctagttagcctcggtcatgatcacgtggctggcgatcacccgggatccatccatatgcaacacagagttctgcctgggataggacgatagtcagtccaagg

SEQ ID NO: 14582 - DNA, 5224 bp, Emericella nidulans
agaaagaagagaaaatatacaataagaatgagaattaaagatctaacaaagtgaaattattaataaggagtgacataaaacacaacggagaggaagaagagtgccaacgaagaagtaaaaaagaaggttccccgcctaaacaaagcctggcagcgcttcaaaggttgattaaggcccacggctggtaatggccggaagcactcccccaaaggacgatcaccataaaagataaaagtaggccactgtgccacaaaaaggatgtcggacgttgaatggcctccactaagaaagaattcttgatgtagaggcgcgacgaccgcctctatcttgtgccgccctgatgctcaccctctgttgaccttcgctgctactgggtcggtcgctctcatcatcactgtcctgtggacctgtagatccaacgcttattccgcaatcaccgttttgaacccgtcgcgctactgcgttagaatagtggctcaatcgaggaatctcgcctctgcccggactcggcgcaaagcgtccatacatgccaaaaagggaattccgatggcctgtcttcgtaggctgctcgggagtatcgtcattgtctgcattctccggggaagacatattttcggcgccagaagagaagtcaaggtcaaatttccgcggtgtcatgaacgcgggctgggcgaatacggatttcggcgtctcgggtgctgtgggtttcgtttgcgaaaagaggaagggctgggagttgggctcgcgaagagcaggcatctgttttttctcgggagactcgaatacattatgtgaacctgtgatggtaagtttagtctattgagaagtcttagtgggaacgcacgcttcttctgattgtcatgctgcatgctgagctggtaaaatggcgaagtcacatcaccgggagctctggactgccactcaaagtccatcggactttcagctgttcgtttatccattacgacagcagatggataccgaaaatgcaccgatacacatcaaaggatgggtgatgaacgtgcggaacgtcgaggttgatctgcggaggatttcaaggatcgagactttttccgttcctttgttttggttatcttttagtaaacaatcttggacagcctagcaactgcattcaggtctacttaactcaactccaggaatcagaatcgaagattcctttattttatcataatattactaccaattattatcgaccttagctatcaatgaccgtgactacagtgtccttcaaagttccctatgccgcggtcggtactgaggcagcgatcgcatcaccttcccctcatttcacgttcccctctctccaaatcgaatattcattactccgtctacaaacgccgcactagaaacgtggctattactttgattcattctgatcgctaataataaaataccatatctgcaaaatctcaacagctggcgccgccgccaaatgactgcaaagatcaacaacgcagcatgcgtcgatcgagagaaaaagacagaagcgccaaagacaccaaaatcatattatgcgaatcaaattctagacaactgtgcccgtcatcgctgatacaaacgccaggggggaaaggaaaaagaaaaaatcgttaaagcttgacatggtcaaccagctcgaactcgtcctcatccgcaaggtaaccgatggaaagctcatgatcacgagttataacttcatactccttgaccaacttctctgtctcctttatctcgaacttctccaccgccttgtcgacaacggcgttgaacagtgtctcccccgatacttcgtaaaggtcaaccgggccttctgcctggtagacttcgggaatggtcgctgcgactgcgagaacctcgtggtcctctacgccggacgattcggacgtcgcctcgtcaagagcctcgcgcacatcgttccggaaattgacctttgcaagtgtggagctgtgctgtgcgtcgcgtaaacgttgccgtcgggtccatgacgttctgtgctcgttagcctgactaaaacacgtcattcaagtatacaagggggactcgtacgactgttgctttgcaggtcgagttatcgggaggataccattaggagcggcagcgccagggcgagcggaacggccaccatgaacccatttggccttgtggtcgtggactcgcttggccgccgtgccggcctggcgcaagtcgttgttgtcgaacgagccagacatggcggcgtaagtatactggggctggctgggttcgaaggacagtatgcgaggtacagaaaggggacgtagttattgtagaatccgtaagatctcagtaggatgcgccttgaattaggtgacagccagaaggtagagtacgaagaggatgcctgcgcaaagagcagagggccgaatgagtaatgaaggaggctcagtaggaatggcgcttgaaactgcgcctatagattgggtgagtcacaaagaaccagtcaccaagcccgtcgtcaaagagagatggggtgcttggtagaagaaagaaccactatgtcaaggagacctaaagtcggggaccttgtttggcaggtcaaggtcagggtcagggtcaaaggcgtcactgggaatttagccatcatgacctcgcccatcatccatcatcacccacccatcgaccacccaccaccccccgtatcgccaggaggtccgggcgggcaagacaggaggaggcgatgctgattgcggcaggtgcagtcatccatgatactgataacggtagcctatcgatcgagcaccttccactgccaatggaatccccctctacttcccctcacctattctcgggacttggttgaactcctattttcgtcgactcaaccgagggaaccgaggattattgtttccgcgagagtcaactggacgccatagcctcaggcacgttgtcggctaccccttgtcacttgctaggtgatgtcatgcggtaggggatgatgcgattagcattcccgtccgactgggctgtcctgtcttatcatgcgtctgtcccaatctcactgcagctgatcactgtcatctgcgtcgtgcaatcacatactttctactctgctcgttcctcgaatctagatctaggactgaagttcggcgtagtctgtaagcctaccacgcgcatccaggttgcactctcccgagcttggttcaatattgcactgcccgatgacagcagctcgtcattttagtataaccataaagttgagccagttgaaccatcaggtctgaagtcgccgttaaggcgagcatacggtggaaggtccggccagtatagccgaggttcttgcatgcttgtttctctattatgttgtgggccgtgtccagcacgacaatgacaattcagtacaagtccaagtatgtgggcgactattcatccatctgccactcatattccagagcctgcatcctctccttcttattgcgcgccgcaaaccactccttttcgaacccattcgaccgatccacaccatcccaccgatgcccgggccggattccatatcgatttggctgaaatgcccccttatatagcggcttccccgttttgctcctgccaccccctgtactcttggtcaggaactgcgccgcggggtcgttccaccgagtttgcgctttcaactcctcgttcagctcctcatcgtccgcagtccgcgccaacggcatgacctttgcctcctcgagcgccgctctcctggactccctctcagcccgctgcacatcacccatgagcgcctctttcgcctccgcttccttgatcagcttctcctcctccagccgtcgcgcttcggcccgcttcatcgcaacgtttataatccgtcctgaggcgtctcggtatatggtctcttgtgcgtgtccttgtttccctttatattgcgcttcttctgcctttcgcttcttctgctgcgctgctaccatggctgctgtttgttccgccgtctgtagacccgcgcgagcgcccgattccattcgcagccctccatcgtcttcattatcatcctgatccacaaccatcgggtcttcatcacccgctgcccgcctcgcatcctcctcagccatcgcatccgctaatatagcgtctgcctcatcccgtccagcatttggccccgtagctgtagctgtatccgtacccgtgttcgtagacgacccaatagtcttccaattactcttcttagttttgcgaaactctgcgcttcgcgcgcctgtcacaacaggtccgtactcatcattttcttttgaactcagcgtagccgtgctccggagatcgggtgggtcatcgtccgcaattatgagcccttgtgattctacttcggcagctttggtcttcttgcgcttctttttggggcgatccgtgggaggcgaagggtccgcagtaaggtagttcttcgcaagatattcggctaatgaggaggatggcattgtagatggtctttcgcttttcagctggtagttgatattggtaatgagctcgactttgaaagatctccgtatgtttggcttggcggcggaggcgagcaaggcgggacaatgattctccggtacggtatgttagtatatatcttcacaatacgggatttcagcacaaatcagcaagtacatgtttacgacaccccaaagtgaatgggttaattaggctataagcccgctacttacaatcggtcatttttggagcgtgtgtggtggtgttactttctcgaagacaacgatatcaccaatccaccattacaggctcgcccactcaaacaaccgtcatcaagactctcatcgcaactagactcaagataaaaatggctcgcacagaggaagcagagcactggttcaacgccgtctacgcagccgtgcgcgagatccctgccggaaaggtaacctcctacgggcatatcgctctcttactaggtgaacgtacgctctcccacctcaaaggccgggagcattgacagcagctgtcaggatgagaactgatatatagagcagccaaacgcccccgccaagtaggtatctgcctcaagcacctcccttccccggagagcggggagtatttccacagcgggaacgtgccgtggcagcgggtagtgaactccaaggggatgatttctcatcggtgtgtttgacctcttttaatatgcggtgtgagaatatgcatgagagaggcaaacgaaataaataactgactattactccgctagcgggcctgggagtgcagagagacaggcggaagctct

SEQ ID NO: 14583 - DNA, 338 bp, Emericella nidulans
attgccctgtgttcatactcaccaccctagttcgccttgtgacacggtcctttgtatgtatacagcttttccgacgggcggcttttagacggggattggccagcgtcccgtcatagagcctcggtgcctgtgtaaatcccaggagtactgcatcatcaacaggacgctgtgcataccctaacccgactagcaccgcgtgaataacaacggcctggcactggacctaactgggtaccactgggcttatcctatgccacggatcgataccacggacaggcgctcggtctgagagaccgtaagccactgactcgagaactgctgattgggtaaataaaacg

SEQ ID NO: 14584 - DNA, 483 bp, Emericella nidulans
acgcccattataagtacctcgactcacgccggggatcatggctgggtgttctcccaactgagagtgcaggggattccggaccggtgcgctccatcctcattctgggccgtcgccatcgtgggcaactcgacatcagagaccatggcaagcctaacggactcggcttcacagctgaaattgtagccgctttcctcatcatcattcatgtacagagaatcgcccatctggtcgaatatggctcattggcagaacatgacagacattttgttgctgctgacgaggtcatccaacaggcaaggggcgacctgcaaccagtacagggcctgagcgacctaccacattgcacaccgggtgaggacactgccgtgttcacactcaggtacccactctatgcggcaagggaacatacgaccatgaccaccctgctagctctcggtctgccttataacgccgaagtacgaccatcaaactcttggcccatgc

SEQ ID NO: 14585 - DNA, 633 bp, Emericella nidulans
  unsure (1)..(633): unsure at all n locations
acacggngtcacggaaacaccgggggcacagcggaaatggagcagattcgaggagacgctctgtgcgccgcggattcagccggggtgagggggatttagaagccgtggggggtaccccggccactgcagcggccatagaggcggcttagggggcggaacgaaggacactatcaacggaacgggcggatacgacggcaaggcacgctaccacaaggccggatcttagaaaaagccagacacgcagcccgcaaatgacaatgaggaaagcagacagcccgataggcttaaaccacagagccattaccacgcaccacggctaatggaaaaatgatcagcatccacgtggccagacagtcaatcgaatgatttcttgccgttcgcaaaccatattgacagcatcatgaatgcacataataagaatgcccatacagctcgccggaatgtccacccttataaagcacatagccgccccgtacagtaatcttaaatgacccataagctgtaacgaattaacaaccctgaattcatccaatataacatagaacaacgttaggggcccatcataacgaaaaaaggacctctgacaaatcaccctgcaaactcacacatagactgatctaaaaatgaaacaat

SEQ ID NO: 14586 - DNA, 643 bp, Emericella nidulans
  unsure (1)..(643): unsure at all n locations
ccgtgtctactttaagacctacctccgcgctagtagtagcggctggaaccggcgtctgagcggccgagcgtttcagccggagacgcagctctccgtcctctgggttcgctcgcttctgagtcgggtcgggaacgggccgctggctatagtattcggcagaaccgtgcatgctccctattgaagcaatggatcgtacctcggtatgcgatcaggacatgtatctctccaagcactctagcctctcaataatctgcattccgactatcggagccacatctcctcgattccgtggaacacttctgtgcccatgagtcggtgtgcagagggaccaagatgcatatcgttcctagaaacacatgtcaatagagttcccaaacgagagagagtaatcgttcatatttaccagaaaagatacttgtccgggtgttcgcagtgcttgctctctgatgtcaccacccactgctgactactttcgacgcaagggtcctcaacattctcccagccgggatcttggttctttcccagcccgttgattcttccactcccgncatgaagagcttgcggtctcgaatagatcggagacaacgatcccgatcgaaaagtaatcgtcccctttccatggtccccgggcttgaattgctgt

SEQ ID NO: 14587 - DNA, 1704 bp, Emericella nidulans
  unsure (1)..(1704): unsure at all n locations
ttgagttcaaacctcaccccagaggacaggacgtatctccgtcgccaaggtgagaccggacggggtccacaaaatgcaaaagacagagcaggtagaaggccatggcatatgggcaggcgtcaacggcgctgcgatgcaggctgttggggctgaggttggcgtagagcattctgttgaaaagattgccaattaccacaccattgtcacaggggaccgaccacaagactggggcgattactatgaagctcgcttcacgctgtccgagaacaaatcccaaaaagacggtattccatctacgcttacggtgtgcattcttctcgaaagagacgataaccaggactttgtctgtgtcccgaccatctctgtcacgcccaacttcaagactgtgatggctaccttgttttcgacaagagatccggacgaccctatttattttaatgtagaagaaccacctgtcgacctcctagaaggcaaattaaagatagacagggataacctggcggccaccaacttggacgaagcatgggactgtaccatgtacaacgagtatcgcggggcaataaaactatccaagcccagtgaaaccaagtgaaatgcggggtcggaagcagtgcgcaaggctttagcatgattaagagaatcgagtatttgcacctataggttgaacgttggcattgctgattccgtcgtttccgattcttagtgtaatggaaaataagcaatatacaacagaaagaataacaggatcctggagaatcgaaaaatgtcgttttatgtcgctatgtgagtattgggccagccactatctgttcgcgccaaaggctgcagctgcacggccggtaccatcaaaaacttggtttaatagaacaccccagccgtatgtccaatcgatgaagtgatatcttgaagcgtatggtcgatcccatgatcatgctgactcgttcaaggatttatcctcgggattctgctctaagcgtctgggcacaacagagaagggtctctcgagacgaaaataacacctgagtgggtgaaccattttttcacattcggcaagacaagcacctgctgaataaactgtataatacccccagcgaccaaattcccatagtgatggctgttagtttggcagaggattttaagggcttgctcatcgggcccttgcaacctgacgaggaacctgaatctcgttcgaggcactggacacaggtggtacatgtccttgagacaggtcaagaggactgggaaagcttagatgaagcagacaaactagcgctggcgtatcatgatgagaagaacaaaggaaggccgaccttcctccataggatggccgagaactgggcgaacggcgagtttagagagcttcccatggcgacacgccagcagatcgttctctttctgctttgaccagcgtatcgacccacgaatggacagacgaacctatccttaaggtgncngggcnnnncacannnnnttttnnccnnncagaannnnctccgaagannnctcnaaacctcatatgccccaaggtgnctnagaagaacggcttaatttccttaaaggccctggtggaaattcatgcccccaaatgtttcccgtttttccccttcaatttccccacctttaaaatgcaaagcgatccccccccaaatgccctgctacccccaccctctcccgtttcccttccccgggnnactttttggttcc

SEQ ID NO: 14588 - DNA, 2335 bp, Emericella nidulans
accacctgttcgccccataatttcaacctggtcaaatccctcggcgcaaccgcagccttcgactaccactccccaacgtgcgggcgtcaaatccgcgacttctcctctggaaacctctggtacgcgctcgactgcattacagacacacggtcgatggccgtctgctacgaagccatcggaccatccggcggtcggtacctcagcctcgacccgttccccatccggggccatacacgacgcagtgtcaagccgaactgggtgctcagtgtaacgatgtacaaccagccgattccgtggaagaggccgtttaaacgggatgcgtgtccgcaggacctggagtttgcgaagagctggttccagatcgcccagaggatgattgatgcgggtgagatcaggccgcatacatcggatgtgaaggctggcgggtggaatggtatcccggggggattggaattattgcagaagggagaggtttcggggaggaagcttgtgtatgaggtcgcgagtcactaaggaggaagggctaggctatgctatgctattctatgttattacgatttgcacttcgcatttgtagagatattatgctactcatgttcggcataaaaaaactcaaagattaggtaggaaccctatgtaaggagaaaagataagaggagcgttgcaagcagagcatacgcttgcgtaggtcctagttcagacagcacctgtcatcatgtggagtattctgagcatcaagagatctacatctaggatggagttgatgtgcctcaatgcggctgaatgtccaataaacgtatttcccgagcagcgtgagtcttacatatccatactccaaatcccgagggcaaacggggcagcgcgcgtgaatattccgggccggagaataggagacggacagcagctgtctcaagctatcttccaagtactcaactgacaggaaaggtgtgcaaaaccatttaaactagccatgctagggtgcctcttagatagttggagagaatcgctccgatagctacctagttcatctactagaaagaaatatgcctaccgaaagcctcaatccaggaactgtcctcatcgtgggcggcggccctgtcggcctcatcacggccacaaccctagccaagtacggggtgcgcagtgtgattctcgagcgcaacctgacgacaaccaagtggccgaagatggacctcacgaattctcggtcgatggaaatataccagagactagggatcgcagacgcactgcgcaatgtcgccgtgccctcacactacccgtttacatgtctcttttcgagcgggctgcatgccgacaaggcgatcaccgcatgggatctgccgagccctgacgagtaccggaggaggattagagagcagaatgatgggagtatgccgtcagaaccgtggttgcgcgtttcgcaggagatctttgaggcgtggctcaaggagcttgggatggagaatccgcttattgatttccgtgctgggtggaaggttaaaggggcgcgcgaacttgaccatggggtggaagtggaagccattcactcggatacgggtgaagtgtggaaagtcagcgcggactttgtgatcggatgcgatggcgcccacagtgctatacgcaagagcctggaaatccccttggacgggggcccgatgtaagtactgatctacctacatatctgacacgacaggcaggaagtcagatcattgactaaatgttagtcatggctacgccgtactcgtgcacttcaaatcaagagatctctcgcgcatccaaaagcaaggccaattctggcacttgtttttccccaatgctgcgagtgatggcgggtccatcaagggggccgtcatcgcacaggacgaagtcgacacctggaccgttcatcgtttcatgcggcccgacgtggatcatactcagctctcgtcggaggaaatcgtttatgaccttctaggtgggatgggtggccagccttttcccatcaggattgacgaggtgcttgttcgctcgacgtggacgccgagcgttgcacttgcgcgctcttacgcagggcctaagcaccgtatattcatcgcgggagatgcatgccaccagaccgtgccaacgggaggctacggaatgaatactggtatcgctgacggatacgacataggctggaagttggcggctgtgatacaaggctgggctggacctgcgacgcttctttcctatgagaaagagcgccggcccgtcggagaattggctctgcagtggtcaaaggaaaacatgggcaacttgatgaagatgtcggccgaactgggcctcgacgccgacatgatcgagctatgaaacgaga

SEQ ID NO: 14589 - DNA, 2374 bp, Emericella nidulans
ttctcccccacgcccgtggctctcacggtcttattgcggcgtcacaccacttcctgattaattcactataatttactcaacgttcgagcactttccaagattacctcatggaattgccacggtctgtctcagtcacggtccacggccgctgagtctccagtgggactcccactggcagttcagttctgaatcgggagagacaaaaagaaaaaacaaaaaaagtcatgcgcaacggccattgaccatgaacccagacgatcataaccggtttttgttggccatcgaaccatgattttccaccagtttgcatgtaaaccggtcttcatccggtccacttcctgtcttattttcagctccagcaaggccactatccactgattccagctctcattgcctttccgcagactcccggccaggcacagcacattagcgttatcgcgctgtccagggtgtctcaatctataatggcctagcgtgcaactatcagtataggccgagacgttacattgggaagactatcgattcaatatatatgattcgagtacaggacggcaggacggcaggacgctcagccgtgcctggaacagcgagaataacaataccccagagcgtgggactgtcagtagcgaacttagtcaggttcaacgatcgaacccagcaacggccaggagggggagtcgtttacccacatggacctcggggaaaccataccatgtggcatgcctcacgcggacgtccggagtaatagctaattatggcgttgatcgtgatccgcaggccaaaaagcagagccaagtttttacctaggtatccatgttgctgaactagggttgctcctgaccccttaccggggtttggctcttccagttatcttttgctgcttcaatttctcctcatccaacagtctttcctttagacttcgtcccctatctcttgtttctgtgccggattgtaggcactatccggtctttaccccgttgcttctctctccccgcaccgtgcgtgcggtgtcactcgtttgccatttcggcggccatctttgtattatcattgccactctctttctctgggatgttcccttcgtaacttagcattggtactcccatcaaatcgctcgcttatccccatcatcactcgttctagaacatttatcttatcaaatctgcgggtgagacctgcagcccccgcgatctgacacagcgttatacgaggccgacacggtccagacatcgtcacaatgaaaatcctcccatccttgcgcttggcctacatcatgactgttctctccgtcctcaacatctcgaacgccgccaccactgcagaatggaaagcgcgctctatctaccagacaatgacagaccgttttgcgcgcaccgatggctcgaccacgcacgcctgcaacacgaccgctggtctatactgcggcgggacttggcgcggcactatcaaccatctcgattacatccaagggatggggtttgacgcggtgatgatttcgcccatcatcgagaatatcggcggccgcgtgtcctacggtgaggcgtaccatgggtactggccgctcgatctgtacagtctaaacgaccatttcggaacgcatcaggatctgctggatttgagtgccgccctccacgagcggggcatgtatctcatgatggacacggttatcaacaacatggcgtatatgacggatggagatgaccctgctaagaacatcgactattcggcgttgaccccgttcaacaagagcgagtactaccatccgtattgcaagatcaaggactggaatgactaccatgatgcgcagtggtgccaagccgaaaacaataaggttgccctccctgacctatacactgagcgtaaagacgtgcaggacaccttgatcagctgggcgaaaggtattgtgaaaacatactcgattgacgggctgcgcattgacgctgccaaacacgtcaacaccgggttcctgaagacatttagcgactccgtcatatgtacgtgaccggcgaagtccttcaacgcgaagtcgacatcatctgcaactacacggagaactacattgacagtgtgcccaactacccaatctactattccatgctggacgcctttacccaagggaacactacctcgctgtaccaccaggtcgagaacatgaagaagtcctgtcgcgatgtcaccaccctcgtatccttctccgaaaaccatgatgttgcgcgcgtgccgagcttcaatgatgacatggcggtacgtaaccctccctcaccgccactcatgccctctatctagaataagaaggaaaaatagaagaaaggagaatcattacactactaaatgaggacattccatgcatatacagctcgccaaaacatcctca

SEQ ID NO: 14590 - DNA, 3057 bp, Emericella nidulans
gccttgactcaatttgcccctcagtaagacaagcctcattcacctcagtcctgaaactctctaccacatatatcctactgggcatctcatatcctagtattccacaagaaacggacaagaaggtctgaaaatgggcggcaaaaagggcggcggcgagaactcaaagaaggccgctggaaacgctcgcgtgcgtaccacttcttccccaaccaaaacttcatagaatcgacctatagctaattgtaaactttaattcatgggagtacagaaagctgaagctgcagccaacaaaaaggccatcgaggaccaaaagcgtgccgctgaagaggacaagcaatgggccaagggcgcgaagagttcatccaagaagtatgtctcgaaaaacaatctatacaacggaaatcgaggtgaaggaaaagcactaacatgcttgttcaaaataacagagaagaggccgaagccaagaaggccgaggccgctcgtaagaaagccgaacgcgatgcgctccttgccgcagaagaagcctcgcagccctccaaacccaagaataacaaatcagccgctaagaagaacgctccctctcggggaacactcaaccttgaccagctcgacgatgctccctcttcgagagctagcgcattgaacgcatcgggtatcgacaacgccctcgatgctctctccctcacgagcaaggacactagcaaggtcgaccgccaccccgaaagacgatacaaggcagcctatgcggcgtttgaggcgcgacggctgccggagatcgaggctgagaatcctggtttgcgacgacagcagcggattgagcttgtcaagaaggagtttgataagagcccggagaacccgttcaaccaggtgcatgttgcgtttgatgcgtcgaaggaggagattgcggctgtgagggaggcagagaggaagaagactgaggcgagactcacgaggtagatgatttgtttacataatgattgtgttttatacccaggttttagctgaggattggaaggactggaaagaagaggtggatcttttatatagataggttaactgggtaaccaacgtgctgccactatcttggcccgaagagtaaacatgcaaattgatagccagaaaatagcgaggaaaaatgaaggtatcatatgccatgcaatctaaatatccaatgaagagaggacccagttgtaggggaagggaaactgaacgccatctatcccatcaccgcacgcacatcccatacataaacgctctcatcccacccaacgcttgcgcaccacccctcgctcccaaaaagacaccaatccacgcccgtcacaaattctgtatgtcggttcatccttcccagctccgcgcccataacgggcgacggcccagaccgcatgagatccgtgtccccgactactccgggcggcgactgatcgctccaagcccggcaggtcatatcatagctcgcgctcagcagtacattcgacagatgcggtgaccaagccacccgtcgaaccgcgtagtcatgtccgatcataatagcctgcggcccctgctgtggagcccttatgtcgaacgtcctgatcgtcctgtccacgccggccactgcaacaacagacggccgatacttgttccagtcatgggtcagcgcttcagatggcggacatgcggcgggtggcgccccggggtttcccggaatcggcgaggcaggtgccgcatggatgggtatctggagagtaaggtggtttgacgcggaggctggagtccgtagatcgtatacccgcaggtatgaatctgaggagacgcaggaaagaatatcaggcgagtgcggggaaaaggaggcgctgtatgtgcaactgtgtgtcggcagagtgacgagcgagtgcggccgttgcggggaccagatgcgcacggtgccatcccagctgctcgagcaaaaggtatcctttgctactagattccaggatacactgaatacttcgcgattatgctctttccaattctgaatggggaagtcgttgagtgtgctgtcgaagagcttaatgctgccgtcgccggtagcggttaggacttggtgctcgttggcttcggaccaggcgagatcgtaaagggcgtcttgggttgtgaacctgacgcttcatcagccgagccaaataaagatgatcgtacattgggaaggattatgtaccatttcgccggcacaatgccgtttggagtcaactcgaggatatatagacggccattaccgacgaggccgaagttggcggatgaagcaaccgctaatcggttgtcgaagaacggcgagtatttgaccgcatagccttgatagccttcggtacgaaaatgaagcatgtcgaagaaggttgagtcacagtgctcttgatggtggtgggggagagcaatggaggcgcgaggcggaaggagactgcggggagcgactcatcggtcgaaccgaggtatccaggaagcttccgatactgaactttttttagaataacattaaaataacatttgaatcatctgataatgacgccctatcatcttaggatacaatcactggcatccttgtactctttctgacatcaagaaaccaaagtgagccgtgactggtcatattgaaagcaatcacgtgcatctagttcgccttcaatgaaattcatcaatttcctccttccaccttgtacaagcatgactttttcacgtctcttggtctagctcactatgtcacagacgatctccccttatggaccgctacctctcgcgcaagaggccgcacagccccgtcaaatctcggcccgcaacacccgactacgatgacgcttcgaccgacataaagctagctcaactgctgtctcttttcccagaaacgccgcaggatacgcttctggacattcttgtctcatgcagtggctcagttgaagccgcagctgctaccataacagagcagaagcaactctctttcaaacggccaaggacaaccgccaccgcgattcagacatccctcaaatcgcatattgccgtatccccgggtaaaggaaacgaaaatggaaagatatcgtattaaag

SEQ ID NO: 14591 - DNA, 1421 bp, Emericella nidulans
tgccggcacgctggaagacccaatccttgagacgactgtgttggattcggggtgcttggtttgtcgtcggatgcgggtgcggcctcagacgagtcaccggtgggggcagggaattggaacccagatgccgcccgcttttgctgagcgagctccgcagccttcttcgcttcagggagagcaagggaatgacgtcgctggtgaccaccgcccgaagggcccccacggccacggccatgagccccgttctcgttcctttggaagttaccctgttgctgttggctgtagtccgaataacccgaagctccagaagatggagctgggggaggaccgcccattccgaagcctgggagagccgattgattacggcgatgcgaatgctgattcgaagtgttccccggaacgcctagctgctgctgctggccaacctgaggaaactgaaaggcaccgagttgttgtggagaaacgccgccgatgggcgcaccgccaccttgtagagacggcgtgaaaccagaagcctggccgatttgctgcggttgcaataaacccatattgatatactgctggtgtgtagctgcaatttgctgttgttgctgttgaagcaactcaatttgctgctggatcgccagttgttccactgtagatctgacagttagcatctcaaactacttgaaggcgagcagatcaataaattgtgagcggaacatactcatgagaggggtaagctcagatgggctccgtctatgggcaatatgaagctttcgtccagcaggtccggggaccccggactgattctgttgatccatctttgcaatcggagagggagcgttctgagtgtgagatacctagcgatgagggagcttggaaagacttgggctgacaatcgctgggctttattcgacagtggaggccgaccgttcgtgttgcgacaaagaaaggtggttccgaagtatgctagataatgagagggacgaattagttactgcgggatagttaggaggagtgaggtgggtataggagctgtgagcgaacaccagacatcttaacggggaagaaaaacaagcgggcgctggcattgcccagcgtaggctgcgattgccccgcgagtgtgaagctgcaaggacgaaataggtaggaatggagaggaaagcgggatgaggaaggagagccgccgaatgctcggtcaaggtattttgaacttccttagtgcacataccttcaggacggtcgcttggttcgatatatatttgctgaatgacgaatttgggtcggctttgcagttggtagtcgacaagacagtgggctcttccccttttgcacggagttgcttcgcactcaagaggaaaagtggcggcaatgaccgtcaggtaggagtagaaaggtagacagaaaaagatgaaagaagacgtattcacagaaggcaa

SEQ ID NO: 14592 - DNA, 1924 bp, Emericella nidulans
  unsure (1)..(1924): unsure at all n locations
gcactcagtttggggatgggccggagttcaagatatgaggttccagatacatgtttataggcgactagagtagtatcgtcctttatgtacgtattatgatcgatgtaaggcctaagtcacggatttatgtgcggcagcgtagccaagggttcatctacaacattgctgtaattaggattttgaggcgatgagcaactatctgcaatagttaaggaaggccgttaaacgacatcacatgagttgctaagtgattgaggtatacaacgcttatgattaaccgcccaatgtagctgaaaagccataatcgcaatatcggggggtaaacacactttacagagaggaataggtatgttattgctacagttcatataaaaagacatcaaccagcatcaacaattcgccgtggtgccatgcacgcccaggtccaaccaaatagggtaaaaacacaattaatcgcatgaaaaaagatacatgagctcaaattttggtcacccattaactcctcaaccctagcagaaggcttgtgctcttcccgccatccttgccttcaccacctggcaaatatgtgacattcgggttgctggcgagggtgtgtgcaatatccttgctggcttcaatacgacggatttcaatgaggccgtttccggccttggcgacggccttgctgatgatgtcggcgctctcggcctcaccctcagctcggataacgttggcctggcgctcctgctcggccttctcgacaatgaagcgggctcgctcggcatcctgctgtgcgatctgcttttgctcgacggcgcgcgtgaattccttcccgaaggtcatgtgggtgattgagacatcctcaagggcgatgttgaattgcgaagacgcttcatcaggtctgtgcggatgcggtttgagacagcctcgcgctgggtaatgagttcagcggcgtcgaactgagcgacgatggctttgagaacttcgtttccgatggaagggaggacacgctcgtcgtaatccgtaccgtaggactaaaagagatatacattagcccggaaagtggcagctgggatgagaaggcttgtacgatcctgataaatagctggcagtttcgggacttcggaacggtgcaagactcgcagggtcaagctgaccatctgcaaatccttgcttccagtggtcgtgaagatgttgcnaggcttggtacggacatcgtatatgaccgccttctgcaaccatgggatcaggaaatgtgtgccttcgttgacgacttgctcttgtacaccagacaatctgtcgaagataactgctcgagtaccacccttgacatcgtacaaggaggcgttgactgccatggctcccaggcctatgggaatagccaggcgctggaggttataaagaccgttagccgccatggttcaggtactgtggagggctagtgtgcagttgcttggcttgaagagctgctgatgagagctttcggatgatgttgcgggcggcgggcttttcgagcctgtcccgaaatggactagcgcctggacgctccaacttcgcccgactcagaccgagagaaacgtcaattcttctctttcgttgtcatacctcatccttacctcgacgtcgcgtttccaaactcgttcgtttcgtcttatacattcacaatgggtggtcacttggatcctaagaacggagtgtgagtcttcctctgttccggtgtccgcgcgttaggatgccgtggatattccggcggttacttcctggattgcctcgtcttgccgagatactgcacttattgctgtttcaataatctcattgcttcgtgcttacattctgcattctttatatacccagatgctaactgcattgtaatatagttttatgggcagctggggtgacatgggtatgtctctcaatcctcaagcgcattcctcgaacctgtaaa

SEQ ID NO: 14593 - DNA, 412 bp, Emericella nidulans
agaagcatgaaccgctcatgagcacggtctttgactgcatacattaatggggacagagtttgtaatgatctgaggggtagtcagacggataatgtgatcgcactgtactaatagcatagtgagcagaccatggtatgaacgtgggctgattataatggttggctgcgaagccgaacagggtttgtcgctgcgtaaaccttagcgggcgtacctgaagaacgacacacggcaacctctatgaaacatgataagagtggctgatgggcgccaaaatttgcggacagtggctctacacaagcaactcacaatgaccggggcgatcctagcatccatgaagggagaaaagatatccacactgtacgagctccggtctaacaagacctaagatctgatgaagcactaggattcgtgc

SEQ ID NO: 14594 - DNA, 645 bp, Emericella nidulans
agcatccgcctaaattgtgcgctgggccttgggacatacggaaagtgatccaattgctagcgctcacgtgtagattttgacaggggaacaccttgaacctgtaatgggccgttttagggatcctagcctggcacgccacgaatagactatcggccgtggcttacttgaaaggccggatgatatgcgtgacattcaagcccgcgcacaatggtcagagataattcatgcctagacggggttgccgtccgaggagcacagtctgttcttcgaaatactggtatcaccaaagaatgccggagaaggacacatgagagaatgaccgccctgccttatgtattgatattcaccgttgagaacataatacagaacgcctaaacgtgaccagcccgcttcctgttggtgggtgactagacgaggaaagcatcaaaacacccacccctcttgggacaaccaaggcaagcaagggaatgccagagaggtgccataccgtaaccacatggttatttgagaattgagcgacccaaagatgcaccttaaggatggaccaaggcttgatgctacgaaccagggaaacttcaccaatacctacaatgccaatacgatcactatacaaactggaccctacttacaggctttgattttttg

SEQ ID NO: 14595 - DNA, 322 bp, Emericella nidulans
ctattaatatccgttcctcctcatcataccaataagagattaactacctaacaatatttaaaactaataagaaaagggttagtgctggtagcgagctcgcaactagctttgaacggctaaggctgatggtgccccacacttattcgcatactacgtgaggaattttggtcagcaggccgagggggcccgtcttcgggcctgaccaagtctggaccgggtttgaatggttcattccagcccctcttgcgctagcgacccgtcccgattatggaacctgtcaacctcgggaggaaagaaattgatcgtcctgggaccgccctgt

SEQ ID NO: 14596 - DNA, 4214 bp, Emericella nidulans
aaatggttcgagcctcacgtagacgtgattagtctcattataaacaacaaagacttcaaataacggttgggaggagggacgaaagaaggaatcgggaccgaagaggcaaatgaacgaaggaagagactgagaggctgagaagaggaatgagtgagattgagattgaacttgagcgggtggaaggagagtggagatgcgagtcgtctccaagaaaaaaacggcagtcccaaacctgtaataataataacagagtaatactcttgtatgatagtgggcccaggcaccgcttccgtacatttattcttagcaacagcgcgccattcgttgctgcaacgcttcgtattacccaacttgctattcctgtgattagtagcagccgcaagaattaaaccaaccatgcagcaggttaaagttgggcagttcactttcaaacagtgctgcatagctttacgattataaaagactgcgttctgcctggaaatctccgtcgcgcccgctggaagcaagcagccgagctctgtgtcttagtgcgcggtcggaaatcagggcacggttttccagtgttcacagcaacactgcattacgccaacggaaaaatcacttcgtacaatcatccttgatatccattatgtcgctggttgcagacttacagtgttgaacgtcccgtagcttttaataaaatgacagcattctatggagcaatgagacctcggttcacaaaccgcaagcaggcgatgccctaccggatcggggtggcccccttttggaatttcgcataagcttcgtctattgcttgtcattgaaatacatgactatcgtgccgtgttaacaccatataaccaatgttggatcatcgagaagaaccctctcgacttggaagaccgtcatgagagtgccaggtgagcccacattgcaaagcagagaagataacagggcggaaaagaatcaaagttcatgaaaccgcggttcagagcgttctagagcgtggaaaccacactcatccacgagcctgataccatgagagatgtcccaagaggacgtccgaaatcgtaccaaaataaacccaccgctttccattagatccatggatccgggcttagcctgtccctggtggaagtcccagcacagagtaccctttcgttcaccagaaaccaagtgtctcatataaattgttgccgccagaggtcgcccatcactgttaaaggtaatagaagattgattgtggtacagaggcgccgattccttcaaatgaaaaagccaaaacaaaatcaaagcaaaaaaaaacaaaaaaaaaagcccgaaggaaccaggattggacaatatgtgtttctcgcaccagaaatagcagtagtgtgcggtttaaatctgactcctgacagaaaagatacagcggcgaaatataacagcaaactccagcctcttgtatgctatgtacacgatgggcatgtttcgcccaaatcaaatctcacgagaggaccaacagcagattgaactcaagaactcagtagtacaaatcataacatggtagttgaactccagaacggagacaagaaatcgttacaaggtttcaacgtctattgccgcatatcccatttaggacgaaggtttgatatcaaatcatccttggtaccaacagtttctgggggcagtcggctgacatggtacgcaccattgcggatgttctgcaaatgggttgctgagaccccggttcgcgtactgcggatgctacccgcatcacttgcagtgtcttgggtcttgaaacgaggaggaggagcaaaatccagattgccgaaagcgcctgacttccgtagtgcgtgtctaccaaccgttagtttaaacacaattgaaagacagcggtgaacttacgggctgggcataggtgctaaatcgtcgaacaccgacacaaggggagtgtgagctcggaccgtagggctgtagggccgtactcctccaagaggggtctccgggcgcccgtctctttggtctctgaagcttgaaccaggagcgaagtcgatagccgtcatgatggaatcatccttcaagagatgaggggaaggaagtacgttaaggggagctggtgggggagccgggcgacgcggagctctggggccaggaaatcggtttgaagctgaagagaatgcacgcggaccgggaggctgaaatctgtcgctatatccaccgatcgagcccgacgccatatggtgggctgcgccctggaaccgaggaggagcgcgtggagggggagtcatagcgcgacgagtcattggttcagcatatggtgctggtactgcatcatagtattctccggtaactggatcatagacatagtcgtcatcatgtgggtagtaatcagcgccatagtctccgtagtaagtctctcgttgtcctgccttgctctcgtcgaagtattccttgtagaatgatcgaatacgattagcacgctgctcagggttatcagacggatcctctggcggcaaggggcgtagtcccattgtcagacggcgggtatcacggcgagggtcgagattcaggttagatgattgcgatggctcctcgggcattgcaggcttaggcacttgatcgggactttcctcatgcggagtggagccaatgcctgccgtctggacattcacagccggaacagctggaccggatgtcctctgatctccgtagtcactatcgacatcgctcgaagggagagaaatccttggcatcgcaattggcttgtcatgtgaagggttgtgatcgggtccagcatgagtagcaggcgtatcctgtaacggcaagtcgaactgatgttcaggagggcaattcaagggagacgatatgcgtctgggaacgtttgcttctctgccagtctccgtcgtagattcgttaattgatgtcaagcctgatacatggacgggactgggactcctgggcaagcttaattcaaagccggcgtcctgcacttgaggttgagcccgcccagctgttggctcaggggggttgtaaagaggcggagacgagcgcgagattctctgagcattacccaataacccttgattcatttcatccccaaatgctcctctccgtgttgaacctgcaacgcttgcagcatcgtcatgaactcttctctgcgaccggatagactgagcgtcagttgagaaatatgtgtgtgcgtgtcggtacttgtcatcatctgccaagattgttcggggtaatgaattcagcgagtccttcgagccgcgtatgctaggcggtacgatataaggactaggtcctatgtccagagagatacccttcatgtgatgagatcctttttcttgcatcccagatctaccgccgctcggggccagatccattccaaagtcaagagacttgtgcttatcattggcgtcctcattgcggagtttcttcacatttcgtcgatgtaaaaaaattaaaactatgatcgcacagacaatgggaatgctagttcacattagcgacgcccgatgaaagacaatagaacatacactgctcctagcactacaggtagtgttgtattgctcgcggtacttgtgttcttctcgcatcgggccgagttgtctccaggcgagcacgtttccactcgaccagaatccgtcgtgggcattggttctctttttactagggtcggagcttcgggcatgagtaggtacggcggtcggttgcgcggcatgagtgctggctcgacaggtgcaaaccgggctcccaaatacttgccatggcgatgttggtgctgttgatgccggtgcatggtcgcctagcttctgattgcacgactttcgaactcaagcattcaagtgattgatgtcaacggatgtggaatttgaaccccgattcattaatctgaacgtccgtgtaaactggatttgggcgagtcttgctgtgccatgcaaaagctgttcaagaacaaaatgcagggttgaccagataagctggaggcagagaataagatcgacgcgtgctagtttcgacagttgggtaaggagtgtacggacgaggtccaaagcgagtggcggccagcggcagagtgcgatgaaaagaatggctggatatcgctaccgcgatatccgagacgtccaggaaagagcgactgggtaaagaaggaagcggatgagagatagaagaaagagaaaggacgggcaggagagggaagaggaggcaagagggcagggccccattgggggctaagcctggtatactagtac

SEQ ID NO: 14597 - DNA, 2768 bp, Emericella nidulans
gctttatcacctcgcgcacccctggggctgcgggtgcgttgatcttagcctgctgctgcgcccgcctctgactgtaaatcggtagaatgctaagttttggcggatcgttcaacagcttcagccgttcatcaactagttcgcaggtcgcttcaatatcttcctgcccagtcataaaaacaagaatgtctccagggccttgtgaaacgtggatagccaagacctgcttgacagcgctatccacatagtcttcgcagggtgtgcgagagaaatggacgtcgacggggaacgttcttccagggatgatgaattccggagcaccgccaaagaaccgtgagaatcgctcagcattcatcgtggctgatgtgacaattaacttcaaatcccttcggcgggccaggatcttcttcaaaagacccatcaacacatccgtattcagtgcccgctcgtgcgcctcatccatgatgatacaggagtacttgtcaaggtcagtctgaacaagtgactctcgaagaaggacaccatcagtcatatatttgatagccgtgttcggaccagtgcagtcctcaaagcggatagcgtatccgacaagatctcccaggtcaacttccatctcttcactaacgcgtttggcaacactcattgccgcgactcgacggggctgtgtgcatccgatcattccaaatttagcgtaaccatcctcgtaaagaaattgagtgagttgtgtcgtcttcccggaaccagtctccccaaccactaccaccacctgattatcacgtataacccgtaagagatcctcccgtacagcgaatgccggtaagaattctcgttgctcgcgaagtgttttgctcttactaaacgagctctgcccaccttcatcctgctttttcatatgatgcgcaaatttatttccgcctttatagacctcctccacaggcatcgcgacagcagtatccccttcatcttccttcacgcccatcagatttcccaacgcggtgccagcaaccgtcgtcgcttcctgcgcctgcttttggcgctccctctgctgtcgccggtctcgcacaaccctactgccctttcgactaaaaacagccatgtcactttggggatctcggacagcggagacaggctccagctgcttggtgaagatcgtgcggccatcgagaaagggtgggcggaggtcgtggacaagtagatggacgcgagttccctcttcatcttcgggcaaaaagtcgccatcaaaatcgcgtctctgggcgactccggaggtcagcatccggtttgtctcccagttgtcgatatctttgcgctttgcatcgcggagggcaggcgggaggttcgagcttttcagcctcttcgccggaggctcgtttgaggccattatgagagtacactgagttccagatacactgttagcatgtgtacaaggagttagatgttcgcaaatccagaaggtgtcccttctggtggtcgatgaagaagctatttatgagacgcaagacggcgggcgatatggtaatccaaacattgcaaacagctcagtatctagatatcacgtgcattatttggatatgcttccctgtagctatagagcccaacgtcgagaaataattaaggcatatcctatagtctatttctggctgcacttgctactcaatcgggtctcgtaattttaaacttctatcatctttgggtgtgggaaggtcttccttctatattccagttaggctcagccaggagcaacctgataagagttcgccccgcatcacaattccagctttgcattcaatccaatagtctccaaacagaatggctagtcaaccacaaatcgctccaaagaagcagcaaggtgccctattcttcttttttctcgagacgctcttctcgcagtttgaagctaatgtcgaacagagctgcaggcgcaatacacaaacttcaagaacactctgcaacagctagctcagaagattggtgatattgagcaggaggctgaggagcacaagtaagcctttctggcctttctacctttgggctccctagagtctcgagcgaaatgtggatgatgctaatagttgtgcccttcgaagactcgtgatcgataccctggagcccctacctcaagaccggacgtgctttcggatggtaaatggagttttggttgagcggacagttgccgatgttctacctacgctgaaaacaaactcggatggcttaaagcaagtattggaggatatgctgaaacagtacaagtaaaagcaatcggagctggacaattggaaggttcgtttgccgaccttaatgagcagtcccgtacaaatcgttcaggaagtcgctaacttttggcacaacagaaaaagaataatatccaggttgtacaaccttaagagacgatttatgaatgaagaatctcgtttgaccacgatgtatgggctgtctacttagccgaatgtactataaacctttctcccttacggatacacgaagatcaaaaggtgttgtagggtttgctcaatcgattgcatttgctgtctctgggtccgacgcagcagcccttcctctcacgacaagctggagatctctaaagttcaatcgattaaactgttattgtcggcgagtctcaaagaggcaccagcaacaaaccagctgagctgagaccagcggcagtgatttatcagcgaaacagccgtggaggctgagccctcgatgcactagtgcctaaagctcaagacatggatgtttggtatatcaacaaaacaatcactataggtcgc

SEQ ID NO: 14598 - DNA, 1304 bp, Emericella nidulans
tgccttgtatcatacacactacgatttaggtgacactatagaatactaggatcaccctgattgcatcaggatcgtttggcggcatcgcctggtttgtagtgcccgaaacgtatcacccggtgctcctgcagaggcgcgctgccaaactccgtaaggagactggcaatcaagatctgtatgctttcctcgatcaccacagaccgacttttggcgacatcgtccgcaaatacctgttccgtcccgttcagatgctcatgctcgagcccattctcatcctgattactctctaccttgcactcgtgtacggaatcctctaccttttcttcgaagcctatcccgtttcgttccaagaggagcgcggctggaccaacgggggtattgctggtctcccgttcatcggaatcatgattggagtgctctgcggcgtggccctcatcgtctggcaaactaagactcgctttgcccgtaagctcgccaagcacggcagagttatccctgaagaacgtttggtccccatgatggtcgcctccgtactcctgcctggtgggcttttctggtttggatggacgtccagtccgaacgtgcactggctggcccaggtcgccgctggtgttcctatcggcgccggtatcctcgtgatcttcatgcagggcctcaactacatcattgatgtgtacatgatgtttgcaaattctgcgattgcagccaacactctgattcgaagctccctaggcggtgctttcccactcttcgcaacacagatgtatcataagctgggcgtgccatgggcgtccagtctgctcgggttcatcaccgttgcaatgattcctatccccatcgtcttttatatctatggcaaaaagattagggcgctcagcaagttctcacctaatttctagctgcaggagcattggttagcatttatggcgtcgacggctgtgcatagtgattttgcatttaaaagcggtctatcagcgttcagtactagttatagaatgtaattagcatacaatcatgacaactaatcaaaattgaatctttcgtttcaccagaatgtgcagtgtgctttcagcgcacctaggaagaggagagtaccccgtacctgagacgtaaacgcgcgacgcgtctcgcaaggcggtcaaggtcaacgccggctttccctttttggcagaagtacgaaacgccgggctgctgctccttgagttgcttttccttccagacaactcgattccgctgcgggatccagccagccaattgcttgcctgtcggaatctgcacttgaatatcgctgcgccagctgactg

SEQ ID NO: 14599 - DNA, 477 bp, Emericella nidulans
ggggacgtagcttgacggctgcgtgttgcgctgtcaccagggctcgtcctacgcgccggcgcctcgggcacctcggggtgtttttaccgaactatctgctaacctgttccaacagactatatggcctaaggcaggctgtgatccgtccctgggctcgccagggtgcgcccatctccgctgaagagccaaagtcactttaaactggcgaccgaggacggcaaccgggaccgtcgaggccgcctctcactctgccagaccttgatggagcgcaccgggcgtgttcgcaggaacggccattccaccgcaaaaagtagaggagcgctagataaagaccagctactggaggaaatattcaatctgctttggctcacgccaatgtctaggagaacaacggctgctaacttgaatttccctaatgcttgagtgggtcacacgaacgacggggttaaggcgctatatggtatggatagagtactt

SEQ ID NO: 14600 - DNA, 1505 bp, Emericella nidulans
cttctccgaaaagacaactgcagacggagaaccataccgccagggtgaccgtcacaaacacgggaaagtcgccggcgccgaaacagtgcagctgtgggatgtgccgcctccgacagaggtgaacagacctgtccgcgaactaaagggttttgcgaaggtgcacctggaacctggagagtcaaaagatgtcgagattgtggttgaaaagaagctggcgacgagctggtgggatgagaaacgggaagcctgggcatcagagaaaggagtttattgggtgcaagttacggggacgggagagggggttctcactgcagagtttgaggttaagaagacgaggttctggaccggattgtgattccttatctttagagagttgtgtaccctgcaccatccccctgcggtacgctccactatcatgacacttactaaaaattctccatgtcatatgatatactagctatggttgagtattgttggtctctaaccctgagccgaggtttatttcttagtttttcgctttatagatatgttcctcccgtgaatacgtacgtactaacagaatccgatgtgattctctgtagatcaaacctcaactgatagctcagcatcttgcagggactccgtaggtttcttgatccgaaacccacgacaatttatagaaataaataaaacaaagataaaaagaaataagccgcccaaatgcccaaacagtggaaaacacccaacacctgcacccagccactcgctaacagaacctactcactcccttttccgaagagcctactgaggtttttgaccagcggcacctgattcttcaatctgcgcgagcccgtatctgtgcccttccatctggatggatgcaatgccgccttgatacccgtccaagatacacctaccctagacccgcttcttgacttctgagaaggagaatttccttcatttccatgatgtgtcttgcagatgtaaccgtcagatgtactccgctgcttgttctgttgccgggaaggttcctgagtagggttgtatctcataatccctggcgtcatcttcgagagaacggcgtgttggagcgctttattgcgctgggcttcctcgtcgggcgttaggaggtgggcgatcccggcggtatcaattataatgctgcgggactttcttaagttggagtttgcgtgagcataagatgtgaaggtgggtttctggtgttgagttgccgcggaaactctagttagccctaagcttggggaagggtgactcgatagggttaaagtttcagaagatagatttgtgatggtgctggttgggttgaggaaaagtttagtgtcttcgatatcctcctttccgggtgctgatcctgacgggatgggtgagctcggggattcagaaaggaaggcctttgtggttcgtgtccattttggttgtctgtatcctgttatcatggcgcctgttgtagacttgggttcgtttgtcctaggactctgagttgaggattggggatatgagggctc

SEQ ID NO: 14601 - DNA, 516 bp, Emericella nidulans
gccttaaatggggaacaaacgcggcggagttgttttggaacctcttgatgccgaaattgagggaatcttttgatcacgggtcaaggctaaagggatggggcgaggactgaactggcaatttaagaacgggttcaagacatataaatcggacttctgcgtagtcgatatgcctcgatatgacgttttgatcagctggggcactatatggaagtacaaaatcttgaagccgggatccgacttgactcaccacttggaacaagcagcgctaaagcaataacgtggccaacagttctggtagggctaatgcagattctacaataagatggacgagtcatgactttgcattagtgagaagcgttcggctgattttttgggtgccgatggaaagaaatgcgttacgcataaaggacaagaccagaaggtgcgggattcttatgtatctggcgaactgccatggtggatactttatttgcctgtattatttatttggccacttggaattgcaatctaaatgat

SEQ ID NO: 14602 - DNA, 522 bp, Emericella nidulans
  unsure (1)..(522): unsure at all n locations
ctttgaaacccgcggcagcttctcaccatttgcggcagctttttttacctggacagctcgctcatccggggggttgcgcctagctgagggggggcataaacacactcctccagcgcattaacaaggaggaggagaatgccagggggtccaccctagggcccaacagctgacatnggacgcgcgataggaggccagatcgatggaacgacactgagtggtactacttgagaacgcccagaaacttcactaggaacgagagtccactgtaaaaacgaggacatgacctctagcggacgctatggcatggacgcctatatccaccaatgggatgagcatgcttaaggttctcatcagcggcaacaccagatacagtggctgcaacaggctcaacatggtatgcaaaaacaccgcgacttaagattgtccgcactggtgaagacagtatcgacagcatgaaacctgcgcgaggctttaacaaacgttccgatcgatacaagcggtccggtcgacacggaccaaact

SEQ ID NO: 14603 - DNA, 2591 bp, Emericella nidulans
  unsure (1)..(2591): unsure at all n locations
gattgttgtttatgggatgaaggtcggcccaggagttattgcctcaactgccgtctatgatcagggttttttcccagatgtgtttccggagcctgaaaaatggaatcccgaacggtggctccaggctactgaccggatgaagctcaattggattccatttggtcacggatgccggtcttgccctggatcaaatcttgctctcactgagctgaagtacatccttggaacactcttcagacgtttccgggttcagttgccggaggactaccccaacgaacccctggaactggcggatgtttttgcagccggctcgaagacggggcactgttggcttgaatttgaggagatgccgaaatgaatgctagatcacggcctactttcagtgtacaggaaatcttccaaattttttggttgcgaattgtcatgaactccaaatatatgatcagtctctcacgagaatggaaaacagcaaatacactagcatttcattccttgagaaatttcttcttgaacgggacccaatactctcatttcaacctgtgaaagctgaacgtataaatccaattatgaggtcggggaggtctggtatcttctagtatttctgcaacgtgtatcatctatttcctcagtagaattggggcgacatttattttgctacatgggagggccacagtattcaagtatcaagggatgccataatattggatttgcgtagttgacagttgagggtgcgagaaaccgaagccctgccttctttactaggggcaaatcgtacgggcaggcaaataaaggcggaggcgccttccgtctctctacaaaagtaagtacttgtccgcaggagagaaaacgccaaggagttagatttgcaaaggatttcagtacacgggaaaagaccgtcacttccattggactcgttctaattttcaaaggaaatggtgttttgcagggtgccgatagactctatctccacgctcaccacatcaccatccttcagaaactgaggtggcttcatgaaaagcccaactccacccggagttccagtcatgatcaaagatcctctctgtagggtttgaccttggctacagaatgcaacaagcttccgaacgccgaagcacaaatccgacgtgtggctttcctgacgaacatctccgttgaccaaggtccgtagagacagcatactcgcttcattaagctgatcctgtcggacgaggcagggtcccaggggagcatagttatcaaaagacttgctgaaagtccattggggaacaggaccggcctttccagcctcgcgttgccagtcccgggcggaaatgtcattgccagcagtgtaagcagcaacgtagttcaaagcttcggcttctggaatattcttgccttcacggccaatgacaatgacgagttcaccctcgtaatcgcattgctcctgtgcaatttttggaataggaaccggagcgtcatgatcggctactgctgggctcggcttggtgaagacggtaggacaagtaggtagcggccttccggtttcaagaactgtaatttgtcaatacatcgcccactcgatggggtaaaagaagcttcttactgtgtgttttatagttgaggccgatgcagcggattataggcacatcctttggttcgaggggaccgtagagacgatagacagtctcaacgacatcagtcttctccagaagaaatggatcactgcccaaaagtcgcttcactttcagttgatcatctctggccagtttgccaatatcgccagtttggccgagaatgggctctccatacttgatggggccattggcggtcgagctatagcggacaagatgagtccagcaaatctcgatgggacacattttcatcattcgtgagagaagaggcgcaatgtttcaaacgggtaattccaggtttttctgcgcgcgagtgacatgatttgtacctctgcggtgtctgacaaaaccacatcatccgaaccaccccgacatcgggaccagaaccactttatccgaccggacgtcataccttgccatccgaaaacaacgcagcatataagttcgctcctgaaataatatatgaaatatttgttgtattatcgctcttatctcacgacaaagttcgaggtcaaaatcacttccacgacaaccatgcccaacccttcggaccgccgagttcagctcctgaagactgctttcgttgtctacaaccacgcagatctcgacaaagcaaaagaattcctactcgactttggtctacatgttgcctttgagaaaccaggtcaaaagatatatttcaaaggttatggcgccgagccgtacgtctacgtggcttgcaaagctgatacatccagcttggggggggtgcatacgttgttgattcgttcgccgagcttgaaaggctaaacaaatccccggagcgagcactattatgcaactggaagatgaagctggcggaggtanactggttactctaaccgatccatttgggcacaaggtacatctcatctggggaatgcgtgaaaaatcagcttgaccattgagctggaaaaatggtgtcaactacgagacgagaagcacgaaggttcgattcaacgt

SEQ ID NO: 14604 - DNA, 528 bp, Emericella nidulans
tgttcgtcattctcttagaccaccgacggaatgtcgatcatgagaccgttatcgactgcggccaatttctattagatatggtaattccgcagggttggggggtcattacagtttcagaggggtatggcccggaagaaagggtggaggtcatcgatgttaaatcacagcatggtgaagataagcgctggaccatgcagaagtgggcggactattacgagagcactggcgataaagtcgtccgaaatgtcatcagcctcgaggtatcacaaagtaaactaggcaggctaatccgccggccgaagattgtgcgcgatctcgatctccaggatgcggtttggcctgaggagttaaaggccgttgggaacttcctcaaagtgcaattctattgcttgatgtcagtagccgactgctataccgactttcacattgattttggaggttcctctgtctactaccacatcctgaagggcaagaagacaattttttttataccccccaaagacaaacatctgaagaagtatgaggagt

SEQ ID NO: 14605 - DNA, 460 bp, Emericella nidulans
cgggatttgtcatgacaacccccagggggggcgattccagcagtcccccatgctcttgggccagcttatttcccaaccctccacggacgcttccagggggggggcttatgcaaggcacgcggcgcaccaacacccggaggcggggcacgcccaccactggactgccggccaaacgaccaaaccagcgaggtctacctcgccagccgaacggccccgcacaggcggattcccgtacgtggaacccggccccctgaagaggcggtcagagggcgtggatgtgaactggatcgccgcgaacaagaaaaaagcgaacaatgtcaagaagcatgatcaccatggcctaagaaacaaacggatggcataagagaaacagaaacaccagactgaaataagaccaacgccatgaggctgagtgtcaagaaacaagccaactataagcacccgacccgaaatcccaaac

SEQ ID NO: 14606 - DNA, 3869 bp, Emericella nidulans
ttaccttgtcacccttataaagccactgcgtttgcctcgccattctttgtcacaagatactcccatcttatcgttattggcctcctccaagacgatcctggatccttctgtatcttctgcggccttgctcacctgagaagagacagcttgcttccatctggacgtcgattgcttagacaagatcgcgttgttcactgacaaatacgaatacgctgatatgatgaaggactgaagtagtgtatggactgatccacattgctcgagtccaccaccagcacaaaagaatctgtttctagggcagtttgtatatgttcaaaaccccagtcatacagttcgtgaatagctcagatgtttgttcaacatcgaaccggttatatccaaggtgggggatatgcatggaacatatgagcatatctccctgggttctgaaatctgtgttgaattctgtcaatgtcgcactcgtccgctgtatcatagcaactgatggttcctgaaacaggtcgcctcgacgcctttcatctcaggaagatatatgggaccttcatgactttagttggaaaaccaccaaggtcgcacaatatctcttttatgtgttgtcgtggactgtcgtggaactaattgtgccttgcacgcccgaatgtaatgagaacagtatcaaacaagatctttctgcggccacgctgacttctgcgatataccctggttcagtattattacagcctgtccagcaatagtctgggccagcaaagtcactggctcagctgaatcccactggcaaggagctagggattgtgagacgcgtgagaggaagatactgctccaagcatgagatagtctgaccgagcccttgacatacctcccgatttcttcttttactgaatcgatgtctcacatttttgagcgtaccttttgatttttgcgagaaacgagatattaaggagtatagtcaaagtaaacaacagtaaagcgcgtgaaaggcagcgttctctcttttatattgaggaatggcagcatgtgagaaatgagactcaggtcggcggttactgtgaaagcaaatgaaatggcctcttcaacctgatatggtgactggtaaagagataggctgcgtgtatttatggagtgcgaatgtccagagtgaagaccactggatctcgtctttcccgccgtcttcgtctctccccctctctctgtctctctccacctacctctccttctctagacttccttacttgtcagcaaaatgaaattgacttccttgagctcatgtcgacgtcaataattaacctctaagccctagaatccttctttcctcgtcctcccggtctgccgactccctgccttcagcagactgaaacgcaacacaattaacacgaaagactttcgccatggcagccgttgtctacgaaaccgaaggaggcttcgtcatgggctgcagcacatttcttccgtctttgctcaagatattctcgattgcatgctcaatctttgaataatgcacggtccgggactcaggatttttcccagcgaggacggtcctccgggcaacgccagttcgactaacgacgacggcgccttcaggatagacaacttccagatcatgtcaatgcggtattatgtgttcgagcgtgtgaatcagatcggtgaaagaaacagacgggaaaagaggcaaggcagggaaggtggaagggacattggaacataataccaccacagaactcctcgcgggcgccagcaaacaacctgtcattgccctttccgttggtgtttgtcttgggccatggcctgttcggctggtcctaaatggataggacttctctctttacagcactggccgtatgccaatgtctctactttttgaaggcatgatcccggctgtagcaatggcggaaggaaccaattctgactccagaaaattgaaaacagcaattttacggcagttttgacatcgtctggcagcgatctttgttcgcgacattcgcacttcttgccgccggcttggtctgctactttcaactggcggagataaaatggctgtttgctcgctacctaaagaaggacagcacaggcgcggtcaggttccctccgttatcacttgccaggtcggctttgctgactttcaaactcctagcccaaggtttccaattacagcttcccatctgccgatcatgctacgaatgtattgacactcccgagtctcgcgagtgactgtccatcgttcatgatgtcgactgaggttatcgacccctatggagatattattgtcgcttgttcaaacgtcaacttcctcgtctcctccaatgcactgtcgctggcttcaccagtcttctatagcatgttcaggcctggcatcaaagaaggacttgcagttagaggaatcccgggcagcttggacgtcccggttatcccattcccggacgatgactccgatacctttctccttttctgcaatctagcgcaccacaagttaccggctctaccagagactttgaatgcgaccttgttgaaggacctggcggttttcattgtcaaatatgcatgccgtccggctatcatcgaccgcggttggctctggataaccaaggatgaactgtccgccgagctgtcgccggaagactgctggaatgctctgctatttgcatatgcaatggaccttccagacaggttttcttatttttccggcaagttgctgtcgtcacggcgacagagtttcagcaactgggattatgcccttgcgaacttggaatttatcccgcatcatgttctaggtgcgtacgcgtgtgatgtatagatgtatattgtgtccggtgctgacagctccctagcagcgcaatgggacatcgaacagactgttgtactcgcaacatccatgatattcgtagatcagaagtttgccatatgaaccgacctaggtatttggtttgtatggaaaacagatgtggcgaggttatgagaaataaaccattctttatagcgttcttgatatggagtctcgacggcaaaatgggggaaattagtataacggttcgtggaggattgattagaaatgatataactgacacgtgattgctgccgtgtacaaataatcttaccaaaccagccttgaggcagccaattcagacattcaactatcccagctgcaacaactatcagtcattatgttctcaagaacagcaatctccttcgtatgttcggcgcagtcgttgtattcaaatgtggtactaatccgtgttagacgctccgacggtctctgtttcggccacaactctcccctcagtttccaaaccagcttccatctgtgctccaagcccgtctactttcaacagagaccaaagcagcaattgataaagctgttgcatcggctccggtggttcttttcatgaagggcactccggaaactccgcagtgcgggttctctcgcgcaagcatccagattttgggtttacaaggtgttgatcccaagaaattcgtagcgtttaacgtgctagaggatccggagctgcgtcaaggtatgtctgtcatcttgaatgttctgcataactttggcttagtcgtgcttttctacaggtatcaaggagtactcggactggcctacgattccacaattatacctgaacaaggagtttattggtgggtgtgatattctgatgtcaatgcatcagaatggcgaactttcgaagctcttagaagagaagggtgtcctagttgctgaatagattgaggttatgaaatgccctgtattttaagtttcgtgtgctgttaatgtatatctattctaatctctatgaagagcgtaatctctgcttcagcaatagatacttacccagagagctatggcatgttatttcatactcatctgctttagctccagt

SEQ ID NO: 14607 - DNA, 563 bp, Emericella nidulans
  unsure (1)..(563): unsure at all n locations
gaaaaaaaaaatctaacaccaacccttctccccccccaatatttccccccccccaccccaccccccacacggggggccttattaccccccaacgtgtttaaaaaacccccccacaccctcccaacacacccccccccctaacccccccaaacaccccaaaaccatacccccacaccccaaacaaccccaaccacaccacctccaactccacacaccaaattaacccaccaaaccaaccaccatcacacaccctccatacccaccccctccccccccaccacccccaatccctccacacacccccacaatatcacaacccccacatcacccccccctaccacnaataaacaccccccatccccaccccaaacctacccccctcacaacccccaccccccataaccaaaaatcccccacctcccaccctcaaacccccccaacatacccccaccccaatatcacaaaacccccccccccccactaacataaccccaaactcacacccaccccaacccccaatcccccacccccccccaaatacctcctctcctccccccccccca

SEQ ID NO: 14608 - DNA, 550 bp, Emericella nidulans
ccaacttatacgaaaaccccctgggcatacactagctcaacatcgccccaagtcccaccccctgtaataaaccccccagccccaccccccaccagggacacctttaaaaaccgctggggtactaaaaaaacgaaccacacctgaacaccaccgcccaacttcaagcgcccaaacccacccgcacacaccacacggccaaaacacattcccccccaggcgagaccaaattgacaccacacatccgctaaaccacaacgcaagtaacacaagcgcaccggcaagcccaacagacacctacaacggaacaaaccgagaaacgcccaccaaatcaaagatctcaacgcgaaaacaaaccatgaaacccagccccatcgatcctaacccccgacgaaaccacgggccacaagacccaaaaaagcgaccacaaagctaacatactcaacaccaacactcaattacagagaccacactggttccacacaaaacccaacccattcccaaaataccaaatcacagaccatacgcaatttttagccccccaccaaccacc

SEQ ID NO: 14609 - DNA, 1769 bp, Emericella nidulans
ccccttcgcgtcaaagtcaatcgtcagtagcttgcagcaatggcggacaacgctccacggaattcatgcgaaacgcgggatgtgccgcctccttgaccatttcgatggcttcgagagcggcgtcagctgtctctaaaatgtgtaaaacgcttcatgaaggataggattgtgttaggtgccatgtgtatccttttttcgcgcgccagattccaggcatagtgtacagaatcgcgatcggcattcgcgacgtagattcggacaggccgttggggcatcagaaggacgggccatctatccgggtgcatgaggtctatgatgaatgatcgatccagcaggtcagggaagaaacgcaacagatgctggatgcagtctgtgactgccacaaatacgggcttgaaaaatggtccgtggcaagtaatttttagaaaatccggcacaaggctggggaagtgacacaataaccacagcgacaggcggtgccagtgagcgccttgatcgtttttaggcagtcggtcccatgcttcgcggaaggcttcttttgaagccatccccagagcttccaggagaatgtggtcgtggtcagttaactttgggagctctggaaagggcttcccatctgtccttgcttcgcgtatcaaacggcatgtggctctccatgctctaattgacttgggatcatagtatagcgatgtcgacctgatctccatgtctctctcccacactccctgatccacaaattgtctgcggacgtgccgccgtttcccctcccgatcgtactgaacgtaatgaacgattcgtttgggttctcgtaggggctctaaattaggtaaatgaacaggaacagtctgactggcgtcaggtttagctataacaccgccaacctctcggtgtttctccataagtgagccggcaacatggtcatctcccggggtaaggtcttctaaaacatgataatccgatcgcgcaccagtctccaaatcatcattatgtccgggcgggaccgcgttattcgactgcaacgcatttccgctaagatacgttaatcctaaaaacttcctctgtcgataattgagtctggtgcggaacctctgttccgcagaacaggagggtgacctgacgcggacgcttgagagcagcaggcgatgtggacaaaatgacattcagattcacttggcggaaagcatgagtctataagagatgatcacgccggcaaagattcttttagaaggcgagacaaggaaaagattggatatatcagtattgtgaagtatcttggtctcttaagcagagtttctgtccccagggaattttgatgaactgtggctagtgggtcctagctgtggctggcgcaggtactcgcccgcacgtatccacctcgaaagttgaacctcgtgagtgcttttctcaaaatcggccattctcgagcccatcaacaattgcaccaatctgcagccgcttcgaaataaaagattatatcaccaaactgctcaccttgtcgttcccgctctacgtcccaccaatatgtcctctaatcatgcatctctcgatgctgccgcaacagatcgaaaagcacgtctcgcgaaattagcagcgctgaaacggaagcagccggaacccgagacatctggagaagccgctgagcaggttaaggaaccccagaataacaatttgaatgatgttacgaagaagtacctttccgggcggaattatgacgcagaaacgcgtggagcgaaattggggtttgaccagactccgactgaaggacaaat

SEQ ID NO: 14610 - DNA, 576 bp, Emericella nidulans
ccacagttatgcccaacaccccccgggggcccccacacacaccaacacaccacactcaccccccgatgattcaccaccaagcacccaacactcaaacgggggggatacataaaaaacccggggggtacaacaaacccccgcagccccaagaaacaaataaagcagccaccgaaaccgccccacagaaaaaaaacaaaaaccacaaaaccaccgaaacatgcagcaacaccacagacccacaaaaccatccaacaacccaaaactacccacaacacgcccgaaaaccatcccccgcaaaacacaacccaataagatgaatgaacccaggcacacgcgaaaccgaaaacatgaaagttccctaccaaacagagatatccaaaaccccaaccctgacccgaccgacaaggaaaccccagcaaactctacaatgcaacaaaagaaaacccctgcacccaacaactgccagaaaaccccccaaccccccaacaaccaacgaaccccataagcagaaacccacgcaacccctgccctgcacaaaaaacagcacaaaacccctcaccccccaaaaaccgccac

SEQ ID NO: 14611 - DNA, 536 bp, Emericella nidulans
gaaaaaacaacttaccccacaattaatatcaccccccttcatcacccccaaccgccacccaccaccccgggggggttttatgacccaaaggggtgtaccaacacacccacccccggacaaagccaaaatacactaacactctaagaaaagagaccaaccccaccctaaaaaccattcaacccgaccaagtaactgatgccatccccaaccacaacaacaaacaactggtagcaacaacccctcacagcacctccatcaaaaccttgcaccccctctcacccgaccattccctcaagcccaccaaaaccacataccccccgatgcaaccatacacctggccacacccaaccccataaagcacagcatacacccttacacaaaactaccacgaatcaaccacaaacccccccaataccaaaaactaaaggaccaaccacaagccctgccaaaaccacaccccccctatacctccccccagaactcctcccaaacaccaaaacccaaccatacctaaaaaaccaagaaacacgacccct

SEQ ID NO: 14612 - DNA, 1404 bp, Emericella nidulans
gtcgttgattccgtgttcttgcattgcaaatgcttgatgattctaagagcgccctagtcctaactcagggtggcaatttgggacctaccatatatgctctgtacggatggaagcattcaagacgtgacaggggagagctgcagcacctgcagcttcagtaaatagttattcagcaatggaaaagcccgctttgaaatcataactcattcctatatcttgtaaatatatctttattgtgactacaatccatgacgtcccaattcacgtcatggtggtatcagccgagacaagactcccaccctatgcagtataatagccctcctctcctcagtttttgtcggtcttgctttctgcgaaagcgaattcctaccctacaattctccttacgcccggccaaacaccatcaaataacagatcaagcgccaaaatgcccaaaggccctatctcctccccacctctccaaccgaaaaaagtccatggagtagtcgacgatgatgctccaattgacgattacgagaatgccgtgcacgaacgcgagcatgaggacaagcacatactagccgatgagccgaatgtcgctgctgcaagaagagcgaataaaccgcccgttgcgaataccgagacggagaggcatcgcggtggtactggaagtgtgaatcgatcgaaatgatctatatggtattgcgccttgggtgatgggaaatatgcacaagctgtagggtgtctgttctagaggaagggaactgtgattatgacatattggtttctgggtttagtgaatggagtgaatccgtgaattgaatacacttttggcagtaatgtgagtatggacaagacagtaaaatagtatagtatcccaagttaccacacttctagaactccgtagtatgcctctaataaacctgaaagcctcttggatattgatatcgcatgtaggaacgggagagcactcaagagaacaagaaagccaactaatatgcttccgcttccgcgataagctcatcaatgtaaacatcctcatctccattcgatattgtgcgctgcggcttaggcggctgtttcgacttgatcaagtcgctggcatgaaccagatttcggtagaattcaatgaccttcggatggaccatgaccttgcgcggatcgaatcggagcacctgaagaccggctttcgaggtggctcgactcagagccacgtaggcttgtcccttctcaaagaccttcccaagatcgaccttgactcgttgtagtgtctggccttgggccttgtgaatggacagagcccatgcgaggatcagcgggacctgctgccgttgggcttggacttcgccatttggcagctcaattttccaactctctggctggcagaggagatgcctctccgtcccgtctggctggatgaagcat

SEQ ID NO: 14613 - DNA, 521 bp, Emericella nidulans
acctctactgttaccaagacactttctacatcaaaccatattacaccacatctcgcttcccctaacaaaggggggctttcataaactaaagtggattaaaaacacctgacaaatcaaaacaaaatcccactacttagcatgaaacatgaccaatccaaaccacagtaaactaaagacttagagagatacacaaactctcttggccatggccaaaatatggtcaatcatatgcgcaaacactggtaacaaactcacacatcttacatgacgatcacataacatgagacactaacaagcaatgaaaagatacttatccatataaaaatcctgcttcacaatactcccacaccatgcataaatgtcatatgcataccctaagcaacactaacgcacagaaaaaaaagacctaccaagccaatactatccaataccaagatccaaaaacccatattttaacaaacagcacataaaagtactcaccactcactctctaccaacacataattactataaaactcaac

SEQ ID NO: 14614 - DNA, 1596 bp, Emericella nidulans
gggaagacgggggggggaagtaatatgatgaaaaagtgagtaatgatgaagtaggagggtcaggaagaagaagaggaggagaggatattgaaagagcgatacagaaagaagagagagatattacaggagagagataacagaaaagagagaaggtgaagaagaatgcatgtttagagagatgggaaaaaagtggaaacgccggacggtatagagaccaggagcgttttgggggaaaaatgaccacaatgttggaaagggggccatttaaaccagcaaccgggtgtaaaggattggtgaagaaaccggtagaaccattatagggagcgccgactctccgttgaggtccaagcctgcgaccaaaatgggcttgggtaatcattgtgaaagcgccggacgaaatgccccccacagtcaaggccatcttgacaaacctgtgcacaggtcctgcagggtaggactggattctctccaagctttcaaaattagaatgctcgttaggggggtagtaagctcgaagccagttctggcctccatctgcccagatactctcatggaacccatcgagcaggccgtacttggttgtcgcattgcatttatcccactacatactgttaacggtttctctgagtagaagctaaggtcacaaaagactttacctgaagggtgaatttgggggtctggactttatcgttagggtcaggttcagtagtttcccccctaatcttgtatgggtcacggaattcacccatcagttgtggggttatgtatttatacaaaggattgggtcgagattcgataatagggccgctgtccttggtaaacaaggtaatccgcacattcggcatcatacaaaggatgggcagtctaagttggtcatggtcaatatcatgcgggagagggccagctgttgatggaggtcgatccgcaaaacgagcaaagtcccagtaagggaggcgccatttatcggcttcttttctccagatatctttatggctctctgggacagcctcgtgaatccattcaagcattgcttcatacagagttcgctgcatgaatgtgtcagtcacatatcaattcaccgtttcacccaaccgccgggactgtcgaacctcatagagcatcatgtacactcgatgccaagtcggaaacgtgtagttcgaatgcacacaatatcctcgttcgcccggctcacgctgagcttgaggtacatcgtcccattcgcaccatggagccgaatggatggccgccagacggaagtaagacttcaggtcatccaaatcacgtctctgaatcagagccagagcttccacaaatagagtgagctggattctgtcgccagccatctgctccatgtaccacttgtcgatgtcttgccggaggtacggcttgccattggcatcacgagtcttaataccccggacgacaatcatctggcagcaaagtctttgttaaaagaagaattatatgaggattacgagtgcttgaacgagtctgttgaatgatgaatagggtcacaacaatctaggctttatataaatccacgatggatttatttgcatcttaattggggatttctagatccgcgagacaattctt

SEQ ID NO: 14615 - DNA, 1722 bp, Emericella nidulans
cttcctatttgcgcacgctgacagtgacgataatagcctcgggatgcattgtgttcgcatcaaacatgatcgtcgcatcaggcaaggaggcgaccgaaggggaagagcgcggaatcgccatcgccgtcatcagcttcatcaccctgcttcacgtctttctgcccaactggggtgtgcggggtatgaacgtcatcggcgtcgtcaaggtcgtcctgctgctcttcatcgtcgtcaccggctgggtggttctcagcggtcggttgaacagcatccccgatccgtacgccagcttccattgttcttttgttggctccgcaacctcgagcaacctttatgccaccgcgctgttcaaggtcctgaactcatttgctgggtatgccatcgtccgttcgcgccggactttgtaccgtatatgcataactggtagtactgactgcaatccagctggtcaaatgccgcctatgtcctcaacgagatccgcaacccggtgcgcacgctcaagattgccgccccaacgggcctgggcatctgcggtgtgctctaccttctcgcaaacgtcgcatactaagccgccgctacgccggaagagatcgccaacagcgggacaactgtcgcttcgtactttatgggtaaggtatttggaaccgctgctgagcgggccttaaggtaagtcactccccgtaccttccccttgaagaataaaatctaacgagcgatagcgtcctcatcacgatatcggcctttggcaatgtcatgacggtgacgttcgcccaagcgcgcgtcaaccaaggactcgccaaagaaggggtgattcccttcccgaccttctgggcctcgtcctggcccttcggatctccctctgctggccttttgctgcacttcatcctgtccgtcattgtgattgtcgcgatcccttttggcgacgcctacaacttcatcctcgaccttgaggggtatccatcaccgatcattaaccttctcgtcgtagcggggttgttctacctccgatacagcgagccaagactcccgcgcccgttcaaggtctactggcctgtcgcggttttcttcatggctggccaggctttccaggtggtggcgccgtttatcagactgcctgaaggcaagggggatacgagtctaccgtattggctctaccccattgttgggattgcggtgttgcttgcaggcgttgtatattgggggatttggcagctgttgttgccgtggctgggcggatacaggcttgtccctgaacatcaggttctgaaggatgggacaacagtggcagtctataagagggagaataagagtgagtaggaggacacatgactagagcttcggtgaggggttattgaaaccacgtaataccacatacatagttcaatgtattttacacctcgtttgcttgatcaacagtcttggcaagaaagctagctcgtcgtccctttgccttcaaaacctatccaatcctcatcctctcaaatccgatccaccttctaaaatgggtagcagccgaagattccagatgtacattctctttcaaccgaattctccaacttactccattattcactgggcgaactacggtgagaagccgagtccagacgtacgatgaccagtcttccaccaggcactccagcgaaagcatagcattcaaggaattactcttcaacgaaacatacgaccgaccgcattatatcctgattcgtgcagggcagaact

SEQ ID NO: 14616 - DNA, 1423 bp, Emericella nidulans
tgaggggaacctccgatgcagcgcttattctcccgacggccgatacttcgcctgggcatctcccgagaagtacgtattttcgtcgcacgcgaaccatagcaaacgtggttaacatatcacagggttaccatcattgatccgtccgtcggtcatgtcgtttctaccattcccgccgagaatgttttcgagctaggtttctcgccgcttggaacttatttgattacgtggcagcgccctaccaaggaccccaatggggacgctgtcaagaatcttaaagtctggcaggtggcggagctggagtcgggtgagaaccggattgtgggacaatatgtccagaaatcgcagaccggttggaacatccagtacagcgccgacgagaaattgtgtgcccgcgtcgtaacaaacgaggtccagttttaccagagcgatgatctgtctaaggtctggaataagctgcgtgtggagggggtggcagactttgcgctttcgcccggccagaatctgtcggttgccgtcttcattcctgagcgaaaggtttgttaacttaccaatctcttggcttgactggtctaatcgtagtagggacaacctgccgccgtcaaggtgtttctggtgccccagtttggagcgccggtctcgcaaaagacgtttttcaagggtgataaggttcaattgaagtggaacgcgtcaggcactagcttgattgttctcgctcagactgaagttgataagactggcaagagttactatggagagaccactctctatctcttgagctctagcggccagtttgattctcgggttcatctgggtatgtcctcacaatcagcttcttacacagcgatctaacgctccatcagacagagaaggcccgattcacgacgtcagctggtctcctacttctaaggaattcggtgtcgtgtacggcactattccggccaagacgaccattttcaatgttcgcggtgttcccaaacacagcttccccctgacaccccgaaacaccattttgttctcgccccatggtcgttttgttctcgtcgctggctttgggaacttagctggtcaaatggacatttacgacatggagaaaaactacaacaagatcactactgtggaggcagctaactcgagtgtatgcgcatggtcgcctgacggccagactattctgactgcgaccaccagccctcgtctgcgcgttgacaacggcatccgtctctggcacgtcagcggagctctgttgtataacgaggacattaatgagctctacgacgttttctggcgcccgcagtcgacgattcagcacccgctgggcgatccgttcaacccattgcctgctccgcacgcctccgcgatagttacctcagcacaagaaaggctccagtcaagcccgccggtgcataccgaccccctggggcgcgtg

SEQ ID NO: 14617 - DNA, 452 bp, Emericella nidulans
cgaccctttttcatagacaaaccccccgcagaacctgcatccgttgtgggcataacctttaaaagctgcttctgtgtctagctggaacggggattgcggtggagaacagcgcccgacccgagtaagtctgtaccccatcatgactaattaccgctagactacaaatggctgagcattgctcggacacgtcgccataatgagcccagaaccgtactgaccgcgatgacctgtataaggagtgaactcccactgacccaccatagccccaaaggctgccgccgccgtagccgaaccacgagtgcacctcttccgtgaagggttgctgacaagcattagaccgtcagctggtgctatgcacagaccgtgcttctgactattcatacagaccgagccatgctactgtgacactgtgtggttagctagcagcactgctacatgatctcacagccacc

SEQ ID NO: 14618 - DNA, 2176 bp, Emericella nidulans
ttccgcataatacgactactatagggatcccctccttctatagagcggggatccttagagaagacagggcagacggatatagcacagcaagtgcagaaccctccacgaaagaatccgcatgcctaacctgcactctcttcccctgggcacacgccctgagaacgccattcgtaacaacggacccgacaatctcgtgctggaacgcgccaaactccgggagttggccgagggatggccttgttaccggtgagttcccacatcctggtgatgttcggtgcacactgacagacgacaagggacgcctgtgagtgggagaattttgaatcgatcttccaccctgatgccgtcgtctacaccacttggtccggccgcgtgggctacaaggactttatcgctggctccaaggcaggcatggacaatggcgccttcatcatgcatcggtgccatggagccacgactgatatcacagcagacgccactcgggcggtcaccaagctcaaagcgacaataacacagcgattcgtgattgatgggatcgaagtagacgcggaagccgactgccgcttctgcttcttcttcgagaaggcagatgtcgacggtaagggcccccggtggggggctcgattcgtgcgacactggtacgagaaggacaagctgctcccggttgtgccaggacgatttcccaaaatagacgtggacaagttgaattcctatcccgaggggtacaagtgtcttgtgtactgccaggagctcacaatgggggtcaaagttctccaggacatgccgggccaccggaggcatgcgggaacattgagcggggagaagcatgacctactgtatcgcctagcaaaggactggcttgatgggaaggaaatcgatgtctagacaatcatctgctcccctcaaatgctcatcctttaggtcttttaattgaagctcgtgttctgttacagagcgtgccacttgagtatagaataaataaggtaatctacctactcgattactcttttcagagtctcgttcagaccctcgtttacgttatattgttcagttggcgctctcaggtggggaaattaatccaacaacgcgcgtccaggattcaagatttgtcgaaatctttcttattccaacttctattcctataccacgcagatgccactgcaagacgtcattagccttgtttgctctttcaagcgaccgccaaacgcagtcgctgagagtctttattaatggcgtaggaagaggtagatcatacacaatgttaataatgctctctgaatctagtggatcactgtaataagccgccaaggccagatgttttcaaaagtatggttaacctgtacatctggtcaaacgcaagtcttgccggctctatactggtcggcagagagtttcccgggctcgcttagaccagttgatcctggtcatactgcttcctggagttggagactgtggcagcttagaagataaagatatgggcaatcgatctggttcgtgtgaggtctttcacttctatagatggttgaccaagcgcctgaagactatataagcatgatgactttcgcgaacaagccacaaagagtgaagatacaatacatctctccgggaagaagacagtgtattgtggatccgtcgacattaagcgagaatatggggtaggagtgaagggttgcaggagatcaaccgccctgacggcctgcagatcagtgcagattaccacgtcgtgactgtaaagcagaacttggaggtcaagtggaagcgcagtttaaatgctgtaagtggttgtaattgtctgaatataattaagcgaggcgaatgacatcactcttctaggtggaatggacacggtatcatagcatacatcaagcaagtttcagcctggacactgcggatctagggtccggggactctttcagacattggacaggacgtcaagaaggaccttcctggctgtaatgctactgtcgactgcaaagtaggattactctcattgccggcattgtacaacagggagggcttcgagaagaaggtcaattcttcagtattccgagtgttatacatgtgcctgtcattgtgcgcttaatgtgcccattgggcatggcctaacgaatatccaaagttgataaatgctcagtaattcctacgttcttgtgaaaaggcttcccgacatgtcgag

SEQ ID NO: 14619 - DNA, 448 bp, Emericella nidulans
  unsure (1)..(448): unsure at all n locations
tcgcattataataaagcaaagacgccgttagcagaagcactcctagaacacgttctgagacaggagtcaatgaagaccagaacgcacctgaggagattgtgtttgccaacacttgagtgacatccatggtgattttacaggtagagtcacaagcctgtaagagggatgagaggaaaaagaaaaaaggaaaggggaggggggaaggagtgaccgaagaactcctcttgccaaattaaaaaaagggaaataaaaagagacaggaagtagatatagcacaagagagaagctcacggcaaaagagagtgtcgtagaataagtcaggttggtgtgaaatgggaggttgttggaggatggagggaggggaccntttcctcacantgttcccaagtatgtttttttgtggtatatcctttaactaggcagccttatttgcaccttagtaccaatc

SEQ ID NO: 14620 - DNA, 1620 bp, Emericella nidulans
gtaacggccgccagtgatagcgattgagccagtcacaccaaggaacgacgagtgataaccagcgattgttcgtagaaaagtcgagcagcccgaccctggtcgacccaaaacactaaagatacatcagtacctgagacaaagaccagtcggaatgggactatttacagcataatctcaccactccgaaccaccccagtaaaatctcgaattaactgacggccactctcgggctcgggtttcgccaaccacggcttgatcgtccattcgtagacatcttgaaaaatgagagtccgccacaatgcagttcctaacgtcttgacgttaacatgctctcctcctgtaccccatgtcgagagtgactgaaagcaaactccgagattaggcttcttccttccagcccgaagttcttcttctagaaacttgtcaaacgacaaatgtggttccgagtagtcatgatccttcttcgtcagggtacggtggatttcagcaatagcatcctcatcctcatacgtcaaatgaacttgcggagaggatggtctgtccgcatggtccccagcttcctgcgaggacgcgagagtagaattgccttgtggacgagagtgaagacgagcaggcatgtccccttactttgtccaagcaagattggagatgaagctctctgttctgtcaagtgaaatgcatgtagtgatctatctctttccaagcaaacaaacaaacagactgactgcgttaaatatatacgtttaggacaggcggaagtgagccatacacccatgcactaattcgatgaggaagccaagagacattggcaatcggatgactcaagatgttcacaccgcgtcttgatcatggatagaaacaggcaacacaggtgagcgatgatgtcttattgctgctcttcagtggaaacgccacttgggccctggcctggccccgaacatttaaagggcccattgctggaggtttctagttcatcgcatctctgattggcgcaaagaatacacgatgacagagggtcacagaagagttttcaagcatccggcgtgtcttcttcctactctggcaggtcgcctgagagggcccagaatcgatccggtccctagctcagatttctctagcgtaccactgaagagaggagcatgggttgtaagaaaacctaggtgggcgaaaaagggacccttgattggcatcaactggaaatgggtggccaccgttgcccaccaagtaccattggctgccccaccgtgcctcggagctttccacgcggctatctcatgctcgtgtatggccgacgatgctactccaggagtagattcatggtgagatgtgctgccatggaaattcagaattagcttaaaaccctcctatcgcggttaatagaaatagtctttgagatgtacgcggaacttacctagcggtggtctaagagcacccaactgggcttaggctctttcctttttttttttttgttctcgcgattggcgctctcagcgccgcgatactgataataggcgaaatatcgccggggttccattattattattttttataataattattattcattttttaagaggtatggaaggctgagagaaaatcgtatgtgaaggtccgggagtg

SEQ ID NO: 14621 - DNA, 908 bp, Emericella nidulans
gcaccaggtctctgaagggatcaaaaattttgtcaagtccgaacgctgcgcgcttcacggattcaggttcagcaaacgaggatgacgaatcccctcatgtctcaccgaagaccatcggccctaacaaagccacagaagtgaacataagctccccgcattcctctagcgagaacggatcagaagctgcatcatccccgccagagactacatttacccccaactcaagctccaccgctttgccggtggcaatagttccgcgatatcagcttacaacagctgacgcatacgcatgcatggttcctatagccgaccaatacaacgtggccgatcactggcagtggatggcagctctctggcgcggtgccgtggggccggatatcacggtttacatccgggagtgcgacatacaagagttgaagcaagtcggaaacccagttgagatccgcctgcaggatgccaaggcggttgtcgtgcggagactcgcgaatgcccctggcccaaaggagctggaggaaaaagttcttaagcgattaggtttcgaaattgaagattacattacacaataaaaagggtgttttgataaatttttctgttttaatcgcagtgcgtcgtttttttagcataggtgggatctactgggagggcatctgttcgcgaaccatatctgcatgcggcggactacttgaagtttttttttgggggggggaggcgggggggtgggattagcttgggaggcctttgccgatttagctcggagtcagaatttcctggtatgatactttaatgtctttcaatcctacatcggatgctcgtcgaccgtgccattccttgtcatataaactattggtaatggtcccatattagcgccagtcaatctacaaaccgaaatttgcggcgagaccgcatgg

SEQ ID NO: 14622 - DNA, 2912 bp, Emericella nidulans
gggagaagagagtgagatggagaaggagcgagtatagacaatggggaatcgagtgaggtttaggacgagaaggaaagcaggtacagagcgagagaaatggggaaagaatgggtggaattgaagttttattaacagggtaagggagggtaaaaggagagtgggttctcggactttattttgccctgggcgaatgcatcttttcaacaaaaggtcttgagcaataccacattaaccgttacgccttcggtcgagcaatgcgttctctgtcggtttatagtcgggcgcttcatccagtctggggtcatttggagggcagtccagcggaatcggaaactcgggtctgcaggtgttcacacttaaaccaagcccgcggaataatgcttctgtcgtcaccagccccgtgatgggaggtattggtcatacgtctatttcaccggccgtcgcgtctgatggcgcgggtcaggccagaaagcgaaatgctggcatggcagggctcgacagctcgcccggaagtattgacgatgttgaggaggtcgagaatcgcgacgagaaaagaagacaaccggtcaagcgggcctgtaacgagtgtcggcaacagaaggtgagaacgatagtttttctggggccatcagacagctgattcgcttccctttttagcttcgatgtgatgttgtccaggatccatggacggactgttcccgctgtcgccgactgaagctagagtgcaaaatcgaatccaatttcaagcgcgtcggcaagcggagtcgaaatgcagagatggaacgagagattattgagctcaggaagcagattgcaagcgtgcagtctgggtctgttggacaacaacaatcgcaccttccttcggcacaacagaccccgaaacaagaaaacccgtccaaccaagtcagcccagccagagcctaccaaacaccgtcggccatgtccgcagcagatcaattcatgggatcgcatgaagccgttgcttcattgctggacttgcgctccgggtatgacggctcgagttatatgagaaatgggaaccagcatttcaagcgaatcgaggatgtggcggtggtacctgagagagtgacagagctgtttgacctgtaagttgtggaagggtcagtgcgccagacaacgtgctgactcatgctagtttcttcacatattaccatcctttcctcccattccttgaccgagagcaatcaccggaggagtattacactgtctctcccttacttttctggaccatcatcagcgttggcgcccgtcggtatcaacccgacccaaatctactcaattcactggccggtcctgtaactggcttagtatggagtacattggccgatgtcccccaaagctatcatgtcgtcaaggcgctatgcctgctctgcagctggccttttcctacaagcagcacctctacggatcccacttttatgttatgtggcttaatgatacagatcgccatgcaacttggactgcaccgcccctcacatacgcaggatttcagcaaatacagggtggagcttgttgaggaagagctcagagacaaagtgcgaacatgggcgacttgcaatatcgttgcacaacggtaggctttaaatatgactctgcaggagttggctaatttttgatagagttgcaacgggatatggacagccgccctgtacattgtatgactggacgttgtcgtcccaagagtcgatggacccgaatttcaagcttcctgaaagcatcagacataggcttgatattgagaaattttgcgacaaggtcaccaaagctctgtacaccaaccgccgggatcctgtagggctctgcggtagccaagagcggtccacattaacatctctcctttcgcgggatttagatgagctggagactcagctcaagccacataatgactgtaagttctgtcgacaaccgtgaatgcccgggttaattagtctagacattaccgatctctatttgcgcgcatcaaatctccaccttcatttatccgctttctttgacgatttcactgccaaagactaccgcgaacgacttctctccctctttttcgcggccaccacgttcctcgaagctgcgatgaagctgcagactcaggttgggccgatgctctctaacacgccgtattacatttaccaaatgatggttgctgggggatgtacactattaaagctctgcaagagttttttcgcgtcccatattgacatggactacgccaaaggtctcttcaatcgtactatctgggctattcgtagcgtgtcagtgatctccaacgatcttcctgaacggcttgccgaagtactagctcaaatgtggaagcttggaagcacgccgtctccgaagccacctcccgacagtgttgaaatggacgactcgctaatgctcaaggtacgatgccgcatgagtatgtctctactctttgactctgtatggcgctggagagaggatacgcggaccaagggccgcaacatagaaggtgattccctcagtgcgtttcagcccgagtcagttgttgacctattctagcatacctcaagaaccccacaaaccccgactcgaacgcagactcttctgcttcgtcatcagtaggaccgccgcgtacatcgcccgggctcgctactggtgatcctagcctcgcccccgctcttcttccccagtccaatatgggcgtgcagtccggaaacaacattggcagcctaccgagcggattcatggagcccaactacgaggtctttgatcctctcaattggcttcttgatggcctggtggacttgccgtatccatactctgtctccggcatggaggcgcaaggaattgcatagtatctgtttatgttttcgctgtctttgtttacctggcgcttgtactgtgggctgttattataccactataccaatggg

SEQ ID NO: 14623 - DNA, 1196 bp, Emericella nidulans
ataaatgtagggattttacatgtcttcacaaaacttataagtacgctctaaatgtcaaggctttctgaagctagtgcctttcttggttttctttttaccttctggcacgggatcgtcctctacatgaaaatatatataaaatttttttttttttgaatggccccgaaatggtagaatactagccacgccggctgaactatacctaaggtattacgacgataaccgattagtattacaagcacagttgacgttatataaccgccatgatatacttcggaagtgcattttgacacaaaaagtggaggcgttcttgatcctgttagacgactccgcagtacccaaccccgcgtcatagcaggccttctcacgcgtcttaacatccatcataatttcaacttctcatctgtaaccttaaactcactccagaccgagctccaacctcttgaaggcatccaagcaatcgttgatatataaagatcccgtccttctagccaaacactgatacctcatcccccaccaccccgcactacttcaccacctcctactcacccgttttctgctcaccatggtctctaacgacatcaaatcctttcaagagtatctcaaagggagcaaacggataatggccttgctgggagccggtctctccgcttcctctggcctccccacattccgcggcgccggcgggctctggcgctcctacgatgcaacagagctagcaactccggaagccttcgaggcgaacccggacctggtttggcaattttacagttataggcgacatatggcactgaaggccaaaccaaataaagcgcattacgcccttgcagagctagcaaggagaaagagagagttcatcacgttgagtcaaaatgttgatggtatggctgcctcaatactcgaatattgtgaggttgctaatgggcttctgttgcataaggtttgtcgcaacgagcgaatcatccccctgaacaacttcaccttctgcatgggaacctgttcacggtcaaatgtacatcgttctactgcaaatatgtccgtgagaacgactttacggacccgattgtccccgcacttgcgataccgaagaacatccctgaaccgcgaccgttcacagacgacaaatccggcgagaaggcgtcagagtcactagccagcgctttgaaacaaccaccaaaaccagagaacgaagaaga

SEQ ID NO: 14624 - DNA, 520 bp, Emericella nidulans
cccgggagactagagccggtctcgttctggcacttctccatatacgcttttgatgcccggggaccaccccggccgcggggcactattggccccggggatggagcacatcatccgcgacctccacacacggaagtattgtgctctatggcaaatgagcacgctacgagggtgttaagatcactggctgggcgcacccaataaacatcacaaatcggaggcgcgactgggagaattccggagcaaaggccacaagaatttaacacctgaggcactcgtctaccgggacaacaatcaatatccgacgcagagcgagggactgatgcaccgcggcctaggtagacgaccatcagaagctgacccacagaccggagagtgtcaaattgatgaggttggtagcaaacaaagcacactaccatggtcgacagacacgatcgagaccggtctgacgatcgatgtcggccatgcatacaagaaggcggtgccacgtgccggcagccgctttgtgacgatgctgagcagc

SEQ ID NO: 14625 - DNA, 1668 bp, Emericella nidulans
ctcgcaggatgtttggccctggaggtccctactcggctttactcgctgcgttcccgatcggtctcaccctgccagtgatactctacttcgcacaacgacaattatactgcttgcggcacataaatccagtgatgctgctgcacgggggaaccacttggtcgccggtaagtacatttgagaggcccgcatggccttagtacccttttttgaccacggggacttcacagttcaaccttgcctacgtgtggcccgcggttccagtttcattattctcgatggcctatcttaagaggcgatatttagaattttgggccaagtacaactatatcggatccgcagcattctcgtcggcaattgccattgccagcttgttaatatacttttcgttgcaatctaacaacattgagctgccctggtgggggaattatgcggattcgggatgtgaggaacatgcgtgtacccgcctgagcttgacaggcgaagagtattttggaccgcgggaaggagaatgggcatgagtgaaatgggccactgctccaaaaaagcaagagagcatctttaacagcgtaagcattaatgagaaatatactctggtttctattcctgtctcgacctcggctttgtgggaacgccatacaccataaagtaggcactgtattcgccctctccgccatatttggtatcatcctgtataacacgatccacctccctgaaccccaaccgctcatagatgctccggcctgccttgaacgccagaataaagataggaagtctgagttgctcagcatgccggattccactctgcacgagtgccgtgccaatccctttgccttggttttcggggtggaccgctaaataatccaaggctaagcgagcgacagttagtactcggtctgggcgaggattccagttcctactgaggatacgtactgatatacggcctctctgacaaaatgcgttccatgaccacttcattcttggcatcaatctcgtccatgccctcttgcggattccaccacgcagaagccgccaggtcctcatagtgttttcgctcctcctcgctgacttcaggaacctgcgcctcggtccacactggctttccatctgcggcaatcgcatggccccgtggcagaatccagcgcgcatacccgactaccgcaccagtggtagggtcgacggccttctcatgtcgagtcacctctcgcgagcgaaggaggttgcgcgcctgccgctttgtggactgttcgataaggaaatctagtgtgatgtctttaggccacagggcgatccacgtcgggtcctcccaaaaggcggccatgttattgcgcgccagggcggcagcgtcggccacggtacattgttcaattttccagccggccatagctgtgctacgatgttgaagtgtatgggtaatagtggatgggataatgagcgatgttagtgtcggaatccccacaacctgcttgggctgtgaaggtaggttgatgttgtaggtggcgaatggtattgattggtcgttctggaaccagacatggtggaagtcttggctttcggaaaccgtatccatgctgcaggctgccaggttagagcacgaaggacgcgactgtcacaattttgcacaaaattttgcaaaaaaaaaacgggaaggggttggtggtagatctcggc

SEQ ID NO: 14626 - DNA, 510 bp, Emericella nidulans
ccccccccctaatccccaaacaccccgggaggaaagtaaaaaaaccccctaccataccctccacccccatttattccccccaacagcacaaccccccaaagggggggcttttaaaaacacaagaggtaaaaaacacaacccgcagaccaacaaaccaatcaaaatacaaacactccccaaccaccccaccgcctccacactctcccacactaacaccctcaccgcacccgctcccgctcccccaccacagcaaaaggccccctcctcaaaccacctcgcagcaaataccgccgccccccatgctcccctcatcactcccgaatcaccctatacctaactaccaatcgcctcccccaacaaaccccccactaacccaaacacaaacccccaacacacaaacccaccactgacaacacaacaaccacccacaccaaaaaatccccccaaaccccaccccctgacaactacccacccacaccttcacgaacctcaacctcacccaccctaacc

SEQ ID NO: 14627 - DNA, 2400 bp, Emericella nidulans
ttgatcttgccgagtggccgcatgtcaaggcgtggactgacaagattgtgcagcggggcgctgtccagaagggtcttgtgacaccaaagccgccgtttgacttggagcaattcaaggtgatattgcgcgggcagcgggaggcgcttatgaagaaagagaacagtgacaagcattagctatccatcgcgtagttatatccatctggaccgatgaggaatgaaatgaatcgaatgctgcgtgttcactcgatcaaagctcacttcacggctcaagttagaatacaatttgatcagtttacccagccatcggcccggagcgcattagatccctcatattggttgaaccatgtttccactgggagttgatccaagtcaccgagaatctggtctatgtaatcgcccacgccattgactcatagtatctgcgcgatgacacgacgaacggtgagaggctaaagagctggcatgtttatcgtatctgtaaggcccagtgttaggacgcgagtggaacggagtagaggtcgcttagacctcgctctcgttgggatggattatgtactcatgagagcctacgaatgcctaggaatggactcaaaatacaatagaaattcgccaaacagtcggcggaactacagtattagtgtgagagtatttgatgtactgtccacattcgcccgtcaagtttggtgacgccagggacaaacatattcaaaatccgcagtacgtttttcttcgaatcgggctagaaggcgatatattcagggcactattaacttccaacataatatactgtcggagccccagatctcgtggcctcgttctgtgtatctactagtgttatacgaagtggtgaattgcagtcatagtctgggcacttgactctggcaatgagcaagcttcgctcaaaatatgttttacgtttaactgttgtatcattcgaggttacaggtaatgatattttttattaatctaactgacggccgaccgcctgggtcacggtcgggctatcgccctgcgtgccaggctcatgaatatgggatatgggcatattgactagctagacctagcatttctcagctagatctatccgtttcctgactatgatctataccagatctgatatctagaaaaaagatacttgctgatatttgtatactctgcaacattcggtacgtatttgctaccggagacgcgatccgtgtatccttagcttattcaggaacttgtctgcttgaacgatgtaacacgccaagacttctttgactcgtggggtggggactagctgattgcttcattggatcgcgagtgcggcggctcgcggaagggagggtccggtagcgcgccatttgtctcggccttagtgcttagtgccaaaatgcggggccgactgacatggattgggtttgtcccgatgcgcctccaatctcgccagctgaacgcgcagtgagaattgtcccgcactcccccgtaatactgtggggtatgctctattaccaactcgacattgattttttctgctgctgctgtgaactcccaaccccccatcggctgtcattctctaaagctgggacgcgacgcccgccagccaaacggccaggtaggccatatgaccaacctggttacaagcgtcaaaatgaaaggaactaacggatacttggaataatgagtaatgaaagaaggtagcattgggagagctggagtcgcatctccccttgatgttcaaggtcgtattagcctgacgctaacgggaagtccatacctgcctaccaccgcttgtcggctaatctacttcagcttttatagccgaagcgactccggtgcagtaggactgtcaaaaaacaatcaggtgaggtgatgtatgtttatttaaaggcccaaaaaattctatttaacaagatacgtctatagccgcctttgtcgtctcaaggcacagcagcgtatccttgcatcgaaacagatatgtgctaagtatgtggtcatatagtctttcctattcttacatcccatcgtgcactgtactttgcttgtgatgctgcggccgtggggcgctcgtgacgggttgggccctcacgcaccggtgcttttcgcccacgtgtagacaaggccgctgatgaacccaagcacgatggcagatacactcccgaaagtgacgggggccgcgaagaagacaatgccggcgaccgcaagaggaagcttgtttagggcgcccaccatggcgtaggtggtagacgaggtcgctcgtacacaccaggcggtgcagtacgagatgaatatggcggccacgccagaatagaagattccgatcactaagctttgtcgcgactcggcaggaaagttccgctgcaggttctcagaggaccagtcctcgacgagcaaggaagagagcagcaggatagggacg

SEQ ID NO: 14628 - DNA, 584 bp, Emericella nidulans
cccccccaaatataagaaaaaaccccggggggaacaaaaaaaatacacgccccccttctccacccccctagtaatcccaccatccaccaacccccccccccggggggttttttaaaaaaacggggggctcaaccaccaccacacagctctggatctagacctccataatcactccctgcaccccaggctaaactgcttagacaccaccaccacctacccaaagcgctcgcaaccaacaccacccctacacctccaactcaccaaacaaagcccaatcaatgccaccaccccctccacccccctccgcctacaacccagtcacttataaccaaacactaaaacccccctcaatcaacctacagcacgcatcaccctaccccctcacccacctaaccgagctccccttcccgctcccccaagaacaccctctcccactacaccatctcctaactccacacctaaaaccctgaaactgacaaactaaccaccctatccccccagcatggtctaccccacttccaaatcaccccctacccgcaccaacttaaccaccatccttcccataacctccccaaacctccatt

SEQ ID NO: 14629 - DNA, 516 bp, Emericella nidulans
cgccaaacccggaaggaaaaaacacctcccaacccactccccccgacccccacatacaaacgcccccacacacacaacacagggggggacctatacccccccgaggggtaccaaaacacacccgaacaaaccaaacagaaccaaccatcgaccgcgccaccacaaaaacccccgccaaacaacgcaagcagaccgcgcccaaccagaccaaccccaaccccacaatggaccgcccacattccagcacaacacaaagccaccgcacacacaaccaaagccccaccagacgaattaccccctctaacccaaccccacacccaatcaacaacactcacaacaacccccccaagaacgacaacccccaacaaacacaccactaccggcccccaaaacaaaaacagaacccaacctccccccccacagcacccccccccccctaaacacagccaactccctcacgaaaaccaacccccaaaccctaccaacgaaacaccccaagaaaaacaccccaccaca

SEQ ID NO: 14630 - DNA, 1722 bp, Emericella nidulans
aacgcggcaatcacggagcgaccagcctaatcgcactaagcgttagcaaaaggccttatctcagtagatttttcagtaaacttacctcacgaatctcttctgtttcaggctcagcagacttgttgtcccagtgcttgaagtactcgtcaacggcggccttctgagcggcagcgctcttctggcgcatggcagcgaaacctcctttagcctgagcagagtttccgtgcatggcagcgttgaactcaccatcgcgctggtggctctccttctctaaagcagtgggagccattgtgaatcgaattgtcagtgaatctaaaagtaggaggttgaaaaggggggaggcgaaaggatctcgaagatcttagtaagtcgagggaagcaagatcaaacgattgtacaatcacgacaccgcaaagcctgcacattgacctgctttataacgcaggagaaattgggaacagcccgaggtgtctcggagagaatgacaagaagaaatggaagattggaaatacgcgatgaatacgatggccagaagaaagtccagaaaggaggtgaccggcttttttagtcacttagccaatcacagttggtttggtcggtagagcctacgcagtgtgctaactgcattggggctagtatggggttgatccagagtccctgacagcggaggtcgagaaactcagagcatccagtgcaccgaagcccagtgcggagtgctccttacgcgatacgacttgagttgcgcggaaagaatctattgagctgggctggggttgtcgtaataagattatcctgcagcctgcggttgagcatgatataatgttgcgtattcgatacgatagatcggctaaggagccactgccactgtagccattgcttgaagcctagactactatcacgtgttacgcttatataatttctttccagccactgtcaccgccacagctcagcatatcgataatctgcgagttcaagtcatattccgtcccattgacctagctacccaacacgaacatgccaccccaaatcaaacaggatctcaatcggtcaggatgggagaccaccgacttcccatcagtctgcgaaaactgcctccctgagaacccatacgtgcagatgctcaaggaggattatggcgccgaatgcaagatctgcacccgccctttcaccatcttccgctggaaagccgaccggacggcccgcaccaagcgcacgaatatttgccttacctgcgcccggttaaagaactgctgccaatgctgcatgctcgatttgtcgttcggtttacccattgtggtccgcgatgccgcgctgaagatggtggcgcccggtccgcagagctcgatcaaccgtgaatactacgcacagggccacgagaaagagattgaggaaggacggggtgctgtggaggaatacgaaaagactgatgagaaagctcgcgagttgctgcgaaggctcgccaacagcgaaccttactataggaagccgaggcagctggaggcgccggaggaagatggagagacgcaaggcccatcagatgctacggtggtcaggagccgttatggtaacgggccagggccggtacgaacaagtgagagcagaagaggtacaccactacctgggcggggtcgaggaggtgtgcgcggcgggcgaccattccctggtaccgcgcagttccgccatcgcaggcagatatactcccacccgctgaccccaacatta

SEQ ID NO: 14631 - DNA, 604 bp, Emericella nidulans
acaccccggggccttcaaaacacacacccacaccctctatccacccccccaataaacaccccccccaccctcacaaacccccggggcccctttaccccccccggggttccacaaaccccccacaacacccccccccaaccacacccccacccaacacccacaacccccccaacaaccaccaccaccccccccccccccccatcacacaccacccaccaaacccaacaacccatccaccaccccacaccccaacccacccactaaacccacaccaaccacaaccacaccccaacacccaccccacccacacccaaacaaccacacacaccccaatcccaacacccccaaaccccccacaacaccaaccctccttcccaaacaccacccacccccatcccacatacccccccccccccaacaaacaccaacccacccaaacacccaacaccccccacccacccccccccctaaacaaaacacccacccccacccacaccacaaacaaaaacacccccaccccatcaccccccctcacaccccccacaaccaaccaccaacatcaacataccaccccccccccccaatcccccaaaccccccaaaac

SEQ ID NO: 14632 - DNA, 2202 bp, Emericella nidulans
agccaggacggcacaataactagcatatcaagctgaagcttcaaaaaccatcagtagcgggaattctcggtaccataagaatctgaatccgaatctgagtctaatctatatcacgaactggatcaaaacgcccggaggtgatcagagaatagtgccaaacctacaccaaggaaaagagtgagaatagtaatcagcagctgtctccacgtaaacacaaacgaacgggatctggaaggtgattgtgaggaagcaattgattgcgataaacagtcagggacaacctacccgaaagtctgcttgatgctgcgcacgtaatagagttcccaattctgcttcgtgacgtcttcctggccaacagggacgccggcccatgatacacgcatttgggtgacgccgtcaacatcgttctggtcgaagttgatctcgagggtactgaaatgcccttcaggccactgagccaagcgccacttctggaccagcagtgttggagactcaagcttcacaaattctccggtgacattgccgtcgaaaattgaatacttgccgccgaccttagcaccgtcccactggcgaggctgcccgcgggtgaaggctgcgagacgctcgggttctgtgaaagtcttgaacagctcttcagccgtggtgcggaattcgtccgaagcggtcaccgtagtggtgttgacggaaaccttgttggtagtagttgtagtggcgggtttggaagcaggggcttcttgcttcttggtctgagggtacgatacggccggcgtaaagcccttggacggattttcaccaggggcatgctggatatcttttccgtgttcagctaccaaggcaggagcgagctggaccagttcttttctgatctgtggaacaatctttgaccgcacaagatccttcacgggctgcttggaaggagaatccgagtagatatcgatgtcaaactgcacccgggtatctatcagtgtgtgtccagaagcagaatagcttgggacatataggggacatacgacatactcatcttcctccgtgtcatgggccacctcggggatggtgatagtaccactcacagcctcttcgtccttagtcttacctatgatggatcttagtgattactcggaaaatgaaattcaattacaactaaatgcgtaccttcatactccaactgcagcttgacgtcgaacaaagtaatgaccttgccctttcgctggctgacatctacgtcgccatccattgtcagtacgtcggacaccttagcggtgacgccatcttcctccgccgaaacggcacgaagcttctccttcagataagtcttggcccaggcggagacatccttgttgacccagtgccaattgttaggattgtgaagaaccatgatgtcggtgtgtttattatgtatattttaatcgcaaaagaaacctctgcagcgaaacacccgacgaaatcaggatgtgaattgtcttatcttgaacgctagataagggttctgctaacgtgcgtccgaattagcattggctttctcaaaaatggaagaaaaaatgctgaatcgaggcatgcaagtgaattcaggatctgggtagcgttcccggatcaggaagctaatcagcaatgaagggtgatacgaatatcccacttcctctgactggtgccagctaattgtctcatcatgaaagtacgcgcggggcagtgtttgtatgcagaagagatttcagggcaacttacagttcgacagtaacgtccagttggaggacactgtagtagaggtagatcaattaagcccacagtcggtaataatagggaaggcagagagaattaccgccagagaaaggactgggagttaaataatgggctttgagccgggagttggtgaagttagaccgaagattcaaaaggaaagctctagaagaaaagcggtcacgtggaattagtcactgtcgcttatctacatctggcttagcggattgtttacttcaagcctctcagcctcatcttctctgcagctaattcttcagaaatacatagtcaatgcttggctgaaagagtatccatattcctcatatatacaggccttctatcctcctggcttgtctgttactacagcccatgtaatagccgccccgtgtctgaaaatatccacgtaaacccaacggtccagccgatacgcccgctgcggctagatgttgcttgcgcatcaacagctag

SEQ ID NO: 14633 - DNA, 551 bp, Emericella nidulans
ccccatcctcacccaacacccccgggagctccaaccccacacccccccaccctccccccccccccatatttcacccccccccacccccccccccacgggggcccctttacacccaatgggggccccaaacccccccccaaaacccccaacccacccccaccacccccacccctaacaccacccaaccaaacacaaccccccacccctcacccccccccacacccccccaaaccaccccaccaaccaacccaaacacccccccaaaccccccccccccaagcccacacacccccacccccaccaccacaaacccccaccaaccaaccccccaacacccccccaccaccccgaacccccaaaccccccaaaccacccccctaccacacacccacccccccctccccaaccccccaaaccacaaccccaccaccaccccacccccaacccctcccccccacctccccaccaccacaccaaacccccaccccccaaacccaaaacaacccccacccccaaacccctacaccccaaaccccacacaaacccccccc

SEQ ID NO: 14634 - DNA, 457 bp, Emericella nidulans
aaccacacaccccgggccaccccaaccaccccaaccccacaccccccccccccccataattccccccccccccccacaaccccaaagtgtgcatttttacaccaaatggggttcccccaaacacccaccacacccttcccaaaccactccacacaaaacacaccacacccacccccccaccgacccaaacaacaaatgccaccactcccccacctcacttaccccctcacaaacctacccaccacacacaacccctcacggccccttcacactaccacaaaccatactccacatcctcagtcccataaccaaactcaaaaccaaccccacaacaccccaccatacaaccaaagcgccacagcaccacaccaaacactcgcaacccccaccgacccctatgccccaaacacaacatcaaccgaaaactccccaaccacgcccagccaatacacacacc

SEQ ID NO: 14635 - DNA, 2180 bp, Emericella nidulans
tgagaggggacggttgtatattgccttgtatatgatttagcggaccgcaattaatgactcctgaagattaactcacgaggcgtttgtaaaatagcggcgaggtaggaccaatccgagcttctccaacccgcggaatacaggcgggagaatgcgtaacagggtgggcttcatggtttccctccatacaaataatagcacaaccccgataagaaaacgtaggcccatagttacccagccgaggctctcataccttgaatggggaagagttgctggatgcgggttggtccaggtcgcattcgctcgcgccagattccagtatgccacctgtgcaccgatcattacacccgcaaaagcaacactgtcatcaaaacatggacaatcgtctgcgggttcaggatggatgcggacaagggccaagatgacaagaaccacgagtgcgacctgctttccgctaccaacctggacgtagtgatctatagcggtctcgaaagtgcaatgtaaaacagccagtagaacacccaacgccgacccaacgacaacgtcaaagaatccgtgcataccgcagtacagacggcctaagacgatcgatgtaacatagagatacgtaatgccttggaggaagaagtttaggccgtcactcaaagtcgagtcgggcgagttcaacaaataaagagcgtatgccgcgaccgatacggcgttggttgagtgagtcgaaggaaacccatattccagcgccgcggagccagacattgtgattcgctgtaaaggaggagacagcggccgtgggagacagagaaggtctttaatgaagccgctgaagaacacgccggaagccagtaaatggaccattctaattgaagcgcaccgttagccaccaaagcgggtcaattaatcgcttcaatgaattcccttgacgacttacccccggcctaagcttggatagccgctccaaaagaagatcggcagaaagaccataaagaatgtatgagttccgagattcgctgtgaatgcgaaatacgaatccaatgccggggtacggatcttctcctggcaccaagccaggtaaggggtctcatatcgtatcaacgggagaagcttttgtcggggccagtatcgccaaggagggagttgatttcgatctagagcatgaagaagtcaatttcagatccagtaaggatatggtcagaaatcttgcgtacaatgatctaaactcctcaacccagcgtccggctggccctccactaccgggcggcccatggtgtcaatgacgattcaagtcgatgtgttgcgcaaagaggagctcctcccatcgatctgcggcatgcccttgcgacggggaatggacgaagcaaataggcgggtgcttctccaaggacggaaaccaagctttcacgcgaaaaggagacgggatcagcaagtaagtgacctgtctcgcaaagagagaaatctagaaatgaatcccgcggtgatggacaggctgactcttggcattcatgtcgatgtcaagctgtgcgcttactcagccgcattcgtggtctttgcgcagcggcggttgagcgggagggaaccatgttggagatctatgatcgcaattccggtttcttttcgaggtcattgctcaactgctagctcgccctcccagtggtcgaaagtatggggtaatattaagctgggtggctgtgcaaatgccaagtctgctcttgtatatgcttgcacttaaacgtacagcgagtagcataatgtggaatggcccattgcctgagtattgggcttctgatgcttgggggttgagatttgaactgcactgcttgttgggaagatgatacaagatgaaattatatgtactgaccctcatggtgactggggaaaccacgcttgggatatatggcagtccgtgcggaggcgaagatatattccaacgtcaggaacagcacgtggggcaggaacgtgctggtcgccttcatctatagtgttaccatatattgcgctaggccatcaaaaccaataggcaacaggccggtccttaaattgatagagggggcattgtagcagtacggagaactctgtacggtagtaaacaatctaacagataaatgacttgtagccaacagaaaaaccttggattccgtctagatctactcctgaaagactataatgccaggcaggagacatcacagcaa

SEQ ID NO: 14636 - DNA, 451 bp, Emericella nidulans
gcttagatgttaggcactgggcctgcggccataaatggtcgtccatgcgaaaggcctgcgcaatgatgggtgtcgacagcgcctattacagcaacttggagacatgatcaaagccaaatggaactgctcgctcggactatggccgaatgcgtggtatctcctggtcggctgaataaggctgctgacgatcgctatgcaccgggtatagggcacataccattgcacgcgctaggtctatgaagcatacgttcctaatactatacaccgaccgcccgggaaatagacagactagttgacctcagcgcaaagcactgactacctagtggagcacatactgtacgactaggaagctgactcttctggtctggccctcgggaatcgagatctttggggctcagtcccgagacgatggggaccaacggtgcagccagaatggaacgccaagtgagtc

SEQ ID NO: 14637 - DNA, 1224 bp, Emericella nidulans
ctagatttgattctgcatacctgcctaaacggaacgcgactgatccccgaacagggaaagggaatttctaaaacgatggatggcgcatcttaaagaacactgggacttgcgctatcctgacgcgggagagctgctctaaagtcagtccccaactctgtgacctccggactctgcccgaactctccacttgcatgcatgaaaactcggaaacgggacatagcgcggtagtacggggtatcgccgctttgtttgatatttgagattctgagtgatcgccgccgatcccatctatccaggtaaagttgcaagtctaagtcatgacactcgctggaaccttacatgccctttttaccctgtgagacaatttggtacctaagaagcgggctcttgactgcgctctgggcgaacttgtctgtcaatcgcacttcagcactgatatcggccacggctcgaaacggggctgtttcggactgacactctacggagacggtcgcggacaacgttctgaatatgtatactgtacgcggagaaaatccagaatgcagagtcacagtcatggtgaactggggggaccgcagggttctgaccgatagggcatgacccctaactgtttcaggtctcggaattcgacgtccacgaaccacgagaggtcgtcagccaactgtggcttcatcttgtgcagtttggttgcctgaccgccagatgctctcatgcggcctgcgattgtggcgctcggcgagcagagccaaagaggcaacgagaagatcgcggtgatttctgaaacgcagcctgaaccgtgtttcgatacgtgttcgctgactggactcttcttcgggactcgtggggtcctgaaagtctaaagactccaagcagaacaggtcctaagctcccaaaggcaataactacggctcgacttgccgtgggttccacgtcctggacggttgccatcaagctttgaggatggacagctttaagtctactgatgagacatattgtggagcgcggtatacctatgccgtcattcggcactactgcacacgagctgttctagaacgccatgctaacaagctggtggagccagaacgtgcatcgcgctctttgctggtggacttagcagccaagctacttgcccgaactgagagaatactgcaaagctgcttctttcagtcagtgtcttctctgggttcgatcttgacgtgtcaagggcgaaaaaaaggagaagat

SEQ ID NO: 14638 - DNA, 472 bp, Emericella nidulans
taaccaagaaccccgggcacgagaaaccaaacgatcaccagacctttcccccccccaagtagtttcccccccacctgtccatccccaaaggggcactttaaaagcaattggcgtgtacccaaacaagacaccccagctggaaccaactcgcaggccagaagagcccggatgcacgccacgaaccaaatagccaaacatcccgatcctcgcaggacccgacttctcatcaacaacgcgagagaaacaacctatgctgccaaaagacaccttaaacggcgccaaccacccaatcaaataagcacccgtgttactcacaccgaaagaccggcctccctcgataccacactaccagtgaccgcagagggacacacaaaccgcggccaacctgaccgcctggagagggaaagaaggcacttcaaagccgaaactagcacacactccaagtggtgcaacatgccgccaccttcccact

SEQ ID NO: 14639 - DNA, 556 bp, Emericella nidulans
acctaaccacatcatccaccaattaacgctcacccaaactaacctcacccccccacatatccccctcagtgtgcattttaaaacacaagggggttttacaaacccaccccttgggacagagcctaccaaagctcccaacaatacgcactacggcctcggatcagcactcacacgcagcctaaacccggatacctacaccatcacacaccttacggtggtctacttggcactacccactcacatcagcgaaccacaccgaaaccatgatcacccagactcaatgcctagcaccgatcccacatcaaagcacccaataaatggaacactacttaccaaactctctcgacatcaacacctcacatcacaccaggcgacgaacaacaatacatccaatacactgaacacaccgcaggccctccagcataataaacatcacccccctccccgtcacttgtaactcaaaaaagagtgcattccccttccacactacccactaaacccacttgctcagacttactaaccccaaaacctctccaaaaaagctaacccaactctc

SEQ ID NO: 14640 - DNA, 1561 bp, Emericella nidulans
ctgttccctcaacctggtcagaagaaaaagaagaagcagacaggcttttccttggacagtttcagcgacgatccttcgcagggcgattcgatccagatctacacagattcccgtgatcgaattcctgaagttgacgagagcgaggagaatccattttatcaaaagccttccaccaacacaaaacctcggccatctaggccaatgactaggagccgcgacaaggaagtcaatgaggctctgaagcgcgaggatggcatggtctacgtcttgtaagtgtttcaaacttccaacaatttgcttacgtttctaacgaatcttcagtcgaggcaaaaagatgttccggaagtttagcgatgatgttttcggcagtgacgatgaggacgatgacgacgacttagggttactggcttcccgtccagatctgctagattctgggattctagagaatgcccgtcccctaactcggtcatcgatcaaaccgcgggtgcttttccctagcgcccgtgagcatgttgcgggggaaaataatgaagaggaagaagccgccacggatatcgaagaccaattcctcgaccacactgaagctgctgacgacctggaccttatcgccaacgtccacccggaacaacgcctagacactccacctccaaaatctgatgtttcaacgcctccatcacccggtgtttcagtacgatctctacgttcaagatccaagcgagagctgggagctcgacagaccccaactgcatcggatcccacgaaaaaacccagtccattcgacggctggctccgaaagaagcaaacgcctccggtcatagccgcaaaaaccaagaagcgagatgcagaatctgccggaggcccagcccccaagaagacccgaggcaatcgagctattatctctccatcgtgatctgacatctatcgattgatttgatagagttagttctggaaaggttccatgtctttttcgtgataccattgtcggagtttcgggggttacaactcttctctttattctcctttacctatctttactgttgtcgacaaacgcggttcattaatgcgtcacccctcctgcttttgtgtttatccggttgttacagggatcattaggttattcaactcgagcgaaattgtgattgaaatcgagactggaacgggactcgggattactgggcttacattgttttgtgttttctcaagcctttgcaccatagcgtaccgtgttgtgccattaggtagacttcaaacaatggaaagaatgtcattaaaatgacctatcctgatacaacgtctagaccctaagaaatattccagtcggatgtccacaggttgtttagttaagctgccttagggagggtctaccagatagaaaggaaagttggaatatgaaggatttaacagccgagtaaaccactagaagagaagcaaaacagaagtgcatgaaacgctttggtatcagcaactctgaggacgagtttcttcctcttttctctccctgccataacatagaagattcgtagcgttgtgagcctaagattggtttcgttttgatactcct

SEQ ID NO: 14641 - DNA, 507 bp, Emericella nidulans
cccccacccccccccccaacacattccctacccccctgtattccaccccccccaaccaaccacaaaacaggggggctttaacacacaaggggggtctaacaaacaacccccttataaccccaccaccgatccttcaaaagcccaagcccaccatcatgacaaccaacaccccactcaaccccccccatccaccaccgatctttacctcccccctgagacatccctcatccacatatctccccaccacaaacatcaccccaccccacaaccccatacctcccgtccactctgccaaccacccaccaccagactaaatacccaaaactacctccaaaacccccagccccccacctcccccccctccagattccacctcttccccaaaacccaccccccaccacaaacaccccccaatgcccccccccaccccataacccccccaaccccccaagcccccacccaccccccaactccaccctgcccccccccaatccaccacaccaaacc

SEQ ID NO: 14642 - DNA, 769 bp, Emericella nidulans
tgatccaatcctagatcataccatcggctcgccaaggttattaccggctcttataaaaatgtataatgtgcccgtttattttgtctttttctcgaacaaactccactccccattcctggccgggaacccagaaatcaaccgtctgcggtcttagaccattcagtcagactggcacacctctaccggctctcttgttgaaacaccggtagaacttgtcttgatcctgtgcctcaattgttctggctgtgcaccactcgatatcgtcttgccgtgtgctgagtgtctcagttgagcttgaaaattctcgtaatatcgcaggagtcaaatcctgtaagtctgggggtcccaaggtaactttccgctctttttgcagtacagggttcgatccacctagaactagttaggataattaactgagatatctggagtggaacttacaacccatgcttttcttgcaatcatgatggaaacacatagagttcgttatattccccctttctgagcatctgcatttgtgcagccagccccttgtaacatgtctcggcctctttgttcggcttacattgtacatttcctcaaaaaccgtagcaagaggcttgcaaattctgtggtaaaccaaacgccctgaggcagtgagcaggatgttggctcatgagccgcagttccgagcattcgtatcgtctcatctgtcgacaacgtgctccctgtttatgaccgataaatcacggctcttgagatcatgatgacccaggcatatgcgtcaagcaac

SEQ ID NO: 14643 - DNA, 2773 bp, Emericella nidulans
aaattgagggaaggatgatgggatgaaactgctcacctttgaaagccagctgcgtaactgtcacctcacccgcgacggggcggaaggagtcaatacagtagacgaaggagacgttggttccttgggtgatggcaaaggatactataatcgctgttagtagagtctaagaatgacgaaacagaggcacggtcaacgtacataagcctaggccgacggtaggcaccatccaatgccacgcattggcgatgccgcagccgtacagaacaagagatagcggcgcagcaataacactggggataatcgccggcaaccgcatttcaggttcgcgaatgcccccgttccgtctggtgaagtagtctgccacccagtccgagaagggaccgccggcaaaggtccctaagaagcagcccaacatgccggatatgaaacagaggccagactgccacgcttcaaagccgtaggtggtgctgaatgccgtggcaaagtttgagaccacagccactaggaatccaatggtcactgacatgacgatggtcgcccagaagacaggcgggacgaggatgagtccaaacggacggatgaacatccgccaaaaggactcctccgtgtacgtttcacccgaccagagccgtagattgtggaggtaagtcttcttgggcggaatccgtgggacggaggcgcattctaagctggcgctgtgaggatctgactgtttttggaggtccagagactgttcaaccagtggattgccgacgcgcctgtaggcggtctctgggaagaagaggaatgtaacgagggtgagcgctccaacgaggcacagccgacgaaataaatggccctccagtcgtggttgatggtgacgagacctgcgatgatgatgccaaaggcaacacccgcactcagggcggcgttgtaaatcctaccagtaccagtcagaaatttctctttcttctgcctttctttctaccaagcacttacgccatgccgtaacctcgctgatgcagatagaacacgtcagagatagtgactggggccagacactcgcctgcacccgccccgatacccaagacggtccgcgtggtgatctcgcccgcataggtctttgcgagtcctgctccaaggatcatgaagaaatacagaatgaacgagccgatgtagatcggccgtcgaccatacttgttgagaagcggcacccagaacagcgtcgagaccccctgcatgagcgcgctgttgttgaagaagtatgaggcccggctaacccagtcgttcagtgtggtgccgcccccttctctgaactcggtggctatctgaaccatcgccactgtcggcccggcagccatgaagttacacatgaccatcgcgagcgaaacaagggtggcgatatagatcttgtacggggtggacctaagaggcgtctcagtagctgtgacgttcctgggagcaaagcagaagaggtatattgcttaccatcttagaggatcgttcggatcgagtgacggagccggtatcaagataatctcgttggtgtgctcgtggcgaagacgtacatggccgagactgtgcagatggaacggctttgcgcatctcgagctctcaacgtgctcgaccatctcttcctcaggcgaggtcttcatattggtatcagccatggtggtgggctacttaggactagatgcaagggatagacgggagagcgttccggagaaggaggaagagaattggtgctaggccacggatctcctggaacctataaagaccctgatcggatttgagagtcgtccctcgaaacccatgggaaaggtggctgataggggtacgcaagcgacgggctgtggctgcttgagagttgtcgacttcagtttagcgtgtctagacctcagacacccgccgggatgatggagaacccggggtggagtgcggggaagtgggggatgtcccggaattcactgaccagagcaaaagaaaggtatcaaagggtttggtctaggtgagtgtcaagtcctgtcgggaataggggcaagcatgggtccggcggggtggagtgtttctgcatgtctgtgatatagtattatatagtactcaactacgcggcaggaaagcgcaggactgccaaggttttagctatatttggcttctacattgacataacagtaaggaatatggattcgttgtagattgtctacaatggccagaagtcaggctaacaccatacgtgacggggacaaatggtgaagaaagatagtcattctaatagcatagcgtaactatgcaacaagagtgcagttttcttgattgactaagaagatcggggaatacacataatacttcccatccgggcccaaaccgctactgagggtacggcctaagatggccacctcccggcagggccacagttttagatttgagccacttgctgccagctgccgaggcgttatagtgaatactgaatcctcgagaacgaatgttcccatgatctgggactacattggcgaaattgtgcagactcacgttccgcgtaagcgtccaggtggaggtttcgtcaagagagacatcgaaacgggcagccccagtggccgagtacgcagacccggtccagctcgagtgctctgtaagattccaggaaatagagcttttattgtacgctacaatatctccctccagggccgactcagccacggagactgccacttcagcaggcttgatcgaggggttctcctcgacgcagcgaagtggttgaacgcctgggtgactgagaggcattgccaggacaaga

SEQ ID NO: 14644 - DNA, 566 bp, Emericella nidulans
cccccatacacacccacccccccgggaaaaaccaaccccatccacccccaccctacccacacacccattatccaccccccccctccaaacccaaacagggggcccttaaaaaccccatgggggttaaaaaccccaccacacgaaacccaggcccccacacccacacgcaccccacaccaaccccacaagcacgcccccaccccaaaccacccccaccgcaccgaccacaaaccaccacccccagacccaccaatcccctcacacccaaaccctcaacaaacccaccccaaccacaacacacaccccaccccacaccaaatccaacacccccccaccccaacacaaccccaacaccccacaccacacaccacagccaaacaaccaaccaactgccacaacccccacccaaaatacccaacacgcaaccccaacccccacaacaaccacccacgaaacacaacccccccacccaaccccaaaaaaaccaacacctgcaccctcccctcaaaccaaaaccagcccacaacgccgccccaaacccccaaaccccaccacacccaaaaaga

SEQ ID NO: 14645 - DNA, 2056 bp, Emericella nidulans
gaagcacgtcaaccttcagtcacaggatgtcacattatattgttccgattatgaatcaccatcactggcttgtggaactttctgaaaccaaccaatcgagtccgtgttctcttctagaatcttgaagaaccaaacgaaagtgaagaaagcgatctttgtatagttagggctgatgcgaatttccgacgcccaacccgggtgccagaagaaatcgcacattccgaggtgctgaggggtatatccggggcccttgatgcgtatatacgactctcgaatctcggggcatatagctaggcccgagaacattgagctcgccttaataatataccagtaagagtggattctgaacagataaatgacttccctgaaccctttctgaaatttctcgatcaattcgttgcgggttgccagaccatagcaaaggcatttatagttcgtatctagtttcgtatttgtgttcgtattgtgtatcgggaggtattgggcggagtttcacctgttcattgcatgcagccatagttcatcatcaaggttacactctggctcgcatgatgactcgataaccatgtggctaaggtctggcatatcatttgtattcccttctccgccttcctcgtcacacgacacttgggtgataagttgctttccgcaatcgtaagacaaccagggaagcaagtaatcgccttcggcgttcaatctccgttctcacaggaatatcaaacataaggcaggggcggaatctcggagtgtccatctccgcctcttttggtaagaacctaagacgaagaacagaccgtgatcttcaatcaacaatgccgtctgagtatgtattatctctgaataacctgctcgggctcgactggcagcaaaatcaactggcagcaaagtaagaaagggaatcacgtctcatcgcgtaatggaagccaaggatccaaaatacggtccttcttgggttgaaggttaagagctgtcagaatctctacgtaagcgcttgtcaggacagccttccccggtcgatagcagcgctagcattccgtctagcgccatacctgaatcacagagggacggtgatgtttttcatggtaactaccaggagtaggtagcttgtattcattgagatgtgatccgggctaggtaggatggacatttgaatccttcttccttccgactcagttgagacgaaagagagatgtcgcctggacgttattcgaaccccaatagtcatccaagatttgccacatttgtaactagatgtcgactattgtgccaggtataagtgttgatcccacgcgaagggacacagtgtggtgatggcgagcggattgatgacaaacgggtgtcgtttggcagagacagtgagtctgcgatgagaggcagttagaggaggcgtttctctgaggtttcaggatctcgttgatgatacgagggagcgttgaggcagcacctgggtgaaagagcaatcaccacttgtgaccgcagttcatccatgacagacaagccaaatttcagtatcgactcaaattgcatcgtcccgcgcctctaagcaagcatccgccattttatcgatcgcatcttccctatgttcctgcgtaatccaccctctgtccaccagcctcgccaaggcatcccctacccagttctggcaattccaatcgagatcatcccgcccgtttcgaattggcgttcgttcgaccgtctgacatattgagtcctcgccgatctttgtcggaatatccgtaactggcacgactttggcgagaatcccgacattcgcggggtcgatgccggcgcctcgggcgtgcgcgaagcggaagaggcccgggcacccgatgacatgcatgatgctccggctagacgaggcgaactggaagtagagcgctgtgtggcggtactcggagtagtctagggggtctcctttgtaaactaggataaagagcttttggggcatgcttaataacggaattgggatattggtggaggtcttggtgagaactaaaaggagattttaaaagatctgatggcgatcggcggggcgttcctcacgcctctggcatat

SEQ ID NO: 14646 - DNA, 2651 bp, Emericella nidulans
ggttcaacatcagtgctaggtcactgatgggtgagctcaatttgccaagcgtccaccaaccagatgcgacctgatgatcgtgccgtcaatcgtccgacccgactcaagtctcccacttctccattaattgtttcctccccccgttctcgcagccaccgcgcctccgcccatttcacccaccacgatgtcttcaattgctgctatggcctctcgccgggcctttgcccgccaggctcttttccgcgctcccgtgcgccgcgcctacagctcgaagatggaggaatcaaccctcgacaaggctcccaagcgtgatcccgagctctacgtacggacttccagcccgacgaaacccaattgaatccaatatttaaagcatgcgtgtctaattagaaataggtcctgctcggtgtcatgtctggtgctttcctgattgccggctggtaagtgtcatgccatgctcgggatctttaggagatgacgaaaacaatttctcacgaactcaattgtttgaatacggcaatatgagactcaagaatctttgttgatagcttctcttgataggtactttggcaagaagcccacctccgtcacatccgagagcaacgtccgtattcccgacagctctatgccctgggagcgtgacgacgacggcaagatctacaagtaccagtaccaccccggtggtgacaagagccagcctctcaggaacgctcccagtgctctgaacactgtcatcgttcctaacgttactctgcctgtggtatgaaccattattcaattctcccctaaattcgaatgatactatcggcatttcgactgacattcacatttataggatctccacgagcgcttcaacaagtacggcaaggaagagtatgacttttagatagtgtcagtgtatttgagctggatatgactcaatgttgattgctgtacattaagattgctgtgaagactagttccgggggattgcgactctctgatcaagagtgtgtgcatagttagttttgtgattcaaatggagctgtcctttgttactttataccagcaattataccagcaattagggatagtgaaatcacagtaaccatgtacagtgccatacttttcgttagatcaaaatgtattattgtcgaaaaagtacatagaaggcagttttgtcggacggatagagtaaaaacaaggaaatctgaagagagagaatagactatggcaggtagttcaacagaccgacatattatcgctttaacgggtcgcctcgttgccttcactagctggctttggctcaggagaatttggttctcccaccgagcttcctgcatcagctgcggaggctgggctatcatccacaatctcctccggcttgtcctgagtttcggggttttggccttcaacatccgggtgaggcggacgaaccttgccatcgacaacatccaccagatgaccatgctccaggcgagtccgagtctcatgtctcgtctcaatcgatatcttgccctcctttcgtaacgaatccactacggcctcatcaaggatgttaccctgctgatcacgatattccactcgcgcttgcgttcctcgaatttttggaatgctgctggatgtgatgcttggttcctgactctccaccttggcttccttttgttccttctgttcctgcttcggctcggccttgacaggtgcaggcgactggggaatagatgccgccgttgttggaacagcggagttcacactgctgaaatgagtcacgtattgattcaacttatgcaatcgttagtcaacatcgtagaaattattcattgagaccgggaatcggagtgcttacgtcggtgtaaaaagtgttgcagtcaaagtcccatgatttcagaagcttaacttgcttgcaggcgtccctagtccacggattcccatagatcaatggagagtaaacggtgaaggcaaaaatggtgagtcctaagaacacaccagccaaagctttcccgataacaggtcgagagggcagacccaagctgcggatacggttcgtgatgaagtcaaactcttgggccagcgcaagaatagcaaaatagagagcggggaaatagtggtgtaagaagagctggcgggccataaggtagaatgggaagtagtggaaaccccagccaagtactgaggtaccaatttcgtagtcaaatcttttgaatgcgggattacggtagtcaccacagttacgctgccagcgtagaagggaaatccccttgaaaatcacgtaaaccaaaactgccaaagtggaagagtaccagacgaatgggtttccgaagaggtaaacctgacggtgatctcggccccagaaattgataccacgaaggaagggttggccatgacggaggacgagaatcccaggcgtgggagtcagtcaaaccagcgttagtggtccacataaccttctgaagctcgaaaaatttgccgaagaagccaggatttcggtaagtgaccttttctgcatctggagggagcattggatgcttgttgctctcgaataccagatgctgatgggcaaagaggcaccctttcacatgtaacttcttgtgatcgaaacccaatcggtagttgacttatgtgagacagacacatcagtatgagtgacaagtcaaatccatgatagccgaatc

SEQ ID NO: 14647 - DNA, 408 bp, Emericella nidulans
tcgtaatccttcctactgtgaggctgggcctttggggatctgggcgaactgtcctttttttctcgcgaggcaccatccgggcaaggttctgggcatactcgccaccaatacagagggagccggttgtgatgggccgggtacacgtgcggacgcacgccggtgcagcattattacctacgagcgccttgttctactgagccatggtgtcggctatactacactacgattgagatgaaaactatattaccaattcattcctgatggccactcctgcagccgacgctggaatgaccgtacaaaccgtcaggagccagcatgctcaatatcatgaacgaacatggcttgatgaactgtggatagcacttggaagcatctctagacgtactcgtgccatgagtttctatggca

SEQ ID NO: 14648 - DNA, 595 bp, Emericella nidulans
  unsure (1)..(595): unsure at all n locations
ctcaccaaaccccccgggagacaccccccccccccccccccnccttctccccccccctatatttcacccccccaccccacccaccaccaggggggccctttatcacccacttggggcctaaaaccccccctacacactaccctccaaaccccctcccccccatacacccaacacacaccaacaaaatagctccacccacacaccacccacccatcatcacctaaaggcacaccacccaccccacacactcacacacaccaccacccaccccaaacaaaccaaccaaaaacacaaattaccaccaccaacccacacatccacaacaaaaccccccaacaagcccagaccaaccacacacgaaccatacccaccccacaaacaaacatcagaacaaaacaatacaccaaccccaccccccataccaaccccaaccaacctaccctcaccaacacccccaaaaccccacccaataaacccccccctccacccccacatacccccccaacaaacaacctcaaaacacccacgcccccaaccccaccaccaccccccctacccacccaaacaaacatgtaacatccaataaacccccccc

SEQ ID NO: 14649 - DNA, 2349 bp, Emericella nidulans
aaaataaaaaagagagtatataatgaagaaatggagaaataagaatataaagagagtaagtaaaacgtgaatggatgatactagagaaaatgaaaatgggtaaaaaaaggagagaatgtagagatgaaattaaggataagagagaagggaaagcaacaaaagtagccaaatttaagacatactccaggagaattttataatctacaagtccaataaatgcagatgagaccaagaggattgaatacacttgcgtatgaaagaggggtctaattaaatggtgattggattaacggataaaagggggagttctacaggagagtatgaaccttagaaggataattaagtccattatagatgggagccactacggtttgctctttgagggggaaagcaccaatggacatggaatggaaggaacttttgttatgttaaaagcttccccacaagaatatcggtgatatctccaggagcattcttgatcgacatactttcgacagatcggaaagctccttctgatctttagggctgtccaggaggcgctagggctattagctatctaccaaacctcccttattcccgatgtgctctcaccgaagagaagccaagcaggtcgaccgtcatcctcgggtggagataccattgctggcgattcgccaaattcacgaatcagcagacaatcaaacaaccaatccttcaactctctttcctcccacgcacctccggccctctccttcggatccaccgcagctgggtcaagcttcctgacacaggcgcacaagccagaactctcgccacaatatcaacttcctctctccccacatggcggctcattcaacggcaacgccaaccgacacagcttcagcctgaatagcctcaaacaccaagaagccgatgcctcggatcctgactttgaccgcgactcagacacagaaactacgatgacgacagccaccgcaacaacaaacaacaccattagaaatatccgctacgggcgaaacagtaccgctaacgaagttctgttctctccgagacgctcggagctcggtcctggtcttggcagtttgagtctcgatgacgggccgtcgcgccgtatgacgcggagccagtctcaaagacttcaaagccaaacggctgcaggcattcgtagaaggggcttctgatgtcgctgtccgctcactggcatacatacctcttccttacccatatcatttcccgtcctattatccatacaacaatgtgttgcgtctccttcgctcttgcctctcagcgttctcttccttgcatgcattcggagtcctggtctagttgctttgttttggcctctgatatatctccacatctcacttctcggtatttgcacaactttgttcttcaattctgttcttttgtctatgtgcatttcttcgtttctcaccataccaggcaggcagaggcgtttagcatgatagcggcgattttgactccatgcctactcgactgcgttttgcatcctttccatgttattttgctttttagagggggctcagctccttgtacttattatcttttgtgcatacaaaggcatatggagtacgttaagtaagcgcgacgcttacagatatctaagtggggaacaaaaaaggaacccggagtagtgtatatatttatgacttgatgaaaataatgaaagcgatgacaatagcaacagcaaggcaacgatccattaccacattaccctactaactcgtagctgctcaggtgactaagcgcatcattcatgatctgggaaagacttctctcccactctccttaatttggaacaacaataaagacccccgcacgagacccaaggcatctcaatacctctaggccgtcttctcaatgcgaatctcctcttgcttctcggcagggctctcatcggcgctctcctttgtgctgccatggctgatgccaaagaggtcgtccatcttctcgagagagagacctattgatgcccatgttagtttgaaagtcgaacaatgaaccacgacggctgaaggaaaagaaatgaaagtaccaacccctttgtcttctggacaaaacaccaaactaatatcaccatgataatactaatcatgcacatctacctccccctaaattgaatgtcattcacaacccctattaacatcgcgttttcaacttcccctaaacttcactaccacgcaataacattaattccactctaccatccaaactatacacctattatagctcaataatgaatattcacattcccccccttctctactcttctcttctctcccaactttatccatacctttcttacctttcatctacctctcccatttccctcctcaccttcatccattc

SEQ ID NO: 14650 - DNA, 3365 bp, Emericella nidulans
tgtctgttgcgcacgcgttggccaggtacgaactctcgcccctcgactttagcgctgagtctctccttccactcctcgccaacttcgccctcgtacctctctttgattgttgaatcttcgaacgtgcgaccctcggattgtgtgattgggtgcgagtcaaagaatttcttccaagggtcgttgccccctaattccatgcgctgtgtttcggagtttttgaaagcgtccatggtaatagatcggacgaaggaaatatgcacccccagcccgcggtgggtgccggcacagttaagacagatgaaggtcccgaatttgggtgaagcctaatccaatggacgcggtttgttagataacacaggacatacggaagagaaacaacaggtcatacccattgaggagaaggggcaccacagtcgcaacatcggtcgtttccattgactttcgagtactgaaggagctatgaacgagagattagaagcaatttcagctagaggggctcgactccgcagagagctgaaaagaagtgaaacttcactaattgagtatggcaagaggcataccttggccttagtctccggatcgacctcccacatacgtgacatggcgtataaaagctgcaagacggcacctaggatatgtagtgaaagtagacagtcaatcgagcgtcgatggctccttgatcctcaggtcaaatcggctgctgagctatgtgcgcagcttgcaaaatgctttcgtttcgtgtaatttggtgatttctaaatggtgtatcaaaaattatatgcaagcgaatcaccatatagccaaacgagcgtaaaaagtaggctgaacgacgggttgggcaagaaagacgggggtttagacggagaggatcaatagtgccaagagctgtggagtggcctctcgtcataaccgtcaaccaaagactgtctccatagcgatctacaacggctaggcactgggagatccttcagaacaagactagaacaaggccagccttgcgtttctcataaactaaatggtgctaagatacaatataacagaagagcaagattcgtcatcagttcacatctccatcaaccacacattacggcattatcagtcctcgcaatacgaagcctggcggcaattcgtatagaacctgcataaaagagtgcatcctgcgtttacttttatcccttaggaccgcgcgggacaggaataagattcatgaatacttttttttttcgttgttttttttgaagtttcttggctctttgttgcatagtagcgcgtcctgacaacgcctactaaagagatatcccatacgtaaaccggcctccgagtttcgatatttaaagtgatcttcgaatacctatcatcggatagaaaccgcgttcgttcgggacagaaacgaccttgtcaattaggcagcggtaggagcagtgttctcctgagccggagcctcggtagtttcctgagtgggttcaccgggaacatcatcctccttgccggggctgtcaatggcgaccttgacagcaatctcacggccctcaatctcttttccgttcatctcctgcacagccttctcctgctgctcctcggaaccaagcgtgacgaaaccgaagccacgacccttgcgaggctcattgcgggcctggagcttcttgatcataaagcgggggatggggcggagagcgattttggcggaaactggctggtaggcggcaaagatctccttaagctagaggtggtttagcaatcacagaatatgtgagtgggacgagttaggagcataccttctcctcgctcagatcatatggcaggttggccaccataaccttggtcttggaaggaatgccatcctcagggggaccacgctgcttctgaggacgggcacgaggcttcccggcgggcttgccagactcggtggcgggagcagcatcgttctggttagtgacctcagcaagaggagcggtctcgccagaggcagtggtgggctgctcttccgccccctccgtggcctgggcctgtcaaagacgttaatggttactgaacacaaggaaaaaggcttgaaacaacataccgaacggcctccgcgtgttccgcgacctacacggccgcgaccacgaccgcgaccacgagtacgtcctcccgccctcttgcggccctcgttgccgctagcgccttcaccgccacttgcggcaccctcggccttggcctcagcgggcttcggcttgcgggcaagctgaacagagaccttgcgttgaaggatctcctttccagagagttctgcaatagcggcagtggcctcagatgcggtacaagatcgacgaaagcatagccaacggggcggttgttgcgagggttcacagggatggaaacgctctcactagaacaactgttagttactgcgagaataaaagtcttatgaataattgaatgaacaatagaaacactccactggcgatggtggtggaagtaaagcactgttgtgaaaacaaagcggaacgccgcccgattggacgcaccggctaaccttaacagcagggcaacgcaatagagggcaaaacacgcagaggcaggcagagtcaatactcacatagtgtatttattgaaaaactcctttagctccccctcagtggtcgcatacgcgaggttcccaatgtacaaccgacgtccttcatcagcactgacagcagcagcatcggcggcggactgggctgcgggggcagtaccgttggaggcctcggtggtaggggcagtggaggcctggttgtcgggagtagtgttttcgacggcagtagacatcttgaaggctgaggacacaaaaaggtcaagtcctggagaaactgggtggtctgaggattggcggtggagaggatgaccggattgtgtgtcgatgactcagaggagcttgttggctgcctgtgggttgaaagttgattgaatatttgaggggggaggaggaagggctcctaaactcttcaatcttaatgatttctttttagtgttagtgctttttgttcgtattcagttcttcggggttttatactcaatagtagttgactttgtatttcaggattttgcaggatctaatcttgatccttctttttagacgtttgtctaataaagcatctgcacctcctatgtgattcgcgtcctttttctttcttttagattatttttctccgctcacactcattgtgttttttgctttagactattttattgtattttttatttttcttaacctcatcttaaataacacctacttttctttcttttctctctacatgtgtattatatcacttatttgcgtttttagtttatttttttcattttgtctttttcttatactctttcttaagatttttatctcctatttt

SEQ ID NO: 14651 - DNA, 2650 bp, Emericella nidulans
ccaacagaccgctgaacaaggctcatctatgatcttgtgccaagatgaagctattcaccttcacctttattacgtctctcctccatctcatccctgctacacttgtgccgccccaaataccgacaagtttgaaaagtatcaattgatctctcgactcgcgcccttacagctcaatgactcgtcctacgatgacataacttcaaggcctcgtgattaccatgtcgcagtggtcttgacagctacagaagcccgttttggatgtgtgctttgccgcgatttccagccagagttcgaccttattgcgcgaagttggaacaaaggcagcaaaccggatgatctcaagctgcttttcggtactctcgattttcgaaatggcaaagcagcgtttcagaaagtattcaatagcgccgcttcgatgattctcggctaatgaagaatacagctaatgctccaaactgcgcctgtccttcttgtattccccccaacggtcggccctcacgccaaagttgacgacagcccatcgcgatttgactttagcgggtaatgcctctagaatccaggcacattagcgcaaatttggctgacagacattatccgctagtcccgtttccgccgaccaagtctatgcttggatcaaccgtcagcttcccgatggaccaaaaccaccactagtacgcccgataaattacatgagaattgtctcaggtatcacaattttaatgggggtcgttaccctgttcagcgttctgtcgccttatgttctcccagttgtcagaaaccgcaatctttgggctgcgtttagtctgattgctgtcctcttattcactagtgggcacatgttcaatcacatccgcaaagtcccctacgttgttggagatggcaggggtggtatcaactattttgcgggaggtttctcaaaccaatttgggatggaaacacagattgtcgccgcaatctgtaagttacttagagacccccgtctgcatttacacctaaggcttcagatgctaatacgcagctccaaagatgctgtgctctccttttctgcaatagcattggctatgaaggtgcctcgcattgcggacaacaagtctcaacaggtggccgtggtcatctggggggctgtgctccttggaacatacagcttcctcttaagtgtttttagagcgaaaaatggtgggtatcctttcttcctcccccctttctgaaacattcagcagcacgcacccctacttgcgttggtggaccggtttctcgtggcaaaactatttgaagtcgtgcgctttcacagagcatcggatgtcccaaagtaggagactggtaattctggacaggcattgtaaatatatttgtacacagactatgaagagactggcctctagaatggaatagtaattcacatgctgaactcttggcaaaacttgaatcaaggtggttataatactgaccgccaaccagcagactttgaaggacttaagtagaacagtgcacagggcgcagtatcttcctcccgtaaaactgattttttcctaaaatagatggcaccaatgaccaaaaggcattaagatcgcgatagttgctaggttgggaggttgggaggttgggagggtttcagcgcaagtaatcggctgggacatggaaaggaggccggaccaatgttaaaccatgaccaaacgtcctcatataaaccatccgttaacttactctccaccatcccgttccacacaaagacaaacatattttgaatctcaaaacggtgggaatgtgtggtcttgcttgctagcgtgctgtattatcaaatatgtcgcagcctaccggaaatcccagcagtatgctggtctcagcattatctgggactactatcttaatattcgtgcagctggcctcaagagttttcattttcgcatcgaatcaagtgatactgcgaagcttatcgccatcaatcctggggatggcatcgcaacttgagctgttcttgatctcgattttatacttttctagggaaagcatacgagccgcgatccagaggcacccactagagtctctacctacacatcccgctgcaaacatagacacgaatgcactgtcgccagtcagagagcgggaaaagaggagaatccgggcagcatcctctcagtcaatagtgaacatgtcgtatttgagtattggcatgggcatcataaccgctactgcattcgcggtgttttatatgcgatttgttcctgtggaagtctcggagactccttactatcacatgagcgttgcgattacagtcattgcttcacttcttgagttggcctctgaacctatttttgccattatacagcagtatatgttgtacagcaagcgtgcaactgttgagataagtgctgccttttcaaaaagcctggtcacttgcggaacattcatttgggctgtgcagaatgaccatactcttggtgtgctcccatttgcgctgggacacctgtcccacgctctcataatcttttgcggctacttcatcggtgcatgacgtcaatccaacagttttccattctccgtcctgctttcccggataagcccaaggtaggaacatcgagattataaaaaaggccgggaacacaaggtaacagcaactagtgcagctcagcatgtacgtcaatccatttct

SEQ ID NO: 14652 - DNA, 370 bp, Emericella nidulans
  unsure (1)..(370): unsure at all n locations
ccccccacccaccaacaacnccggaagtctttttttagaacctttcccctatttacccacccccacctctttgtctcctgccacctcctatgtcttaatcttcacgctaccgacctcgctaacacttccactacccaccgcaaccaaaactgtcttcatcacattcgtatcaatgtcatcatcccccttttcccaccccaatctccccaattctcaacatttataatcctaccaccccattatccccccccaataccctttttcctaacaataaatatcccatacccaaatatccctactccttcccacttaatttcacctaaactttatatcaaaactatttcaaacaaaatccccaactacttctaac

SEQ ID NO: 14653 - DNA, 3348 bp, Emericella nidulans
gggggaggatgtctttatatcagctcgacccattaaaggaaagatgttcggtgtctcagccctgtcgaccccattggcggtcgtactgcagatgatctctgaatacgaggagcagcatcatcttgacaagaggaactgccgagtaggtggaccaacacgagataaccgcagcataccaggtaaagtaaacgctgaggacaaaggcgagtgaggtgtagtcctgacagaatcttccacgggacatgtgtgtatgtcttagagttagggctcagattggacgaaaggaccaccaatcgagagagctcctcgtctatctggagactgcgaatacgagcagtgacgttgccttgaatacactgcctatttatttcttccccaccagacaagccagagaagcttaccacgatccgagattgggttccattgggttacgtgcccgtgatatcatctttgtcgacggaagcgtcgaaaagcgtcgactatgcacggcatccatagaatgagattctggttagttccttcagcgggtatttctatagcatcctcgcatcttccagtaaatgtgtcggctcagcccgacacgaggcgtacatcgcacccgccacttttgactcagtctcctcatctgcgccttcagcaggtcatttgtaaagcaagctctctattatctggcgttcgcggataaataagatgcttatgcatcttaaagctttcaacagggttgtagactttatgtcgccgcgaaatatgaacggagacaggaactcatctttgatatggtctgtataccagctacgtctccatgcaaacaactaacctagccaccgtaccataatgcccatactcaaacctcattcctacttgctactaaaaacatccttcatccacttctccaccactcacctcaagattacctaaagctcacctcgaactcacctcgacggtaactgagacctctagtacgtcgcctcccccagattcgctgagaacgtggagtctttgaacggcactgtcgcgtccccaaagtctgtagtctgcagcgcattctgggccgcatccgtcaagctctcccatgcaatcagcggctgagtgcctccaacggtactcgtaagcccaagctgatgattaactggccaaacattatagtactggatgagcggatgcgtactgtccgtcagcgtgaaaccgtcggtgctgcagttccagtctccgtgggcagacgggcagacggcgaggatgttgtctgcggacgtggaggaggatgaggagagccagacgattacgccttcccagtcatggcggtggccgaggcccgtcgatggctcgtctttcggcatataccagctgtacataatcgcggggccgtaggtgctatccgtgccgtcggtcatggttgagcgggcgtagacttggccggtggagctgtcgcatccgtcggaggaaccgccagagggttggaggccgccgcttgtgttgcctacgcttgccatggtcagcatcatatgcttatgagcggggactggatagggatgacggggacgcaccttcagcatcaaccgcggggaatggcacgcagccgctcacgactttgagatagggcttgtaggcaaggtacatgtctccaattttagagtcggggacggtctcgtcgaaaccgacgactgcgtcgtggtcgattacatcgcgggtgaggaggcccgcattgggggttaaagggatggcagctgcagaggcagcgagcgacgcgaggagagtgcgggagaccatttttcagtagacctaggtttgtccagggctagctaaatattgcgagacaaggagctgctatgggcaagggttggattatttatataggatgccagaatgtcggccgcggttgagttcatcagctttctcaatctcggtttcgcagggggtagtggagaggtaaactgtcgatcacggcagtcaagcctaattaagtctgcaaactacgaaactagtcgaggaacgcgtggacaaggccagtgaaatgaccatgccaaggagaccggtggaaacgtgcctgaagcatgcagatccaacggagaaaacccgatattaaccctaactgtcaaggtaactactccgcaggagaacagcccagtctggcgatggctcgcgaccccgtgcctgctatgtcgaaactagcctgtcaatggcacatgctaaggcgataatagcgtgcatgcgcactagcctacggcaagcaagtcaacaaatcacccaatttttccagcacaatcccctgcaacgttgcatccgcatctgacttatcagcggcccccaccgagatactaacatagcatccgtccgtgtccacaacatcattctccgttggcaggcgagtcgacccgcatgtctcaacatcatcatccgtaaccagcggaagtgccgtaagaatccgggaaaggacgaagctaaagtcgttggcggtgttgcaccctcgacgctcgggaagttgacattcagccaaacatcatcggggaggtacggcgtgccccggctcacgactcgctcaactacctttgccgcgagttctgcgtagatgctgctgtaggcgggcacttcggccatcccacgccgtggaagacccgtctgcccctgaaaacgcgatcgcaggaatcccacagtagtggcggcatagtttgcagcgccaactgttccagcgatatagactgcaagaccgaggttgctgccgacgttgggcccggaatcggcgaggtcaggcggtccgtcgaagaattcgagcgacagagtgtcgatgccgtacgcgatggaggtgacggggtacgaattcacccaattaaggcgcgggtctgtttcattggacccgtaggaaccactgtcagctgggcagctgtcgaattggcacggatccgttctgttagaaggggcctcgtcggtcgaacctggtttggttagctggtgtcttctggcgggtcaagtcccaggcagacatgccagagccggacttgttctctgctggggcggacaggacgaccgaatgaccagcagacgtcagggtgctgaacagctgcctaatattgatctccgcccacccgtcgtcattagacgagatgatattgatggccgaagccaacgggacaagggcgagggctagggcgagtgcctgagttgagcgcatggcgagtcaagcggtgctgatttggagagttgtcaagaagcttagtcctctccggcggggttggagtatttatctaggcttttagggttctgggacggaagtatcccgatgatcgatgtcttcatacgcaaacgttaaatgagccgagtgccggcgacgatcatttgggaggaggccgggac

SEQ ID NO: 14654 - DNA, 5731 bp, Emericella nidulans
acggccgggggcatggctggggttcgggacttttgatggtagaagtcgatatcgccggcgacagtggatagcgaccgactcattcggggggtgatagccactgcggtgcaaccacatctccacaacctggcgcacaaggtgtcagtaacggagctctcaattatgccataccaacaactggaccagaaacatacatagcctcgagcctcgaaggtgaaagcttgttcgacatcggcccagacataaccgtcactcgcgaaattggttcccagatggtttagaggttgccatgtaagcataacagtgccgtcttgagggccatcgagaaaggtccagtgcatcgggtgtgcttcacggactattttaggtgcggagaggaggtagtcgacaacggtgtctgtgggcatcatgtgcatcagaggatagcgattgcgcgaaacaagatgcatatggggcagctaatatttcgcaaagcacttgtcagcaggggccccaatggacgccataatagggaaacttagacaagacaataccaattgcccggggacacgactggcagggtcatccattgtgaccagggagcgcggtggctgatgatcgatcagggtaatgtagtcgcaatctatgtcataaagtgccctcgaggactgggatggtgattcgagataagagggtgacttcagcaggggatagctgagcagaccagtactcgttggtgagcagccgagcgaccgcaaacgcgacgcggaatttgtgacctttcagccacagtggctgaactaagatctgcgccacagaatactcgactccttaggtatcaggcataaactaatcacccacaagttcgtcaatcaagctccactcttccccagccatgggcttccctcagatgttatcatcacatcgcctcctcgcattcaacactcctcccatgtttcatgttgaactcaggaaagcaaggtactattaattgtgtcaaatgcgaggtcccttgtgtctccagcctcatatgatcgttcccctggcatcgttgtaaccttggagtcgactctggctgcgttgttaagcggactccggctacgctttctcctaagctttatccacctcggcctgattggatgattggactattcggggaccaccaagcttcctccggaaatcatacctccaactgtgcaaggtgtatggtgccctggcaaatatgattcgcaaatgtcatcaacgactgagtcttcgcagcgccgaggggaattttggtttcctcctttccccgccttctgcataacggcgtaaccctagaatgctagttccagctcgagcgctctagcctgctggggaagccagatgagttgagtcccatgcagatcctaaaatctctccaatgatggctgtcacgaaggaatatcgtccgtggagagaacgccgcacttataagacggcctcgtcgctcctccagcctttctttccacccgtccttctctctatctttacgagttctggtcgcatcgcctcgtaccaccatgggcttttttggcaaggagcatgcgcatggcagcaatataactggacatggaaatgacgcgcaaaatcatgctgcaaaaaatgacgccattccagacatggatctcttagatcccgaaaagcaaccagctgataatacgaataacgattcacatactgcgctgccccaggtgcattccccacgtataagtattgaccctgtgcttgaggctcgtgtggtacgcaaactggatttgcgggtaccgactcttcttggctttttgtgtaagcctccattctagtgggagtatatttctcaatgtggggttgtctgactcggacctctatagacctgctcgcgctcctggacaggagcaacatcgggttagtcttcctggcactccccatactaaagtagacgctgactcctcatagaaatgcgcgaatcgcagggatggaagaggacatgtcccttcatgggaacaaatatccatggcttctgacgatattctacatatcgtacaccctgtttgagcctcttgcattaatgtggaaaatcatgcctccgcatagatgggcagccattactgccatgacttggtgagcttgcagactaagagtgcgccctctcaattatcttgacctaactggtatttaggggtattgcggcaacatgccaggccgctgctcagaactggtctgggttgatggctttgcgctttatcctaggcgcagcagaggcaggttttggtccgggttctccctacctgctgtctttcttctacggccggcgagagcttggcttgcgctgcggattgttcgtctccgctgcgcctttggccaatacgtttgccggtgcgcttgcatacggtatcacgtcaggacatgccctactagcaaactggaggctattattcctagttgagggagctccatcactggcggcggcatttcttgcctggtactttttgccggaccatccctcttcagcctggtttctgacagaggaggagaaagacgttgcgcgagcccggtcgcttcgacgtagcggtgaaggtgagcgtgttggaggcgtggatctgaaagagatttttcagactttattcgatgtgaaaccgtggattacggcggtacgtacagttgatttgtttctgttcgatactggcctaactaacggcctggcctccgcagttgatgtacttcagttgcaacgtgagcttttcctcgctgccggtattcctcccgacaattctagaagacatgggttttgagtcgatcaatgcccaaggcttgactgcgccgccattcttcgtctcgtttatcttcagtatcttgactacttggcttgctgatcgatttcaacaacgcggcctgacgattgtcttcttttcattggtgggagcagtgggctacgttcttcttgcagcttgcacatccgtcgcagtgcgctatttcggcgtattcctggcagctgctggggtattcccatgcattgcaaacattcttccatgggttctgagtatgctccctttctggagttgaggttcctaacttgctaacgtgcgagctacagataaccaaggttctgatagccgtcgcgggatgggtatcgtcattctcaatataatcggacaatgcggccctttcctaggaacaaatgtctttcccagcagtgatggccctcgctatattcgtgggcagtccatttgcgcggcatttatgttcttcaacgccattcttgctctcagtctgcgattcctcctcgcgtgggagaacaaacgcttagaaaagaaatacggacctcaaagccaggctacgaatgcgcagaaaggacaggttattggggaggaaaattacggttctagtttcagatatgtgctgtagctgttagagcattcaaatgcacaaattacgtatagcttatacatctccggagttcatgactaatgccttcagactaactaactagcggacacaacaattacgtacaaggcttatcctgctgcctctcgacaggctgcccaactaagacgccgtgacatatactcatctcgtagctcgttaatcgctttacctgggcagtatcagctgcaaagactaccccacctttagccttccaccttccttctgtcttggagcttatcggtaatccaaaatctactgccccaaacataaccgcctctaatcccagtctactatacctaaaaccgccatcctacaaatcaagagtacaaagtataatagatcatgatacaagccggggaaaatagctacctctacggggttgttgatattggaaggtatgctgattgtatctatcgttcagcaattctagattcgtttttatgaaagagctgtatattaatgatcttctagcaatggaattcgcttctctattaccgacacatcgcctccaacagctcgaaccatgcctacactgtaccaggaccgggctggaatatcgctatacgacgcccaattctcgaagcccaaaaccaagagcaacaacagtgtcagtagggaacggcgcccgattccaccggaggttgtcgaacaagtcgtggacagactagttcggttccaaggcgtgtgcgaagatttccaagtaccgtctgagaacatccacgttctcgcgacagaggcaacccgtacagcaccaaactccaaggcattcatatcacggattaaagagcgcactgggtgggaagtgcggcttttgtctaaagaagatgagggccggattggggcgttagggatcgcgagcagttcacgcgctgttgcgggactggcgatggatctggggggtgggagtacacagattacctgggtagttgctagggatgggatcgtgcacacttgtcccaagggttcatttagttttccgtacggagctgcggcgttaacggggaggctggaagatgcaaaacatgctgggaaaggtgccgagagggcattgaaagatgaaatgaaagcgggtttccaaagggcttatgaggagctggagattccagaggattttatagagagcagcaggaaggagggtaggtttgatctctatctttgcggagggggatttaggggctggggttatgtgttgatgaagcaggctgaggttagcccctaccctataccgattatcaacgggttccgggcaaggaggggggtcttccacaataccgccggtgtgctgcgggaggtctctgagtcggaaggtatctttggggtatccaaacgacgagcatcgcagattccggcggttgcgatgctgattgatgtgctcatggatgcattgccagcgattacccatatacaattctgtcaaggaggggtccgagagggtttcttatttaacaagctgccccaggagatccgttctcaggatccacttcttgctgcaactttgcagtatgcaccgccgtctgcggatgatatcaacggagtgctcttatccgccctaccaaagcatgcttctccgattgagtcttttcacgtgccctcgactttgtcttcgcactttattgccgcactcgccaatatcctctatgcgcattctcgtgtaccccgagagtctcgcactgcagcggccctgcacagtacaacgactggtctcttagcctccactaataccatctcacacacagagcgggcgatgatggcactgctacttgccgagcgctgggcgggcgacctggcacctacagaagaatcctaccaacggaacctgatgctttgcttgtctccgcaagaggcatggtggtgccagtatcttggccgagtagcggcactgattggcgaggtatacccagctggtcgcgtatccaagacgcattggaggattcggctggaagcacagtgggatcaagtaatcaagaagagggagaacgtgacttgctgcgactaaagctcagtgaacagagagacggcggcgacatctgggttacagagcacctgctgcgagacccggtgggagaaatcgagaaagccggaaagaaaagagcttgatccggaatattgagtccggttgaagaagtggtttgttagcctacaatatagtgattcggacttatttttgcctaccggtcacttgtcgaggagacgagttcgcatcaagagtttaaggcctgtaatcagtgattggcactttaaggccctcacccgttttactttttttctttccccatcaaccgactcatttatcaacagcttttctaaaccggggtgatggtacttc

SEQ ID NO: 14655 - DNA, 403 bp, Emericella nidulans
  unsure (1)..(403): unsure at all n locations
tttaaaanccagatcctttttactccannggattcanagtccgacccgttcccattattctgcgtgtcccgtttcttgtttttgagaagtgcagctgtcaaatttcccgttgagggcaaggcgccggagactttactggagggaggtcccacatatggtggttgattcatccggcaacctcattgtctaggcttcaggtccaggaggtctcggatccgagataatgtctcccttcgcgctacgccacagtagctccatccctcgccccagatcgtgaacgatcttccttctgcgatccttccatttccacccttttttaacctagaagggtacacgaaatggactcggatctattacctaggtgcggtgaattaccccccgcttccacaaaccaacaaattga

SEQ ID NO: 14656 - DNA, 4502 bp, Emericella nidulans
agctccccagggaaaagccgaccatatttcgatatatactttcaaccgagcacagggagcctagatagtccgtagcgcgataccaagaaagggtggatttggtaccatgaatgacaactatgcttacgagtgtcaaaatcattgctctggagaacccggcgctcaacagacactgaccgtgaatcacgatccaggggtaggaaggcaactgagttgacgtttccgccgagtcactcaaaattggagaccatgctgcagactccgtgtcgactcgcgaagataaggcccagatcctggtctcccaaaagtaaaatacgaccagcggccgccgcatggcgaacaagcatcctgcagatcctgaaacaatcgcgttgaactcggaaatatgacaagtggaagaataccagaccaagacttgcacaggacgcgataccttgcagcggcccttgcaaagataccggcgaagattgaccaatatgcaattattccagcctctagattaagtttgacttgggacaaactttcgcgatatatcattgctcgacagacgccgccggtccagaagaagcatatacatcagctcaccgtctcgtaattgcgatatgtcggaagcgcttgctggcggtccgccacgtcaattagtcactgccgagcagaaggtctcaagaaacagatcacaaacgcacagttcatcgaaaacagatgggactgtgggttcctctcgcggcccgcttggtctccagagtctgaacaaatatcactgagccagggttctgagatctgacgagtctgccttctgcctgccgaagaatcgttgctcgcagctccacaggaggaaagcaaggctgattcagtcgctgttcctggtcttttctaacgcttcatggatgcataagtagtaggaccttgctgaaacggtgtgtaactgactccagatcgcataaatttgttgttgttctgcctgaacagtctagcttcttcgccgagtgggttctgtggaggctggtttaattgcagtctggcaaacctcccagaggcccagccgtgcgtcccccttttgagtgccagagtcaaccttgctgagtgtggcctcaaaatctctcatttgatcgattcattcttttcagacttctgtgggcactcaccttgcttcaggctctgccagagtttttgggaagcgaccgcgggctcctgacttcctgtccaacccaaaccagtaagcccgaccaggaaatcacggggtttggatcagtctcccccgatcagcgcgctgcccttgtgttcagcgactctccaggctctcgtcgatgatctcgcttcccctttgtgtccttgcgtggttcttcctctgaacgccctctgtggaccagtcattcgttcaatttcaattcttcaccacgccagtggacgttttctccttctttccctctgttttcgccaatgatatttcgcttctgaaactgagccccctgttactctcgaacttgtcgcgatcaccgccgcattttttttttcagagaaagacgaggactcgaatcagtgctaaggcaggatacaacatgatcgggcgctgcggccaatttgcttaagaggttgaccattgagctgcgagcattccaacgaatacccagtaatacgctccgtgagcaaacgagcaacaccatgtccggcacctgtatttcactatcaggctcaacgcaatgcccagccttcaatgcgtcttcaatttccacgaactctaatctctacaccgatttgtacgtccgtaaaacaatgcaatgcgaagccagtactaaccatcgcccagcccgtttctgcgaaacgttacaaacttgagcgaattcgatgctgcccttaacagttatgtactgggctcatacattcagagcaagtgcgtttaggaacttggtatggaggcggagcaagttaaccaggctgcaggtattccgtattcctgggctgccagggcgatctctccaacgccagtgattactatgcgcggtataccacaagtgccatctgcagcggtttagtccagagctccgagagcgactgtgatctgtctgctgaacagtcacgacctctctgtgccgaagattgcgtgcgtgctgattttttctcccatccatgcaaactgctaactatgcaacaggcattgatggcttcaagcgaggaggagatcgtggttaatgacgagctttgcccggacagacgaagtgactatctaaaccagatccgctcagatttcgctgtctgcactggccctgacggttctctcactggttcttgcatatcggcggcagacaatgaacccaacgaatgcggcttccgatcgaacctcatcggtctatgcggattctgcgcgtccagcaccgtcaactcgaccgattcttgttgtgtaaatgcgaacgcttcaagtcgatgcgaaggagtagatctgccgaccccgaccacgtcctttattcccatatacacgaccggaacagatgcgggaaatgatacggataacggcttatcaggaggccaaattgcgggcattgtcataggctctgtggctgggttcgccattcttgcagttctcatagcgtttggcttaatctattactggcgacggaagcgtgaggcgaccgacgataactctttaaacaaaccgaacccgcaaagaaaaggatctcccatgcaacagcctgggaaccaagctttcggtgtcgctcctggacgtgtcgccagaatgtccgcgcttcgtgaggccccaagctcttctccaggacactctcgcagttcgggagccttccttggtggtagtgccaagtacagtgattcttccgactctgaaggcttcgcaagccctggcgccatcaacaaaaagattccaccgacaactggtaaacgacaaggttcactttccagcaattcggctctggctggcgtcggtagtgatacttctcctcgctcaggtacaataggacagtactcttcgccggaagggctgaccagtggacagtcggagcagctatcttcttttcaagattattactcgcaggacgacatccatcccggtgataaggttgcagtgctctgggcttatcaaccgcgggcgggtgacgagtttggcctagaacgcggcgagatgattaaggtgataggcatctgggatgatggatgggcgacgggtgtccgcgtacccgagagcgcagaagagtacgatgctagacatcgcgagcaacgtgatagcggcgtgtcgggtcgctcgcagaggacgtcaccagctccatcaggcgagatcaaggcattcccattggtttgcgtctgtctcccacaacactggagaaagatcattgatggtgcacaaggagatgatgaagtagcagaaagatattgatctatgcccggatcgcagcactgcttcttgtccttcttcatgccttgacgataacgcctttgatttttttttgtttcttcatgggaaggcctggtttatgcctccctcaacgccagcaaccttgtgattcagcaccacagcccccaacaaaccccatcgatacccaacgtcgctcgattatatacgcaaggctcatctgttgcctgtttacggcttcatttattcgccctactggccttaccactgtttgctactcagcaactttcgagacccctccggatgcgcccgagacgacctttcctttagcgcttttgtgtttatataccccttcttttcagcggtaaatgacttctttggaactgccattctcacgcattcaagactctacaacagtacctcatgctacttcaaccctcatgggttcgatatgcatttgtttcactttgttgaggaggacgagctttcaattgtcgaatgcgcaacggctatctgcctttggttcttactagtggcttgactaactttcttcggtacatatcgatatatgtacgtatatttagcttcatacctgcaatattatagatccaaattctccgccggttctacttcggtcaacagcgtaaatgtgatcaatccaagggcggcacggcctgggtctgttgaaatcacctgcctgaatagggcagcctcaaatatgtagacagttgcaggctgcacgtttattttgcagagtataaaaataatgattcaggggctgacagtgtggcattgttacgactgtcgcagcgaatcaagcgtggctggtcggccaccccactaaccgcctaacgcaagcgcagcaacttggaagtgagtgcccctctcgaacttcccccatccctctacctacttgtcttttgctcccaataatcctacctcttgaaataaccatttccccattcacatttaggtcttgctggtcagttggaacaccaaagttttatatccagcctctctctacttagatatggggtggagcaaaccaggcgagcaattacagctgacgtcgtctgccagtgcaaatcacatattgcaaagcctcactctagaataacaatgtcggtgagtaactgatacaatc

SEQ ID NO: 14657 - DNA, 633 bp, Emericella nidulans
  unsure (1)..(633): unsure at all n locations
agctacttttgacaactcaacctactactgcctcgtccaggagtagtgcttctccagctccgccttgcttgtacctacagtgctcgctgtctaagccaccaattacgtattgcccaagtctctcgcaacagcgccagtccgcccattcgcgtgccctgcggaaatagtgtttctgatctctttgccccagcccagtcgcaatattctttttaatttgtcttattggtcgtgaacgtgcccagcgcttcagcctttgcccgagtggcccgagaaccatcgtcgccttcatggtcttgagaaaacgagctcctccgcaccttcacaacctcagtcaagggaatgcccgcttcgaacttcgctcttcattctcaaaaacctccccgacgtccttttctctatcatcaacctcacctaaacgcctgacccgtcctagcagagcccagagctctccgcatcctcgtcgcattccgtcgcaggactctatattctcgcctgatctgaatacgtcgccagctttcgacctgatgtctctagagcaggcgcagcggtcctcgattcggacttcgtctaccgacactccgaatcctngggcggatgagctcgtcgataagtaacccagagctctcaggacaa

SEQ ID NO: 14658 - DNA, 2608 bp, Emericella nidulans
ttcgcggtcgcataatacgactcactatagggatccgcgttgactttttcgagctcattctggctgcctgtacgatagtcaccgtggcaggtctggtacagctgcgcggaaaaccgcgagcaaaaagacgatgcgtggaagggagcagattggctgctttccccgcaattgacgagatttgtgtgagtctaacgaagtatgaggatgcccgatgagtcaaggccgggaatcagacctgtgggggtgttgatgaatttgctaactgcctcattgagtcagcctgcgcatcacttctgatgtacatatccttcttgaatttgtgacttaccagaccaagacactgcggcgttcaatcgagaacatgaagctctggacgatctttggaaaatcttgcgatgacgtcggttccatgactaagcataataacttgactagaggattaaatccatatacaactggggggttataactcccatagatatagtagtctagagtacgttatcctctaatacaaaatatatatatatatttatattcgttgaaccaatattgcttcagccatgttgtgggaatgtacgtttggtatttgatgcaagactcgcgatataggagccgctcctatctggacagacattactccgacctatgcctgtagcccagcgagcttaaatctatttctttttaccacctttacctcccttgttaccacccccgcccttcgccttgcctttgtcgccgccaccgccagcgatcataatccgtaccttgcttactggtacggtgttgatgatctcagtatccttccatgccttgagcaactcaccctctttggcgcggagtctctctgcagcgactcgactaattcccagatcctcagcatgctccttcttaaccttgcccgttgtagtctcagccaaccatcgtcctagaatctccttgacggccttgcccttcttcactgttccaggctgtaacttgactcggtacttgtatcgaccaagagaagaccacggcgcgcatatcgggatagccgccaagatttcgtcgtcgacatgaggcgtccccacgagtgcaggtagccattcaagatcagccgcttcggcagcggcagtttcctcgtcatagtcatcagttgctccttcctcaaacaaagcctgtcgtttgcgctccgcctgggcggctcgttcgtgttgcgctttgcggcgcttctttgcctcttcagcttctttctcccgtttcgccttcgcctcggcttcggcggcggctttctgtgctttggcgttgtttgcgcccaaaagacgaagcgccagtgctcgttcctcctcgtcttgatccgcatatttggatgcagctttctttgctttgcctttacggccgcggactggggctggggcgggctttgtttcgggcccagtggacgttccgttagctgctggtgttgagcggtcgcttgcagcttcggacctcgcagttggtgtgtcaataggcttccctttgcgcagtaggcgtttttctcttgcagagaggtgtcgcttcccttgggatcgtggggtagctacgccttcggcgtcgtcctttcccgactggtcatctgcccgctcgtccttctcgtcctgtccttccgcctcttcgtctgcctcgccttggccttcattctcttgcgtatcctcttgttcaacggtacctgcgagatctgtaacttcttctttgtgcgtctccgcctcctgcatggtgtccgtagagggatgcaattggttctctgtaaaagttgcattgttgtctccttgctcgtcatctgactctgaaccttccgcttgttcctcttcctgctcctgcttctgttcctccgccccgtcagccttctcggaagcctgaataagcttatctgggtttccttcctgaacattagcaatattatcctcgcctgtcacccgagcttgcgaaacaagtgcttcttcagatctaaagctcttatggttgacgaggcttcccttgctaatttgccacattacagcaaagcccagaactagctgtgacggggcaaggaaattcttttcccctttgacaagaaattcgccaacaggtagaaggtcgccgacagcagaagtcttggatacctgggccgcatcaacccagtatgcggacataattgctttcgagtcccacgccgtcgaagtcgcaacacaaagattgcccgcctgtgatagggtcgttggggatatggaagagctcaacgctcctggtttgttcttgactatcattggcgtggcgccctccaggtcggcgtgtacgaatacgtcccccttccggagatatcgacggtagagcatttcgctttgcatagagtcgcgaccactgaatacgttactattagcatccacattttgtcgaggagataaacactaacccaagaactagatatccttccgaagagacgaaaaagaggaatttctcgaaccagaaaggcttcctagcaggtcgcaggacctgcttctcctgcttcagattacgcttgagatcatcctgaactttcctttcgtggctctttagcgcctttgcagaagattgtgatgttttctcagccttgaccgcagccaccttcttctgc

SEQ ID NO: 14659 - DNA, 1833 bp, Emericella nidulans
agcatgtcgaagtagagagacggattgtatggcgatgagaataaatccaaaaagagcctgctgaatcagtaaaccctgaaaagtccatcagcggagaagaaaacgtacaatcatcccccagataaaaaatggtacttcccatataatatgagtagtcgtctcgaaaccatctgctgatgttaagaagagccaacacgaggataaatattgatcaggggcctcacgctccgcaattagcccagcaatcacggcggacatatggatgattgctccaacgacaataacccgaccgacccagcgatgaaagaggttgaaagtatcaaacgaaattcccagcaaagggattaatgggttgttccgggcagcggccagcaccagcccaggtgtattcatcacagctaaatggcctccagcatacttgacctgatacaatttttcctggtaatcctcccaccagtcgaccaagcaaacaaagaaagcaaagttgatagcaatatacagtgcaagaattagcgtctctatccgcagcggcacagtccccatgtgggcgcgtccaatgcggagttcgcgactatgtcgggccccgaagagcggtgcgtaaaagacatgtctattcgtccaagccataaagccatttctgtttgtaaacggcgtctggtcatcgttcctgagaaccgcacggagtcgtaagtggtgccgcattcgtatcgcaagacgccccacgaagaggatcagaaaacctccagctagagcaaagaggggagtcgccagtgcgatattcatcggaggatgtacatggcgctggcgctcttggccaggtggtagcaggtcaactcccatgatctcaatctcgatatcgcgaatttgcggtggatgttgaggattgaactgttcaaacaggatacagaagcaacgaaagctgcacccttgggctcaatgaccgtagccctacgagctgatgtcgatctcgggttacatatacccttcccatgtcatggcctccgatagcagaatgtgatataacggggttcactctgcaagaaaacgatgccgtcatccagcctggttccagagccattgtcagccggaaaggtcagaaccgctcgggatcatcgacgcaatgacgcaattggaggttaggttgggcaaggattgcaacagaaagaatgtggggaacgacggtgaagaatgcgcgcgtatatcgggcttataccgggcttataccggcccaggcgggccagcttcgagagctagaacggctgacaggtggtgcctagaggctatcagtggtgcgggaaaataaggcctagatctcggatgtggtgcggtacctgaggttgtaaccacgggccggtgatagcaccgcaacgctgaaagcggaagtcagtccagtcgcgtgcatcaagtcccacgtctccagcttccccggcctcgcccctgaatgctatcttcgtcacccgtcgagcatggctcgtgccaatgttcctgtaatgattagcgatgacgtgtacagcacgcgggtgggagttcaggaggtggatgatggaagctctggaagtattggaagcaagccagtcagctgattccagcaaacgtcaccagtacggaaaacattaccggtggccatgctcttgctaatgtctagactgcgtgattgtaacgctgtatttctgtctctagcacgaagttagagtagttggctgaaaacgcaaactcatattgttgagcgaagatatcgctttttgcccataacgcccttccggatatacccacccagttcctatacaccaaagatctacagccagtgtaacacgccattagggatacattata

SEQ ID NO: 14660 - DNA, 307 bp, Emericella nidulans
gtctaaactaactcgctattagcttcttaccctctccaactacctctcctagtaggtgacttcctatcaagctactctaagatatctccgatcactctcaccgctaatagaactacttttgtcacataatctggtacatttataaagatatagcgcactacagacccccaaattcactaaagaaacatctgacatattatatcatcccgacggctcacataaacactgcgcatcaatgaaaccaagtaactcagaacatactaccattgccaaaacagtctgcatacctctacttgtttgttgcaca

SEQ ID NO: 14661 - DNA, 1911 bp, Emericella nidulans
ctaagagagaaatatgacatgatcctgttttgctaaaactcttcattggccgtggcagcgaaatgtggccaccacagacgtgataacctaatgacgtaagaatatatttgctacatcatcacctttattcctgtatcatacagtagcacacaaaattaggtgtctttcaacactttctacactacggtattcttagttgcactgggaagctgacatataatcgatcaacatgttgtgaaaaggttcctacacatctctggaaaggtaaattcactccagacctgggatggcttcttattgaagcaaggaggataactctgtttacataatcatacaagtgctctgtccagcagcaaagactgtttaatgtataagaaaatagaataatcaaattaagctattgtacaggggtaatgagaaaagccatcgcatgataatcggtatcataatccatcactcatgaaagatagggggtagttataagcagcgcatgagcccttaatggaatcgcccagtgctcatttcatgatcgccctgctgagcaacggcacggttcttggccacgccttcttcatcgccaaaggctctgtcaacggcagcacctaagccgccacggagagactcacccatgccctatgatgctgttagagggtggtgtctagatggcgcgggaggtaggacttgcatgaatctcagcagcggccccctttactccgctgccagcgttctcgccggtgcgggtagcggtcgtctggccagtgtggtgagcgctgttagaggccgtggccgagttgtggccgacaccgccggaggagtaggcgccagtgctgccggcgttggtgctggacgaagtgttgctgtggctgttcttcatctggccggtggtactgtcaacgcggggatcgagcttgttgaggaggttggaagagtggactttctcgccggtgtgagtgccgtgggaagtaccagcgccgctggttccggtggttccggcggcaccagtagcaccagtagcgccagtagcaccagtagttccggtagcaccggtagcaccagtggtggttccgtgctgcgtgcggtggtcgcggtcgctgtctacgcggggatcggccttgttcatcatgttgctgttgtgcgggccggcgttgctggaaggagcagcggtggtcgtgcccggggcgtacttggagcgggtatcgcggtcactgtcaacacggggatcggccttgttagcgagattcgaggtgtgaggcccggcgtttccagaagtcgcagtgtattcgttgccggtgctggtcgtctggggcgcgtacttggcgcggttatcacggtcgctgtcaacacgagggtcggccttgttcatgaggttggagttgtgcggtccggcattgccagaggtcgccgagtgtgtagtaccggtggttgtggcaccgggagtgtagcgagcgcggttatcggcgtcgctatcgacacgagggtctaccttgttcatcagactggagttgtgagggccggcgttggtggaagtgttgcctccggtatgaggaccggtaccgaagtgagcatcctcaaaggtcttggtggaagtgctatcacggccgtgggtgccagtgccggcaccgaaggtgttgcctgcactgccgtactggtcgctatcgacgcgggggtcagccttgttggcgagaccagagctgtgagggcccgcggcagaggcgccatgtgtgcttgatccgtaggtgccgtgagaggtgttgccgtactggctgttatcaacgcgagggtcgaccttgttcagaaggttggagttgtgaggaccggtggtcgatgtgttaccgtaagcagacgtcccaccgtactgggtgttgtcgacgcggggatccgccttgttggctaggttgtagctgtgtgggc

SEQ ID NO: 14662 - DNA, 1827 bp, Emericella nidulans
gaggataaggatcgatagacttgagtttgggttcaataatgctatctatttgggcataaggagactaatggtgtgggctcgcgataagagttagagtctggctctgtttccaatgcccttgtcgtgtcttacgtcgccttagcgacttattatttcaggttgcgcaactcgcgggctactttcctttcccaaagcactacgacgcaattcgctacgctggaaccctaatctcaaacttgagtcgcaccatgttctgtccatgcgccggatcgtacttcacggtcgaaggactccagactgagacaccgcgcctcgtccgctctaaagacgatcgagttccattcctgaggtcgcgcgcgccccttccagtgcagattcgaccgcaatcagcaaggaaagggttccagagagaatacgagcaggcacaagcaaatatgtatgagccaggtaaagtcccggccattttgattacaacaattccagaagagccagaggtgtgtgatgatcgtggatatgtttcagattgactggtgtaacaatatgtagtcagctcatcctcgaggccggggttatatgtgaattcctgatcagagtacggcataagaggttatcgccagcccctcggtctattagaacttctgacggacaagttcgctttcgatcatggaattcccgtggacacggacggttcagagattcagagcggacgaaaagttgcatgtccgtgttgaagttgggttgcccagccctatgcgcagttgtcgcgagcccctagcatcggatgttgtcaaagtccgtgtttacaggcgtggtcaaaatatgaacacaggccggtggaaggatactaagcagagaaggttccgtttgtgagagacgacattgtcgtgcgcgaagcgagccgaagctttcaatataaaccgcctcgaaaaagttcgaaagttgaattcaacggctcagaactgaattcgcgactcaggagtgggatacaccaacggaagagtggaattcgccaacccaagagtggaatacactggaccaagatgggcactcgctgaaccaagttaataattcaccaagccagcgctggggtcctgttggcaatgcgatgataatcgtcttttggctgtgcactcttcctggtaaaagattccgccgctctggagggaaggctgttggatgtcgttgatgttctgtcaccgttcatttgtgttttcgtttcttttgcgacttctcattgtttcctccaggctgtttcgaacgtccgccagatatactagttattgtgtcgatgtttaccctcttctgtttctctgtttgtcggggttttggagaatcgcccccatcttcagcttcttcagtcggtggctgcattttcattagtgtcagctcctagtgagaatacggaaacaaaccttagctttggtcttccttttgaagttgccataaagttggcggcccccatagcccaaatcgtcatcatctgcgtctaaagaactgtctgcaagtacgagcggctgagcaggctggtccacggtaacagcatctccaaaatcaagcacccattctgtttctcccgcttccgccgcctgccgagaaatggcttcccgccgtcgctcctcttcttccgcgagagcagctgagatcgcttctaagtccgacgagggtgcgggtgagattccgtctgcagcagagactctgcgttttttcggtgtagaatctgagagttcgctaccggacgcagattgggcagcctcttttgtagcagcactggcagcagctcgttgcatgaactacattgtgttagcgtaatagtatatacacggaatt

SEQ ID NO: 14663 - DNA, 2035 bp, Emericella nidulans
  unsure (1)..(2035): unsure at all n locations
cagacatgggggaatcagtatataaggacaagcttgcatgcaaccgcaagagagtgaggaagcagtaaaacaaaaacaagctcagtaatgaaatggaatgatccaaatctgtcgctacactgagtacgctacagcggtggcgactgcggaataacatgttcaaaccggttacgatgcgctcagcttcctgtaatcgacggtccttctcttgaacttcccgccgcagtcgtttgagttcaccgcgcatgtccacaccattctcttcatcttccggaaatacgatgacggggtctgtgtttggatcgacgtcgagcgattctcgctttcgcttcacggtctgtatggaggtggcgccatctaaatcagaagatggcaccatcgtcagatctggcgcgtgtccattctccgtatgcatgtggcgccggcggagatgctccttcaagttctcctgacgcgtgaatccgttccccgtgcttcgattgcagtcagggtaagggcacatgagaggcttcttggcattgacgttcttcttatgaacctcgcgctgatgtctcaacaggccaccggaatatgtgaacccctgtatcttatcacatccaggctctagacatttgtaagggcggtcgtgtttgtccatgtgtttgctgtaaggaaaagcgtgttagcctcatcctcgccacaccactaacaactcaagcgaaaggcgcacttacttccactcgcaaggacgacgaaatgtcggcgggtttggttgacattctgcatggtcacaaaaaatctgtccaacggcgttcttgggcggatcgcgcgctcgtctcaccgacagttttggacgagccccttccatgaaacttggggacaattgatcggtcatcttcggaacaccagctagaggatcttgcgcggcgacaagaacagcagtcggacccgtagcaccttcgcttctgggactgggataatcagacccgtcccccatgtcgtagttagcagtagaaccccgccgtttgagctgggggggcgcgaggtattgctccagtgtaaaagagtcgcgagacgaccaacgtaaacggtgggagagaagtcgagtattcgttagtgtgagcgagcaacgacggccgatagaaaattgatggcgaaacgcgttcgtatacttatactcgatggtaaacgagctaagggttgactgaataggtgcaggacccaacttggaaacaggtttgccgaaattttcaggtggtaacaaggcagaagccgtgactaagcagggcttggcacgccactcgagagaatcatccggaagcaacggatgacggcggggtgtcaaggtcttaatgtgtcactaactgcggtgacccgtcagggactggaacctatgttccatttattgatcgagcaagtcggcactgctgtcataactcattggcacagatgctgaaattaggctgccagagtgagtcattactccatcaggtatcggagccaaggctaccaacaaattattttgaggaatgctgccactcctctcaggcatccattccgccactagaaattgacactggccaatgaactgatagtcacgtggacgcagccaccaactgcactgccagcatgcctgcagcttcgccccttgtgtgtcgtctgtatccacagacataacacactagtggaccgtgagctactgtacgtcgaaattttttggagacttactactttcgaaaagtttatgcccttttttaggtgcccaagttcaccaacgtcggcggggagagaggccctgacttgcccgcccgatctatgcggccaaaagactcgcaaccgcgcgcaagacaagccttgatcaagctatgtccttgatgatcgatcactttaggcttattattggtacactgtttagggcccggtctgagaatgggtgccttgctcccaccagtctgtaaccgaggccgaagtatatttgttgatatgctcccattgcatgccttgccttatgcntactagcgtggctagaacgccatncacttaactggcgtaatcc

SEQ ID NO: 14664 - DNA, 2124 bp, Emericella nidulans
gctcatcgaggatcgcgagacgtcgctactggggactgtgaaaatgtgggagaagtggaatgggaaggcggatgaccggatacgggtttggttcggggcgaggacgccaggggggtatgtctctctcttccttttcttttttgtttctccttctcgctctcatacgctgctcttggatgcttagacgggctaatgggacggtagggtgtctgacgaactgtaccgcgaaatgacggctatctcgcgagagaagaatatacccatcacgatgcactgcgcagaggtcaaagccgatagggcattttttggctctgtgggacatacgcccatgacgtactgctcttccgtcgggctgctatctccgtccacagtcctcgtgcacatggtgcacctggacgacagggatatatccctgctgtcagaatcgggaacgcacgtcgcgcactgcccgacttccaacgccaaacttgcctcgggaacctgccgcgtgccagacctgcaaaccgctggagtgaatatcggtcttgggacagacggcgccccctgcaacaacacctgcgacctacttcaggagatgaagctggctgcaatcatccacaagggggcatcttatgacccaacagttgtttcggccgagtcggtgctggaaatggcgacaatcaacggagcaaaggcgttaggcctcgacagcgaaatcgggagcttggaggttgggaagaaggctgactttgtggcaattgacaccaggggggtgagcatgcagccttggttcaatccggtcagtgcggtggtctacacggccaccgggagggatgtggatactgtggtcgtagacggaagggtagtggttcggaatggggagttgctgaccatggacgaggggcagattgtcaaagaagcagagaggaggagtcgagaggttgtggagcgggctggattgggcgagaaggtcaggcccaagtggacggtcgagtgagatctggttggcatatagctgggtgtactctgcgagctgtgcgtgatcctctccggccaagaggccgaatcttaccctggctgagaattgtatgatccagggtccagcaagcggaagtttgctgcagaatccgaagtattggatcagggctggctcatccagcagagatatattgatcatgttatctgacaaaccagcgcccttctaccccgcaaactggataacaggacccagagaccagcgagaggggcaattggatgggagcgccagtcggccgatatggaaccctatcccagagaatagtctcctgacactgcccgcagtacccagagtacatcctggctgaaaaggcccgataaatgcccgtttggatgagatttgatgtcgatggagtcctcgaccacctctgatccagacagcacgtgactatttatccccaaagaggctagatcaatttccccaaaactttaatttctatttccccggcaattacgtaaggcataccacagcgaatcatctgggaacatcgaggaccgttaactttctctcgtccactttcctctttcctcttctcctggtgtcagtcggcctctgtctatttctcgctcttgactgcagtcacatcggccaattgttgctgtggccgctgctgcagaaaaggcaccacggagtacggctctctggctccaggactcggtcccgccactgccgtctcggggaaggggagagtgaaaaggccggtctcgccacctggagcgtctggagcgtggaaagcgtggaaagcgtggaaagcgtggaaagcgtggaaaccaacaattcgactttgctgatccaaggttcgccacgcggtcagattctgcctgtcaacctcctgactcctggtctattttcgcaccggattttggctgatactgctgttgctcagccccagattttcgctcctcatcaagaatgccgtcgaagcgcatgctcttcgctccaacgttgtgatggcgtcgacggacagtcacggatctcttaattgaaccagctccgtcctctcggcttcgctatggggaccgacctcacgcaacctcacgatggactcataggaggctacaaaggcgataatgcctccgtcaagatcgtcgttgttaccttcatcactc

SEQ ID NO: 14665 - DNA, 486 bp, Emericella nidulans
atctttgattccctgtcacgctgcctggaacaaacctaaatttaacagaagacgatctttctcttgatgggaggacacatgagcaggacctgcgggatttattgttgtaaactacactcgacacatacgggcgaaaagcgtatgcgctcctaaccttacctaggaggaagtgggtactggctagatcttgctggctcgctaccacaaacacacagagaccgtctatacgaccagcgtaacacgactgcataaacatactagccaaggacgttatgagtcacacgttatacgcactttctgtggaaaaggcacatctgtacatagattgagctgcgattcatagtgactgctaaactttctcttttaccctgggaatgagatgggcattgttacatatcgcaggcgctgtggatgcaatgactggcgctgcgactcattggcgctcaggtactcaggagggagaagcactagaatagacttatggct

SEQ ID NO: 14666 - DNA, 485 bp, Emericella nidulans
  unsure (1)..(485): unsure at all n locations
agtttctaagttgcttctggcggggctttttggntctggaggcgctaatttattctcgaagaatgttttataaaagctaggagggttggacttagcgacgggttcgggctgcgtgtctggcacctggaacgatatgatgtctaccatgctcgaaacctcgttctttatcgtttcgggaagaacacttggtatgtcccgccccgttattctcaggttgcacaagtacatggccaaagcaaattcaggaaacagtagctgaccggatttcgtggtgtccgacagtaccctatagatcataagctttgtttcagatacaaaggacctggcgggcttaccagatccttgacaagtcactgcctggaagctttgaccgaaggagcaggttcttcgccttgtcccctaaataacaacgcatatcagaccctgcgccatctgtaacagaacggatttaccccactaaccagtcattgcttgactatccccaa

SEQ ID NO: 14667 - DNA, 602 bp, Emericella nidulans
ctggggccatcgaaggtaccttctaactccaaccattagatatccacattgttcttcaaactccagtcggccaagccgggggaggtttgaaatgcaggcctcttagtactcacagggtccgtgagaggacctgtgaagagcagtgagggtgacatgaagcacagcctcgaagcccgtcgcatgggtcacccagttgccctgagcacccttgctctccaaaagaacctcctagtataacccagactcttactcacggggaacaatggtaacagcctccctcaattcctgtgggatattacatacaaagcgcagaatcagcttatctgttgattactctggcttctcaagctacttcaaccgtcgagaccgctccaagttgaaaccggagaagaagcctctagctccagcagtatttttgtcgacaccattctgatgctgtgatgtcttgaggaagcttccacactgaagatttcctatgaagtcagagccgtccttggtcctactaaggggggggcaaaccctgcgctgaggatgggccctgctccgccacacgcatattgctgcccgagatctacacggttctcatggaggacataactgcc

SEQ ID NO: 14668 - DNA, 555 bp, Emericella nidulans
acgcggaactgcaaatgcttgaagccattcaaactcattccaatagtggctttctcagaggtgggtagagaactgggtcaagttcctgcgactgcagtattaggctggggaacaccaagacccgggttagagatccgtatgctagaggccgattcccagggtttgatcagcaggttgctcaagacgacaccctctatatcgcctcacgtttccccttgcatccgtatcccatctctcaaatttttttctaccttcttattaactctacttaccctctctattgttacctacttttcccccccaccttccttccccacaaccctttccccctcatctcctccttcacatctacttcttatccttcttcacttctttccactcttttccttatccccttcttccttctactataccctatactcccactttcccatcttcccttcccccttccccttatccactctcatactcattcttatcccatccccccccccctctctcctttactccttcccttattcttctccacattaccttaccctccccaccttcatc

SEQ ID NO: 14669 - DNA, 593 bp, Emericella nidulans
taacactcctcgtaacccgtaagcttatcatttgatacgaatatttaggcatcctgagaagcctgttgtaattgatagattcaggctagcgagctgcgcggttctcataatgccctcgaagatcatctacctctttctgcagccgcgacagatccgccaggatgtccttcgcatttgatggatgcggaacaaaattctcaggctggcctgtgcggtgttctgaagcaacgcttcgaacacttgttattatcgctattgaggtttggcacttaaagcttccttatttcggctctatgttctcttcttacagtcttctttctctctctattgacatattcttacttctaccttgttaaacacctatctacctcctctcacccctccatctttctctttctttcacttctaccttcttttatttcctgtctctccctatcccttcccttttcctaacttcactcttttactttaatcccttctcatcctcctctctctctcttttatatcccacaattctcatactactacttttttactctctcacctccatcttctttttctttcaattacctacctatttatctccttctcct

SEQ ID NO: 14670 - DNA, 1271 bp, Emericella nidulans
ttaatcctctcataagatccaaaatggcccgatctcaataggcccactcccgttgatgacactcgttagcgaggccagcaacataaagcccagaaagactagcagtagactcaagagagctggacacaaagctaagccagcctaaagttggcgcaaagcacaactctcggagataccggtcgccgctttcaatagtgtcgcttagaattgccgatttcaagacaatccagcgcgagaaagcgggcctttgccaccaagctcgcgcttatctactccacttggctggtgtcaggcttgtatagccgacctctgattcgtgctggaagtgtataatgtccctatatacatagatactcacgatatctgtcgcttcaagccaggcagtctctcgttcattctcaaggagcgtcatcgcatccgtccactctttacaccctttcttcctccggcttgtccatcatgcggtccattgctctcttctttgcattgttggcggctcttctagtccagtcctcacaagcctcggtcaacgtggtaccagcactagggttgaatgctcgcccatctccacgaaccttttgtccgatgcctcttttgagactggagaactgggcgcctgtaccccttggtacggctctgcaccaggaggagttccttcatcctatagtcgaaggacaaagtgtagctcgtgtctactgtcagcccggtgactgtttgccgaatggaccggtatggggatgagggagacgtgattgtcaatgcatattcgccggcatctgaattgtcgctaaccacggtagaaacgccctgcaacctgcctcatgtacctggaatacgataacaaccgtgtcctgtcgtctggatcatacagctacgtccctggcgtcaccccgggatggacaaacatctctggaaccctcacagcctcggccaccgaacacagcttcgtcatgtgggggtactgtggcactaccaccctgcatggccccgtgctggagttcgacaattccaggttcgagcgccccttggtagacggggaacccaaggagagctgctcgacactgaccgacagctcgaccgtcacctacacccctacccctacccccagccctaaccctacccatactcctacgccgtcccctttggcttcgaccattgttcttaagacaaccacgccgggttttggctccttggttatcaatctatcttttgcaacgacaggctcgtagcgacttccttcctacaccatcaaaaggccggcacacgggcct

SEQ ID NO: 14671 - DNA, 792 bp, Emericella nidulans
  unsure (1)..(792): unsure at all n locations
cgttctcggcctggctgctgcgggcgtagttgtcggggacgtgagtgtccgcgtcgtaagcagcaaggaagccgtcactcgctacaaaaagagatcagtatcttctgtccgttcgggctaaagggtatgcttgatcggtaaagggcaacgtacagcttaaattctcaccaaacgctgcgaatccgtccagaccgtgcgcggactcgtggatcatcacatcgacgttgctgccggttgtgccaaagaaggcgacgttgccgttgatggcgaaggctgaattcgcgccgggcatgaggaggatctggcggacctgcaattgttatctgttagccttttttctttatattttgtgggaggagtgagcaaggggcttggaatgaggacggcatacccagtctcgtactttcacaggcagcttcgagaacgtctctgcggccgtcgcgatgtctacctcgacatccctgtgccggcagaagagccaggggtcggcgcactacacatatgtcagcaaccgatataactttatgagagttgtgtttgaagaataaccgtacatcatcgtatgtaacctcataaacctcaaaatcactcgcattatacccctacncggatcccaaatcctggcagtccttgggaatatacccgcttggccagacggcgatgtgactgttgaccgtggcaagttgttggcgttgccctaaggagngtagtccaggtgngacgtgagagcaggcttgtcgagctctgcgcgcgngagcgtaaggaaaagcgcggaggcagcggaaaacgtga

SEQ ID NO: 14672 - DNA, 5340 bp, Emericella nidulans
taagccggtactaaaattaaaacacacacctcttggttagtagtatggtgggtgaccacaagcgcagctatatcaacatcctgccagcatcatccctgactcttggagaaggttggcaaccagttggatatcggtacgattgttctctaacctttagattcgagacataaattacctgttgtggctattcgttagagaatagtcgcctaatatgacatatcgtcatcaccgcccgtcagcacccaagccatctatctagtgcttatatagagtgccgaatgcgaaagattcaattatcaaatcagacgggagacctattcctaagaaggagaatagaagctgcttatatgactcaatctgtatacttaggcagcctattgccgggaatacttaacatgagggagacaactacggtaacgtaatttcaccgccggtccgctcactctataaacatgtttatatacgatgaactgagcagagatagtggtcttcttctatttacaacccactggatgctttccatgcctactagcagggagggaggagggacggatttggtctctatagatgctgataacctatgcaacccccagatcatcgccgaccagaatgcatgaggcctcaactaaaatctatatgtatcatagatagctacaggaaagttgccgttaatgacgaggtatgcattcgcgcggcgattgtgtctagttctaacaagcttcctaccatgggcctatgcatccaggcttaatactttggtcgtcagtatctagatctacacattagcctcccgctcagtcttcccgccccaccagtgctcaatcatcagcctagacccgtcttccacctataactgcaggtaggtctgcagaggctctagaccttctagtcttgtgccttgctatatctgtcctgcctaagcacgagccttgcttgggaaaaacttacgctaatatactggcattaaattagatccagtagcctaggtatagtgattaagtcagttcaggtacccaaagacgctccttgactgaaagccaaataaaatgatcgaggtggtaggccagctcaagaaagcctaggcttggggtggaagggcttgaggctatcaggctctgaaacgacatcagaccaaacggaatccatgattgctgcaataaacctccttatattccagcaataaatgtgctcctgccggccgggacaaatctccggtcattgtataaaggagttccttcccctgtgtgaggtaatactcagtgtaatgaactgtgcagtttctatgaagccactgcaatctgctgtaccattatctattcacccattacaagtctcagcgtgaagcgcagccagtaccacgaggtgcctctcagcctacttatcaaacctagaaagctccgtagagttatgtttcggtaatagcaaccgctaacacctgtcagcccaccgaatgctcacattagagtatcagccaacaaataaggaacatagcaaacctccttaccggccaaccaaaatcggcaccataacctcgtcgaatgaagactgctccagtcgtggcacatcatcacagtctgtatcaatggctgttgttcatcacatgcggcagctagccctatagtgagtccatcaaacaatgcaatatcattgttagctggcattcaaaacacgttttgactaggccttgttcaagctggtgcaaagccgataatcccaaagagagcactcacaacaaagggcttgaaaggatctctaacaaaggtcttggtcctgcttgtctcttgggttataaatgaattgcagccctgccacactgacaaaacaattgtcaaactaccgcaaaagactctcgagactaccatcagctttaccaataaccatatcactcctctcactacattctggggtctaccatcgtggcgggtaactcaataatgccttttgcaactccgattaagacgtcggcgggaattactctgccagtcgatctcaaggaagcctctgtggagacggcatcgatgaccaccgcaattgttgcgcataccttacgcggtatggactgtatgagctataagataagcacaggatttgccgtcggaagcaacaaaaagcttgacctcgcgtcgaataaatggtggctgcttatatcctttgatacacccaagaacgccaaaccaacctgggaagaagatataatacgtgacctgatgaacaggctgggtctaccagtttctgaggccattccacccagtgaccgtgatagtgccctattgcaagctcaaaacggcgagcagtccagtcgcatggcgagaatcaggtcaaagatccggactatgcagcagacatcccgcctcaacagtctgaaatcccgtctggacagcctgacgcttcatcatgaaaagacagtcagggtgtacgacgatatacctttccttcttagttatggggcgcatgatgcagattttgctatctacgacgaattatgccgtcatctgcaggcgggtggtgagaccagactctgtggtttcgcctttacactgagggagctccaaacctgggataagatagacgagagactaggtattgtttggcggtccaaaaagtccaggcctatggcgccccatcgtattcggacggcgagtatcttaggactttagggtagaatcccccaactaaccgagggtctacagcagattacagagctcggtgcaccatgaataggtgtagagtttgactacagccttgaataattcttactcgctggtatttgttagatcaattttccccatcattctgtattgttgctttgaatgttgcgatacttgctccttactcagaccattcttgttccaaggcggatggaggaagccgatttctcaatcccggtaaactctcacttcatataaccagttccattgccatgcaaaatcagtagatgacaggagtattagtattatcgctgaacccgaggtaaacatcatgaaataaactaaagcaaagcaggagatcccgtcagtagcagtgataactcatcaagaaataacacgctatagtatgccatgccagaaaagcatgcatgcatgcacgcaatcaatcgaacttctagagcaaaatcgtaaaaccagcgaagaatccacctagcacggcaaaaagcccatacacctgcctcaaatccgtcacaggccttacagcagcgccctcgtcatcatcaggcaggcccgtgaagggcgcgagagaagaagtggtggaggtagttgtgctcgtcgcggtcgaagacccattggtagaagtcgtattgacgagtttagggttctgcgcaccgcatgggttgctggtgcggcaactgtcctggcagctggagtcgccttggctgcaagcggccacgcagttgttgttttcttccgtgcagaggaagtacgggatcgtttgggagtattcggaggcgttgggggattggccgttgtcgcagacgcagttataggctagcgtgtcctgattgcaaacaagagttagaggttagtttaccaagtcagatttgatagatggtgattgtgtatctggagaaagtaattggcaagtcaacatacatcatcgcaggtgttggatgttgggtcaccggatgcgccggggagctgcaggcagagaagagggcaggaggaggtttgtgctatgcaccattgctctgtggagattgaccgttagactactgccaatatagacgtatccgaaagaggccatacttttcgtgccatcgtcgaggctctggatatctaccgttgttgtactggcatcttggctgattgcaaggccagccacagaggcgaaagcgagcacggagcggaacaggaccatttggatgatctggtagcgactgtagagaaactatggagttcacgaaacttggtaaggagttctatccagaaacgagagaaacagagcccccccggagaaagctcgatgcgaatattcaggtcttgatagtcgagaagaaccccgaagcgagtggagacttgaacgaatggagtctggggtaacgactgaaacagttacgaaaggacgcagctgatccaagagggagaatcagaaagcagaaaatcacaaaggaaggaaacgatcgagccggagaccctgaataagtactattgagtgtcccactcgtgttactcgactagcagcgctgggtggcggcgctatcaacctggatcccttttagctctgctccatccccagcatgagttagctgagtctggatcattcgtcaaggctctcaaaaatcatgaatccagcctgttgcaaaaatacgccgagccgcatttcctccttctatttcctgcagcgtcggtatacggcaaacttgcagagtcactgagccactcggggttggcaggccgtacttcgtataggggtaagagctgtcagaaaaaagaaatatgtcgatccggggactaactaaagctctgtttcatccaaatatatgaagggtgctcttcccgtcgtcttccccatcaccgcacgacgattctacatcgagggcttgaaactttacaacaaactggatgtcgtacgtggactccagtagcctcccggattctgtgagacactgtcatcctcaattcggtaagacaggcaaatagcatggatgcgattccgaagcgacatgccatgatctctgcttgacttgccctctataatacgcaaactgagactggtgtcaggcattgattggcttttgacgaaacctaacgttgagagtccgtactataataacagccggtaccgacgaagctccacaaaacgctcacatggtgctggaatgtcttggaaagatgcggacgctgggccctgcccgtcctcacagaagaggattaggggtctggtatgtctgactcgaagagtctctgactggccgagccggggcttggctttttctagtgcgaacctcggtctccagctccaggcctttccctggagctgctctaatttagctttgtctactctgtactgcgtagcatttttgctttggtggctcgcttctcttatctgtcctcgtgatttgaccgacgagcggcagtttcatccgaatatccatcgtgcgaagccgtacgaatacggtcgaagacggccgcataatctccgccacctcgttcaagcctttgctattattatatctaccttgcgatgaggagacgagtctggaggcattatcacaggtgaacggcggcgttcccgttcaggataggcgccttggcagtctgcattcccgtgatctccaatcccgcttttgcttcattatccagctcatgcggtggcatcaatccacattcaccgtcagatcatgtc

SEQ ID NO: 14673 - DNA, 3080 bp, Emericella nidulans
cctggtgcagggcgttcaaaattgtacgcacccacctacaacgggttttctgaggtcagcgtagcaaaaggcacttcaattaaaacccacaacaaagagttgggtcgtaatatgccgaacccaagatttggggtcaaccatataaagggacaaaacctttgcacaaggtcttggcggctatcacactgtgcgcgtctcccgatcgaagggtacaggtcgacgatcgaactgtctaaaggaaaaccaagcgtcatagatatccagagtttttcttgtgacctgaacccaagatcccggtagatgggaggatctcgcgagagttggtatttagccaccgccagccggagaatgttaacttgtccaacctctccagtagagccagttgtcgattccgatcaatcaaaatcgaagagcttccagaagagcagtcattcgggtaggctcagcaggaaaaaatgcagtccggcaaagagaaagccgatcgttgcaaggcaattggaatgttctgttagctgcttactacggtcatatgctaacgtgtcttctcggaagactgtacaaaatcagaaacgcgtagccttgacagtgagtcggtcgactggaagcataccgggactagttccactagtgtcgacttcttcactggcgaagctctcgttaatgattggcgtccaacctacgaagatgctcactcactggagttagaaaccagcggtgtcacagaagcctatgtagaaggatactcattttagttgcgtcgttagtatttgggagctgaacaacagagcactatatcaaacatgtcttaagcagatttcaggccttgtattcgtgcctagcaacaagttgcgttctgagtagcactagcacatattggccaaaagggctgacctagtaatccataataattgtttgatgtagagctcacatcgatagactgaaaccgacagtcgaacacatatttatacagacagaaacgtagcacagacgaacatgttagacgtatcatctcacgtgatggtgtgcgacaacagcctgaatcagtctgagccatgttcttttctcttttccctgcactaagagatcatcgaatctccatcgtcgagttttcgcaccagcgacaaaagaggccacttagtgatatcatcacaagatgctcggagacggtcaaatgccaaaaccgaagccgctaaacgcggggttcgcaagctctccccaatggggtatggaactgccctgcctaggtattctcgaacatgtgctcatgaaggctctcgctttctccccacgctgaatggccgctctccataatctttatggtcaatgctcataacccagtggagtcatggactcatggaatgtttcatcacataagccattcatgtctacaaatttcgcccattccccgctgtcgcaagctgcagagaatgaagtacgcccgcttctctgaaaccatatctggtcacggcacatcgcgcttgtcggctcaaagatgattgaagagctcgtgagcaagacaacgcctggacaggcggtcgtgtacctgcttggggcattcttcctcgcctgtttggctcgcaagatccaagtgcaatggcaactctcgcgtctgggtagcagagcccctaagataccgtttcgtcttccatatggtttgttaatcccctcaatctctagaaactcccatgctgaccggcgactctcttcagccatggacttcatctacaagtccatgcaagcgaacaaatcggaccaggacctcgagtactttactgacgttatgagaaacgccaaaggcgcgcctttggctgaggataagaaaacagtggaattggatgctgggatctcaagccgtatcatatttactcgggatccggagaatattaaggccatacttacgggacagttctccgactatggcaaaggcgagtccttccatcgcgactggcgcgagtttctgggagacagcatcttcgtgaccgatggcgaacagtggtctgcctcgcggcatctcatccggcctatgtttgtacgagaccgtcttgtggatacggagatatttgagaagcacgttcaacatctgattcccctactggctggtaacaacgaaagcaaaattgtggatgtcacttccctgtttttccgctataccttggatgctgctaccaactacctcctcggtcaaggaacagatagccttcaaaacccggaaacagaattcgccgaggctttccgctacgtgcaacgccgccaggcacaatactttcggctggggtaaatttgcctatatccttaggtcgactggtgtatgctgattcttcataagtgtgttcaagttcgtgctctcccgaacagaattccgtcgccaactgaaggtaatggatgacttcataaaaccctacattgaccgtgtcctcgccatgtcgcccgccgaactagaccaaaaactctccaaaagcgacaccttcctccacgcattggctcgcttcactcgtgaccgccgcactcttcgcgaccaactcgttgccatcctccttgccggccgcgacacaacagctgccactctatcattctgtctctttgaattagcccgcaacccagaggtcaccgccaaactccgcgaagagatcgcatcgcgcctgggcctcggcgctccgcccaaaagccctcttacacggacctcaaggaaatgaaatacctcaatgccgtcctcaatgaatcaatgcgcctttaccccgtcgtcccattcaacgtccgcttctccgtaaaggacacaaccctcccgcgcggcggcggacccgacggcctcgcccccgtcgccgtcagagccggcacccgcgtcgtctattccacaatgattatgcagcgcagcccagaaaactacgatcccccatctgcaccgaactacttcgatcccgcgcaatggaacccggagcgctggctctcgggatggcaaccgaaaccatggcagtttattccgttcaatgggggcccgcgaatctgcattggtcagcaatttgcgatgattgagatggggtacacagttgttagaatcttgcaggcgtttgagcgcattcagg

SEQ ID NO: 14674 - DNA, 596 bp, Emericella nidulans
ctgattttgcctcgttacccgcatacggctgtgcagcgattataatgagcttcggggtttgctgcaaacgttcaatacggcgccgccggctgattcgttggccagcgcgaaaaaggaaattgatagtgtgagagacattatgacagagaatatcgaaagagtgctagagcgcggggagaggatcgatttgctagctgataagacggattggtttatgaaattattataatttattataatatcatttaattttattcttatttcatatataatttatttccatatatatctattattaatttataattataactctttaaatttatataataaactaccatctatcatactaatatattacttttatccttttacacctaacacccatatcattcattataacattaattcatctttcataccttactcaatctatctacatacttctatataatatcaattacaataataacactcattattcaccatatatcattatactttattaatttctacatattttaatttatgctattcttatacaatcccattaatcaattatactatccacatttctctacctttttctatcaatt

SEQ ID NO: 14675 - DNA, 553 bp, Emericella nidulans
ggaacactaataaaatgatggcctatgaccagagggtattatgaagaatcatggatgctattcaccttactggattcctaggaagtaatatgaaccaagggatataaacggcgagcagaagatgatgtcgtgcacggtgggtagggcacagggggagtggacactaatacagcattactgtatatacctacgctatgatataaaccttcataagggacttgactagattaatcgagcttcgtatcgatatagccacgactgtaatgaggagcattgatctagttgtacagagacggtcatggtactagagtatgatgctaagaacaggagccagacagtactacgatacaactagtgactcaatacagacgtagcttcctaataaatgggatactgatggcagacatctgtagcagtacgacggatggtgaacgtatcgaggacagactttgagtacaacgatagtataggcgcggaataaggcacaggatcgatcttaacctgccatagacctttggcagagataggcaagtaccatccgtggaagaatgag

SEQ ID NO: 14676 - DNA, 886 bp, Emericella nidulans
gttcttctctccggcgacagacacgagtttgccgctacgcgattccctacagttcctgaatatgacccactcgtcgactccgaatctcaatcgccccgtatccagaaccaagaagtcctcgaatccggcgaggatcttgttgaattctgcaccggcccattgagcatgttttacgttcccgtacgcacatactaccagtctggcccggacgacgttcccattaagtaccttcccgatgggaacacgaagtttggcctcgtggagatagaagatggtgttgtggatggtgtgccaagctctgtccttacatattcactctatatcgatgagaacatggtttggaagtacaggctaagtgtgccattggctctgacttcggaagctgaagagcctgctgcgtcggcagatgcggcagcgggaacttcagctgcgggtgcattgcttccccctggggaagttttggttgacaagacggtcgatgggtgggtggatgtcattgctaagagagtgtttgggtgggatgtgatgagagttgagcatgccagtaaggattgggtcgtttgaatttgggaaaatatagtgacaaacgcgaatataagtacgtataaaagtagttttgttggttcgatttggaaaaatagatatacaagaatgcgatggcgtgaggatgtttctgggatacaacaaaaagagagattagatatgcgccggacgcctcccatgcgaagataaacagccttcatcaaaatcagatcacggaaggaattaaatcattatcagtaaaaacaaggccaaaatggactaccgtccccgtccccttccaccacctcccataccgcccatcaacccgctcatctggctcatcatcgactgcaagtccatccca

SEQ ID NO: 14677 - DNA, 2286 bp, Emericella nidulans
gagatgggtaaaataggtgatgtaaagttcaagccaaaagaagagggagaattttgagatttatccggaccccagaatgtggccaagaataatttaggaaaataggcaaaggttaaggttccggatttgtaaaaggattcatgccagaatgggggaatccacagccatatcctggcctgggtcgtcctccggtaccagaccgggtgacacctcgcggtaaagctcatttgtccttcctgcgctactttttaggaacacgggtcaattcaccataaagtagaagggcgtccataagtggcttaagtagaggcattaaacaggcttgcccatggaggcccgtatgtattcgaatttaacggcgggtggttatgttctgaagatttggaatttcgcactgcgcctgaaataaggcggcgtactcatcgaatctttgtcttcgtctcggtccctccagtaatgaagccatcatggagccacggactgatccttagagaagcagatgactccatcaaagggtctttctacccgcagtatctccgccgcgatatccaggctctcgagtaacccacgcggcggatcgtcttcgaacagccggaaccaagcgtgcgtctcaatcaggtctggatctttgaaattatctgatctctcgcgctggatttcagagaggtagtcgagtctatccgagactttgtatgcaatcgggccggttgggaagaagaaggttgacccgggatatgcgcgttgaatatgttctcgtagccggaccgtcttcctctcgaagacggggcccgtctgggtgtgcccgtgaaagaagaggatgcgcatctcgtcagagaatgcgcgcggtatggtaggtggaatagttgctacagtagacaaaggtaatagtggcgactgccgtgccggtatagaatgaaccagggctagtctatctgacttcttcgcagcagcgctccagccacttggcgtgaatgataaattatatctcccaaaactcccacttcttgtgtcggcgctgtcagccattgaaggcaacctgctatattgctagcttagaccttgtattcgcgcctgctcttgcatcggcaataggccagttcagtactatcttgaccctactcaaaggatccagccaaggaaagcaactaaggaaaggggcttgccagaagcaaaaataccatacaatataggccctggtgtcctttatttttgcaaaaaccgcataccactcccgtcacgatgcgccgctggttcttgtaggaccttggccacaaccacgccggcgacaagggtagatacgcagtgggccatgcggcgctgacatcacaaactgcgccattgccattgcatgaaggatctggccttccaccgggtactctcgatgcctactacggagggttgatgcgcagtactgtgaccgcatcaagacatttcaacggccagccgggtcagctcagcttaccttggtgactagagagtttcatcattctatgcaatcatagcctgattctacgtttttaactgtcaccgacccacctacgtgcaggctgcagtgagctctaggtcctttctgcctcgaggacccaggtgccagaaacctgcattccgccatgtggcctgtttattgcacgacgtcctttgctctcctggggccggaaagctgggtgctccttactacaattaccatgcaggtaccactcatcgacccccacttgcacctatggaccctacagcatgagctgacgcacattgcgacgcacattgcaggagcccccgccaacaagtctcagcggaatcccatacgcatatggtggttgaggctcacggtttcgcatgcacggtgtcgcaaggcttgccactcgagttaagtgcccacattctattccatatacccacagccaacgactgcctacaaaactcgaatttccggattaccgactttgataggtcgtttcgatactgcagaggggctggaattgaatggctcatgttgatgacacagagtatctagaatccacaagtgtacgcgagcggcaggggccggtaagtggccgttatgcttcggcactaaagatatctgttacgggcttcagggtgcccaaacccggcttcccaatgtatgatcttaagtactttaggcctttctcaataaacaggctgttcagttaccccttcccgtgtccaacccacattcgtaggggatcatcacccctttatgccttttttacttccctcctatgctcttccccccacagttgaccctcttctccttacgccttcgccctc

SEQ ID NO: 14678 - DNA, 1909 bp, Emericella nidulans
attcccgctcctcttccccttatcttctccttttattcgccgacctttctttttctcttttcttagacctatttccactacatcttgtttgccaggagtcaatgttattcttctgtctctcttgtctcgtccatctctttttcacacccacacatctgacttgtaaggtgctatgccatgaccgataaaaattgtggccatcaacctacggccgttagaatgtctcccctttctgttctccctctgctgtcagtgcatggagtgctctgatgctctgatattctgatattctgatattctgttcgcgggtcgagctagagcgaatacaaatatacaatccatcttaagatataccaaaaccacacatgtacatgtatacatgcacgcttgaagtttgcgtagtaatgtatagcatctgcccgtcctgcccatttctgtttctcattatagtgtgcgtaactgcttttgagttgactgatagatggtgcttgatggtcctcttgccttcctcagaagtcgagtgttcgtcaaggcatgtgaatagtgcgatgggaaccctctaaatgcagtacccaataactatcccattcatgctggcgagaatttcaacatatatatcttatgtacatctgggaatttgtaatgcaagccgagctaagctcattctacaaagtacccaaccaccactggtggcatacacaaatgactctgtacttcgtaatcaagaaccatatgaagagaaaagacgactcatggtcatttcaattattgtccaactataactgaggtgacataactggcagaaaaatgagaaagggaagaaagacataatgcatttcaacagaaccatcacatgcctagatgggctgaagatggcgagagactctagctgatctgtacggtcttcttggctcataaggtagttaaatagacatcactaacgcaaaaatagagggagagagaaaatgtacggaacagaggggggacaatgctgaggaaggatgcagggtgagagtaggaaggagggttagaaaaaaaaaatacatttccacacgcctgttccgttgtcagagacaaaaaaagctttttgacgagataaaccagctacatgacttccagcaaagactcaggattattgagatcctactggttttgttgctgctgtttccatctaggcacccacttcccaccggtaccgctggcaagaggtttgggttcttcaggcttaggggacgaagttggcggggtttgtgtgcgggagggcggctgggaggagcgctggctggggggcacgtagcggttgcccgcgggaggggcggcgtcagagccaccgcgagcgtgagggggcacgtagccgccagttcgtcgtggaggctcaggctcggccttgggcgcctcaggggcagcgccaccggcggcttccttagcggcttgacgctcacgccagctagggccaccgctagtgcgaggagcaatgttaagacgaggagcagtacggacttcagactctgtacggggaggctctgagaggccagctcgcttggcgcggaggcgagcttctgcttcctcctcacgctgtctctgcttggcggcaatttcatccattttactgtgatacaagttaattggggaatattgagtttgtgctttgggtggtactgacgctctctcttcctcacgtttggccttctcttcggccaggatgcggcggcgctctgcatctctagcagcacgttcctcctcctcgcgcttgatgcgctcttcttcctccctcttggcacgctcggcgttttcgcgctcgattttctcgcggcgtctgcgttcttgaacatccttgacgcgctgcttcttcttggcttcaaactctctctcggcggccgtgcgacgcttctaaaactcctcgtgagtt

SEQ ID NO: 14679 - DNA, 519 bp, Emericella nidulans
gtgaagacgacgtttttttgggcacgccaggcgactcaccaaacccattggatatctcctgtgattttaaggctacaacgttgtattcacacatggaaaaaattcaacgacactgaactcgtatggcgaggttcacacgtacgagtttatgagaactagtgcattccagacgcacgtcctgggctcgaggcatcgtgaatagctgctgcagcatgtgcacggtggcttgaatagcatctgcagagtatgcgcctgaatgaagacaagggactcaaggaatccgagaacaagagaatcatcatgtgccgagtacatcatggcggtgtcctgaggacgaccgtccaaacagagtcgtataagacctcattgcctgtggaagacgataacactgagaacccacctatgatctcgatcgcctacgtggtaggagcctgcgtggtactagttaggatatactaggaggagtgagcttcatgaggcctgcttgcaatgcagctggtaaccttttgaatagggccg

SEQ ID NO: 14680 - DNA, 1581 bp, Emericella nidulans
ctaaaaaacgaccgatgctatgttcgtagatatctttagtgctagagcagagtagcataattcgtattgacctcactatatcgacttctacttttcaaattccctcatcaaggactgaaggacttactgatgccagcccctttagataagcctgtaagtggcaccgagtatccgcgaggatatcgtagccaaagttatggtcccagaattcctgctggttcgatggcaccttgacaccctcgggcatatactgctgggcacgttcacggacctcaaagacacgatcttgacccgcgtccgacaagatttgcattgcagatacgcgtcgcaaccggaccttctcaaagaccttgaggcgatcgtggatctcgtctttcgtgagcgggtcctgtacaccggcgaatatctcgcctagggcggcgccgtcctcaattgcctgtgctcctccttggccttgatctgcgggctggttagagatctggccgttgaaaagatttgcgtacggtactaacgagggagcatgggatgtgctgcgtcaccgatgagcaccaagcgacctttactaagggctgaaatagggtcacggtataagagcggccagcgtttgatattcgttgcttttctgcttttgttagcaatgaaacagtgtcgggaccaattttgatacctaatgattctcactacattaggatggaagtcttgaaactgcgctacaacatcctctgcatctgcagaacgatcccagtctatccgtcttgttagcgaaataatcctgaggttttcaagaaagatctaccttctcgctcatcattggcccgccgatcttcatgtatagcgacaaagttctggatcgtgttactggatgttgaaagatttgattagcacagatcataggaattatcagggagccctactcagcacacgagtaccagacaatccgtctcatattctcgttcgtggaaagaaacctcgacagaccatcctggacactcaaagggccttccagcaaggaagcaatttcggggttcccctcgagttcttcggttggaatcaaccagcgaaagacagcccagccagtcgcgaccacaggggtggggtgaccgacaacatggcggatggccgaactatgtacgcgtcggctgccaccagcaggtcagcataatggattgattcatctctaagcgtgatagatccgttttccgcattgtaatcaacgacttccgcctgcagaacgagctctaccggcttccctatcccctccgggtcgacggcgactcgccgcagctccgaatggaggtccacccggtgagccatcagccagggaccgccgtaaagcgaagcgaagtcagggtaggttccggtgaagttagtctggagggtgattccggacgctcgcagatggctacgtgcggtgaccattcgcgatctcttgaagtcgaaccccccctgcgccaggacttggaacgcgttgggacaggcattgatagccgcgcccacctcgcgacgcagcctggaccgttcgaatatctcgtcgacaaacaatcagctggattgggatcagtctcagagccgctggccggg

SEQ ID NO: 14681 - DNA, 548 bp, Emericella nidulans
acctaacaccgacatactaagttatcgggaaggcagttaactcagcctcgtttgtttcattgcgcacgaaaaggcgtccgagaaccagttgaatagtgcacccttcaacaaacctcgcccgtgaatactggagacagcctcggccgcctggggcatctgactgtggccccaaccccagatgctatgccaaggcactgtgattctgacgccatcttccgctcctatgccggctccagttaaatagcacaccctacttccagaccaccaatacccactaattaggtacgtccttaaaaacgaaacgagtgcccaatgtagtcagtgctgagccccatcctgggatgctgggagatccccaacatgatcgttgcacttagcatcgactcaccgctaagcctaaagtagcgaatctggactagtggtataataggctgcatcttattctcctgcctatgtgatacacggacactaagcacatttgagaaattgcgtacattactctaaactggtcaaagctggaggccgctgattatacctgactgaggcaa

SEQ ID NO: 14682 - DNA, 1677 bp, Emericella nidulans
  unsure (1)..(1677): unsure at all n locations
atgaagaacttcacgttgtcagcgttagtcgttgaaatcgtgaggctggagggaaagaggagagtacgcacaggattaacaaacgcactcagattcaagaagacagcgtagaaaataatcacgctcgatgattggagcgggtagctgtcaacaatatagctggaggttatggtattgccaatctggattccggcagcgactgcgaaaaacagttaggccattgctatcaagagaaatgaaatagggatagcgatggtgatagggaacatacagagaaagaaagcaatttgtccaagaatccagtggtacgacttgtctatgctgactccgaagagaatgaggcccacttcaccacgaacccagtcagccagttgatttttgaccagtgtagataattgcagggtaggcataccagcagtaataagaatagcaggataaacgccccagatcctcatctcggcaaccctaacgccgccgtttttcttcgccagccttgccactaaggcatcgctgagtcgtcctgagcacagcacctccgagacaacggtgccgaggagcaggcctatgaaaagtaggccttggatggaagggctataagacgggtatgcggcagggagcatggtgatcacagataaaacccaccaataccagaggaaggagtatcccagcacggcgagcgggatagtagggagagtgaagaggtacatgaagcggacaagcggagtataaaatgggacggtaggaagggctgggaggggacgtaggttgaggaagggaagggtttttgtgcgggggatatcaatatctctttcagtcacggccgtgctgttttcgtatggggctggcttttcgaatgagaccaaggctggaggctgttcaatatcagaatctgtggtggtaatcgtgactggcatccgcgtcagcatgagagcccgcggatacagtgtctcgggcatgaagaatagttcaaggaccaacagcgtggcgaagagaatggcgttaaaccagttgatccatgctgccgacacgaggttgaggacgccaccgactgcattcatcatcagtaagtttcacatatttaaaaaaccattgtgcaaggaaaaaatcagagaaacccacaaattggcccaacaagcaatccagaatcaatggccagcacccatagacccagtttctggccacgctcatagtcgaaaaaaagatcgttcactgcaggtattcgttagcgctaaccaaacagctcccaggccatatgttctataatgatagacataccaacagccatgcccacactgctacccgggctgaccccaaacccctgaaagaagcgtgcagccatatacccgccatagctatccgtggccgcagccccgattgtagaagccagcgcaattactgtgccgatgataaacacaatccgtcttccatatatatcgcttaatcccgaccagaagagtgggccaaccgacaggccgaggggcggtatcgcgaccgttcagtcacctcgctgagctgatactgaactgggattgagctncngnnaagaaggnacngttgtgtgtttaggttgtaaagaaccccttttgccctagttggtttgccccactgggtttgttagtttttgaccacgtttttccggccatgggccggtggaagacctggcagccaacctggaaa

SEQ ID NO: 14683 - DNA, 1180 bp, Emericella nidulans
tcgcgcgcattcaagatcctcagatgacaggatatgtttcgaccaggtactaccgtgcgccagaaatcatgctcacatggcagaaatatgatgcaaaggtggatgtttggagcgcagcgtgcattttcgctgagatgttgctgggagcgccattgttccccgggaaagaccatgtcaaccagttttccatcatcacagagcttctcggaactcctccagatgatgtaattcagaccatttgcagtgaaaacgtgagaaacagctccctgccatcttttgattttggaatcgcgcgctaatagacttctcacaaacagactctgcggttcgtcaagtcgctaccaaagcgggagcctcaagatttggcgaaattgccgaagttcctggcgctcgtgcatcccgacaagaaacccgaagaggatgaagattataaaaacagtacgtgtcccgcttttgtattcatatatgcttgatggtggcctctaacggaaaatagctatcaaccttcttaaagcaatgctcgtttacaacccggaaggaccgaatcagcgctgaagcggcgctcgcggccccatacctagcgccataccacgatgagacagatgagccggtagcggaggagaaattcgattggtctttcaatgacgccgacttgcccgtggacacgtggaaaatcatgatgtgggttgcattctgtttatcaacatctattaggattcttgaactaactcggcactcaggtattcggagattctggacttccacaacatcgatcagggcggcgacatcaaccccgcccttgtcgagggagccgggctcaaccagcaaggtttccaataaagccctaatgaatcgcgtggatgcggcgctggtagcagtataagcacgatatcgtgggctttttttccttttttcctctatctctggcatgtagactgggcgcgagagctgtgatgtggctatatgttttatttatgaacgattatatttatgtcatgcgcgatgtgtctttattaaagtctaatccacccttgtcctgctgaatgaccttgaattacactacatggccattacatattgctaggttggtaagtgatggtttgagggctatttgtaggagttttgcacgtgacacatttgaggttgccagataatgacctacgatccggagatatatcca

SEQ ID NO: 14684 - DNA, 3166 bp, Emericella nidulans
  unsure (1)..(3166): unsure at all n locations
gctgatggcttagtcgagcatcatattcttccagagaccaaacgtgaggagcgattcgctggacgagagggcttttttcgcgttcagcatctcgatcacaacaagaatcgatagcgagaccgtggatgcagagcgcgacatatcattcgagaacatttcacagccaatctctgggaactcggtggaacatttatggaagtgagactattaccgagttagcggaagaccgcaaacaaaaacgtagttagggcttaccaattgccagaaagaaatttgagggccttctgggttgtagaggaaccaccagacgtagccaaataccgtagctgcaccgacataggtaccgatcactagatatctaaagagcagccagccgccaacaagcggctcatcgcgctttctcgggggtcgtcgcatcacatcatggtcggcgggattgaatgacagggcagtggcaggcaagccatcggtcaccaggttgacccatagaagctgcacagggacaagagcttcaggcataccgagagcggcagtcaggaagatagacacaacctcaccgatgttggacgagataaggtatcgaatgaattgctgggtattgctgtagatcgatcgtccctcttcaacggcagtggtgatagttgcaaagttgtcatccacaagaaccatatcagccgcgagctttgcacgtcagtgccagtcccatggcgacccaatatcggacttcttcagagcaggggcatcgttaacgccatcaccagtcatcgcgaccacatggccaagagattgcaagagatcaacgagcttagatttgtgagagggctcagtacgtgaaaaaagcgatgcgctcttgacggcctcgagttgttcattatgagagaggctgtcgaactccctcccagtaaaactcttgcctttaagatcttcgtctttgccaaaaacaccaatctcacgacaaatggactctgcggtgttctggttatcaccagtaatgacaatcacacggataccggcttctgcacatttcttgattgaatcggcaacctccacgcgaggcgggtcaagcatggcgacaaggccaatgagggtcatgttctgttctagctgcgcgtactcttcagacgtgctagccttgtgaataagggggttcgcgccgacgtcatcgacgcttgccagggcgatcacacgaagaccacggcttgcgtattccacgacctcagacgacaaaagatcaaggtgggctttagtcagggacacgcgggcaccgttcggaccaaggagggcgtaaaagcaacgctcgaggatagattcaggagcacctttgacaagaagtctccggttacttccagtacctaccaaaacggacatgctttttcggtcccgggaaaactcataagtagcctgcagaggcagacgagattcataataggcgcttgaaacgtgaagcttttgcgaagcgggcaagctgagaagcttatcattcatagcagcatcgtcagtgccaatcttctcgacgaggacacgtaaggctccctcggtgggctcgccaatgcacgagaatgtaccagtcttctcatcataggcgatcgcagcagcgttgcaacgagccataacctcagccatctgtcgtatggtcgaagaagaggccgccaggttcgtaacgacctggccgttgtatgaaaggctgccttcaggcgcaaaagttgtgccttcaacatcgatgacctcaacgccggttcccaactggctcaagtagacgatctttccgacactcatctgattggtggtgagagtccccgtcttatcagagcaaatcacactgcagcttccgagagtttcaacagaaggcaacgagcggaccacggcatttttctgggccattttacgagtcccaagagcgagacaggtggtgatgacgacggccaacccctccgggatagcggccactccaagggagactgcgatcttgaggtaatagatggcgcctttggcccaaccgccatgagaagggtcgttgaagtgttcgatattgatgacccaaaccagaatgcagatcaccgtaatgactttggccagcatatcaccgaagtcgttcaacttctgctttagcggcgtcggctctgaaatctgggatgtgatgctttcatgaatatcaccaatcgcagtcgatgaaccagtcaaaaccaccaccgctgtggcatttccattaacaacggtggtacccgagaagaggatgttggtttggtcctgcttaacagcctgcctatcactgaccgcacgagtgtctttggctacactctcgctttcgcccgtaaggatagcttggtctacccgaaagctgttgctgtggatggcgaggagtctgcaatcagcggggactcggtccccaaccgcaacatgaacgatatctncaggtaccagatcctccgccttgatgcgctgaaccacaccatcccggaccactttggcctcgttcgcggagtattcctgcagagcggcaattgccttctcagcgctgctttcctgggtcacgccgacaatcgcattgaggatgaggatggtcaagatctgcaacagcgcaaactatgttagaaggatgctggagtagatgatctcttcgggtcctagtacgtaccaccgcagggtcgacgaagacagtccagtcgtcactctcttcgaaaagagccagtacgaatgaaacagctgctgagcctaaaagtataagaacgagctggtccttaaactgttcgagcacaagctcccatagaggagttggtggttcttccgcgagcgctagcgacggaaaagacaggttagcattcgaagctgagcctcttactttacgcagagagcaaaaaactcaccatttggaccatatttctgtcttgagtgagagacctgggcgctagataaaccagatcgttcagtgacgtcgaaatgcttcagcacttccgccggcgcgagaatataagattgctccatggccgactatataaccgaatagttgaccaggaccggggaccaagaagaagaagaagaagaagaagaagaaaaagagcggagagagtttgcgagtaaaagagaatgctggcccaggcaatcaaggcattaaagctaggacaggtggccgaacggagccgtaattagtagtgagcggagggcggtt

SEQ ID NO: 14685 - DNA, 471 bp, Emericella nidulans
cggcagacggagattccgccggaaggtacaaagccagacaaggaagctccctcacgcgacggacaccgaagcacaaagggggaacttaaaaggggacacgaggggtgccccgaacacgggggcaaggctgggagcctgcgcatggagaagccgagggaagaagcgagcaggcgaaatggcgcaggacaccaacagagaagaaaccggggcatccaggccaagcgggggcgcggcgtgaccgcaggggcgaccacggggcgcacaagaggccaactgaagaaacaagaaaacggccagcgcagccacaatctgacggaccgatcccacccgcgggcagcagctcgacactcccggcgaccggacgcagccggccaaaaaccggacacacaaaaatggcacgaacgaggggagcccacgcaaggacccaaagacaaaacccaggaaggccggaacgaaccaagcccccagaaa

SEQ ID NO: 14686 - DNA, 389 bp, Emericella nidulans
  unsure (1)..(389): unsure at all n locations
gaaccccagaacacagtttaagggggaaacctgaattttatgcacgggggctcagggcaccggcaaacactnattggctgagggagactgaaggggaattctcgctgtcttacacccgcccagcaaccgattgtcaaggccaaggccaccgactggggctgagagggaccgacacaggcagtcgcgcgaagcgacgatcatagtccaacatgcaacacacttaaccaagagccgacagaacattagacgcgacgtagcgagtgaccaaccggcccactgatcatcgtagtctagaagcccactctgtgaacaccaccaagagcctgcagcctacagaccgccgcatgaactccactggggccctgacaacacaataccaccgacatcta

SEQ ID NO: 14687 - DNA, 1690 bp, Emericella nidulans
tgctggagaccgatctcattgttaatctcgagagtgccaatgcgcgaaatgggcgtttttttgttccctagcaatggatctggagtctgtgctcctgtcactggacttgcaaagcccggtgtgctggcgatagaggagcagcccggcgtcggtggtgcagttgagtcaccgccgctgccgttgctgctgtcagggtcgcgggatgccgatgccgatgccgatacagatgcagctggctcggtaaccgccgcggtcgcagcgaaataactcttccgtggcggccgtgcactcggtggctgcagatttcccatcctctctgatgaagtaagtacgcgcaagatacaggagattctatttttttttccctaaaagaaagatgatttaaatacgtctgaaaattatgcgattatctaacaccttcccagcagctgctaggggtggcgtgcgcgtaccgaacctggtggagtcgtgagtcagtctagtagagacggtcatgacatgattgcacatcataggcgagacagctgggacttgataacaaaggcgaaaagcaaatatcggtgtgccttgtgataatagtcatggtcatactttggctgccctgtacggcattaggagcaattagggctcgcttgcggcccggctagactagactatcgtgtcggctttttagccttaagctccagagctactttcggaccgaccgatcattaacgatcataaagtttagagataaatgattttcgtttccttgaagtgataagcagcaagcttcgctgatcattaggcttcattgatgactgatgagcaatgcttggtgacgcgtcctgttctccttgaaagatcatacttgaagcttgtctcactcgatatcgcagtcctttctcccatcctgcagctaggattacccaagttgcttttagccgttgaacagctgagttggtatcaatggactttgtccgcgctacttatcgctgaaggatatgggtgcctaatcacagtctaattagcgcctagattgttctagacgtagcccgcaatgcgagaatatccctaatcaggagtatggttcagattcgaagagttctccagagattgggtggatcttttttgtcgagaaaacaagacgtcaaggcaagacttatattaagagcgacatccaatttgagattaactagtactaggtgcagtagggacagcgacactgaagacagatatgaagctggtgatagtagcatacaagaaacgaagggaaaggttcgtaatatgaataaagagtgtctcaatcattgccctcctaacttagatcaatcccgttggtattgccgtatatcgtttcgttcattcgtggtgcgcactagacgctttggttcgttgtatcctcgcgggaaacaagtattaagattatgggtagttatttgattgtaagtcgcgctgtcatcagtgggcaacagtacattttattttcttctttctttttctttagaagtcggtgttgagtacgcacatttcatgcggaggaaatccgtacattcgttcatcagaatagcgaacgacaccctagtagttgccggtgtacccagagttaccgtaacccgccccggctgtagggagatgctcaggctcatgacgcggccgaaaagattgaaccaaccctgtttcaaccgccccggcatcacagcaaaccaga

SEQ ID NO: 14688 - DNA, 2091 bp, Emericella nidulans
cctcatggcgggtgtaaaagagcgtaagttagagggtcgagccgcgaaaaagccctgcttcaaagactcttgccggcgggttttgtcagtcacatcctggcaggatctctgcgcgcgaaacataccctaggataatgcgaatagcgagtaatccgccgaagttatttgctgcgcattgacacaacgcgcagataccccagacgacggtcactgcgtaccgtcctatcagccattagggtttcccactgcggatgaaagacctactgagcgagagcataatccgtgccgagtaccgcttgatcagcaggttccatggcagatcaaacaggccaaaggggatatagaagagcaggatgaggagcgagtattcgttgcccttgagattgatgtcctcttccaggccgtccgttttggcgttggcgaggttgctctatagtctaaaattagtgtgccgttgttttttttattcaagcgagtagagggaggctgaacatactcgatccatgcagtcaaagaagtacatctgccgcggttagcctatacccgccgcctgtctaccacagggatcagggcaatataccaaacatagcataggcaggacaaagaagtccaccttgcggactggtacgggtcagcaattcccgcgtcccttccgactcattgatcatgagccgctcgatcaacataccgaaactcttctccgcctcggtgtcaacatagacattagtctcgccggccttgggctcgtccggtgtcccggccgatggaaccttctcaatatcggtggcagtggcgcccatgacgacagcaggacagaagaccgatgtccaagaatggccagtccattaagtggagatgggaatggaggtgtggagatttataaacggttctgtttggaaatccttgctgcgtcattgtgcaaccccaacattcaccaacatttcagacatccactcttatcgctatcaggaccagcagcccgtcctcaatagccccagtcttggtttagataggcgatcgttggagaatggagaacggagaatggagactggcagggctcggcccgtatctaatcagcatcccccactcttgacgccctcctatgccttcatctcccactcttgtccgtacatctcgccgtcattgctgtgtatatggagtaatgaggagtctttgtcttgccaaccggacaactatccgctccgctaagcctccaggctgaggggaaaggagctctgtgtagataattagctcgatcgatgccatagcagcaaccacccatcctattcctaaacagcagtaatcgttgagtatccagtttattagatttactttcgtaaccacgtctattacatttccccgcatctgaaagagaagacgtacctaatggctccaaccgctcccccgattctcgacttctcccccttctacggcacggacggcgccgccaaagccaagcttgtacagcaagtacgcgaatcctgcgagtacaatggcttctttcagattacgggtcatcgtatcccgcgcgacgtgcaggtacgggtcatggacgctgcgaagaggttcttcgccctgccgctggaggagaaaatggcgattgataagagttgctctacccgaccaaagcaagatgcatggaaactgacaatgcagacctcaactcgttcaaccgcggctacgaactgcttcgatcgcagatgctcgaggtcgggacggcgccagaactgaaggagggcctctacattggggaggagattggggcggatcacccgtactatatcaatgggcggctgaactcgggaccaaaccaggtacgttcgaatctgtcagcgcgcgcacagtttggcacagtttggtaagagtatttctgacgagatatgatagtggcctgcgactgttccagacgcccaggagttccgcgagacatcgatggaatactaccacgccgtttacgagctggcgaaagatgtgctagcggttcttgcacttacactggatgtcgaggagtcattcttcgatcctctcaccgagggcggcgtacgacgatgcgcatgctcattacccagtcaccaaaagacgaagacgaga

SEQ ID NO: 14689 - DNA, 394 bp, Emericella nidulans
  unsure (1)..(394): unsure at all n locations
gcaggtaagtagctatagcactgctggaatgtaagtacctgacttaaccttacctacaaagcttctggcagctacacgtgtatatagctctatgcaaagctgtgactgatatgcgataacgagttactaagtttaatctagaccctaccacgggctctatcagcctttaaattagagtctgaacgtggatagtcgctacttatcaaaggtttaagaaggctgcgcgtatatttatagatggattagataaagatgtattggacgagctctactcagatgattgatccgtcttataagtacctaacataagaaggagatgatgagctacttctatgggctgatgatcatangtaaagatcatctaatggattttaggcctcatagattgattatc

SEQ ID NO: 14690 - DNA, 2205 bp, Emericella nidulans
ttcggggattcctggggtagaagaaagctgtggacgttagcttattcttggaatggagcttgtgcttgcatatgggacggtgttcgtacgggtatccatcggcccaggggcgatgttgttaacgctgatacggcgggactggagttctttgcagacgccactacagaatgttagtagtggtcataagtggaatccatggacgcttaccgagtaaagtgctcgacgggcgctttactgccagcatatgaagtatagtatccggtgaatgcacccagcaaagccgtgacaatggtgattatcttcccatcgtcggaaacgtgcttggcggcttccttcaggacaaagaatgcggtctttgagttgatcctgttccaatgtcaggtaaatgaagagattgaggacgaaggtacatacgcaaacatcgtatcgtattcctcctccgtgatctcagtgataggtttcttcaagaccttgccaacagtgttcacaacaatatcaatcttgccaaaatcgcgattgacgtcctcaaacagcttggtgacggccgcggcggaggtcaggttaccttggtaggtcacaaccttgacagattgctgcagctcagcttcgaccttagcggcatctgactggctgctggacgaatgataatggagcgcaaggttagccccggaagcagcgagctctcgcgcaatttgggcaccgagattcttgacacccccggtgatgagagcaaccttgccatcgagcgccattacaatggtagttgtatgatatggtctgtagcacgtgataaaagaattgataatggggtgactggttggcttgaaacttgaggaggggtagctgcaagatgaggggtatttatctttacctcctgctacctcattgtcggagttaaggcattgactgcggtcgagttgagctgtaatgcatcgagatcgtccaggatcatggagtaatgtgatagccggatccggaatagtctaaagagatcccttcagatgtgatagcccttttaggaaatggccccatccaggctcggaagctaaatcgtggttcgttagagctattaggatgctcgcatctgtgatatcacagtgcactctcatcaaccagtgggctattgcgctcccaaaaaatggcctggattcggatctggcaatggttggcctggcgcaaagctctcgccggggaaatatagggttgagccgttcaggaaagcaccattacggtcgatccagatcacgatccgccgtaagaggccgccgaggcccagggcatccagcccgccacgaagctcgactgcgcgctgcaaaccccgcatgtggactgcgtagttctctgggtttccgtacatggcctcgtagctcgccatcttcgcgattgcgcctatcagggcatcgctgacaaaagaagactggagctccaaagacttattgaccgcctgtactgcctcgtaccgaagtccgagcagatgcaatttcatgcccgtgggctctgtctgtacagaagcataattggatgcggcgagcaagacaatgaccaggaaaagcgacggctcagtcataaccagaggaaaccagtcggtgcgaaggaggcctcggtttcctggctggtctaactcaggaatgtctaccgccatgctcatgaggtctacaataaacgtcagaaagtgcctgttagctcgtgttttgagtacgtacagtgatcaacaagttgcggcaagatcggccgccaggcgacaggatacgacctaaaggggtcccctcgcaggccaccgaatggtctggggataggtaaaccaaagtacactggctgagcagctcctgtggactggctgtgtcggacaacttccccagaaaccaggtgctggttgtcttgcttatcatcgttcccttgtgtctctgtcttagcctttttgagatccctctgaaaggcagcctgagagcgttcctcaaacagcttccattggcggcgtgtgacatgggagcggatgtgcgagtccttggccagtttcagcgcatccttcggttcccgaacgtggatgaagacaaagtcgttgcccatggtggtgaggtcgctagtggatgcttgcctcgaaggggaaacagtgttcgcattcaggtgcaggtggtgtggttgatctgtagctccgctatttcctcgcttctgtttatggcgtcgatcctagtattctatagtgtc

SEQ ID NO: 14691 - DNA, 1895 bp, Emericella nidulans
cggtcccgagttgggaacactactttcctttactggaaaagtgcggccatcagtatggtcgtccgatagattcagcacgaaaatggaaaagccacacttgatctcccccttcccgcccctctcccaccaaatccagctcagccacttggatggtctctctggattatccgaattgcgcccacaagaagcaccgctaacgagtcatacagacgtagcccgctatggccgatgcacaaaatatgcgaggtgtaggaacgatgaagagggccacgaggaagagcatgcccaaggtccgcaccggctgtttcacctgcaagtacggtagtttacccttcttccgctgtatcctgaggctaaatcttctcttcatgtgacaggcagcgccgggtaaagtgcgacgagggcaagccagcctgccagaactgcgaacgcacggggcgacgctgtgaggggtacccccctgggcctgcgtcaaccccagcgggagacggttcacttgatgcgcaggtccagcgatgcgcgcagcagattgtcgtctataatctgccctttaaagtccccgggagtgcagccgatcgtcagctgctgcatttctatacgtgcgaggcagctggtggactctccagcttttcagactcgacactgtggtcgaaactcgtcctgcaacggtcgcaccaccagccggtcgtccggcatacccttgtcgcccttgcggctttgtaccgtgactacattgaggggggcaatcgggtccaagctcctgcgtcccatgcggccatgcagcggatcgccaaatgtcatcgccagctgagactctatctgcggtcagctgatgcgtccgccgacatcgcgctgatttgcagcatcctcttctatgcgttcgagacgctgcttggggactgtagtaccgcgacgcagcatttggataacgggctgcggttgctcaagcggtgccagatgcaggcgctggctcatagtggccgtgacgagctcctcgctcacctcgtacccatattctcccggctcgacataaacgccagcacgttcgacaatgagcgcaggcctattcttaccctcgtctgcctcgcggagagattaggccccatgcacgtagttccatcctcgctggcgagcctcgacgaagccgaaaacgtcgcgaccaaactagagaattggctcatgcattacctcatcgcccacgtcgcgtacaaacataaaccagtagacgagttccccagatgcctcgtgcgtgacgcgttcgcactgtaccagcaattcgagcggttcttcttcgttttcgccgccttacttgaatccttaccgggcgaaattcccgcccgggctctcctcctgcgcgtccaaacaaagatgtactattcccttctgctggagaatattccaaacggctctttcgggccgtgcctccggcagatagtttgcggaacacattggccgatattgagggattcctgtcaatggagagcacacagaagagcgcaacgacttttaccttgtcgtctcagcttgttgccattctctatttcatgtgtctcaagtcaactgacgtcgaacgaagagataccgcggtttgcactccttaggcattccagcatgccggcaaaagatggactgtgggagtcagagaaggcggccgcgattgtccagactctgatcgagcaaaccaaaatgtgcgagccgtccaggtcacttgaagagacgggcggcgacgtctttagccccgaggaagatggccttgagcacgtatttcgcaatctcaacaagcgtccggggcctagtgtattgattaaggagccttttacgatcgccccgccctatgaatcacgacaacctagtgatcaagtggttggcttcggggtgacttgaatacctgggag

SEQ ID NO: 14692 - DNA, 7432 bp, Emericella nidulans
gcagctttggtacgccatggatttaaagtagaaaatcggcttagtagtatctacaccgctggccaatgggatgggtttgcgctcgtggtagacacacatagtggaagggtacgtaaccttcttaaatgcctgttttctgattaacctttgtccagggtggcagcatcagaggatttctaaacgacggcacgacggactacaaaagccacagcagcgtcgatagcctagcttttggacattgcgactattcataccgtaacctcggacggccgtcagtcatccgagttaggtccactaatgctatcttcgaggtcacggtggatgataagccttgcttcgcgacggacaaggtgtgttgcttggtctgctgacttcaccttcaactctaatctctttacagattactcttcctgccggaaacactattggcgtcacagctgcaacccctgagaacccagactctttcgaagtcttcaaggtcgtcctacagaccgccacttctcctgtcggaaaagccccgcctgtccaagcacagaatacaaaccagcaacctctcgcagatcagccgcagggaaacgcccggcaagaacagggtttttcgaacaaccttaactcaataaacgcgcaattcgtggacctaggtagccgtattcaactcgtcaaccacgctactaacaatatcatccgcgagcttgggaaccaggcttccaaatccgaaactagacaattggagttactccagcgagttgccaccaaggaacaagtccagagtcttgaagctcgccttcagcgtatggagcagacgctactatccattcaacgcgatcttgaaggcaaggactaccgtgaccggtttaaccagctgcacgaaactctgaggtcgtctcatcaaagcctgacagaaaatctcaaggacaatgttgttagcggtatgttcccaatgatccttctttccagtcttctcacttctctctaacgcactgaaacagtgattacggcctcaactccccgcatgggcttcttcatattctcaatgatcgccttccaagtcttcctcgctgtttcatacatcatatacaagcgccgccgtgccaacatgcctaaaaaattcctatgatcacattctgcatgaatgacggaggacacgatttgattttcagtatccctcatattttatgtaaagctagccggcattgaaagctcttttgactttagtaccattagcatcatgctagttccattgccatgtatattcatttggttattatgtgaagttactcgtttgtaaatgtatatgtatctgcaggggctctttcatctctttacacacctgtgtaaatattgatacttaagcaacggtgatatcataaccgaactgtgtttacattgtttgttctgtccacgtgtcgcccgagccttgaagaacccactttcgtaatgcgctattctataaatggctagacaaaaaagctaaaatatgatcaatccactagctgacttcatacttcttcgtgacgggcagaatgtgaaggaatgttgctaggggtttattcaacagagcgaaaatgtgtcaaaatagcgaacacagaagaataatctataaaagagtctattactatcatgtttcacctaatgcgttacgccgtggtttaaagggtatctgtggggcttgtgcgtgatatatttttgctgctgcaatgcttagcaaggagtggccgcagcagtataagctttctcccgcttggaatatagcggcttatctctatcctttacaaaaattgaagtcatgcatattttcgaggcaaggactggggttgataatgattccgtaatatgcagaagcatgactagctacggagtgaaagcgtagaggtcaacatttcctggaaaggaactggtagtttagaagtcgtacgctattcccgagattgaaggatgcaaaggctttaatctaggggcgcgttgcagaacctgaaggcagcggtatcttgtcggtcacttacaagtatgtggagataatggccggccagtagctggagataatgagcttgacctcgccgtcagttagcctagttgacaggttgccgttcttctggtgcagagattccactaattgtatagaagctggatcggtgttcttttccgcactcgtagaaaaatagtgcttgaacaacgctcgcgatgtagcactgcattgcttcgcactgcctctgagtctcaagacagtagaagagacttgaccggtcatagcaaagacttatgactagcgataactgcatcctagagttctggattatggggcaagaagacggtggggagtataccgtaccgttagaccggcgctggtgccgatttgctggggcttagtgatttcgtttgatctgagtgaattgattgacgaaccataaaaagccgcattcgaggtattggtaaataagtataagctcctagaggttctggtgaatatgactaagacataatctgggacccatgcgtcatgcgggcgttgagtctgcttgatgacaaggcatggcgcgtccatagagggaagaaaatagctgaaaaaaaggagcaaatgacggtagtaaaacagaactatatcaacctccgggagaagcttgacttataaggacctgaattaagtggcgagtggcagtgtgctcggttaaggtatagatatcaagactggcgggcgtatatggctggagtagatccaccgcaattaaagggacaacaatagaacagtttatcgataatctggtgacagaggagagagagacacataaatttagttgtaggaagcagctgaaaagaatgttgtgacgcgcagaggaaggtatttgttggtcttatcgttcattgtctactgcaccaggcacatattccgtgaatgtacctgtttttgtggaaatcgtatcgcaatatcaaaatgagctactcaagctgacatacggagaatcagcaggtgaaaaggagcagaacgagtgcaaatacgtcttggaatggcggcaaggacaggtagtggaggcgaagaggacggtcagtcggagacaaaagatgtcctgccaggagatttcccaaagaggacaagcttctccgctcgcgagactcagccttttactctgttgccctccagggccaccgggtctccgtcttcctctttttgccgtctttgatttggtcccgcggaccgcttctcctttcctctcctctcctcttttctgaagctcttttcttcttcacttgctcctcttcccatcttcaacctcctcctacaccattcatctccccacaagctgcgcatctacaaactacttactccgcatcctcccgctccgctacttcgcaattgtcaagcctttacactgacccgcttttactactttcacggttggtagttcgacctccgggctttccgtacgtctgcttgttatcgccacctctaatcagtattcgggtccgcatcaacttcgcattagggcttgcggcgcgattgggacgcgttactccaggtaaattcgctttctaaaggcgcacggcggccctatatgtactgccgcatattgcgcttgacaccaactgtgtttctcgcgatagagttcccatgcaattctcgtttacaatctctgggaatttatgacaacaccgacgcgttcccttatccgcgtgcgcatatagatcataatggtgtgttgggaacctagaaccatgtcaaagaggacaggagtggttgactgatacttactatgtccaggtactgttcaaacgaaaacccgtacagtatctcccacggcccattattgaagacgacagctccgaggcatgtacactccgtgaaggttcgtgaagaggcaaggaatactgacacgcattgcgcgcaggtgtgggtcatatcagagacgaatgaggtcttcaccaactatgaatcgtatcttcagcgcatggatttttataagcagcggaaattcatttgcgaaatcacgggccattcggggttgaatttcttcgaggcgttccgaagcgaggtaaagggccagttttaataaacgtcgacttgcaagcctgacgaatgatttcacagatggaggaatcaagagaggtgaacaactcgtttcccgaagcgctaaagggtcccatattgcgccgggtccaattctcgacggtatcgcgggtcgataacctcggtgcgtatctccgatttctctcaacctaacgttctcggctaacttttacggatctagtggacgaaatatacgaagtgggtgactcgcagttgcttctccgttgatgagacttttattgactcattgaacgtaggaattcaaatcggaattctaccctggcgaacctgttctcatcctgttggacgacaacacgcgcctccacggagtgattagagacaaagccaagttccccgaacagctgtacccggacggaaccgttagaactccagcccatgcgacttatttggtcaaagtgttggatcgtccggatgaggaagccctgttggataaccaccacatcacccgtgataggaagacgttcaccaagcagatgcttcgcgcattcattaaaaataacgtgactcgagagtcctggaacggcgcaccctggctggttaagccgtcggttgccgaagaatacaggattcctacggaagtgccaaaacatctgcaatatggagctagggtggctgaaaagaaagcgcagaaaaaggctgaccaagaggggttttttggtttttttgcgtccaaggagctaccggaattgaagccagcggtcaagggccagaaggcgaaaccatctgcacaggatctggcgcgctcagaagaggcgcaattcctggagtataaacgttccttgaacgggaacccaagctttcttgtcggtaacaaatccatgaatgggcctccacgaccctcgaagtcgcaggaaccggagaagaacgccccgccaatccctagtgtcgtgatcaaggctgagcccccaagaccaccatcgccgccaccgattaaataccctattgaagacctggaaataccgccgaatcgcgagaagaagaaacaacgcccgccgctgaagttcctaaaggcaaatgaatttgatgatccgaacgatgaggatctcttgcaggatgcaattgagatggaatcagtggggctacttctcgaaacgtggaatactctcaacgtatactgtgaagtattccagctggactcctttacgttcgacgatttcctgcaggcgatgcgattctcttcagatgaaatggattgcgagctttttgtcgagattcattgcgcggttctgaaaaaacttgtcaatgcggaaaaggatgacaacggggccattcaaatttcacttccagagcttccagttgaggaatcagaggactctgacgaagatgaggagatggtggaagatgagcaagatgaacccgaggctacaccggagcctgcggtgacacgaatgaccacccgtggcagtctagcaaaagcggaggcagagggcttgaaggctacgttgaatggtgatcatgattcgagcgaaatcaagagtcaccgtgctagcgagatgctctccgaatatagatggattgatcgtctacgaaaacgcgatttccgcaatggtggatgggagatgatcatgatcggactcctgcaccaactatccgtccgcccgcgaatggagaaggtctgcaaccaaatacttgaacatctggcaccactagaccaagagcccacgcaagatactgctcgcgcgcaatacgccgtccttgacgtcaacctccgaattcgagctcttcagataatctgcatgcttagtttggaaacaagggctatccgaaactaccttgaagaatgcagtaatcaaatgacagagttccgaaaggagaaaattgagtatcagaaggctcgcaaagcagcgtaagttgtgacaacatgttgaatatgagccgggtagctaatagttataggatggagtaggttcgtcggctacaccaagaatgcaaagctcttgcacctgaacctgaaaagtcgccgagtcccttaccagagatggagcccgcggaagatacaaagatgagcggtatggacggagactcacaagtcgaatctgaggtagaggggacacctcagcgtgctctccgtggtggcgtggatcgggtaatggagcgcaaacggaagctagaagaagagcgagagaggaaggagcagcttgctaaacagcctaaaggctcgaagcagtatcagcgattattgaaaaagctggaggagcagaaagcggccgtaaagaaattcgaggacaagatcgccgtcgtcgacaacgacctcagagaggcggactgcccgcggacaagatgtttaggaaaagaccgtttttgcaaccggtattggtggtttgaacgtaacgcaatgccgtacgagggaatgcctgacagctcgaccgcggaggccaaatatgctaatggccgtctgtgggttcagggtccagatgacatggagcgacttggttttatcgacgtctcggacgatctgaaaaagcaataccagaaacggttccatatgtctccagctgagcgcaagaagcacgaagagggacctacgcggctctctggggcgcatgaatggggctactacgacgagcccgaagctattgagaagctcttggactggcttgactctcgaggagagcgcgagacgaaactacgtaaggagcttcttctccatcgtgacaagcttgtcaagtgcatgcaagcgcgtcacgaatatctgtcacgaactgaagacgactcggaggatataccgactaaacgggtaaccacccgaaacaaaacatatgtggctgacgccaaacatcgatgtttgaactggcggaactcgacagctctggcggacaatgggcatcttcatgttgatgcgtccaggccatccaaacgagcgcggaaatccggcgaagatcttaaggaggtcaaggccacgaatcggcaaggcaagccgctcacgaggcaaggtggccgatacaacttttgaaatatggagatggattaatttgtttgcatattatggccctcattctgggccgatggcgtttggtgctttcatcagggttttgtttgaaaagagcccttaacgtcaagagggaggattggcttattccgaactgaatgaaggatatgatgatgaataccagacagctatacagtgtacattgcattagagagggagcttggctggttgggtgtttggaggcaggagtacgcgttaagtttttagcgtgatcattgaatagagcacaagcatgtaaattttatgcatgtcatattagtaataattggaccgatgatctcgttcaatcagggagtcgaaataccacttgcgtaatatgaaagtattcagcctcttaccggataataggacagggcactgat

SEQ ID NO: 14693 - DNA, 484 bp, Emericella nidulans
ttgcattccctagaccatggttaacgaattcatggtggactgatttagcatttatgttcggaaggatcattacgcttacgattgacgatagggctgatgtgagcaggctacgtctacgactaggatgactaccaggtccacggttgattccattttgagggcactaaagtgtcgtttgatgatggactacgacccatactggaaaaaaaacgtgggctgcttaaagttcaagtgcatgggctggtaacggaggcaggagtatcggattaaatatgaacgcacgatccagaaaaagtgctataagcgcatcaacaaaatccaggcaatcggggatatgctcactaagttctcggagaatgaagccattactggcaagatggtagggcctggctagctgatagaaccgtacataaaaactattctatgtcgggcatagagctctattgcgcatgccatggttatgcagattggatgaacaaaagta

SEQ ID NO: 14694 - DNA, 2258 bp, Emericella nidulans
aaaatatatataaaaataagaggaggttatagtgagagaaaagagaagtttaataaagattataaaatgcaccaacaaaaaaaatgtatgataaaaacaacaaaagaagaaaagagctcttttacgtccgaatagaggggggtttttagcccccccagtagagcttggggattttcctattgggagggggcacaaaatttttttgggaccttctttttggttccccaataccttaggaaacccggggcaatgacctctccctttaaggtgggcggtgtgcccacccgcaaggggtgggtaaggtgtgtttctcagggtttaaggtccagggtggggaaacccgacctttaggtttccaagcccttttttaataccgttctctattttggaggaaattcctccttgtgaataaggcatccagccttgctgggttggatatgtgcccttggcggggggtaccccaacccttaatgtgggtaaaaaacgtgctgttcccgggggtccaaattgttaaccctttgggcgccccccgagagtggcccgctggcgccgatcttcgtccctcaagacgactacaattggcgcttcttccgtctccgagacgacctgcgcctgcagctggatgagattgccccaaacggcaacgagagacggttcaagctcactacgttcccgttcggcttggagcagccatttgagattcaagatcagctcgtctgtaaccctgactatccgggctcggactttaacgcggtcgggcgcaatgacgatacgattgttcttgccaccggcgagaaagtccagccacagatactcgaatcaattttgtgtgaatccagcctagtgaagtcggctattgcatttggggagcaccagtttgagattggtgtgctcctcgcagctagcggctgacgtacctccaaaaaactacagcaagctcagggaacaactgtggccgctcgtcgcacgggcgaacgagagcatggatggccatgcacgaatccagtccagcgaggctgtcctattactccccagcacagtcacgatacctcgaaccgataagggctctatcgcccggaaagacgtctataagatgttcgaggcggatattgctggagtctatcgcaagctggagtcggctgggccagtgctctgccttgatatggagaccctggaagaagatctcaaattgctgatttcccgctgcacagactggccccctgactgggccgtcacagatgacctcttcgagcgcgggatgaactcgctgcaagcaatccgagtgcagcgcgcgctggttgccgccgtgactcggtctctgcggggcgtctgtcaaccagaacgtattggccgagactttgtctatatacatccgtcggtgcgtgctatggcggattttttcagggaaccagtcaatggactccagttaccaaacgggttctcgactaggggctgggcaccggaccagttggtccagaggttcgctctcacaagcaaggacggcagagctaccgtgctgctcactggggccactggtagtctaggctctcactgtctgctctctctcattcagtctcccaatatcaagcgagtgatatgtcttgtccgaccagaagattcgtttactgatcctcgtttgcgactccagaaatcccttgagtcaaagaagctgcacctttcctcgacgcaatggtcgatggtggatgtgctgggatgccacacggcaagccagtatctaggcctcactagagagcaatacacaatcctccaggaatcagtcacttacatcctgcacgctgcgtggcccatggattttcactggaaacttccctctttccagtctcaattccagtctctccacaacctgcttgctctcgcttgagacattcacaaccgtcgaccaagcattaaaccttgactgacctttatcttgtccatcgccacagtcggtcattacgcacgcgttacggtgtttgcatggttcctgagacctcagtgactcagtggaatgtctgaattccattggctatgctgaagccaagcttgtctgtgagcggatgctggagcattgcccattgcttcacccccatgagatgacgtcagtacctccccatgggcccgttgcagatccaacacccagggtttggatttaacgagcttttccagctggtcgctatcatgggattgagaaggcccggtctaatgtcatccccttccaactacttaaccctatttttagattggtaacagtgtgccct

SEQ ID NO: 14695 - DNA, 2094 bp, Emericella nidulans
tggaagaaggaatagaatatgagagaaaaaaaagaagaaatagagataagaagtaggagaagaagaaggagagataaaaagagaaaagaattaaaatgagaagagtaattatcaaggatattgatagataaagaagttagaaggtaatgatagaaatctaccgagaagtaaatagaagatttaaggttagtacaaaataggttaagtaagaaagagaaggataaaagcaccttataggaatgtgagaaaaaaaatggtaacgaaatgggaggaatatgagaagatagaaaaaaatgtgagttattaaaaagaacaattagtgaaaattagaacatgatttagaggtgaaggcgaatatatgattggtgtaaatgaagaaaagccggaggataggaaataaaacaaagaatcttaggtgagcataataaacaagtataaaatgaggattaaaattaccaagttcaaccaaagaacagagaacagacatgctataatatgctattgccatgccgatggagggccctgtctcactttgatgatcggacaccggatcctagccatgtgcatagtgactcgctctctcactgcaatgtcagtctgacagctgccaaaatgatatagttctttaggtttcagagggcaaaccccagagataatctgaatccggagaagtgagtagaggaataatggacgtattcttggacagacgagtagagtaactagggtcggtcaggtggatgcgaaaatactctgtttaatggccacatctccatggatctctacatgggggttgtaaagactggcggcctagatacagcgccatagaaaataacgtagagcgcgggcattgcaaacttttcagcccaattcgagacggcaaaaacggtttaccatggtggtctttggtctagctcaatgcgcatcacagactgcgcccccgctgccgccacaccccaggacgattaggcttaactaggccagaatttggtatggcgtaccgcggtgctttcaaatgtacgctctaaagcactactcttcctcgtccagtcggtcaccttgtcccagaagtatgagtagcacttcaacggcgatgcatctcgtacgtgtgccaggcgtccccagcagcattggggtttgatgctcagatcaatatgcacctgacagacgtcgctgtgagatggttctcgtccagtggtcaatggcaatgggatgctggggggagagtaggagtaggagggtatggctcagttgttttatgtctatcgcgataacctgaggaatgatgtcgatcgagaatgttatttactgcacatttactagttggtgttttatcctcgttctttattaaatatttgggttgcagcactgctggtattcagatagcgattgatgccttcagccgaggcctcagatgcacgcatcgagctcagctacctcgacaaagactggacacatttccaaggatatattgcatcagctccattgttcatctatcttcatcaaattttaaaaggctctccgcagcagctacgaccgcctcttcgttcgtatacatccacttccactccagtaggtttcgcgccttgtcacctcgaacatctctatcgcgccccaagtcctgcaggaccagcctcgcaaccggcataaaaatcgccgcagctcgcataaggaaatccggggctggaacgtcgtcactctcttcgccttgtctcccatatttcttttcacggtcgccgccatctcgctcatccacatcattccctccccaatacagatgaagcgctgcgccggcgcttcttcatgcgtcatggccaggacatgcagttctgcgcagtcgcggacatctaccacgccccactgaatccgaggaatgcccggtgcgttgccagaggtaagctcggtaatggatggtagggtcgttgaatcctctttcccgaacgcgggaccgtacgcgcagacggggttgatagcgaccaactccatctctacacctgcccctttgcacccctcgtcaaggaagagccatgaaagcgctcagcgagcgtcttggatttcgcatacgcagcgacgtccggctgccgctggggaatggtt

SEQ ID NO: 14696 - DNA, 509 bp, Emericella nidulans
cgtggtgtggactaggccggttttgcttcgttagctgtgtcgacatccgcactgtcacagacacatccgggcgttttgcagaccgttgctcggaactcacaagagatatcatgattttcggggttctgaagatcccggcatgagcctcgagctggatgttggaggtactggccatgggtcgatttctggagactaaagatcagagatatttgggcgctatactggtaactgcacaagcattcacttccatagggttataatgattaaagtagggattcaccttgtgtcatctgcattctcatcctatcactagtgggaaagccctgataacagtcaatctatgtgatatcaaccaatgcagattgcatgcagtgttgtaccatctccgaatcccaataaacaattgccaactctcccgtaaacaccacacccttccgaaagccaatgccggcatcaaatatctttcctgagcttgtcatcgcaacacatcctgacacctcaatactgat

SEQ ID NO: 14697 - DNA, 2476 bp, Emericella nidulans
  unsure (1)..(2476): unsure at all n locations
cgttcattccccgcgtattgtgccttactgatcgcactcttctctgaaaacgagctcggtgagattgagtgaccgcgtcccagcatgcttgctcttcatccacgctcgatttctcatatcattctttgcaccgcgcgacctccgtcaaccagtcctcagttttgaactctgaattcgagacgtccttctcaaactcttccattctgtcccgaagccgatcccgaccatggccagccgcgccagtccgcctcgtccgccgtttcaggcgccccccacgttggccccggccaaagcatcagatcgcctagccgtacctgaataccacgttgtggatcctttgcttgggaatctatctccagaatcaacactccacgcgttgttgtcgattgatgccgttccgaacaatgaacaagtcgcccaagacattctagctaaaagcatttccaaggcctcgtcagcggaacgagcactcgggatacgcgctgcagtagccgctcaaaagcttggagaatggtataaagaagtgcaatcatggccgtggctgaaacggtcgcatattgggcttggaaaggggtttgtccccccttctggcggcatcgacaccacacagtgggcaagcctcgcgtcccccgtggttgcgtaacgtgaaaagcgtatcaaaaaaacccctttcggtatgcaagagtgtctcagttcaaggnctcagggaggnnngttcaaatcctacaagaacatcaaccacccgccgctgaaattcggcatcacatacggcgcctacatggggacaagccctgtattcaatgccttctactcagagccacttattgagacgcccttcctacatttcatgggtgaattcgaccccgtcgttccgtcagagatggtagccgcagtggacaaggcacagattggaggctctcgacggcggaaggtgatgcacccaggtgcccatgcgatcccggtaggggatcggtaccacgaggccgtagtggattttattcggtctgcctgcgagacttcacctacatactttgacttgcccagtgacgaagttcccctgcttagctacaacgatacccccgagcaaaccccctttcagaccccattactgacaccgtctctctcatccgccgtatcaactacgtctatcccgtcgtcggaagccacaatactcgctacaaggaggctggaccagtgggaaaagtccagaagcccacgaagtaacatcaggccacgatcgactcgacgtactgtattttcgggccggcggtcgacaagttccagcgctgaatcaagcgccgcctctcaacattctgatcacttcgaagccacacgcacgccgacctcttcgacctcaaccgtccaaatgatagaaccaacagtcaacaaagagccgaatctagctgtcagagtggtggaagacgataccattgtctcgggatcagagtacgagggtgagggatggcaggagctcttattgtcggatctgcttaacgagatgctgcgaaggcacggtcggcccggcagattctattttgtgcccgatggggagggcggccggttagagaatggcatgagattgaattaaaagatggtcttggttatttccttgtcttctggtgcataaacatagagcaacaaatacacatcccattccgactaaagtcggtgccatgcatagacactctagacaactgcaggatctctccgtacgtcatgcccagcaataggagtggtttcatctttcttttattaatacctggtatgtacctcctctctgagcaatcggacgcctttatttcctcttttagccttcgtttctagtcctcgacaatcacaacttctgaagagtctaaccggattgttaatcatactcatcatgggtaacaaatcatctaaaaatacctatcaaatctcatataaaggtacctctatctaacaaacgcctgcctggcttcgttgacttttgctctgctaaaaacatttgacaaattccttccagcagattgaaacacttctaccccggaagaaagccccgtcttgaccaggggcttcgatatttgctccaactggcaccaccgacctttgttcggggggccaccctttgtccggtcgcttgtacttcaaacctccatcttgcggtttttgtaaaatgggccggaccggcaataaggcttgtttccaaattctggctgggctacaagtcctgttccagccttttcaagcctctggaccaatctgtgccagatcctggccccttgtccttttttccacctccaaatccctgctttcttccccatacctccctttgccacaatgtggaccttctttaacgtgaaatctcctccttgaaccaagtactctccctttttcttaatcactgatgcttaataaccttctttgctagtacctcccacttaatccgagcccatatcttcctaaagggctctttagttacccattcctttgggaatcc

SEQ ID NO: 14698 - DNA, 3519 bp, Emericella nidulans
cctggtcgtggctctacggttccaagcgtgttgatggcgagtgcaactgcagcgtctccaatcgcgtgcaaggcaacttggagacgggcgccgtcggcgcgctggacgactttgcggaggataccttcttcccagaggggtgccggtgaagctgtcgaggcagtgtttgataaaccagccgtatatggctctaacagcgccgcggtacaggcatcaacaacaccatcacagatgactttgatccctgcaatccggaaatctgagctcgtctctttgttgtacttctcatgcaattcaattgctcgatcgacctgcgctagcacttcttcctcgctagcagcgggcgtaataagccaatgcatagccagcctaattgaaaatgactccggctcctgttctcgcaactgccgcgcggtctcgaagatattctcatctgttgccatttccaccattcccgtgtaccctgctgcattatacgcgcgaatcgcatccttcacgtattcctttttctcgttcgtcgtcgcgacccgcgcaacgtgcggccagacgatcgttacagcggcagactcactgagtagcccggtggggttaccgtcattatcgcgtgcgatgtctccgccagcaggtgtaggtgtggatttgtcaattcctaggtccgttagggctgcagtgttgcaccacgctgaatgcaggtctttggcgtcgatgaatatcggccggccgtgggggtcgagatcgtcgaggtcgctggctagagcttgtccgtccgtcatggagtgcatccacccgctgcagaagaggcgcgggtatgtggtgggagatcgggaggttgctgcatcgcggatggttgattggatctctgagagggatgtacaacctgccaggctgatttttgacagcgaagagccaaagaggaggaggtgcatatgtctgtttcatcaattagcaatactggatcgcatagatctatagagcagaagctggaatataaacacacccatcaataaacccaggcaggactcgtcggccggctaggttgacctgcttatcggatgcaggggcatcctgttcggagcctacataaataatgctttcatcttcgacaaggagacaagtatctgcatccttgctatcgtattcagtgcgagagaagacagaggcgttgtgataaagggtcctcatggtggggttgaggggttggagttggaagttggagaaagatgaagcgaagccctcgcgctatgtgactcgaaggaattctcgccctaaggcgcattccttgtccaaggatctataatcttccagtttttgattgaaattgcttgttgaaagtcatgtgtggccgggcaaggtagtctcaaagtcaataagtccaaatacataccttactgtgtacctaagtagtaatacttccatagtatagtagtaaagcttgatatatttctaatggaaatataaacggtacattgccccgggtgcaacttaaacactctagctctcgcatcagcggttctagtgttcctagttctcttacgaaagtgccacttcatcataaagacaggacacaagactaatcctagtcccggcaaccgcagctcgaaaggaagggccgcactatctctccccaatatgtcatgggtgcatcctccatacgactctcacccaccaccgtacccgcaaacgccatggccaagcgaggtgctatacttgacgacagtcatgcccacactagctttataaactcgtccctgcgcggcggggcgtaggagataagatgatcgcggcaggaagcggtgacgacatgccgacgcagacggcgactatgttctaggaaaggttggccccgtgaatctgttgcgtagatatcctggttaataagtgcgctatcagttgccttaccatgatcatatagcggagatgcgtccgagcagcttgtccataaccagcgcggcggcaaaatcagtccgatccagagagctgtatcatgccggtagaacgggtgcgccagccggtagcctcggggtatctcggggtatctcgcagtctataatgcagcatttgtcgctcgcttgttggggattcacctcgctgcttgaagaatgagcaaaaggctggcaagacgcaagcctatccggggcactgaagaaagatctccagctcaatgtggagatcactaaggtatatgtaattctaccagtcacagaacccgttcagcagaattagggaatcgtcgtcatccattcgtagaaaggtactctgtacacacaaaattgcctttcctgttgttcatcacatcgtaggcctgttcagtccggacttgcccaaagtctatctggctaggtaatcaaaataaatggatccttccaaggggtgtaaaatagaacaacaaagaagggggcggaaaaggaagaaatgaaagaaaacaaaccagacttcaacttccacctcccccaagccgactgcgaacccaaccagtccatcctccggaattcgaacttgtactttcgctacgactggttgtccgcggacgagatccagacccttcttcttcagcagaggcagttggaggtcgattgttggacgaggacgagggcgaatgtctagcctgggcgtcagtcccttcagttcctgatctgtacgggagcaaaaataatcatcagtactactgatcagttgacttttcatgctgtgtcgagagcgcttacggcatcgtgtttgtcgcattcgcgtccgctgccgtcggatcaaccccgcgtcgacagtgcggacaagagttatgttggttcaaccacaactcaatacactgcggatggaaccagtgtgtgcaaggaagcacggtgacctcgtcgcccactttgacagcgtccatacaaatcgaacactcggttccttcgcctccgagcatctccgcgtcggcccgcttcttgggaagagcacggatgacgtcttgagcagccgggggagccgcagtgcggttcccattctgctctaccagttcggatattacccggtctagctcttcctgtgagtacacagcatccccattacggctgatgtccatgagaacctcaagaagtgccctgattggagtccctcctgtcacgacacgcacattcggtcgtccaggtctgtccgtttctccaagctgaccagcttgtagattattgagattggtgtggaatagctcaaggatactgcagcagttagataaaacccagtttaaagaattgatggaacgtactctcccaaactccgtagaggtgatcccatgggctgaggtctatccgcatcacgaggaaacaaacctccagcaccgtcgtcgaaagggccacgagaggaatgggggccgttatcaggcccatatatctcatcgaaaaagcttcttcgcggctgcgggcggcctggtgaaccaggtgaccctggcccttgtgcgcgcgcagacgcttgccgattaagctcagtgagactctgaaagaacgaattgaaaccgtgaaaagcgggttgtatgggatcggtggg

SEQ ID NO: 14699 - DNA, 622 bp, Emericella nidulans
  unsure (1)..(622): unsure at all n locations
tgtacactagtataaacaattgattgtctggtgggtgataatcgctttattatttccagtacgctcaaggttcgatctgggatggtggatctcactgacccaaggctgtggacgagtcctgccggttcaagcagcaggcccggggctagagaacttagcgggctcacattgctttttcccctcaggcgttttgtgcaaagccagcagcagtccattatggcctccaaccccggcctgatgctgctcaaactttgttcgcttctatttatcgctcgctccctcctcctctccctggccgtctgctgaactgacttcgtcagctcgccaccctcttcatcaccagtcaccattcaccagtcaccacgcacacctcactacggacggtcgcatcaggaggtaccattaaccaaatcatatatcgcgtctgaccgccacttgaccaatcattcgagcgggccctcgttctcttcgctcacggccgtccgcctggtcgggtctcccaaccgtctggttctgggacacaaacaccccgtgccacataacacctgtctgtctgattctctcgccatccaactncgctttcttcttggtttcgtaaacgattgcatcgattntatcaatt

SEQ ID NO: 14700 - DNA, 512 bp, Emericella nidulans
catcgattgagtggatgagcagcattgggaaggatctgctggactcgaggacgaatgcccaaagaggagtgacgcttttagaggggattggatgatgacccaaccgagtaacgcgtctgggcttcgcatggcccgggatcacaacccgtaatagaagaaaactggcaggccctgagcattaattacaataccatttgacttaactccgctcaaaaagaatctactcccttatttaagctggttacactgaaatacctcattccgaacagtctgacatgtgccattttaccctataaccattcatctataaacccataaccaaggctttactatttcctctcataaactctttccttctgtgaagttatttatatgctataaatctattttcgacaaaacatttttcaacaagctcttctttcttaaacatctacaaacagatcttcaaaaagtccccctataccagtccataatcctacttataatctataaaaaggtcctcaatattaaac

SEQ ID NO: 14701 - DNA, 1223 bp, Emericella nidulans
attcgcggccgcataatacgactcactatagggatcactgcgccgaggcctaactctgatcactcctttcaaactggtaaatgttcagtaaactatcagagcttctatctactcattcactgctggcagtagttccacacatttgaaggtgagcacgtgaaagattcatattatatactccaccggtagcagtagaaagccgtctagacaactagaatcataaccaccaatcctctcttagaaatagacggcatagcagaacattatgctacagccgaactcatgaaactcatccatgcaaaaccgtcatcgccatcgagagaccctgaacacaaaaaatccacggagggaatgaaaagaaaaacaatcaccagaaactgcaccatccaatccaatgctgacagatgttctcaacactagttgcctgtgcaagaagcttgtcaacttgatcgctaacattgagctcttcgctaggcttaaagtcccggccggtcagcttctcccgcacccgagcaagcacctgtaaggctcttgcattctgagcctcacgtgcctcattaggcaccccttcttgagcgtcgagaataccaccttcaaggattgaaggccgacggtgccgagagaagttgctgggttggacgccgtgctcgaggttgacattggagacaatcgattgacgacgctccgcgttaaatggcattcggtcaggagactcgcgaattcccagacgccagttgattagagggtcgtgaataaactatattaagttagcaaatagtggattatatgaggaaaaggtaacttacagcctccagaacggccatcagcgagtccttgttctcacgtatcacccgcatgacagcttcacaagtgatccggtagcttccttcaatgttgctgacttccatcgcaaacgtcaacatacgcgtcaaacggaatggcacgcgctccggatacttttcacgatgcatggcaacttcgaagcagtcaccaaagtcaatatgaaccactttgccggtcactctgtccagaagaagattggacgggtggcggtcacctagaccaaggatgtagccgaccatggacatgactccaagtgaacgagtgtagttggtacgacgctcaagccaggcttcggagctcttactcttcaaccacagaacacggtacagatccttcccggttgtgttgtcatcgcataccaaatattcaacttctgcatg

SEQ ID NO: 14702 - DNA, 608 bp, Emericella nidulans
  unsure (1)..(608): unsure at all n locations
gagaccgcttaaaccgactactatccttgtccgtgaacggtatgagagtcgacttcgacctgcgctaactctatgacccttggtaccaaaatgcgaatgccctctcacacggagtatgcactctggagcatctctatatccgcccgtatctagcaagggagcactatgcgcggcttacgctgcacgtggctgcctaacacgcacacatacangacggcatgcaccaccgactatcttacagcacgaattgacgactgcgacgcatcatcggcggacggagcacgaaatccagacactgatggtggcgctgatacataacctgctcatgatgaatcgcgctgatactgatattcgggaggctgctaagcaatatgctcacactgtgatatatgacgacggtggatgctgcctgtgcgaaatctttgtagagaccaccagtaactgataccgccctgtggaaatgccgtgatgacagacgaatgacaggctgagatatcatataacaggatgcctattactgacgcatgccgtagacccttagaagacggggacatgctatcctgactatgctaggagctcgccgcgagcgctcactagatgcgagagtc

SEQ ID NO: 14703 - DNA, 439 bp, Emericella nidulans
tatatatttacatggattagtggtccgttttacatctttcttagctggccagataataaactgaggtttcttgcgcatacttatctcatcggacagaatggttatcatccatacaacatggagattatgagacagttagagggtctagatgggatgaatgggaaagaggcatgataaagatcgtgctagatcacatccgcacctggactaatgctgaagcgcgaaaggttcctgatgatatagatggtcatagtgacgcttaaaagtacatggactaagagggagcataatgatgaaactctgagcaaggaagagattgacaaactcgtgggtgacttgaagcatcgaattgccagcttacgtttggatacactacgactgtatacgacggacagaatgacacctgattctgcacatgacgtaggaggctacttctgct

SEQ ID NO: 14704 - DNA, 2300 bp, Emericella nidulans
tcatctaccgacagtccgatagtctcccatctaatcatgctcgaactccgacggactctcgctgccgctacaggcacagacgcatccgttgaagacaccccagcagcagcacgaaccacaccagcaatcatccagaaacaaatcactgatatctgccgcagcatccccttctgtctgggcgacgttgacgtcaacggaaaccgcacgacatcgccttcggcgggctcggcgtcagcgccagatggaatcagcaagccgcagccccgcgcccgcgcgttctccgtttacagcatgatctggccgctgtggtatattctttcctgtgggcttgcgacgccggcgcaggaggaccagattcgcacttgccttgcaaggattgggtctgtgcttggcattaagcttgcgcttgtgttggcggaggatgcggagagtcagagacggccgccgattagtcttgagggagtaatgtttccaggccctgaatcagagccgggccgttgagacagaacagaaattaagatgactaggctacttgctaagtggattggctggcggttggataaggttaagggtcgttcttgatctcttattactggatatatgattacttcgtacatatattgcaacgggtcggtgtatatacaaccattcttttctggacgtctattgatctttccaaatacgtttattttattctcatttattttaattgtatatcctcttagaccagtgtaaatattgctggagggttacctactttcaatgcagatggatacaggtatatctagactatgtgtgacgtcatgcatgcttcccatctggactgcatctgggacaccacagtagaaagcaaagaagctcagtgaaagggcaatgattaatagtagtatcttagctatagaacggatgtcggcactgctccttcacaagataatggaacaagataagctgtgaacgcatgtatcggcacccggatggctcggccaggcccagcccagccccaggcacatactgcatgcattactgcttcgggttctgacgacatagccccattatccacgccctgattttttcttgacttatatagtgggagatttctcagaggtttgtgcgggcgttttgacagtttacttcgtgttgcattgtttacttatcaaaataatccactgtgatcctcggtatcgacattgaggtctgttctttgtactgtatataacccctttggaagttctagcccgttacattcatacgaaatggcgacgcaagagaggaagtacccgctcgggaagattgagcccaatacgctcaagtactttggtgcttgtacaatgggaggaattataggtatggtttaggacccaaccaatcttgaacagatgatggactgacaagttggtcgtaatgacgtgaagcttgcggcccgacacacacctcagtaacgcctcttgatcttgtaaaatgtcgtcgacaagtcgatccaaaaatctacacttcaaatatctccgcatggcgctcaatcatttccaaggaaggcgtgcgcgggatcttcttcggttggtcgcctacatttatcggatactcattccagggagccggtaaatatggcttttacgagtattttaagtacttgtatggcgagcgcatgttccccaacacaaaccgcacggttatgcatctggcggcaagtgcctcagccgagtttattgccgatattgcactctgcccgttcgaagcgatcaaagtgcgcatgcagacaacattgccgccgtacgcccatagtctgcgcgaggggtggagtaagatcattgcgcaagagggcgtctccggcttttataaggggttatacccgctctgggcgaggcagattccatatacaatgaccaaattcgcgacattcgaggagacggtcagcatgatctataagacgctgggaggccccaaggaaagctacaacagccttcagcagacggggattagctttgcaggaggatatattgcgggcatcttttgtgcgattgtcagccatcctgccgatgtattggtgtccaagttgaatgccgatcgaaaaggtatgtttcccatagctggcaacgtggtgcatatgtgctgaccagattagcgggtgaatcagcaatgaaggctgtctcccgcatctatgggaacattgggttctcgggcctgtggaatggccttccagtaagaattttaatgcttggaaccctaactggtttccaatggttgatgtgagttgccttttattatcgttagtggaatagtggtgctgatgaagacagttatga

SEQ ID NO: 14705 - DNA, 486 bp, Emericella nidulans
agggtgagggactgcaccgaaggctgatgtagccggacgtcagcacataatagaggtctagacggcacggcgcacgagagacctagtatgtatagtgtacggggacgatcattacgcctgacgaacgataggcattcccatgcgatggaaaggacattatcgtccatgtagggcaacgggggcaatggtacctgctcagcattagggtattgagtatataatacggactgcttattaaggaccaccgtgatctcccaatttcaggcaaagtcgcacctcgcatcacgagtgcgggcaaaggcacggacacggtacgcagatacactgaatgacagcgatagctgatatgtactcatggcgataatacaacacaacgataattgcgataaccggacattacacaaaagcccttgacactcgaactaatcatgaacataggaccaatctcaaggcagagactgatgatgacgcagcaaactcactgac

SEQ ID NO: 14706 - DNA, 1853 bp, Emericella nidulans
aacaacagtgcctggggaacagaaaccatcacagagacctcgatctcgacagtgccaggggcaggggtgacaattacgctcggtccgggccatccccataccaaaactgtcacgatctgggagcctactacaatatattccaatattactgttcctaccaccatctattccactgtttactcggagacaacagcatggtcaacaacaacatttcccggagaggagactaccgtttgggagaccacaaccctgcctggtgaggagaccactgtgtggacggaaaccactgcttggtcaaccacaaccctgcctggcgaagaaactactatctggtccacgacaactttgccaggcgaggtaaccactctccctccagtcacaacgacgatttctggtactacagtcacaatccctggatcggttacgactttgccaggttcgacaattacgctgcctggatctacagtcgtttacaccagcaccgttagtggtccaacctcaatcgaaaccgtggttgttacgcaagttatcagcacaacaattgtgaatgaaactccaggtaaaaatcatgtgcctatctttttttcaatggctaatccgtgtaggtccggctacaaccctcaccattacctcgactgcagttcagactcttcctccggtaactgtgacaggtatatcccaagcccatcatgcctgatcctatactaattcttctagcaaccgcaacagaaacaactgcaacaactgcaacagaaactgaaaccgaaactgtctctatctctgtctgtcccagcctgacgataaacccgacatatacacccgccacgcctctcccaacggactacacttggggctgcccaccaggttacctttgccgcccaagacgccagggcacagtcggtggttgcaactttgaagccggactacccgcagaaacatactactgcagccccgaagaatgtattgaagcaccacccctgtacgacgaggaccaatactggggcgaacccgtagtatccgacgaagtcggcacatacaacgtttcaaagtactacttcaacctcaacccggagccattcggtcttaactactcgatcttccgcttcccagaaaaggattatggcgtggactacttcaaacgctccttcctgggcgtgggtcttggcaaaatgctcaacaagctacttccccggcaggaactattgcaggacgtcattcggttcagcgacgtctgctacgacgaatgcaacggcgccgcattggaagcggaacgactggggaaaacaccctcgctttgcgaggctacgtccgcgttcatggacaagctcgatcaatgtagtcggtgtaatgagagataccccgctgaagacgaggaagatccgcaggtcatcccgcctgatttgaaccagtggctaggctactgtgacgggctgggcaacgatgaggaccagacctctactcgcgaaccgatcacaacgtccagcgagagcacatcgagtacacgcacatcagccgtggatccgaccagtacaggcggggatggagatgaggactccacctcggctaccgactcgaccaccctgactgggacatcaagtcccggtgatgacgaatcaacccagacagaatcgggctcagatgccaccaatgaaagctcgggctcgggaacttcgggtccatcacctagtccaacctctggcagtggcggtagcgacgatggctcgggaggctcaagcgcaccgacgccagggtcaacgccaggtaccccgactgatgtctcgccgacgggcaccagttcggcctcgccctcggcgtctgttttacaggtgcggcggttcggtttggctgcccgt

SEQ ID NO: 14707 - DNA, 3342 bp, Emericella nidulans
agctgatgtcttatcgtagcgcgccctataacagggcatgatggcttgacgatatatgattccggcggcatgtttgaatcgctcatattcgacactgcgattgatgtgattggcaagtcaatattcaggccaccaggcacgagtgcgttgttagctgaagatcggtttccagccaagcaatggtgagaaaattgccgcaatagcccagcattaatgtcgttcccagcccaatgcctcctggaagccctccgagccatggcatgggcgtagccgatgacttctgaggttggaaaagtccagtaaacttcgtgcagggatacgtatcactgcaccctgtaggtatgaagcgcagagcaaatcccgcatacaggttgcgaccctcatcggcggctatccctaccggtacactttgacagttcctgtaatgtcccagttcgtaagcctaagcacaaagcaactagtgcgcaggtaatgcataccgttagagaatccgcccgcccagcattttcctttctcattccatgccacgcaactaacagccttgactcgttctccggctggaattgatgcgattacatcaccactcagtacatcccaggcgaagatgtgcgcctgagcagaatgatcatcttttaccgactcgctgccgctcagaaccactgagtcgccttttgcgaacacggaccgaatgcgcagctcaatgttgtgatatgcagctggctttgctggcgacatatgggattgtttcgcggtgtctcctgacccgaaagctctcaataacttcccatcgtcgcgatcaagcatccggattcgactgtcgagtgtagacgttagaagcgcatttccgtccgcagaacaccgcacgctcgtaaccgggttcccgaggacatccaccgtcgtccggcccatgcggatgtcatagacccgcacgcggccgtcatagctcccactcgcgatagagtaagtcggcatatgtacgtgtagtgatgagacagtgtcgctggcctcggtgagagtctggatgggtttgtgagcattcgaacgcgtgtcccagatattgatcgtggtgtctgcgctgcctgaacacaatttctcgtcagagcaggctccttaagcaacaaggctaaatcatggctaggaagacactaccagacacaacaaccgcatcatcttcgcccgcaaattgtaccgcttcgaccctcgcgttgtgtgcaccccaccgccttatagtgatcccctgttcaacgtcccacagaaaaacctgccgatctccgcctacactcgcgaatttcgaattatccgcagcaacggcgatgtctagcactgagtaaccatgagcctcgtacttctgaatcggagacgtggtttcgatggtcgagccattgttgctatttgggatcgcgcgggagagatgcacggcgcgatcggtagatcctgttaggatgtaggttccaggaccacttgagaaagtcaccgcgttgacgggtcctgcgacgcgatttagccttagctggagtaggggttgtgcggagaaggctgggcttcccattatgtgtcttgagggtgtgtactaattgcgtggggaaactccctttttcagtcattgacgacctgagaatacaattgtggttgatcacaaggtcacggcgattcgggcataggatgtcatatgtaagttgtaggcataaggaggcaacggatctcgcatccgaattgttctcagggaatctgagagatagatatcaagacagggcactaagccggatttggctctggaaattgctgctcagccgtactttggctttctacaaagaagcatgccctgtactcataggcgtctacccgtgcaccatgaggtctcgtaactacggctacatatctcaagtagtttatttatttattgcccggaattcagcaaatctagcagtgcattcagaagcctgtgcgcagttctgaagttcaacgtggtgttctcgtattccatggatatcttgaaaaaaatgtacctataactggagaacaagtctgttagggcttcagccccgtctatctaccttcagattgaggcttccagctgccaacactacgcagtttaattgagttacacttcgcaatgcacaattaaatctgtagttattgagatgccggatacaagagggctattatcaagacatagacaaaccatcgctagcgactagcaagcaaattcagaaaacaggacaagctggatggggctgggtaagccgacatttgtggtgagcttgagtaaagaacactatccgcaaatatcacggagtgtcaaatgatgaacactgataggaagaaaaagaaaccgtcaaggggtagtcgagagtaaaaagatattagtagagatgaatgcacactcctgctttttctaccgtacgtaaaacggccactaccacctgctttcagtggtatagaatattgttcagcgacggccgtggctaccagtcaatgagccttgcacgctttccatctcactatcccaagcttagatgctgcgtcctagttagaccaacgatcctagacgcgacttatacgaaaatttctgggactttcactatcagggtagcctccagattcttggtgtaggtgatctgattagcattaaaatttgtatccactattagaatcgatactcttaatgaataattgttccttaagacttttaccatgtttccttatgttctctgtgcttagagtggtcatttacattatcaagtcttcatatataagtgatctcatactttatcttactatatacattctataaattttatattaaaaatattcttctttatcataatgatgactattcgttatcttgaattgtgtaacatactacattattctcgtacgatattataatcctcatcatacataactaaaatcattatttctctcatccgttaaacttatgtatatcttattatacccttacttcctattattatattgtcttctcctacttgcaattgataattttattttgtaatactttatcgtattattcatcaatctttacgtattcatatctatcttgtatattcaatcttaatcaactgatacatctatatatttctattacttacatataataaatactttttatatctatactgacttgttatttatgcattagtatctatatagtttttatcctttactagtattaatatatcatgttttattcttaattgactcctttgtctttcattatcattgtattataataatatttatatattataactttcaaattcaatatgtacatatttctaataatgtattatcatatctaatcccccccccccccacccc

SEQ ID NO: 14708 - DNA, 1115 bp, Emericella nidulans
gcaccaatcttcatcctgctggtaaactggacctcgcccaatctatccgaagaaaggaatggattgagaagatagccactctgatcccctcatgcggctgcaacactggcagcaaacacagttcaaaaaatcaaacccaaaccctttattgaagcagtctcaaaactcgtcgctccttctgtgcagggtagaatgtactcggtatcctttagggaaattaccgacgaagtggcgggcgtgattgcgcatttcacctctgccgagaggatgccgcgggatgagggcgtcctacttgaaattcatgagctacgcgctgtttcgccttctgcgaatccgaacaccagctctgtatttagtgcacgagagccacattttgtcgtcgcggcctgcgcaactgctgtgcatgaggagaatgtcgagaaggtcttgaaatggggagaagagctccaggttgcactgaagaggacgaagagagagaatatcctgccgacgtcgtacatctctttcatatcgagggaagagatggaaagggatcaagagaggattttcggaggacatctgcccttcctgaaagatttgaagaggaggcttgatccagagaacgtgtttaaagctgcagtttctggtctatgacttgattactgtatataagcttgggttatatgctggataccaaaactatcaggtttccagttaaccttgggagcatagcggagtatattctgacgatataaaagagccagcttgagaggccctccttatttgagggccaatacgaagatctgataacgaacgaggattggctatccagtagacgagcatgtactcctctagcagactggctatgtaacagttaaaagtagccaattgagcgatcgagcctcgaataaccctaatcaaatacaagaacataactatatacaaagccataaacacaagccgttccgcccccggccgcccccttctcccccggctctacccacgtagcgctcccatttttgcgtctgcattatacactctccgcatggacaacctctcctgccttcccactaccaattttctcgctgtcatccttttcggtcattccattgacgctactcggcgccccgaacaac

SEQ ID NO: 14709 - DNA, 2953 bp, Emericella nidulans
aagccgttgctcagtaatgtgcagaagctgaccggcataaatctgtcagattaccgtatttcttgctgctgatcagtgggggcgtaccatgtcaacacacagccgaatgcgtccatcccaggactgcaggtatcacagtcgtttcggcttcccaattccttctggggctggtaagcgcatctagcgtagcaattacatataatagtaaaggctagaaacaaaacagctggagctgggaaaaccagggccagcggtagcaccatacagtactggcctgaggggtctgaatctcgatacaatgatcaatgcggctttatataatattaccattaggtggcacactgtagatcagggccaggacccagaataaaacccaagccagtgtttgtctcagagctcagagagttctgcaatgcatctatttattgtagttgaacgatattatattgtgttcctgcatgtttgactgcaacatccatcaagacatcttgatcgcaatgctcaaaatcagccaaagttgttctcattgaatgcttcataataagataaataattaatcaagctcgattaacgggtatttgcctccctcgccagtaattggatcatgaaacttctctaaggcgctctcaacggccgccatgtacccgagcaccttctcttcctgccacctcctaccgaccacctgcacagccgtgggcaggcctgccattttagacgcatcgtagtgcttccaggcaccctgcgcgagagcatggttggcccccagctgcttcaaaaccgttttatacggagccgtcagagcatccttcttcgggtcgacgtgcgacaccggcagcacaccggtggtgtagtcgagcaggttccagagaaaggtgtatccgcaagacgagacagcgtccttcatggccttgtgtggaagcgcgggtgtcgcgttgaccgggcacaggataaagtcgtactgctgtgactcagcgtcccaccaggcatgccaggttgaccggaagcctcgcgctttgcgacgagcttccattgctgggctgcgctcttggaaccgaagctctggatcaaagttgcccatttctcatcgcggcggatataccgcacatagaggtagtagaggtaccgaagaggacggggcaggtttgcaatcagggacagttgcgcagcacccggatcggacggctcgaagctgtaaaagtgcgagttgaaagtctcgcagccgtctgaattcaagagctgcgaggcaaggtgaaggccggtaaacgggtccgcagtcgctgggggtgtgatctcgacgacttggtgtcctgcagcagaaagggcagccgccgtggtagtcacagcgcgttgaatagccggagtgggaggaatgacgcctgttcaattagtatgatactacttaggcgacttgggacataccatcagttgccatcaatccgactctcagagacttgctctttgcctcgctctcttcctcactccgccaggtgattggatgaacggtgtaatcgtacttccacggcttcatgctgatgattgatcgggtaaagtacgtcaagtcatttaacgtacgagccattggactgaaaacgctcggcaccccctcctgccccgccatgctggtgttgacaccattctttggccagcgaccggtactgcaacggagagagtagataccgctccatgcagcgggaacacggacagaacccgcgacgtccgagccaataccgatgcgggcacccagagcgagcaaagcaccctctccgcctgttgatccgccgggagaatactggggtacgtgagggttgaggcagggtccccagagcgcgttggccgattcgaacgacagaagcgtcacagggagtgctgttttcgcatacggtaccgcgcctgcaatggtcagcctccctaacatacagggccaaacatacagggccagggtacaaacctgcatctttcaacagtttcaccagcgggccatcctctgcatacggtttccccgccagacgggagtacccgagtgagatgtcgaaccctttgacctggattgagtctttcaacgagacgggcactccagccaacgggcccttgaggttgacctcagtctgagcccaggtttccgcctcgggaagtagaagttctgtaatgcagttcgtcttctcttgtgctttcacggcaaccttgccgtacgtccggaggacatcgacaggggagagcgtgccctcctggaccgtctgtacgagctcttcaatgggctccgaaactatccttttgtccgctgatgtaaagggcgcatgatagtctggaggcagagaagcgaaccgcgcagctcgttcctggcgcttgatggtcctacgtgggtcagcaaccaaaacaagaaacgacattctttttgtgcccgtgactccaggtaacttaccggacacgccgataggtgaagtaatcaaatggtggaagcatcgttctccgacggtgtaacgaagagtgatattgaaagaggggcggccaatgttgcggtggtgccttttataccgatgcggagggggcgcggaggcggacagttggagcgataagacccgcagataagcgcctcggccgggtccactaccaacagaaatccgggggactgacgtttatccaatgaattcgatgatttttcctattgaagatgagttttttaaagactgaagcgtctcgaaagactgagaatagatggtataactcaaagatctctactatggccttcaagcactatccaggtcatgtgacgctctgacaccgaaggaaaccgtcagatcccaatccggcaggtcctcgcggaagggataacttcccgataatcggttggagtacagaagctgtgtctccaaccctcgccctaagctgccttggagaagtatgcgatatgttaaagtgtaaattttgagaagctgtccactcctctgacggtctt

SEQ ID NO: 14710 - DNA, 1761 bp, Emericella nidulans
cgccgtccagaaggcctatgctcatcccgcttggattccccttgctcgcgattggggcggcaactgatcgaatcgacttggccccagggcccgccgggaaatggggtcaagtcatcattttcggccgagactacgattgtaaatatgtgattgcccgatcttgggccgctttccttgcagtgttctcggacgacctctgcggcggtaaggctgttgtggacgaggattcgaacgagctgaaactcttggaattcaaggctcagaatgtggaaccaccttacctagaaataatgcgttggagaacggatcaaaaatacggccggaagcaacctcgccgcaaggccccgaacggcttaggcctcagcactggcagcagatctggaaaagagtctccttacgggagccctggacccagtgaagaacgtggaaggtcaccacaccgttttccgaatcgcggttcggctcaaagccccaagatgcaattcggtatatcgagtccactcgctcgcgtcaccgaggaagtatcgagtccggtacacggtagtgcggaaagcgaagtcgttgatgagggcaataaacacggtacgaaagagtctcaggccgaagatttactggaggttgcgcctcaaaaggcttccggaaaggagaacgaggcgcttgaagagcaaccgccggcgaataaggctgacactgaaaggtcgcaaaaacgcgagtctacgcctggctcggataacgaagtcctaggcgagatgaagaatgtcgctatctaagctacggtcgtatgtctgttctctctatgttttgggtccgcatatcatgaacaacttcatttcgccgttttcgcgcgggcttctcatctatcattacctgaagtgtatccggtgcagtcgctgaaacgatggggtccttgaagatgtcttttcttttttttattttaatagccttgtataaaattccaccatcgtcgtgttttctagtgatcttgctcagcacccctagtcacgcatttttttctataatcatgtgtaactttatccttgcggtcatgcagtgctaggtggttgttctttaactgttattttactaatgctactgtagactcaatatttgtgaaagctgtgccggatgcaacaccttggtgtgcttttacagcttactcattactattgctgaaaacccgatgtgtaacaaaaccagaggtaacctgtgcacattagcatgtatgaccagtcactgttattctgagacccgttacagtgtaatcctttgtggcacgagagtgccaattttcaatggtgaggtttgcatggaatgggactctacagggccgtatcttcgtacctggaagcccagccgcaggcgcaattggccagctctatacatggaaagatgatcgacgagggccacggttatatagaatctattggtcattttgttggagcgggtatctaggtgcactgccaattcaaactgatagcaggcctgtccttgagagacatgtttctggacgatcggtgtatctcttgcttagatcggcaaccgtccgcttggataagatcaatttgccgtcaggctggtaatggcttgctcgcaggtgggtgccgactctcttatcacactcagcctaatagcggcgttcagatacgcaatacagtcagatattgtctgctatgcggaccactgcctatcgtttcagtcccagtcgctgtcatcgtcgtccttgtaggctcgcgtaatcccagtccgaataccgcgtctgcc

SEQ ID NO: 14711 - DNA, 1651 bp, Emericella nidulans
  unsure (1)..(1651): unsure at all n locations
agctgggaactcccatttctcacgcacctggtagcaactaactgccgaccgcacaatacagctactcgattgatcatagccaataaccatagtcaaaggctcctcttgctcattgatgtagctccgcagcgggagattcgcgtacggctcggacgcgttatacacgtccgtgtttccgctcgcagcctttgcacccgcaagctggatcgttagtgtggccgtcttacgtgcgtgtagctgtttcgcgcttagatcaaatcggattctccagtcgtgggtggtgttcgattccgctacggggttgtcgggcgtgggtccgaagacagcccagtggactgtattgaagtctgttgctggatcgctctcaccgatcatatagtcaatcccgccggggaagtcagattgccagtcgtaggcaccccagtagatcaggtactctggcgggtggcggggatgggtaggatcgcgcgctgcgcgtggcggaactcgccggaggatttgtcgggggtaccgagacgccagatctctgtgccagcagattcgggcttccatgtctccttgatggatgttgatttgcgtgctttgacaacgatcccgtcgcgtgtgaagtcgccgaaaatgccgtctgcatagacggttagtcggtatttgccggcaacgacgcggtcgatgctgaagcggccattcttgtcgatgtcggcccagtattggtgggacgagggaacggcagagttatcctggaagtagtggccgtcgacggtgaggacggcgatgggacttttcgcgttcttgggcagcttgatcgtgccttttacgctgccgcgctgcgacgaagggacgtaaccaatgacgtgtttggcgatcgagtcgtagaagtcggcgttccagcttgggctcgctagagagcgagcctcgtctctgagctcctctagtgaggaggatcctccgccgttgaagaggtagaactgcggtccgaaggtgcggtcaaagccgttggttatgttcggagtgccttcgccgtggtggttggaaacgatgtagttgtagattataccgtcgacggtgaggtcagagtgcagcgggccctgctctgtcagctaggatctgttaggggtgtaatgcacatactccgtagtaggtatcctagaaatgtcagcattgaattcaacccgttcgaaggaacgagactgacctttgtattcatcaccagccatgcgccgtatgtagtcccatccgaggtagacccgtccgcgtagagtccgtggacatcattgtctcgccagtctaaccacatcaatcagcctcttagccaagaaaggaaaaatcccaagtgagacgcacggttcgagaaggtgtacttggtaaagtactctgaaaactgctggtagtatgcatcgtccggcgtgttattaagcctccaggtcgcgtcctggacaacgatctgctccgcaatagcctcgtcgctgggcaagggcgcagtctgcaggtcactcgaggtgagatgtgtccatagatccgtattcgggcgaaagagcgtgcggagctcttgtagatagcgcaggaacggngtgggtcttcgtgtagtacgcccatcgactgaacatatggaaacccgtctcgccatcgcggaagaaccagtactgctggaact

SEQ ID NO: 14712 - DNA, 2249 bp, Emericella nidulans
ctgctcgcgacgcacattaattggtaagtctgcagtctagactggcgctaggttgcagattctggagtctagaaggattcgtggtctgtgaagctatcggcctattgccttctatggtatgatgacacccgtctttgctcgtcctcgctctcaaggacgagcggaggggtcgatgtgaaagctgtcaggagctgaagctgtcgatcataggggctagctctttctggagctatcgccgtcctgcggcccgaatcctaggggtccagagggcgcaatcaggatcgttaagatacggcaccagaatgaattattgacatgcggacaatttcaaggctgctaccgagaattgggtcggaaccgcactctatttggggaagatgcaatctccagcagcaagttgcacaaggctgcaggtccgagtttcacacgaaggcgcaagtttgaggtatgggtgattggtcacaattttgatgcaccaagctgcaggtccctggcacaaaattcggggactggaacgggcgggagccagcagaagcttggaagcaatgcagatgctgaagcgggaaccttgggaacttccaaggctgagttttggatagctggggagggagatgcggggagagctcagtcaggtgacgccgtcacaagcacctcgaccagagctcttccctgtttctcgcctcatcgtcaccatcgtcgccgtcaatctcgtcatttctctgcctttcccgttggtgcggtcaccctcgctgtaaattaacatcctgtatactatatctagccgcattgcttacggaacttgtcttgggagtaattccccgcacctcgcccccgctccgaattgtaacttcgcagtcgtcattctatatcactatcatcggatcatctcacaaacgagagctctggatttctattcaaaaggttttaagccctcgttttagtcctatgcctacttggctgattattgcaggatgtcacttcctcgagtctcctacttggagtcgtgggagaacaatccagccttagttcgtcgtcatcaagatcgcgaccagagccctggccgagcagtccaccgtgacgatgacgaagagtcctaccatgacattccggacagctcagtagcgtcctcgtttccatcaaccaccgatcttccttcttctcggcatcgcctgaatttcaacccgtatggtggtttgggatggactcaggccgtcggggcggaagatgataccaatgttctctcgaaggcgtcctccattgtttcgaggcaaggccaggccgatcgaacggctgaagcgggaccgtagcgacaatctggggattcgcagctcgaaacctgggggcccttagagaccactggtgctttcgaagttagcaaggcaaagcgagttggtgggacaattgacagccaatcaatattgatctgaatcgctgactttcttctaaagtccaggtgtcctttgccgtgatatactgtttccttgccgccggaatagtgttcggatttgcggcgatcaagccggtattcatccgtgaaggggtctaccatgatttctgctttgaaggagaggatatttgctatagacaggaactcagcctcaacctgatgttcacgatagcggctgtggcgacaaatgtgtctgcgctcccggtcggaaccattctcgacacatacggcccacgagtctgcggaattattggcagcacgcttcttttcaccggagcactcctccttgctcttgccaagcgcctcccgttcgacgcctacgttccaggttatctcctcttagctttgggagggccgttcattttcatttcatcctttcagctctcgaacaccttcccagccaggtccgggctgatcctttctgccttgactggtgcttttgatgcctcgagtgccttattccttatttttcggatcataaacgagaagacgaatggcgtcttctcgactcaaaaattcttcttggtttaccttgtagttcctatattcataatgattgcgcagttgtcggtcatgccaaagacgtcatacaagacggctggagagctcgttcaacaagcggaagaccacatcatcgccgaagtaacggaccgtgtcgacgaacaaattctagatcgcgacgaatgcgagagacagcggaatgatccgtcgatgcaccgacagagtatcgtcagcaaaatccaggaccttctacccgacgagccaatgcatctactataaatgatcttggctagcattgaac

SEQ ID NO: 14713 - DNA, 4253 bp, Emericella nidulans
ggaggatgaaggaaagtgggaggagtgatgtgttgataaaaagaaaggaaaagttagagtaagagatagaagagaggtgggagtgaataagaggggagaatgaatgtagaagaggtaaggtaaaggagagagtgagttgagaagggttaggtaggggagggttagaggtggatgagggtgtgataaatgtaatatgaaataaaatatgagaagataaaggtaataagatagaaagaaaaagattggaagtaagtgggggaagaagagaagagaataaaggaagagctgtaaaaggggaagaagaccattggataagttttgagtaagaaagtgaaataagaagaaatggtgttcagtaataagggaaatttaagagaagtgaatttgtacgggaggagatggataagatggggggacaagaaagtcccagactaggttaaagatctagtccccaggaccgcgggggtaccatgttgaaccattgagttagggtagtcgtggttgggcaaatggtgcaggatgctaaaacagttttacaccagtgcaagcggataatgatcaaacgctcagtggtcctgaagctgtatgaagttagctctcagactgttatggtggagagaccgagttgacaggaccatgtgcccacatgccactctcgtctttgggctggagtgtaggtggagtcaaaatggagacctgcctcctgttcttgacaattataaagcctgaacaaagaaaagaactggcttactttgccgataatatatctggccaccaaaagcgactattgcaggatatctagagccgggtaacgtaaatcagacgccagttttggcggtgtctaatgtcgagcccctccgattttgaggcggggaacccttatttattcacttgttccatgagtgagcttgcccagcaaatgagccatcaatattatttcctaaatacgagactatccaagtatgtattctgtacagtgctcgatctctgctctatgctcgctgccagacaaacccaatcttagctgctcgggctgcaatcagattcaaagttccagcgataatgacactgcccatgaacatctgagcgtacaagtaatcgccatcccctcgttggaccaacgccccagcgattggagacccaatcagcgccgcaaccccgacgaccgacataaccatccccatacgcgctcccatcttcttgagatccgttgtaagtgtgcttaatgtcgctggaaagagcgactggattcccgcggcggccaagccataaaatgcagcaaagccatacaccccgccgagattacgcacgcccgcccagcaaaaggcgactagaccggtcgcgaagctgaacgggatcagcatgttcaatggtccagtgtaccggtcggccgtgagattagggccgagacgacctagaagaccgatgccgttcatcagaaggagaacgttgattgaggtcgtcgtagacgcgccgatgacttccctggtaaagcttccaatataaaagaacccaatatatagtccccagaaattgagaaacatgccgatggcgaagaacgagtaggatgcttctttgaatgcggcccattccacaagcggtccgctcttacgcggtggtagccgttgtttcaggaagaataggcagggtgttattgttgctaaagatatgaaccccagggttcgcatcgtccaaccatatccaacccgcgggagcaggcgcataacaacagctggaaagacgagacctcctgttgcagatccggaggcaacgattccaatggcgatagaccggttcttgctgaagtatgtggttgtcagagcgattgtgggacaaaacatcagaccacagcctataccctgtcctacaccctgtgcgaggaaaagctgccagtactcagtacagagggaagtcataaagatgcaaaacaattccagaactgcccctgtcgtcagggtgagcttgaaatagccagcgtccgtcgcacggcctgagaatgtgccgatgaagaaaagcaggaaaatctgaatgcttccaacccatgagatggcggacggtgattgccctagagtctcagtatagtacgtctggaacacgccaaatgagtttatatagccccaggtgttgaatatgacaaagtgggccaatgctacctgggaccaggcaagaaaaccaccatccggaggagggccgaggtctcgtccggattctctggtacggacgatcgaaagagccctgactgcgaatgcgccaacatggctcacgttcgtagcagtcttcgtgaggtccttgccctgaccgtgtcccacccctgactcctcgtcgcccggtgaatctctcagggaactcacatcctcgctggagccctcgcctaccagtccggcagtttgaggtttctcgttcatatatgggtagctcgtttgacaagcattaggctcgtccgcacccatcgcccactggtataagaattggatccctcaagaacgttctatgataagggtgtgaagcgaacagtgggctgcatgcggcgtcggctcaacaatacaggacaagtcttcgagaaatgcgccagagtgctttggttggtagctgaggagttattgcaacggaacaaatcacacgggcagcagcgcacggtgagcaacaaacgagtctttgcacgtacagagtatctcgcttggaccagggctattggcgtagaggtttcagactatgggagtcctggtgtgaagaagtcaggtagggccgagtcaaagtatgactcaaaagggtctccgattctctagttttgtcattttttaaaaacatgggtaaggcagcaacaggtggatcttgccagagactttttttttttctgtacatgaattcgggggcagcggagagtgcggggacaaggacttggtgaaactgggcaagcaaagggcgcaaagcccgcgtggagactggacagtggagtcgagagaggcatgctcgcatagaatgccgaggcgagattgtacttggagtacaagtagggatttgtagggtcactcggttcatcggcactgctagactggaaaatccgcaaataagatgctcagagggtcgcagcgatgattaggccagactgcatggcatatcattgcccaggttcgtcgcgcccttcaaaaacaaggaatactctttaaaagaccttaaaagacccatttttgacatggaatggacgtttggatcacggaagctgacagaacagttcctcttaatgctgggaatgtaaaaaccgcttcctaaatgagaattaattgaggtactggagttgatgggaggctaactctcacacgtggggagattgcatccaatactctgtggggaaagcatgaaagtgggaacatgtaggcaaattataaccggtctatgctgtctaaagtatactgacaattctataacaccgttgtatataatatagctggaagtaagccgcctttttttcaacttctatactgtcagaatggcctaataatcctgccctgaagcactgttattgagcatcgtgatggtctcgataacatcactgggttccaggagatgccagctcgcctctgtctgctttgaacttgcaccatcagtgacagtgtacacatgatcgcccggtaattcaaatttcttcaaggcacggaacatatctaagatatgttagcagcaattcatggcgaagcttaggggtggcaagaaaaggaaagagcataccttcatctgtaaagtcgtctccggaacacaggataaattcagggactttcccgtcctcgtatgcctgcacaagccgcgtcgcaataaagcctttgttaacgaaccttggccgaacctcgagattggctttgccggccatgacttccacatcccaggttttggatacatgctcttccagctgcttccgacattctcgcgcctggaatgcaccatattccgggtcggcccgtcggtagtgccacgttagagcgactttctttctctcgatgaaagatccttgcgtgcgctcagtaaagtgttgatatatctccataacttctttctgccagcccatgtcggttgtctccgctaagttttgccagttgtcggaccgtggcattcggatgaaacaaccatgctctgcgctcagtccaagctcagggatctggcccatccactcgtctaagaaggactgaacgcgaccactaatgatccagaccgcattccgaggatctgcagccaaagtcttaaagtagcaaaagtcgtat

SEQ ID NO: 14714 - DNA, 2382 bp, Emericella nidulans
agagaaatgatgcagaaaaagggaagagtaggaaagatgagtgagagaggaaggggaaggagtaagaaggaagaattggggaagaggagtaggaaatagaaggaaagaatgggaaaaagataaaaagagtaagtgaggagaagagagaaggagagagagattgtgagaaaagggaggaaaaaaaagaaaggaaatagggagagagaaagagagaggaaggaagaaaaaagaataaaaacttgtgaagagaaaagaagggaggaagatagaaaagacggccggaattggacatggactgctcgtggcttccagccgacaagctcgcctgctccatcatggagatcgcccgggtatgttcctcccattcatcccacgataaccgcgacgacggcgacgactctgtatataatctgtgcaatccccatacctttacctggtcggctatgctcagcacccttcgtcaacacggattcgagttccgaacggtcccgttcaacgactggctacaaaagctgcggcaaagcgaaggcagaggagaggagctgcagaatcctgctgtgaagttagtcgaccactactaagcgatgtacgggggcaacgcaccaaagccgaggattttccgaactgaccaagctgagcgggatagcgagacgttgccaaatgggcgtttgaggattatccaggatgcaatactggctcggtatgtccaggattgtatgaatcgatggaattgatccaatcggcacttcagcagcccgtggttctgtggttcggtatgtcgtaggtgcttgtgttagtagtgattgagtagtgcagaatgactgatttggtggataatagaaacccatttctggggtagtttgacgagactgggtaatcaattcttctccactgaagagtggaatcgtagcaaagacgaccagctgatgcgctttctcaatggcttgatttgaagccaaagtggaacgtggggagtgcacagagcgtagagactaagcggtttcccaccgggcggagacagaggccgcgagacgcgggcactgtagtcgctaaaacgcgggggacggcgtccaattcattctctacagcaacaccagtgacctactctgagtaggcacaccacgcctcgcggcatcatggacgctcctgcaaaagtcgtcaagaagcgtatcaggaagccccgcggccgtggccttcgcactaataccggctggttggtatgcccacttccccagatccgcgaacgtgactgaccctggtcgtctgtccccagtctcacgtgccgcaccagacacaagaaatgtgatgaacgaagtaagtctagctagatatctacattgccattggaaactgttggctgactcctgcagagccccgatgcggcccgtgtactaattcggaccgcgactgcgtctaccccggcgatacccggcagactccttccgatagaactggcctggccagtcctgcatccaactcatcccggatacagcatatcctttgctcgccccgatcagcgcctcctggtcctgtagcaccgacgttagactacgatgccaccagtggcccgagcccggaaacgcacaacatcctggatcccgagctggtggccctctatccggatacccgtcccccagactattctggctctgtgcaggcacttccatcagcgcagaattctgagtcggtcacgcctgacgtcaatctcgaccacgcgagcgcccggtggctgaacctgcttgcgaccgatgccgcccaggccggtgatttcagcctgcccgcttcaactcctcgaacgcggctctcgcgtgggtcggtcagccactaccgcgacaacgccagcacggcgccgctatattctccacagctctcggaaagacaagcatggcaagccgactcggatattgctttaagcaagcacgaggcttccctctttagaaagtttgccgagcacattgccctcccagtgagttcccgtagcgctatttggagaagaaacagatactgaactagatagctcgacctctttgactgccacaaacatttctccagctatgccacccggcttgcgctccgaaatgtcgggctcatgaaagccatcctcgctctctcggcccgctactcttcactatcgccgcctactcatgatagccaggaacccactgatccaaacgaagccatccaattctactacgaaaccctgcactatgtctccaccgcgctccaatacaactcctacaagcacagcgaagagctcctcgcgacggctatcgtggtgagcacgtacgaaatgctcgacgcgagcgaacacaattccaattggcaacggcacctcaaaggcgttttctggatccaacggtcccaagacgtcaatggtgcgtc

SEQ ID NO: 14715 - DNA, 501 bp, Emericella nidulans
agcggagaccgaatagacacctcattcattttcaacccaagagtttgttccacagtgttggagacctgtagcgggctctccctggctacaagatccctctgtggtcacccgccgcccggaacgaccagcccatggaaaatgacgcacatgactctggtgtcacaaaatacatgagagcagcactggctccttatagaccaagggaccaatccatcgcgctgaagttctggtaaaatataccatctctgcaaacacatgtagaggcatcaacaagcttgcgtgtgacgcaaacatacgcgatagctacaattaccggactagctagctagagaacctgataatgggatgcaacgtgctcgtacaacattactggatgaccgtcataccacaacatcccaagaaagatgacactgacaaggtgctgaaatcgctatgagcaagatggaggcagactcaataatgatagcttggcacttaactaggaggagcactatgcaagca

SEQ ID NO: 14716 - DNA, 611 bp, Emericella nidulans
tcagcaggcgtgtggtggcccgatgcaggtggggccagagccaaaacttcggatgggagcagcggccaactacgacttgtgcgcatgtagagtggagcgtgctgacacatagacctgcggcgagtttgcatcatggcctggtgcccttgactcatactgacatacagccataaccaagcactgatctcatgcacagcgcaactggtttgacatgcaacgaagtcgatgcgcgcagtgcagctatagtatgcgtacgagggccagctatcgtgcacactgcgaatgtctacaaattatccatgctgaacattgggggcaggtgcctgaatactggtatcatagacgatgctattcccttagcacacaccgtcctcgtgagtgctctactgacagaggaggccgatgttcacttctgacagccacaattaggaccatgctaacggtaactacaagctctcagccttagctgctattgttgcatcaactacggcagcctgagcacggtaaatctttttccggctatgctgtgtaccaatgcagcttccatggtttcccatacgctgtgtagatctgagaattatcatgtacccatcaccgcgacggtggggccg

SEQ ID NO: 14717 - DNA, 623 bp, Emericella nidulans
atggggaaatccgtaatagaactaaaccatcctagcccgacccttgtttccgcgcacaaggacactaactagggtacgaacgatgcgatatgcagctctgttggggcgcacaggcagtcacacatcaactgtggggaggatgcaaccatgtgccgggcgaggaacccaagcagctggctcgcggcgaatgtatacagacccttgcacaaagggaggcctgatgacaccaatagtacgtgatctcactgcagtgaagcaagccgtatgcctgccatacgggggcatctacagctctacatttaccacagaggccggaacggattcgacatataatgccgaatattacagtgcttgccgcgtgtggtctggctggataatgccacctagatcaggacatcacccgagcgactctaaagaactgaaaggaagaacggcgacactattacctttatagtgcagagaactcaccgtatacaaagcggtgacgggatcacactgttcagagcagtctggctggaatacaagcggtgctcggcttggaccacaacaacgcttaaatccgtgctgataacggctgaccgaccgcaagggtttggacgcaccgatctgacgacgtgagttag

SEQ ID NO: 14718 - DNA, 654 bp, Emericella nidulans
ccccgcgcctatgcaatctgactgtaatagctctgttcgttgggctaccgttttctttataccgcattcagccaaccgaccgttagatggtatcattcttgtctactcgctgaataacaggcgagcaggactgaccgattgtacctagatataattgtcgtgccttcatcttggtgcgaaccagcaactttttaatgtttatccttgtgccgaattcttctcgcccagtaatgcattctaagtctgtaacaacattattctttgttgttgatcttgtccgttccgccaaattcctccttatcactatcactatcaggttcgtcacaccacttagatcccgaaattcttgttcccgtcacgaaatgctgtattgcggttcgtgatcggctgttgtgcgagccagttcataaggtaatcgtatacttcattattctgtctgatcctgctagtgtctatgcagtgcttctgtaaaagattatacatgtttgtctgatattttctgagttgtttcagctataatgcccatgataattggtcatgtactgagctcgtcaattctatttgttgtaagccatccaatgtcgatctctttagtctctgtgttaggttctcagatcctttgttgtctggttgagaggtctcatgtggtgtgtc

SEQ ID NO: 14719 - DNA, 501 bp, Emericella nidulans
acgctgaagaggggcataagtggaagcacagcggatggaaagaagtgccggacgaattgtacacgtactaaagtctgcagggtttttgtttgatgtcggatgagctgcactgtgatgaatctagtattatgtatggcacagttgagagacctatactagacctgtgactatgcgtataatcgagtgatgagcgacttgctgcggaagaaggcatagtttgtgtacacagacagctcgaatagctcttggaatagtgtgactgacatgagtgttgcttagcgtctgcacctgcctgaccagcaatatcttaatggcactggaaaagagcacgctatcactgagaatgcgaccagaggtgggaggaggacgatggcctgcgaagaagagccgaagtatacggcaaaatatgacaagaggaagaagatgagccgggacggcgagtacattgtacatgcgaaagcagctatgggagtacattgaagaggggctcactacgtaaga

SEQ ID NO: 14720 - DNA, 2781 bp, Emericella nidulans
atgacccgaccacggccggggaccatgggctgctcgcgatctacacgggctgggtcggtctgcttgtcgctcgcctcgacttcgtgatctttccttggcttgaaggctacataccatgagaaacacacgggtgctatggaggatgcaactatgagaaatgtggtgtacgttgcatgtgttaccatgagaccggtgtcgataggagttgtgacagcaaacaaacacatcaacgagagaagcgacaagatcctcaaccagtctagcgttaactcgacgatgataaccggttgcaaactgccgagtgagtgattgtgctgccagcttggaattcggaccccaaagcatatgcactgggtgttcaccattccggctatggccgctcgtattatcgccgcaccaggcgtgggttaggactttagtatagttgaagttggaagcagcaaaatctacatttgattgatggattgacaatccaactttcgatctagcacgcagtcagatacaccctaccataaactcgatgggcaggcgcacaacttcttttggcatacaggccgtgccgacgcgtgtcttggagaacagatggaggaagagtcgttgcttgacaggcagcgcctgctttgccgacctcagcatctccttggcagtatcgatcgttgatgtaatcgtgtcggtctccctagcactgagtagatgaaatgaagcaaacgtggcaaacggtgataccaggctctggacttgaagtaagacatcaatcatgacagtagtaggctaaaggaaatttgaaaggagtgggtatttgggcaggatgcacggtgcaggtctttttcatcaaagagagacggtagctgtgataaagatctggtggttagagatcttacgcagtggtggagttgactagatgctctatttatgtttatcaattccacctcaaaactgcaaaggtgagagaagggcctggttcatggttgggcacagcaccttgaggcagagatccttctgtacttcctggctcgcaacgcgcattgactggttaaacgcctgattctatgaccactagtattcggttcatgaagtctttagctgtctcaaacccttttttttttttcttttttcttttttctcttgttccctgtttgccaaaaaaaaaatcatgaggccattccaccatgggacacagtactagatactactgagtaaatcgatcaacacgcctttggtggatagactatgcttctttgatttatcgatcatcagaacattgaaatcattagttctttcatcgttccttgttccgcctgtgctggctcttactgtaccatagccccttcaggagtccatccattttacaaatgatttagtctatcctactcatagtatcccgtcaggacgcaagttcgacattaaaagctgcaattagactggcgcttcctaactccatgtctaaggacattccggttgtctctactgcgactttctgcgaccctgtcaagctcttggccgacgtctgctagcaagaagcccattcccggcgggccttcttttctcgcaacccggaaatgatacgacgaatccctctagctacctcactcggactcgtatccgtatacgagtaagacattgcctcctaggctcttgaacatcaaggtatcgtgcggtaaccgccgtaacctgaactaatgcaaacccaggctcgactatttgacgaaaaagccattattcccatagtacttctcgctatgagtacttctcgctatgagatgctcgaggacggggcattgtaaagcaataatcgggagaatcccccagcaaggaaccaggtcaagctgagggccaaagttcaagctcgaggcttaaaggcgtggtcattcctatccagtggccgtgcaaagataggactgaccgaatttcctgtctggtattttcgtcccctcttgtcatgtcttgtcatgcctttacctcattgctgtccgatctcctccatccgttttcttccccatacggacgctgatagctaccctccaacagcgcgtaaatgatattcgttacgggtttcgactggcatttcccgtctacagtcgttaataaggatcagggtgacagtctagtttgtacactgaccggcttttgccctctctatcatttttacggcaaaagcccatgcttaaacctggccgtcaaatcgaatcgcagtggtttctcatgaaattcggggaacttgaaattttgacgccgaggattgtgagacgatcagccactgctgcgccccgtctgaattccgctgtctagtcgaggaaactgagatcaggtaagcatttattagcaagacgagaattcgatgccatttcctgacactcgggcggactgcctgtcctagctcggctccaatataaagataaaaggcgttgaccttcctaaagccaaatcagttaactgtctcctggttcgaagctgaggcaggcagcgtacgtctgtcacctgggcataacttgtactaaggtatgcgaagtgtaaaggtatttggcagcgttcttaatgaactgcctcggcccactacgtttctgggagcccatcaccggcccgttcgcttagttgtgactggtctctcacagatccacaaggcacttgtgcctcattccttagaccggacccaagtgcttgctatttcaagctgacccaacagccgacgtcatgatccagtctatggaaaaagccccgcttgcaaaattcatggccctgatcatgccagacacattcaacccattttccaaccgtcatgtc

SEQ ID NO: 14721 - DNA, 496 bp, Emericella nidulans
tgcatggggagatgttgtgtaatatccggggctgcatgacttcgtggctatggataataacgcatggtgaaagattttggtgacgttgcaaggcacactctcgatgagggtcacgcctagaaccaagaccgttggtgcccatcttgatcacattaccttgaggcatggcgaacctactagcgtgacacattgagcgccgatcggtgactgcgtggttgaacggcaccgagactgatgctatctacaagacagcctgcctcactaaaccgaatgtcgattgatggtatgctcaaacaaggttctaggagactccgatggactgatcatctaagaagatatcgccacgcgagccataagtgcctgctctacacactaggaaaccacatcgggattcaatgatcatttgatggcgacgggcctgctctccgaccttgcagtagaattcagccagcaccataagcgacgatggctgaacgatgcctatgaactctgatat

SEQ ID NO: 14722 - DNA, 4056 bp, Emericella nidulans
agcgcgtcggaagggctctgaggatatcgaggaggaggacagcgctggcgcgtctgaggattgcacactcgtcttccggctcaagagtcagtgttgcaagggcgaggtcaacgcacgatgctagaattgacgggccaagccctgtgatgtttgtttggatggccgttgcgaggatggagagtgctgaggcacgaacgcgcaggtcgtcgggttcttcgtcgcgagatgagccggctgcccaagcagagatgatatttgccgaatggaccgcttgttcgggcgtctctgagtcggagtcgtcattgtctagaatttgttcggctatctttggtgtcgatagtctccatccggacgaggagtccttctgcttctggcgctcttcgcgttccattttccgtctttgctgctctagggcttgctttcggcttttctgcgcttgaggctttgacgcccgtcttcctgcaacggaaatcaggccttcgcctagaacctttgctgtttcgccaacgagggcttcgccaagatcttgcactgtgcggagcagggcttctccgagtttgagcctttgatcgagtgtggcgttttcgctcctatcgatatagcgttcgattaaggtcgttgtcacggtgcgaggatgccgggaggccaatgtaccaatgagtttgattgcgttcaggtatatgaattcatcatttgcagctgtctctgaagagtcggtaataatagacaagaggagagtaagtgtagatggtatatcaagaatcggtgaagatctcttgaccaggtccgaaagaagcgagaatccctctgcttgtaccggcggaagctctgaattgaggttcatcaaggcgcggcggtggatctcaaagtcagggacttcgactgatttcccttttgactcctgattttctggagagtcgagctgaatctcaaggagcatgaaagctgtcgtcccagatttgcttagtgattgggataaatgtggaagaagctgatctagcgtctctttgatagttgccaggagatcacctgtctctttcgatatggagaattcaggcgatgccagaattgtcgagagtaggctgaatacaacttgtaaagactcggcagagtcattccctgaagcttcatttgactcgacttgctctgagagaacgatgttggctagggatgatagagacatctttgtggggccgggacttgttgcgttctgatggctaattaattgccttagctcgccatctaaaatttgtttgataagctggagcaccttgagaggccgccgtgaaagagtgtccctgaaggtgtccaggagcgtttcggcaagcttggcactaattagattctgaatgatactatcagacccgccattgtctgcaagtaatcgaatcttgtccagtgtacgagcgttgttcgcgtgttgcgtaagccacgtctcgctcacatagagaaagacttcgcccgtccgctcgtcatgactcggatcagcattcagtaggctcatgaacagcttggctcgagactgtaggtcatcgacaagggcaactatgttgctgccaatccctggaccgtttggcttcttcagcaggattccattttgagaacccgaggcatacgcgcaagtaggtcctccagtccataggaagttgtccacgatcttcttcagaggcggaaacccagcagatactccaaagtaagtctgcaggacaatcacaacgttctcatggatggacttaagttgctgttgtgcgctaaagcatgcaaatccccagagcggaagaagaaccgggtatacgactcttttgacaagtccaggattaggcggttgcaagaccagtgcttttagtctgttaatggccaatattatctcggcttcgctggaaagaatttggttggattcttgtctctgagttctttctggtggtataaggtaacaacgcgaggatgcatctgcggttcccgtcaaagccttgaaaattggatccaaaaaaatcagatgcccgattgtcccaggggcgccataagcctttttaccaaggattccgttcccaatgatatacgcagcagcctttcgcaagtctggatcatcaccatcaatcaaggttaatagctgaggacctatgaccttgaggtaagtattggcttccatgccctgcggaacagcagaaagcagccgcgaagcgtgcataatggcgttcacagtgattcgcagaccactgggcccttgctcctgagcttcacggcctaatgatggggcaaattgtgaggcaagaaaaacgatcgtttgaagcaccccattgctacgcaacggtacccttgagaggagacccgtaatgacagatttgaaccatggggttggattcgattgaagaaaagcggacaatgtcggcagcagactagcacttggcgtgctgggaagagtcagtacatgcaaaacatgatggcatgcggagacaaactcttcaacgactttggcaaggattcgccgatattgagactgctcttcgctagctgggagggtcggattgtagcctaggtccgatgatgcacttataatatcgctcaagatccggccagtaatcaccggctgtatgctaggccgagcatcgaatatgatcccggacaagtccgttagtatgcggcccagaaggaggatatctggaggcttctcaggtggaggggggttttgctgtgcgatcacgcctgcaggcaggacggatattaccctttgttggagaggaatgcctactccaaacgaaagagaagggtagatcccttcaagagcaatcaggtccaaaagagcatgaaggatacgtcgccgtttggcatcttctaaagctgcatcttcttcttcggcgttgacttgcgagctctgctctgcatcgattactggattgacaaatgctacatggatctgggatagcaaacccaaagccttgccgatgacgtctgctctggcggacccatcttccgcagaatattcgggagtgttttggctcaagatatctatcagagattggccacagaatctttgcagttcgtcttcagttcaagttagcaaaaactcctgcactggtatagtcaatttagcccaggtttgcatgcctcgttgaagaactgggcttaagaactcgcttgccgaagcaaaagcttccctaatgcttcgctggtcccccatatcaaataaacaagacaaggctgagacttcacattccggtaggcgctaggccttcgaacctatgaaaagactcttataagactggaatctggtcgaagcggtggaacaacgttatattctacaagcctcaggcataaattcttatcgatagcactggatgactaacgaaacagcccctccaagaagaaaaaattgccccgccaccgctggaatgaccaagaacattccgtcgtatattatatatttttcccttctatacaattccaatttctccaaggctgacctaaatcagtcgattctctgctctgaattcgtatctgtgttatacacaaaccacaatgtccgccgatgagcaggtagcgaaggaggaggtgttccagaaaccgggagaccttgtcgaaagaaacgaagaaactggtgtcatgcaagtggagagcttgtgtatgaactgtcatgaaaatgtaggttctcccaagtataaaatcaagaataccctctaacagccctcagggaataactagacttttactcgtccgcgtccctttcttccgcgacattatcctcgagtcgtttgaatgcgaacactgtcacttcaaggacaactctgtcaagtccgccggacagattcaggagaagggctctgtatacactctcgatgtcgaaaacgaagaggatatgcagcgccaggttatccgaagcgatgtctccattttcaaggttgagtcgctgggtatcgagatgcccaagggtgagagtcagttgacgactgtggagggcgttattcaaaagatccacgagtcgctctccagcgagcagccattgcggaaggttcaggcgcctgagcttcacgatgcgctagtgcccattatcgacaaact

SEQ ID NO: 14723 - DNA, 465 bp, Emericella nidulans
gtcagggtctgtgtgtgtgcggttgggtttcatcatcgtgacgtgcgcgttggagattcgtttgaattctggttggatgtaagggtaagccgggtcttcagagactctccaacgatgccactaggagtaccctggtgtgttccgcgagattacgtggacgctggggcactcaaagcccatcgtaactgctcttgctcaccgcccgcaaggggcccagcactaacagtatatcgtgccagggagacgggtacgcccttgcgtatgaacccaaacacatgttagtatcccaggcataagggataaacactggcaatgatactcatactgtagaaaatggcgcataacatatgactgtaccagtcactgaaagaggctgcgtggccactccaggccgtggtcaactgcttttggagaggttcagcacgtccaagcgctcgttcacattcactatcgtcaatctcgatc

SEQ ID NO: 14724 - DNA, 2141 bp, Emericella nidulans
  unsure (1)..(2141): unsure at all n locations
tctggactggcatccccctgtaacggcgacggtggactacgggtgcacatatacctcgcaatcgatcgatgcaagttgctccttcagctatagtgcctatggctcgagtgatgggctggcgttctcgcagcattttgatacggcggtcagctgaggccgacttgggtgtccagcgcagagatgcttgtcacggcaggcgtagataagttgggtgcaactgcaactgcaactgcgacagagacagggacaaagactgagagtgaagagtctcaggccacggagacagagtcaggtgctgcggcaggaggtcctgggccttttggcgcgatggttacagctgccccggtgctggtgctgggagttgccgctatgctgtagccagtcacgtcatgtatatctgagctggataatgtgatttatgcctattagggctgggcatagctgaagatttgaggaggatacctgttacctgaatctgtcctccacaatcatgccgtgccggagccactaccagttgtcaaccccatcatgtctctatagcaagatatcccctaatatgaacttgcgccgccgagttcaagatctattagcgacccccataagtcctctttagtatctccacgatctcgtttaccaccagatctggtcggcctttctgcacagaatggcccgatccttccgcagtaaccgggccttggctcttcctccctgcgtaatattgaccaagcgctcataataaggcctccagaaaggatttacaaacgccatactcagttcagccaggccactcatcctctcgctttcccgcgcgaacgcttcaaaatcatggccgacgaccgtcacaaacggtccactgcctttccctttgtcccctcgggccaagcagcacaggctcgttgctctggggcagtcacgaggacaaatccgcgcgggacaatccctcggcttttcgtcctggccgtcgacagggtggaagatgggccggacgttatggtctccagtatcaaggcctgattgaactcagcggcatcagggtccgggaggtcgacacaaagtccgagttcgcgatgatagtatcaagcagtgccatacgagccacactgtctgagcattcctgtacgtagagacaggcaagggcgcagccgattgagcatgcgacgaacaggatttccacttcgcccagggcatggacacccagcttcttcgtcgtaatctgtgtcagcagctgacacacgtcctttacaatacctagacaatcgtgcgcgttgagattgggaatcgtggtttgtcgttgcgccttggttgtaccaatcgtaggtcagtatgcctgggaggtctagggcggattgttcctggagcttggcgatgacaagaaccagctgacttgtgggagaccgaggccattgagaaagacaagaagggcattttgttggtcttggttagtgatgacggtgctggtcggtggaaggtgtagcttattcgagcggttggcttggtggtgagtgtaatacattacagattggccattttaatgatgtatctggtgattgatatagtattaaaaatgatcgatagacagtgagattggtagggaacgaaagagctgggtaggaggcagtttactttaggtacagtttagtttatatgtaagaaatagttcagctgagggaattccccattcaactgaccaagtggatgcgcattgtcagcattaatctaatatttgagttagttgcaagcttgcatatgtcttgaatgactcggcctattagatgcttcgagttatcatgcattgccctctggatcgtgaaaactctcctgattccaggtagccagacttgggcggggcccgtactggaaaaaaaacacttgagctgctgtgtcggctctgtttctctctgcatcttccgtgaggcttctgatcagggtgccgttcaggcatgtatatcagtctatctttacgtaactggaggtagcttgcgtccatggaagcacaggtccggccacacgaaactgcgcacgagtagcttagtcgtcgcctcatagggaatatccgccagtcatatgtaaaagctggaaatatgtattcgtaaatggaaagccagtatgtatagccagagctatcacangagcgaaattgg

SEQ ID NO: 14725 - DNA, 2588 bp, Emericella nidulans
actacaacaggagtgatacactaccagattttatatggcaggatatagatacagcgcgtgggaaccagaatgcggggtagataatggaattactttaaacggcaaaaaacaagaaattaccagcaggccgactctaatagacttaaactggttctgctcagccccttaatagggcagatcccccgccattgactaggtccagccgccactacgtgccgataaagggccaggccaacggcgcatcatgtgtcagctccgtagcgcagagagtattccgctacccacagataaggttggttccgcgtcattccagcctagtctgggaaccaccttaggagacgatacgagccggtgcgctgcagatagcctgagttgccgaatccagcaataatgtgagaaaccttatcaggcgcctgtccatcatccccgcagatccatagcataaaaatttctacgacgccagacctgggcatactccggactctttattggcttcaagatatccgtagaaaccgtctaatagctctgattcggttccgacttgtatctgtttcacgctcatgaacctaccaaattggacccaagctcaacatacgtgactatttataattgttactcagcgtcttcgcttggtctttgttatctgggtgactcttggttaccgaatacgagttggatttacgaagcgtaattcgtttgcctgatattagtgtcgacagtaaccaggtctatatcagtttacctcatattacatcaagtcattcagttgctgctgacatacgcttcagcagggatgcaaaagattgtccacttcacgattgaaatgcgtaaagggtgtcaaaccaccgagcagatgtgggtcagtgtctcccatttcaagcgagggtgtattgaatatatcagatcccagaacccatggcgaaggtgacggtatattggaaataagtggctccgagcaattggggctatcaccgacactggagcccaccataccataatcaagcattgtccaaagcgctattattgctgcgtcgtacatctcgtctgttatgcaggcgggatctaggagcgaggaaaacatatgtgcctgagcgtggaactcacggagtcggacggtctagaaaaagagggttaacgacagggaaacaacaaaagaagttcaaacataccatgtttgccgcgtgagaccatgtccccgctaaccgttcaagtgtgttgagactgtcatgaaagcgttgtaaagtacctgccgatccccggtcgtttctggatgcctcgtagtggaacgttaaagactgtatcccccctacaacgacgatacagtatgcgtagaatgatgattgcaggggaaagcctgcctcgctcgccccgcgcaccaagtctagtagctcgttggcgtgctcgctccccgcctgtaagacacgcagaataaagctggtgggcactttcgacccaaagggcctcaagcgcagccgcgagaggaacggatggttgagtaaacagtggcagaggtgaaacagagtatgagcgaatactacctgctctgcttctgacttgtgcgttgattccttgtcacgaagcgtatcaacgatagagagccgtctgctcctggagtaggattccatcagcagcaaggacgagttgatcttagagaactctgaattcgtgtcccacggcggcgttttatcggggttacactctcggtggacatatctagtgcagcgtccaaagatagatgccatcaagattactagtccgaatggactaggaggctgatcgtggtcgatttttgagtcccagctgaggagctcgtgcagggtatgcgttttctgtacttgcccagcctggagcgtttcttcatcgcatggaagacgaacatggcaatcctcgtcgtgaatgcacagcggcctggattttccacatgaaatgagcctgtcaagtaaataccctgaccagaagacccgccggcgctcctcctgttcaggaaatgatagtgcgtcggaaggatccatcatcaggcgtaggtcctgggatatgcgcgcggcaacgccaactttgagccaggcagaactgacgtgacccgctgggatagattgtcagataaccgactttgtattaagatggtgattgtagatgaggatccagcctacccgtatagtccacaatcgcaagcaagttcacggcttgtacaacctcaacgctcaaattatccgccactgtgagatgctcggtgagcaccgacatccatgaccctttggagtacacttcggtcgcttcttgcttttgtccttcgtaataatcgtgcgtggaaaagcgaacagcggacgctagtaccgcgagaagcaggcagtttggcacgagccccatttcgagtttccgccggaaggcggcctcttgaatatatgagtatgggcggttgtgaatgtggtcaaagaatgtttggatgacggattgcaacactgaggaaggaggaacggtgctggttcggtggcagcatgtcagtcgactgtcgttcggggtgcaggccagcttaccactgctcgtcgctgaagcgtagaggggacgatgaagtcagagaaattccgata

SEQ ID NO: 14726 - DNA, 1776 bp, Emericella nidulans
gccgacacacccatccgtcagctgcccggcctcacgcgccgtcacaacaacatcgcgcacttctttaagagaatcggatgcgcaggccttgaggaggcgcggttccaggcgatcgttgtgggcgtcggtcgtggagctcgttaagctgcgagagcgggagcgggagttggagttggccatctattttctcccagttttcgggtcacacgatcgaataatgcagtttgcggagacggtgtctcgcggagattgagttatgtaggcatttaagcgcgttttcgtgtataaaccgcagtgaggtgtttcctggtgttggttgcgtgaaatgagtgggaagcggcagacggcacagctgcgagttttactccagaatctgagagaccaaaatgcagaccggcgatctagaccgttaaatacgagcttacggccctagttgagtacaagtcttgaaggattcgcttagctgctgattggggctgaatgcactaactcatttagtctctgtgctaatatcgtatacagaagcatccatgctgattactccgataagtcggataacatgtctaatgcgtagtagacgggaggacagatcatcacaattatttattactctatcgctctactataacagaaatccgacgggtcgagaatcgtgggaatccagtgaatgcaaggatgtaaggccaggagaccgcgtctaacagcagtttccaaaaagcaaaggtaagggaggggaaaaaagacaaggttgaatgcaaatcccggaatcaaaatgctcgccgcaaacaatcagctgaatatcttttgtcacgcatgtacgccgtccccgtcctagtcctgcctgctgtaccattacagagaacatggatgacgatgataaaagagagttattaaggtgtataataaaatgcaatgttgatagtatagctcctcctcaaacattgtacaatttcggttaaagggacatcatttcttgcccttttggttcgggacctgtttcaagatgtcgtcgaagctcatgttggggttgaacttgctgacgggccgtgcgggcggatcaatcggagccacaccggctggtaatggcagcgcctccagaccgggattgatcgagtgccgatgctctgcccttgcacgtagagcgggcgagttcattcgcggaatagcaggtggcggcgcaagaccacctccaggggtcagcagcggagtaggaggcatctgctgtccaggcatcggttgctgtaggtgcgcgggatgctcagatgatgacccggtagatgattggtgtgcgggatatggggatgagattgacgactcattatcatacgggtcatcaactgtggtgcggccccaagatggcatccttttcggcccattgctcagccatttgccaacaatggctgcgccgggtagacaccttccacaccgttaacgaccacatcggacggtaagctaacgagaccattgccgccggcaacgccgaaccagctacgggcaaccttgccgtcactgttcacccaaggtgcgccgccgcgaggagcaatgcacaggaaatattccgtgtcgtcggtataacgaacgtcctggacatcaacaacgaccagcggtagtgcttgaataatgcagtaaatgagaatccactggccgcatcggaggtcaatcaagtcgttaagggacttgccatggccttggcgccgttcaaactgcatgaaagcttcaacaaacggcgtcggcttcagactttcacgagtataagatgccatgagcacggcattg

SEQ ID NO: 14727 - DNA, 2076 bp, Emericella nidulans
atatccagacttagggggaatggcacgagctcaagcccttacatggtgcattcctgtgttcttgcagcctgtttagcggtcaccagcgcgttgctggtctcggggtggttgttgaccattgcggacgtcaaaacccgaaatccatactccctcaggcgtataatatcccgtatccacagcgacaggtccagtgccgccaatctaacccagcttgctcgatcggaccacatttatgtgtgcagtttggggttggagctggggccttggagacgttggaggcctcggggacccaggaggggagcggtcgccagactgcatgaaggcgttaatcatcagcttggtaaagccgaattatcgaatagccaaagacgctcatcgagcaagacttactgtcattgtgaaattgatgcttggttgaaagagaaaagtaggtaggaatagatggagaagtaagaacggttctccgcattttctggaatatgtctatttccacccacccgagccgcactcgatactatgcgtgtcatgaaacgggctaatggagcgtcatgcgataactgacgtgtatgggtgccagggcctgaatgagggcggggataatgattggagaacgaaaggatcctcgttgagagggttgcaaagagcgtcagcctgcctgattggtttctggaaacgattcaggcctcaatgcatatgaacatctaagtcgtactggcagtgcgtcaatctctttgaaagtgcccaagcagggcaatatagccccaggagttcgtctgaggctgaactacagatggagagccaaaaaagtatttaagcggtattcggtgaggtcttgtatgacagccatagaagttttcctgccggtagcctttctcagtatcaccgatttcagtagaattactttttattttgaacaatactgcgtgggaggtgggacgacagatctaacgtgccctagcctggaataactccgcaccaaaatggcgtccgaagctaaccagaggtgctggaatgaggcaatcgaggtaggcatctcacgaattgtgcccccaactgaataagagacaactggataaagtgaccgataactgattcaaagccatggacgcaaatggcgtatagtccttcttaaaagagtcggccaaggatcctggcaaacgccgtcttgttcgcgattctcacgcctgcacaccggacaatctcgtgatgacggtgcagcatcagctgacaagtcggatgactgttgggacgtggaatgcaaggctgcgccgatttatcgatgtaatgactccctactgtgccgctgttgatgccattgttcaacatgagccgcataatactgccctggtctggggctcgataagagttatcattcaggtgagtcgatagcgctacgctatcagcgctacgctatcattctgttttgttctttgctccctgtctcgcagcactctcgttttggtttgtttgcggacttgatgtgaaatttctaggtcatcgtcgcgcagcaagagacttccgaagagatcaacgacgccttcgaatttataaaatatcagatcgataattaccacaaatatctcgatctgttcccacctgagcttttggaggtcacaaagctgatttatacccgcacttttgagtatatcttgcgagtatgtgcgtgggtgaagtcttcgtccagctgctcgattcctgagagcggccttcagctccttccgacagagactcacaaaaattcgtcattcgatcagggaatgggaacgcatccaacggcagatttatgaggttgcattagagacacgtaagcacgcgccttgttggtgccaaaccagccaattgacatgtgcagagaaccgtgagacaacacgacgtatgtcacctgactgattgcaaccccgccattttgtgagtatttctgcttagatgccatagagaatagggagagccaggcaggtgagtctaatagagtcgtaacgcaccctgtccggaccgaaacctgacccatatatgtttcagtaatggagcgagccacgaaaaaaggtacgggctctacggccactaaccgatctcagt

SEQ ID NO: 14728 - DNA, 953 bp, Emericella nidulans
atagaatttggagaggtagataggattcggaccgtgcctatgaggtaaattaccttaacatctagagagcttgttgaagcgatacatacacaatggaacagagaactatcctattaatatacttggaaagttctatctaggtctagctagagcattctaccaaactccatacaaacaacagaacaggcctgcattagaacaagcaaggttcacccccaaacatcctcctgccacttattcctcctctttacactcctaacccactcttcggcatctctatcactccatccgtcttccatttccgtcaggaacccggtaacgcgcctctcaacctccctcgccatacccgcgcgtccacaaatatacagattccctcttcgggcaaccaggatctccctcacctcatttttatattccaagactcggtcctgcacatatgccctctcgctacgctgtccgtatctcgaaaatgctgtgacgatccgcaacttcccgccaaacgcaccctccatttcgctcagctcgtctttgtaaatgaagtcttcctccggagaccggcagccgaagaagaggagcacatcgccgacctcgcggccgattttgaggacttggcggcgttctgctatgaaggcgcggaagggggcaaggcctgtccccgctgcaatcaagatcaacggtgttgtttgcaggcgcggaagcttgaaggaggagcgccgaaggtgcgctagtatccttcttctgccgtcagatgaggagtctggcgtgaatgggaggagtgtattcgtgtatgttggtaaggtcatgttcttgtgttctcgggattgcggactgtcggcgagagtgaggaggtaggttgatgtaaggccctgaatcgacatggctgtgttttccggaagaggagtggacaggacgaggaccgtgagggagatcctaagcgtgtctccctatagtga

SEQ ID NO: 14729 - DNA, 365 bp, Emericella nidulans
tctccttggggggagatatgcgttacaaatctacacacggacattattaagatagagcagatgtcggacccaccgggggcttgcttacggactttgtagaatgtgccggactatggagacgctacgagacccggaacaatccagttgaaacgatggtgtccggacgagctagtccaggagcatgtttggctgcagtggaaaggacaaaaccaccgtcattagcgcttattccgttattgccggtgagatggaaagagtttggtcagctatcgtcacatttcattcagaacagaacgccaacatggcacaggtgaagaggttttttagcgatccctccttgaccacagagactcggaatctgattg

SEQ ID NO: 14730 - DNA, 3327 bp, Emericella nidulans
actcttgctaagaaggttgcgcaagaagaccttggctgtttcatctgtaataagtgcttcatcatcgtgccatactggacttggctcgaagccgacgttggctggttcctgaatttgtgtaacgttgtgccgcaggaacatgagggaatcgaggtgaggctggtttcggggaatttcgttgataagattcgccatgtgatccgagctcttcactagagatgatttctcaagctgcgccgcaagagaccatagcgtgttcagccgtgctaccctagtttcattcaggtcttgtagtccctgattaccgtcagccaagattcgcgtcaattaactttatgtgactcacatcaagcagctcgggaacatattcatggaaaaatttctccttcaacttgttcgtcacgtttatgctaatcagatatgtgttctgtctcgttagcaaccagctagagaagaggacagctgaattaccttaacgttgttcatctccattatttgctgctggtacactgtctgagctttcgtctttccgtggtcgaaggcactctccatcttctttctccggctttcgacttcttgacaggctccgtcatatttgcccttagctttcttcaggtcactgaagctggactcgcgctccttctcaagttttccgtgaaaatcgacatggcactttcgtagctcttcatactgaaccgcagactgtttcaatggttctgccacctgagctaccaggtccgttgcgaacttatcccgctctgcggcgtgcgcttccaccgctgccaattgtgtcgaccaagtcgtaagtgaggcgctctcgagagatccaggagtcattgtagggttatctccgacactcagcgggctaatcttcttagctttgcgatcatagtacttcttgcagagagccgtgagcttcgccgcatattccttttcaatcgcgctccgttctcgatagaactgttgcacctcctccatccaagcaatgccattggaaacctagatattgcatttagcaccggcgctaatgtactgcatcgcgtttgttgtatcttgccgtaggcatcgtacatgcggggaaataacatcgaggaccgtacccaattgttgactggcttgaaggcatcctagcccagcagaacgttagacaatacctcataggcagcactttattaaggagacttaccttcaactctgctccaaaatgaggagcggcctcagcggctgccattgttctaacaactgtaccagtgactttggcacatgcgacctgcgggtcccaggcagcagcggaaaggagcggacaaacaaccacgtgcagtagagtgtttggctcagataggcgatttacaggtagaatgtgttcggggcgagcctcctaccaactaaccgacaacacgccagtgcctgaggacagctattgcttctccgatctgaacgagtaatgcgggagagcggggaagagtcaaggcactgggcgagtagatagcgaatgctggtgacaataccgaacagcccttgtctggccacgttggtgccttatggtggattaattacgatatacgtcatagcgatacgggtgacttcgtcacgcctgctccttccatggctgagcggttgtgcccaatcgagattggtggcttggcaacttgaggtcagtcctactctgttttttgtcactgctctctaggtctcattgacgctattcctattaaccgcgctagttgtgagtacgactgattattcaatcattcctacagactgcatatccctcttcttcagagcggtgtcctttcctttgattcgtggttgtccaacgtctttgtcggctccgaccccgccaaagcacgctccttacccccgccattgaacacaactccgccgtatttcttcatcccatttcataatggcatctgacgcgccaactggcggctctctcgccgaccgcatctcgaaccccgcaggtacgcgcgctgtccccttccagttcgactcgactggccggtttttggccccttcgcattcagcactcgctaatgaccggcacgaacagagaccactgaacccgtcgccgacaaggcccaactggatggtgctgcatctaaccagggtggctcggatctcgcagagccggagtacaatgtcgaggttaagctcagcgatcttcaagccgaccccaacaaccccctctattcagtgaagaatttcgaagatctgggactgtgagtcgtgcagcgccaattcattccggcaatgtccgaactaatacatctcacatagagatccgcgcatacttcaaggactgtccgctatgaacttccgcaaaccttccaaaatccaagagcgagccctacctctgttgatgggcaaccctcctaagaaccttgtcggtcaatctcagtccgggactggtaaaacagctgcatttgtcctaaacatcctcagccgcttggacctgagctccgaacaggctcagaagacgccgcaggctctgatccttgcgccaacgcgagaattggcccgtcagattgttggtgttatacaggtcatgggaaagttcctggatgggctacacattggcaccgctgttccggctgatacgaatgcgcgcccaactcggatggaagcttcggtcgttgtgggcacacctggaaccgtcatggatatgatcaaaaagcgtatcatggtggccgcgaaactcaaggtcattgtcttggacgaggcagataacatgctcgaccagcaagggttgggtgaccagtgcattcgggtgaaagcgtgagttcttgcttttccatgccagaggcgctactaaactcttgaacagcctgttgcccagggacatccaagtcgttcttttctccgctacgttccctgcccacgtacaccagtatgcttctaaattcgcccctgcggccaacgaacttactctgcagcacgaggagttgacggtggagggtatcaaacaactgtatcttgactgcgctagcgaggaggacaagtatagaactcttgtgcaactctacgggttacttaccgtcggctcgtcaatcattttcgtcaaggtgtgtttatacgccctagttatcagtcccaactaacagctttagacacgtgcatccgccgtggagattgagaggcggatggtcgccgagggccacactgtcgcttctttgaccggtggtattgagggttcacagcgtgaccagattatcgaccaattccgcgccggccatgccaaggttctcatcaccaccaacgtgctcgctcgtggtattgatgaagacacagtgtccatggtcatcaagtaagtacgtttcattcgcc

SEQ ID NO: 14731 - DNA, 1303 bp, Emericella nidulans
aggatcgcgccgatgctagtgctaatttctgactttgcggcaggttggtgagctctggtgaaccgcgggagcgtcttcagagccgtataggcccggaaccaggcgtccagacgtgcctgaagacggtctcgttgggctcgggcgacggccgcttcggtctctgtagaagagggtatggctggttctccaccaggaccggggataaacgggttgcggcctgtgtctctccagaacatctgcacctctgcggccagcggaatgattgcgtctcttgcgtcctccagtgagctaaataggtacttctgctgcgtgtcaagcccgctgagcaggtcgcagaccggaacgcccgagatccccagcgccgcagttcctaaacggaggaagagcgggacaattatagtctccctaaagtcaacatcacttgcagtctgaggtgcatatctagctctagcccgcagaccatggatcagccggacaccttgcccgtagagccccagagcttcttcaacatgtccctgcaccatctcaatacagatgaacagcacgcagctgaccagcgcaacttggacactgaggttgcccctctcaatcccgctctggatcttggataaggaccgtgagtaccaactcaacgcctcgatttgcttattattaaggctagattgggtcttttcatgccgcaaaaagacaaagtctagacacatctccggaaactcgaacaatgtacttatcgcattcactgcgtcccaaaccgcagtctcagcacgacagatccgtggcactgtcactgtccagaaggactggtccagtccgccggccagatagggcgctgcatggtggaagtagtaggcgaaagcacggcgttcgcgccagacgcccgctgcaccgaggggactcgaccctgaaacaccgaggctgacgtcgacatcgaggtcaaggatggatgaggtagttgacgatggggctgatgcataggaggtcgtcatttggctagggtactcgcaagtgtatcttgctgcgatgcaccgccggcacgacggtttctgctggtcgcacttgatcttccgcgtcttgcaggccgtgcagccgcggcgggatttgaggggcccgaggcactgcggatgatgcggcgaaggagtcaggaacatggttcaagcgtgtcgaactagagaccagttggaacggggttctttgttgacgagagtcgagccatgatggaccacgaggattatctccgacaccaaagtctagaccacggtcggacacgggtacggtcacggtgtgaaacagagctcacggcgtt

SEQ ID NO: 14732 - DNA, 590 bp, Emericella nidulans
gcatgatgagcccttctgagccctcaggccatggacccggacatcgtccgtggggaagggccggttaatgtcctgtgctagccccactagattggggacatcttacgtatatgcggcagactctcatctacgacttgacgagtcatttgctatacacacattgctattctatcccatctcggagcgaaccaagagacaggctcaagatcttcagtttgaggggcctgcgttcgtaaactgcatcctgcacaggggtgaatgcgctactgaagaccttgtgactacatatcacgcatgtctctctggcggtgaccatactgcaaccagactacggtttgagggcctatgtgctcttgaggagacactacctgagggctgacatatgtgcatgtgctattcggactgctatagctgataatctgcgctgacatccaaaagagcgcatttgagaaggagtgtttgtttatgctaacctaactgtgctgtcttcgaaggctttttattactggccctcgcattgctcagactgaaaaatggcatgcctggttatgttcactgggccatatccttagtttggaatcttggtcgag

SEQ ID NO: 14733 - DNA, 465 bp, Emericella nidulans
  unsure (1)..(465): unsure at all n locations
cctggggggcagtgctacagtctttcaggcttcattcaggacccctttcctcanacatggaggggacggcacttgcgggggggagtacttgacgggcatcgcatcaccgaaaggtccaaccagaccggaggtgcccccgactcctaacctccacaactggacgtccgaagcacggggacaaggccgcatgtcgatgcattagaaagggacgattacccctacggtcctgtgctaaccgtctgttactgcatggcctggtatgatagcttgcaaacgattgaacagcggctttaaatgccaactctggggcacactaggctgcccctttggcaaccatccgagtctccgccagacccccaatactgaatgtcattccacgaccgctgttgcccaccgcctgaacagttggagaggatccctgaatccgccaatggcacccaaccccttttgaaaatttccatgaac

SEQ ID NO: 14734 - DNA, 532 bp, Emericella nidulans
ataactgacaccgagggagaaggtgccggttgtggctttgaaaaaagggctctaccgtttggtatgctattgacctacaggaccagtcagggcggtccgatggaatgatatgggcaactacccggactataccggagaggtatgggagaggatggaaggaccagggaccatacatgacgggacgtggttcaagcattgcatggagactccattcttaacgacaaacatgtagcagatcgaaaccatggctggcatcgatccgcggacagaccatacttttggcctgacgccagcactgcctgtcgggtatgcaacagcaaggaaaataggtatgcgaccataatgtcgcagtgtgttatgtgtagtggactagtcacatggttccggagcgcaagcccatatgctatatatgcgccatcgaattgagacccggtcgcaacagcctgcctgataggattgtgactcggacttgcctcgcttagcgctgcgagaggactccatgaaagtgctgtgatagattgtgactgtgact

SEQ ID NO: 14735 - DNA, 642 bp, Emericella nidulans
accatacaaacttgccacctactttataaaactgccctgagggaatttttttccgtacgcccgacatgggggcatgaccgcacccacggcgagggcaatcaagcgtaagtctactaaggtgacggcaacggaggcacttattagggtgcggcttcgacgtgccctgtactacccaatgaggccgcgacttaagaaacgccatgtgctgcgtctaacctggcgacgtagcccgcaacctggaggtataataaccatgccggttagtccatagctgaccatatacacctactataacctggttataccggggcgggcctactctaggcgcgattgtccgaacaccttgcccgaactgatgaggaccatgtctcgcaccttattcattatgagagcatccctgttgcacctcccctggatgcgaataattgctcagcagccctgaggcttctaagaagagaacctcgcaccgttccccagaatttcagattcagccccattcatagatggcatccggaaaaataacttacctgtctacctgagcactctggaaaagatttgaagggacatggcattgtcaagcaagtagatttgcctcccactgcaagggggaggaaaccaacaatgctgaccagccgaggtttg

SEQ ID NO: 14736 - DNA, 527 bp, Emericella nidulans
cctgtaccttttatgtacacaaatagcgatgcggcctcacacataacattggccataggccaaaccatgttcttggggctttgactgtcatgagcacgcaggggggaccactgacagagctgcaacacacatcaataggggagggtgatgacacgacagacactgaaacaattgttataactgacctaccatggccaaccattatcctcactggcaatatgtccagattatacagaccgaacaaactgagcaattgcatcaaaaatcaatccttcacagaagctaatggttaagtacccaccgtcagcctgtttttatcctgactctatatgacgagggcatatttcgacatcaacaggatctgccatgctaacatgctctacacttccacaacatactatgtatacagggaacaaaccctgtcaacctgatcaaaaagaccatcttaccactacacagtatggcctctgtagcgctacataatgacacaaatagctggtatgaaaaattacaaacattatacctat

SEQ ID NO: 14737 - DNA, 2441 bp, Emericella nidulans
attccctgtctgcaccatccgaagcacaccgagccagccaatccactgcattgtctggcgaaaagctatctcttgccgtatgtccggcgagcctttgaaagttcttgcgcatgctgacaatttgaagcgagctattcgggacgagcgagactgatacagaagaatttgactactccgcggatgcagacaacggttcgttgcatcatgtctgttaacctactttgaaaaaactttattaacattattcacagtggaggaaattgagaatctgcagagagaagcaagagctctcaaggaaattcgtcaatccatgggctcggctgagtttgctcaaaaggtctttgataaagtttttaaggaggatatcaaccggctacgtggcatggaagatatgtggacctcgagaaaggctccagaacctctagatttcaaggaattggaagggacactatctactgttgaaccggaggtctccttgaaggaccagagagtctggacggtctctgaaaacctggcggtcttcaaagacaggtgagttgccagcccagctataacaatcctcccttacactttactgattggccatgcagcttggatcgtctaagcaaacgcctcaaaacactgcagtccgaagaaagcggttctcccgcggttctggtgttcgacaaggatgatgtagacacattagacttcgttacagcaagtgctaatcttcgcgcaaccatctttggaatcgaaccgaaatcaaaatttgacacgaagcgtacgtctttcttgtcaacccaagtgttctaactatctcgctgatgtctcgtcttacagaaatggcgggtaatattatcccagcgatcgcaaccacaaatgcgatgacagcgggtctttgtgtcctccaagcgctgaaggtcctaaagggtgactatgaccatgcgaaaatggtgaggctctttaatcacagttcttcgatatatactaaatttgtgctcatgtgtaggttttcctcgagcgctcaggagctcgtgcaattaactccgagtccttaaacccaccgaatccgcattgccctgtttgttctgttgcccatgccagaattgagatcgacctcactcgcgccacattgaatgatctagttgagaacatactccgaacacagctaaagtacggacaggaattttccgtaaatactgagcagggcacaatctacgacccagatctcgaagataatcttccgaaaaagctgtccgatctgggtatcacaacttcagctttcttgacggttatcgacgaagatgagcaaccaagagttaacctccagcttatcgtagtcgcacctggatcaccaccgtcagaggaacaacccatcgtgcttaacagaatacctgagatcccacggaaacctcaagcccctgcaccgtatgatgctgaagcgaatgggacgtcaaatctagggaaacgcaagcgcgatgctaatgaaaccgagctcaacggcgatcctcccactaagcgagtggcgaacgtttcaatctcggatggtgccgataaagcacatcccattgatctgtctgaggccgaagggggcgctattctgatcgatgatgactgataacgcacgcatatgcgcagcggcaatctacggccgaccaacgtgtaacatctctcacagaagcagcatatgggggactggggctatctgtgtctccatctacctttttcccccaaatgccactatctcatgtatcatacgtcaaccgactttcacgattacagacgatctagctaagaacaaactcacgggctacagatgaacttttaaagaatgtactcttcacctcgtaaggtcagtgggaccttgtgtcatcgcggcgtgaccgggctcaatatgacgttctccgtaaatggttggaccatactagatagtctatagtacatgcgaatctttccatcagctcgctcttaacttatatcaaagcgcactaagaccaccgtctaggtttataatgcaattattcgcgtactcgttctcagccaaaaagaccgcagcgtcggccgattcatgagcttggccgaagcgcccgagcgggatatcttccttcaatctgttgttttcagcttgactgaaatctgcaggtcgtacccatgatcccattaggacgtagagcataattcggagagggttgggtggaaagttttttaaggtagttcaaacttccagcattaaagggccttgtttaccccgggcaatgcatcaagcgataaccggtttcgggggttaacctctcacggccatgccatttagggcaagccccccttttacagttatgacagcccgggcgccctaaccaggggaaaattttttttccctttggtttagcgcacagccggttatccttcctttgggccgaatcctaacaaggcgcctcagttgcgaacttgaaattgacctc

SEQ ID NO: 14738 - DNA, 561 bp, Emericella nidulans
ccctgggatatgacttctggaggtatagaactcttaagacattttactgctttgacttgagcggagaatgaagcaacggattaattcagatcgttttccttggaggccctgtggccaccgcgttcctttagattgctcaactgctttttcttcccctgcacccatcttgaaaggtagtctagcacctctaagacactctgaagcatgtaaattagagatgttccaaaaatatgtgggtgtcctgcttctcacctggctgcattagatgacccgtttctggaccctattcttgtttttctggagaggatgcccgagaatgtttattagcttcccttgcagctcaatctttttcctcttagtatccccaactacacggtgcaaaacccgcgaacttaaagaggaatgaccctattcatatatcctgggcctttgataatacccactgcaaatgctaaatacaggtctttgcctttatcaccatttccctgttttgcaacaatccccttgtaccaaaaggctctttaactcaagtactgcaatgggcttacttccccgggggcg

SEQ ID NO: 14739 - DNA, 581 bp, Emericella nidulans
  unsure (1)..(581): unsure at all n locations
tgaatgttgtttacaacaccatggggggggctatctaccaattctggtttatgatctacttgtaaagttttttgccgctgttgctgcagggcgatctgtgggggggtccctgaaaactaagcgccggtaactccacgcccaatgagcacgcccgtatcctgagatagaggacgctcctgctttctatctagtagcccttgaacatcaacctaaacctaattcacatacctatccccatccatctacctttcccgcatacattttcgtaataccctgctcacagtcctctacttgtcttggaccctcctacttcatctatttttctttggattaactcgactatatgcatcctatagactataccgcttggctacagtgcccattaacctgcggtaggacttactccttcacaagatcagcccaggtccagccccaactcacccgaagacattgatccaaaactagacgcgcaagctcgtgaccctgacaacatatcgccgatttcgagactctaacacactcgaaaggggcatccaacctgaaaaagtnggcatgctcccggccaagccccgtagaacaga

SEQ ID NO: 14740 - DNA, 394 bp, Emericella nidulans
gggtgactaacgagcaggccagatatgttcgccgttggtgacatcacatatcatccatatcgatctttgtcaaggattccagtgcaagcagaagcggttgcttcaaacattgaggcgagtattagaggtgaggcaggctaggcacatactgtagcgaagaacagagaaaaacgctagtccctcctgtcgggcaatcgatggggacagggcatgttggagggtggtcccagtaatttcaacctcgactatatccccatctttaagaatctgacgaggcttctggaatataccaacggcagcagggttccggtcatcactatcgtatatgctggtatcgtggcgcctgcaaattgagattcacggctcagtggatgtgtatagaaacagcgaaagg

SEQ ID NO: 14741 - DNA, 639 bp, Emericella nidulans
ttcttttatttgggggcaccgggggcggggtctatctcaaactctgcaagctgggcgcctggggtttttatttcgtgccacccggctttatcttctgggcgggttttatataaacatgggggcgttctacccccagcgacggatattcgtcttctccatccgagtccctttgacgcacgcggcaaggtgctctcggtgccggctttacattgaacggtttccgacctcgtaatgacgatcctccctgagctcctagggggtgtgggcctctaagaacgttatggtggcaggccgccctatgatttcgaggccgcaagacacctcgcatcaataatctggcgagggcggagcctgtctacattcgagttgctgagcttcacgagaacccggggaatcttcagctttttcgctaacttgtccctgggagtggcgctccaaacactaagcccttgattcattctgctggcgatccactatagaggttgagccctaactaacttacattgagttggcccaccttcataaggattgatgcccaaattcttcctagactggaacattgtgactacctgctggggataatctgttccaacgccctgttgcgaccatttccgtttaggaaatgatgccttcccttct

SEQ ID NO: 14742 - DNA, 7012 bp, Emericella nidulans
gttcagctgcctttattttcctctcctccttttcttctatttctttttttttcccttcccattttagcagaattttcttcctgaacctgcaattgacgctccggggcttggctgtacccgtgcatctcgtcataacccgggcgacaaagctttcgccttttcgctcaaagggttggtgaagggtccccaacctttggggcgtatttgtcaacatgtacgtttccctcttttgagagatgcgtgagatccggctatgatataaaacaggcctcgctcttaccagaaactgattgatggcttgtaggaagttcggcaaacaaattcagcgcagacagcttgatctgccggagtacgccgccagcttcgtgaattataaggcattaaagaaggtcaacagcagtggatcctgagatcgtgtataccgcaggtgctgacgtcggacaaaccagcttatcaagcaattgagtgcaacgccgaccatccccgctcagagctctgtgcccatctctcaaaatgcttccgaagcacaggctgcactccgtgcgaacaaggaggtcttttttttccgactggtaaggcgtggtgtgaaaggtgtctgtggctcggggcttttctaagtttcgtaccaggaacgtgaaattgagaaagtcaacactttttatttgcaaaaggaggccgaggtctgtcccactgtccaggaccgctgcacagaaacctgacattaggcgacagttctcccaacggctaaaaaccttggtcgataagaagcgagtcgcccagtcacggacggtgactaaacctaaagccccggcgaatcttgtcgctctccttgaaggctttcagcaattcgatggcgacctgaataaactacaggtgagttcgtatgctgactgaatgaagtctttcttatgcatcggtgtaacatgcagcaattcgtcgaaatcaatgagacggccatgtccaagatcctcaaaaaggtttgtcgaaaggatatgttacgatctttgagagtcgattccgctaacggagtaatctagtgggataaaacatcgaaggtctatattcctcgccgtccaacttccgcgtccaatcagcttaccatacatctataatagtctcgcatgaaggaattatatctccaccgtgccgttgaagtacaaccatgtttcaatcgggatgtattgcgcgatctttctgatcgggcgaccaccgctcgtatagagcttgaagcttgggcggaaggagagaatattcaattcgacacgacccgaccgaccgaccgcacgaccacctttcaaggttttgggtccgaggaagaagaccttgaccttcaagttctacaatctgccaattcagggaatctgtatgcattacgcgaatgggcagacaaactacagaaatcgggtgattcgcgagagcgtgccacacgcacgtttctagccgcgatcagtgaatattccgacgatgtcctcgctgtcctcctcgaaactggtttagtagatattttcgccgaggatgatattaacgagcggaactgtttacatgaggcggccatatctggccgcgagttcgttcttaaagctggcctcgaggcgggtgtgcaggtatctaggaccgatgtttacggaagaatcccactacattatgcttgtatccatggccgtgtgggcatggtacaacaactgttggcaacagatcctagcactgttgacattatggatcatgacaacttcacgcctctgatacatagcattgtcaagaaccagcttgactgcgcggagcagcttctccgcaataatgctcgcatcgacccggtgtctgaatcggaccatattccgctcaacctggcatgccagcatggatcgcttccaatagtcaagatgctcttagaacgacaggctcggttactccccgatgcggaaggcctctaccctcagcacatggtggcgcgcgcatcacaatcccctgacattctattgctgctcaaacggcatggtgctgatctcaatcagagagacaagttgtaccagtggactccactttttcacgcagctagcgaaggctgcgtaaactgcctgcggacacttctggagctgggcgtggatgcagatgtcaaggacgagaagggtctagcggcggtgtattacgctgcgtgggagggtcatttggaatgcatgctgctgctctggtctcatcatacagagtcacagccatcgcagcggccattagatatcttgaacggcttaaggctccatgagccgagttccactattgcctggcaagagcatactccggcagaagcacaagacatggagacggtagatgggattccggatctatctctccctccgccaatcatcccgttgcgacgctatgggcataatttcctcgacaagaaggttttcgtacaaatattattcgaccccggtagctccatttcgtttgatcaagctgggcgctaccctgctgctcgattgaccatatcttcgaagttatccgaactaataccgcgaactgtgatgcttcccattcaggaagacgcccggatgatctcctttcatgtcgacaccttgcaaacattcaccgttgactttgagattttccctacttttggctccaaggtgatcgcaaaaacagttgccctcccgacagtgttcggggcggaggagtccagcgctggctcatgttgtttaccccttttcgacccccggttacgtgccattggacagcttcgtttctggttccaagtcatcaagccgtaccacggagatcctcttgaaatcacgcatttcgcaacttactggaaggccacaagcactggcgaatctgaccacagcggcttagtcactgggtcgagcttgtcgggagatcatgtccagctttttgtacagctcacaagagacaaagtcccagtagtgcacccacagtacatggtgaaacactatggcatcgatatacccatctgccatctcaccttctctgaattccaagctgttggcggtgagaagaatgtgaaccgaccagaattactccaattcttgcaggctcatgctgccgatgatctggccctgacccatcgagtgctcgcggcgtcattcttatcattgcgtgaggtcttcgagaatctcccagttgacgtaaatgtcaatatctctgttctctatccatcagctgctgaggagcaagcattgaagatgacgtctatgacagatgtcaatacgttcgctgacgccatattgacggttgtttttgaccatgcacgcgtcgcacgggataagaatccagaattcatgcgttctgtcgttttcacatcttataacgccaacatatgcgttgctctgaattggaaacagccaaactgtaagcagccagtccccgtaaacctctcaccaatcactaataatcagaccccgttctcctttgcaatgaccttggccagattcgtgacttggcccgcaatgccggcactcacccagacgttgacagcagcggtcgagcatcaatgtccataaaggaatcggcccgcgtagcacagagcaacaattttatgggcctgatatgccgttctagtcttttggtatgcttacacaaacttccgttaattcttgaccgccacagatactaatggaggctgctctagaatgttgtgccagctctggtagcaactatgaaggaacttggacttgtacttgtagccgacacctccgacgaagccgaacaaccggaaactcaagctttgtcagctgcaggctctatgggcgtggctgaactggcataccgcatgcccgaaggtgtaaatggcttgatgaaagccaatggcatactgaggttcaatgacatgattgacatgtgatgcaacgtcttcatacgtctatttacctactcatatcctataatctctattctggcttggatctgctttttttttttattatatccaggaaacggcccttatgagccaaatggttggcgtctttctttcttctgttatcggaggcttgctgcatcattgcttttcgcatttccatcagcagcatgtgtctcattttgcgtgttggtttacctgtcgagaggcatgcgtggtcaagtcctttctactctcatcaccataacttttctacatcatgaacccccatttggcggatacaggtgacaaaaagcgagagtggaggactagattcaactaatgtacaatgaatgtaatatatgaggatgcgctcagtatctagctgcacaacgctatgcaacgaataaaaaaaattggatatggtgtactatatgccgcaggaagtcggccaaggaagtcattcaaagagctaatttgccgccgtcattgccactacttggcctttggcttgcccttgaccacatcccagccccattttctgagctgcttcacgactttcggcgtgatagccgctgtcagcggcacgcgcacaaagatgaagctcttgtgaatggcgtacgctagagcaagctgcgtccataaacctggcattatcgacctttagaaaaaaaaataattgatagatatgggagcgagggaacatactggcttcctcaaccggtcccttcttctttcccccagcctgagcgccgaaatcctcgtcctcgctctgctcctctgactccttaaaagctcccggccaaaccttattcacagcacccttgacgctctcaacgataacatgctcataatgcccaatcttatccgcgccaagtagtttcaccgccgcaaagcagaacgggaaatcaagcgccgagaggaagagatagatccagagcgcagaccatccatattcgcgagagagagtcttaaggcgttgcgagagcgatggcgtcgcgttgggggcttggtatgtgtatccaggtccaaccgatttattgttgttaaatcgggggcggtaagtacgaaaggtgcggcggatttgacctcgggatgctgtactttgcaattgaaattgctggagtgttctcagcgatggtaattgtttccggatgctgaaaagctgtctctgcgcgggcgcgagtgatattgggcggcgaaacatgcgagatgttgggtttgataaggggaagctggcgacttctgagttgagcattcgtagggcccagggcctgagtggaaatcggagagacattgtgtagtgtggttgctttaaagtgtttcggttcctgcttgaaacttttaccttttctcgccaccgaggtttgagcggtatattttaagcgaggtagacaaggtgaaatgaagccagcagctatgattatatcatatacagaacaaagaagtttattatatcaagattgaaaataattgagggatgtaagtcgacgtagaagatgacgcatagagaaattataggtaagcttcggcattagggatgagagcggatgtttcggagaacgtgtgccctatgccggaattggcctctcctccagcaaatgtacagaccgtgcccaaatacttaggttcagaaattgaagttcaacttccgtctacaaggcctgatattcgatatagggcatttcgagtgtattcctgcgactccgagttgtgcaatctctgcctgaaatcataaggcataaacacaccgcctttcaaacatccttccgaaatttctcccgattcactttaacgaagcaattaaactacgcgacaaaactcacaatgcctccacgcctatcaagaagactggtacagctgcctttttctaatggtgcagttataccgcaatcacacgctcagagtgccgtcttcgtccgcgctttcggcatccgctctctaaatcctccaaaacactcgaaattcaatgacagccccgaactcctcaagtcgtcgcccgccgcagcccttgagcggaaagcaaatacacttccgccccgcacaggagctattgcaatcaagaagggaatgaccgcgatcttcgacccagagacagggaagcgcatctcttgtacggttctgcagcttgaccgtgtccaggtcatcgcgcataagacagtggacgtacatggctactatgctgtgcaaatgggcgctggttggaagcatccgaacaatgtcacaaagtcgttattaggccatttctcggaacaaggggtttcaccgaagcgacatgtgtacgagttccgagtgaaggatgaggatggtttgctgcctgttggacaacttgtcaatgcggactggttccatgagggccagtacgtagatgcgaggtcgaatacgaagggcaaagggtttgctggtgtgatgaagaggcatgggtttggcggtcaggatcgcagtcacggtgttagtttaacgcatcgctcgcttggttcagctggtcccagtcagggtggtggctctagggtttatcctggaaagaagatggctggaaacatggggaatgagcagaacacagtgcaaaacctcaaggttcttaaggttgatgcggagaatggactggttctggtaaatggtatgcactgcctttcctgtcttattaccggcgccagactgatgactataggttccgtgagcggtccaaagggatgtgttgttaggatacaggatgccatcaagaagccttggccggtaaatccggagtcggcccaatcatcgaaataatctatgacgtggtttatacttgaaaatgtactactatactttttgtttctgagcggcgtctgtaaataatacataagatatctcaatttctcaaatcctcctctggacctttccaacaatcctacaagattcgctgtaaaagaaaaagaaaaactagatgcataacccgaacgccttcacttaatgcatcaaggtacccaaatatacagcggcgacatggtaaagcgcaatgcttgttactgcattatattggaagcgccagagtacgtctattcttgacggaacgggtcatggttgttttcaagaagttggatcacagttccatccgttgtctccaaactccattcctcagtgcggaactagggcgatacgttagtgacatctattctgatagaaagt

SEQ ID NO: 14743 - DNA, 843 bp, Emericella nidulans
  unsure (1)..(843): unsure at all n locations
caaacaacaaccacactcacacaaaccaaccaacaaaatacctcacctgcacacactaaacaaaatactcgcacacaccccaatcaaaaatagaagcggaaactgctaaaggcagcnactgactcaattaaaaaaaccaagggggggaacccaacacacacccaaacaagacccagggcaacaaatttatcccccccgagccgaacaaccacaaggggggggacaaaaaaaaaaaacgggcgccaaatacaccagcaagaggaagcagctcaacgcccaaacaacgaaacaaagggcgggcgccataacaaaacagcctcggcacaaaaagacgcgccagcaccccaacagactacctacagcgagacccaacagacaggaaatacaaaacaccaaacaatccaaaaacaaccaccagagaaaacccataccgaacaggacaaccaacccaccaaaaaaaacgcacaccaatgaacaaagccaggacaaaggcaacagccaatacaaaaaaacccgcgaaacaccacacccaacaaacagcactaggacaaaagcaaaaaaacgaaaaaaaagaccgcacaagcgaccaaaatacaacccatccacgcccgggaaacaatacccccaaaggcccgaacaacactagaaaaacccccaacaaaagtccaaaagccaaggaccaaacaaccctgaacgagccacaccaacaaaaaataaacaaacccctgacacaaaccagccccagaatagaagaccccacttacaaccatccccatccaaagcacaagaccaacccccccgcactgacacaaacccaaaacccacactaacctccctcaaaaa

SEQ ID NO: 14744 - DNA, 310 bp, Emericella nidulans
tcaaagagcagatgccgcatacatccggtcacgtatactggactcactgcagataggaacggcaaacaaagcttgcgcatcctttgagtttgcaatggctcctctgggtaacagtggctttggaagactgcaaattcctcaagtgttggtggaagtgtatgtgcggtatgcagaaaagcagccaaccatgaagaatggctagggcccgtagctttcctactaaagtacgattagcttaactcaatcttgtatagagattttacaagcggcaagtagacagcattgaccgcaaccatcccttgggcaaagg

SEQ ID NO: 14745 - DNA, 102 bp, Emericella nidulans
ttatggtgcgcctccgtctgtgggggctatttctagtcatgctgtgcggcaccaagctattttttttgcctactagcctgtcctaacattcgtattagcggg

SEQ ID NO: 14746 - DNA, 488 bp, Emericella nidulans
aggaacccagcctgttctttattcagacgtgcgggggggcagtgctcacgagtcgtggtcgccgactgccgtgaattttattatcaccagcgtgagcagcggccaccgggggcacttcaaccagagggcgtgctaaaagaactgctgtcctgatcctgcggctgttccggcactgaaagaaccacccagctcttggccctgaaccccgaggagcccttggcatcctgcaatgaccttacactcgttcacattgggttccgggcacggattaaacaagagatggtgatgccagcccccaaactttatcatatgtgatctatcagccgttgattctcagccactattaccatccttaccaccatactgaacccaagcgagtacctccaataatattctataggccctccctgagaccagtataccaatcacatgcctaatgggaaacacttaagctgtcccacgtacatttgcagccaggtctttgagca

SEQ ID NO: 14747 - DNA, 308 bp, Emericella nidulans
  unsure (1)..(308): unsure at all n locations
aatgccagccttgcaagggacctggagcagcccgcgctagactacatatgactacacatcatctactagaggaatagggccatttaccggccgccgcaggggaggggagnctcgtagtctttacttagggcaccctgacctaaatgctccgcaggggaaaccattaattaaaaattgcgagtcgtctttaatagccttgtaatgatatccgcgacagggatctgcgaatgtcaaaggcatagtcaccactgccagcctttatagaactggcagcgtcgaaagagttttggaaaaaagttgtcatcata

SEQ ID NO: 14748 - DNA, 519 bp, Emericella nidulans
acctttttggaaaatgccccatacttgcgaggcattgcattgcgtaaacctttctccaaatattgtatttatcgaggcggcgaataggcttctaatcttccttttatgacggaagagggcctgagcctattggaggagcgaagacgtgggcctaggtagcctctgcgaccggagagagagctaggatgctctcttgctctcgcatgcccagcatgggcacgtgacaattgggataggcgcaaagacataagtaccgcggtgtgctccagacactgaaacttgttcattgaggggcaatagatggaggccaacactgtgacaagcatgatgtgtctgtatgcgaccaacgccatatgattgaagcacgacataacgcgggaacgggtgactggagagatacagaaaatgcggctgtaaaagtgagtgcatacacgggcgagcgagagcataggcaggacttgaactacggttatagactcgttacacagaatggggaggagaggacagagaccagacagg

SEQ ID NO: 14749 - DNA, 464 bp, Emericella nidulans
caggatgcctttacgctggttacaggcctgggtctggcggagaagaatttaaaagcgccgatggacgtatcaaaagccaatgagataggtgcgcctcatcaccaccagatgctcatggtcaggggatacctggctgctgtgctagacttgcgacgaacggaccggcgtatggtcatagctctcgtgctctatctcacgagaatgttggcaggcctcttgcaccattggccgacgaggcatcacatacctggtcgagccaaggtcatacatactccggctataccatggtgcactagcctttggacgctagtctgtcgtcatccccgccccacttagaggatgcgttgacacaccgaccttggccgactcctgcggacaagatcgatgcttgcatgcgaactgatatgatcggcgtgatgatgtggagctgtcgatcatgatatgaatgattattctgtacatac

SEQ ID NO: 14750 - DNA, 1917 bp, Emericella nidulans
gagagtgagctcatatttgggggtaactaggccggtaactaattgttttcaagccatcgattaccttgccaaaaagggcaccctgaactgcaatgaatacgtacctacctgggcaagttagagtaccttccacgtctatcactgccattacaagccccatagtgttgtttaaatctcaaaaagacgttacttattccgacaaccttaatatatacataacaccctctagcggcgtagccgtggcaacacgagttgagagcccaatcgaagtttcaatgctaagtttaaagggagaacacagtggaaagatggtttatgagataaaagcaatcaattgcggccctccaagaagcccgagataaagttgggaggtagccgggcacctgggtcttcctctggccggaagtacttcatcacgtgggagagctgtttccagtagttgagggtttcctggcgaaatatgttagcttttcatcgtaaatggaggatgtgagcagacatggaatgcatagctctaagtgaagaataaaatggcctatgtaagaatctttacagggcgtgttatgactcacctggaactcagagtggctttggtacaacagcacgtcaacgacctgcagctggctaacatagcggtgcttctcaaattcctggcggaccttcgtgcgaatggcggagaccggtaggttcagagagtacatcgtttgaatctcgggggactaattagcaaccgagggttctgttagctatcggcacatgttactgagaccgaaacctggagctcgtgtgacagtgcggctggttgtggatgaggattgatagcatagatgccgacgccttgccatgacgccgtattgaactacaaccacaaccaattatacgcagcgtccgcaacgaactggaaatgggatactaacagctcggagccagtccctgtaggaccttagaacacgtttctttgcatcactccagttggcagctatatacgcagacgagtcagctctcaagggttccagccattgacatcgcgccaatttcaaaggagatgtcggactgcttcgggttcggatggtaacgtacaggagcgggtgcgctgcgcgaggtaggtcggattgatagtcatgatgagtaaaaatcttcttctagatacgccaatggcacactgcgaagggatgggagtcgtgaacggaggatgggatcctggagagggcgaggtttgctgttgagcctggcgtagttagcggatgtggagagaggtcggagacagtactcaccgcctacccttttgaaaaatttcttctgcggatggggttgcgatagttaattctatccaagttttcttcattattgacgattggttatttgtgtactacttttccggtttacagtcctaatataagtctgcgctcaagtgattggccctgtggatccatacaattccacgttccgttgaaatcttctcaagatggcgccaacaacaaaaggcgcaaagggcaagacctcggccaaaggcgaatcaaagaacaataaagtcctcggctcaaaagtcagcaagaagaatgtcaagcgaccaccgccaaaggaggtgaaatccaaggcgcgcaccgagcagagccaactcaagaagacgaagaagagagagtactcagaggcagagctagatcttccgaagctgaacatgattacgcctgtcggtgtagtcaatcccaaagggaagaagaaaggaaagacgttctgtgatgatccggtgcgttatctccaggccgtgagccctgagttagaagttaaccattctacaggaggcgatgatgacgatttttgccatggtcaatgcggagaaggagggccagatcgagtctgagttatgaaggcaggcaacaaggagattgagaacgaaaagggtttccagagtttagt

SEQ ID NO: 14751 - DNA, 1182 bp, Emericella nidulans
atcagtacgtcttcccctctcatcttccaccaacgagccctactaataaatcagtgacgttttcgtcgccggcaccgtcaagggcacgacctatggcgaattgtaccatggtatcagcatcatcaacagcaccttcttcgcccgcctgcccgaactatacgccaaagtccccgcatccgccatctcgaccatccagctcgactggcaaccgatcggcaaactctggctggacgcctctgccaaggctggcggtaacccgctgggcctcgacgcgtcgaaggtctacctcgcgtacgcggaggtcgtcgagtggaccgattcgcagtacgatgaggtcgtcatgcagtgggttgaggagacgaccaatgcgatcaacgccgccaccaaaaaggctggtctttatgatccgttcaactacattggcgacgcggcgggcttccaggagattttcccaggttatggggcagagaaccatcgccgactggcgaagattgcacaaaagtatgacccccatgcggtctttcagagtttgatgccgggagggttcaaggtttttgagaactagactaggtctctttcttcttttaattattggatactcaggtatcatactattctgtgtattattttttgtgaactagagagaaacctaataccctatctaccctaaccgcccccaaacccttccgtaacagaaatcactcaatctgaaaccggcgaaaccgccactaagcgccctgaattaggcaaaccctgcagcccggcagttctagtctcgggtccatgaacgctgctatccaatccagttcgtgtttctgactcgatcccacaagtgatgtcaactaattggcccagggaccaacatcaccgccaaaaccgccagatcgaaccatcatagccaagaatcgacgggccttaatatcgggcctgtcatatcctactgcatgagctgccttaaaagacgccgccactgtcggtaactgcagccatcatctttgttggctgccctgttatctggcagattgaagcgatctcgaccgaccgattcagccctgaatcacctttaacttgctttggaatcggcagggccgggtgcatgcagggtaccatttcatcttggctctgggccctgaggctagccctaccggaaggtaggactgacggcccttgagtccactttgc

SEQ ID NO: 14752 - DNA, 378 bp, Emericella nidulans
agagaacttacccagaagtgcggggggggggagtcaaagatggatgagcgcccctggggggaaagtttttggtcccaaaagggggcagcagaaacggggggccttttgaaaatcaatcgggcgtgcacaaaggcacagcagatgggggatagggaccagaaaccggagcagcaattgagcgagctgtataggcataaagtacctcctggcggacgagttagactgtccaccaacgtgcagggagtgtaggtacacgagagccaccctgtggggccatgaatggactgcgaacaggttacaccaatgtaagcgcaggaggggccttccaaacctccaaagtacaaccctacaaaatgcccaaagctggccagggagcat

SEQ ID NO: 14753 - DNA, 1941 bp, Emericella nidulans
atctcctgtacgggccgccgggtactggcaagagctccttcatccaagccgtagcgggagagctggattatgacattgccattctaaatctgagtgaacgagggatgactgacgatcggctcaatcgactcttgactatagtcccgaagcggactcttgttcttttggaggatgtggacgccgctttctcgaatcgccgcactcaaacagatgaggacggctatcgcggtgccaatgttaccttttctggcttactgaatgctttggacggcgtcgcgagcgcggaggagcggattgtcttcctgaccacaaaccacgtggagcgccttgacgaggccctcgtgcgtccgggacgagtggacatgacagtacgtataggcgaactcactcgctaccaggctacctgtttctgggagcggttctacggcgacttggactcgaccgggtcctacaagcaagcgtttctcgaacggctctatgaattaggtcttattgaaaatgagaacggcgagagactcgacccgccgcagagcacaagcgctgccgcgctacagggcttgttcttgtataataaaggaaatatgcagggggctatcgcaatggccgaaggactgacttaccggattcaggaataggctgagcttagtcctggattatttgtatattatgtgacctgaagcagatagactgcttgatagagtcacgagtgaacaatgtagtataatatgaaccctcgtcacggaggaataactccaacactccttcacttttaccttcaacccaaccaccccacctttatcatgtcatcatcatcatcaattcaccccagatcagcttgcatcttctgttattggaagaagttgaaccaagtacagtctgtgcatgatgcagcaattgaaccctcgaccagttgaaccaatcctatctgaagtccattcttcataagccatgcatacgcatacggcccctcattacatgacctacgatccttccattgttcagcgcttgggtaacagcaaatcagcatctcagttttagctctctctaagcgctgtagctgtgaagaaccgccctgctgtgattgggaccgacagctctccgactgaccatcgaggtgtcgcgttaagcgccggcgtgggctctcaggaacaacatgcaggccatctgctcatccttcacatctgcaagagcctctcaccgttgagaccctgattctccatcgaaataagtttgtgacgattcttgagccaagacatggctggcacgcaccttgtaaaaccggccggagtcggacttcgcgcataacgatcttgatatacatatagccatggctggatttctctgccttctgggttaatgtcgctccgagtcagactcctaatacttcctctactcttgccattcctgcctcattgattgagtcgccaatccatggtctacgtaccgaaacgactgttgtgcatgtgcatttaagaggttgcattaactcctgcgccatagcatcaagcgggtcctgtttgtgagctcagtcaaactgagcccgtagtcatgagcagctgtcaatttcagttgtttccaccccccgccccccagggggttcccaagaatccttttcggcgaggccccagacaaccctcgattgacattcagtcaacatctgcaagtccgcttgaagatctcagcggaaaagagtcggaggcgaaggcagtggtattccaagttgtcgaaccgcgtagcatcaagacaatgccggaagcacacgttcctcctctaccaccgcgctccgccacgccaaagttgaggcacccccctcaaccgaatcactatatagttcgagcccgcaagagacgagagggaaatcgcttgcaaatggagtgaattcgccatcgccacctccttcagtggatcactacgatgaactagatctcagacttgctacga

SEQ ID NO: 14754 - DNA, 1443 bp, Emericella nidulans
gctctggacttgtgtgcaagttggacggctggcaggggatgggatgaaggttgagatcgaggtcgaggcgcatgtgcctgttggggtaagtgagttggatgcttgagaagagctggggtcacatttgaatttcgagggcttttcagggtagaagaaggttgcagtggtgagtgcgcgattgtaaagcaagaggatgaattcactagcgtttctgagagacgtcttggaaaccgggaaggtgtgcttggatttgctggcttcgcgtgacattatccatgcgcctggccaggagatagcttcctgaaggtagaaagttgcttttgaaatggtttcccatggtgactttgaattgactgggatgtcattcccgatactggtgaactgggcaggtggatgcgtgcagatgaacgggcctggaggaaggcctactacgaagaaagatgtcgaggcactatcaagacgggttttgtctagtttatactcgttcaggcccatctagaagctttaggaatacctaactacgtaaaagaaattattctgcataatggcattcagttatgtatgcagcatcagcagggctcttccagaaaaagtcaaacagcctaggaagcccctacattaatagtataatgaaacaggtggatttgtaatttgcaactagaggtgtgtcaatcataataggtcatattactgatgtcgttaactacagcatgatatgcgtcatcgaatgcacgtgagagatgaaaggaaacgcgaccatctaggcacgattaccgcccaagggcgataactccagcggccatcagtttctgaatcttcagccggacctgtgcgttcttcatgtgctcttgcagggcagcggggtcgcccttagcttgctgaaggatgctctgcatgacggggtcctgaaggatggacatgatctgctcacgttagccatgcacgtcatattattctgtcatggcgggcatacctctgggtctttttggatacgctccatcgtctcctgttcagtctcaccggcacgggaactgtactgggcctcaaggaccttctgttgctgttgctcgatttcacgggcgtggctgccgtcgtcgtgctcggcggcgtcgctgcaagcatcaatggcacggctgtattccttcattgcggcaagagcctgggacttgcggatataagcacggaagaacttggggtcacagcggatggcctcgtcgcagtcctggacagcctgcgaaaaagccatcagcttgatgagagcggcggcacggttgctgtagccgcgagggtcgtcgggagcgcgtttcgtcatctcggtaaaggcatcaacagcaccgggccaatcagcctcctggaacttcttctgtccaagctcgcgggccttctcggcttccacagggtcgatgtaggcctccttgttggccttgtccggaccttccggcg

SEQ ID NO: 14755 - DNA, 488 bp, Emericella nidulans
atctgttacttattgatgcttgcgggggtggggtgcccacgagacatggttggcccttggggtaaagtttttggtccacaaaggggggtgtggagacgtgggccttttcgactatgaaacatgcttgctgaacttttctactgatgcgggatctctacctgcactgcaggctgtattcaaccgtgctttatgcccatctactgccccacgtcatacagggtgtgctttacactcatgtgaatggggttccgaacactgggtctccctgagtcggtggcgccattccgaacaggtttcacctatttaatcgcccagcatttatttcgcccctgctatttccctcaagatgaccttactgaactctaccctgcatgtgttatcacaaataatgtaaggccggtttgttctttatacgaacgcagggcctcatggataacattcaaactggtcctgagtcatctgcaggaggtagttgtttacgcctcccc

SEQ ID NO: 14756 - DNA, 564 bp, Emericella nidulans
ccatttttttgggtaggcctggaatgttctactcatattatacttaagactgtttgtgtagccttcttttcctccattctccagcaacccatctgaaacccaacctggcttggccaactcatcacaaatgatgctagattttattacagttctggccgacgtggcgtgccaatatagatcttaaactgctgatttgcgtgtagtatcatcacaggctaaatagaacagattatatctagagctgtcacgcaagtactatcggatggtagtcaagatagagacgcataggagacgaattgtgactgtcgtagttgccttggtaggatgcgttaaggagacttcatcaacagaagttgggcggtgccaaggatgtcgagactcctggattgcttgcagctgacgaatcttagcttgtggctaccgcacgatcgggttgcattgtaagctgccattagtgatcgagtctatgaactaagatgtttaagaatgccctacaactgccatttgtataaccccaccagggtacatttgcccttgaaaccacctttatcaacaaacatatga

SEQ ID NO: 14757 - DNA, 2426 bp, Emericella nidulans
aaagataatatgggctgttacacgatacgacggaagcaaaacaaagacggtggacattatcgctccattcaaaagcatccaagtgatagtatattaatcccgatatgggtttgagatatttactcctgggcgagagtttggccctctcggagaccttcaacgacaagctcttcgccagtcgcacggcggtaaatgtcccgcacgtcatctagggatgtcagtacttaacactactcatttgctctacatagggctaaagaacttaccagtagtggtctcaaagtgagatgtggcatcgtagctcttcgaaatgaagatgttgtctttctttccatcttccaggggctggtagagcggaatgggaggcgggaagaacttctcttcaatatcacccaggcgttcgaaccctggctccagttcaaggtggtggttggagtcagtctcggcgatggtcgagacgatggcaatgtagtagcctttggggcagacgttgtgtgccgatgagaccattgcaacgtaaatatcacgcttgcgtccaacctgggactggggaatgatcagctggagggagtcgctgccatcggtcttgtcgataggatgctttaagatgcagatagccttgagcaggtagccggagacagaaaccttgccggggaagtaggatgggtctgcgatgatcttctttgtcttggtctcgaacttcatggtttcgccgccatcttcgcggtccttcattgtggccttgatgccggagacctttccgttctcatcatacagaacttcgtcaatatcggtgttgagcatgtaggtacctccatagatggcggaaagacgggcaaatccctgagggagctcgcctagtccgtacagggggtagatgtatggtgacttgccctaacgggccatcgagttcacgtatagacggatgcggttgatggcgtcagaggccgttcccgggcggttgatgtagtcgtcatcctggtaaagcgccatcgagtggccaacgaagtcacgggtattgtcttctagcgagaacttatcataaacatccttcatcgtgcacgtggcaatgttcagacctagactgtgttagcgccatcaatggtttgatttgaagtacacactcctgtgagtagatgggtcgtcctccttgaattcaaccaacccactcgaggaacttcttggcccttcgcttctcgaacatgcccatgagggacgagcgcagagcttcgcctgcgtcggagggcaccttggccaccgtcgccttgggtcccttgccctgctgaacgtagctaccagcaatctgcttgaactcgaggtatcgggtgacatcagtcgaaacgaggatgtttgtcaactcgccattcgccatcaacagcttgggtaccaaatccacgttccagtcgttgacgcggccatacttcttccagggttcctcgccgggccggacattgccgtatttcttgaaaagctgcagaagagaaaaaaaaattagattggaagtattcatgaggcaaccacacttacagtctcaatgttcacggaagcagcttcactgggttggcgttagcaggctgtttcgtagccatggagcggggttgccaactcaccctccgtaatgatcattgcgatcgatatggaggaccttattgcccttgacactaagaacactattgtaatatacgattagctgacgtcgaaaaggctatatgatagaagggtaagggacctacccagacagcacacattccgtcagtcctgaagggggtggtgagctctagcacctagcagcggggtaatttggtgaggtacataccggtgccgaggactataacatcgtattcgggagcaatctcatccatgatgcaagtgatgctgaaagagatagagcactcgaagatatggcagaaaagcagttgttcaagaaagaggggacaagttgagaggatgcgtagatgatgagctgggagcttagcggtgtggtggaaacgacactgactaggcccggctaactatacacgatcatcctctccttttacactcctggggacttgtcttggacaaattacgttctccactcttattctatctatatgttctcggcaaatagtgtacgatctattgagcgtggaaactatcttcgtgtcatgacaataactcctgagtccaaccccttttccgatcaccgcgccacatcctgtttcagcatacaatgccaactctatgaagtgatcctaagtggtttcgcttctgaactgaccttgagcagtcgaagttcttggttctgttcagcacacaatgctgattgtgaattcggattgaaagagcttcaatcacataacacgttgatccattaggttaaagcaatgtcccctttgactgtcccacttcagcccatggtcgtaccaccaacagagtcagggggt

SEQ ID NO: 14758 - DNA, 595 bp, Emericella nidulans
cgctgagttcattataacaggcactggtgggtactaaaaaccaacaacaccccgcatggaccaaagattttgttcttcgcctccctttgatgagctatgaggggccaattcccgccaccactgatgagcatccctggaagacactgtgtcacggtggcaccagcctatgtcgttggcgccaaccgagactgactgagacattcaatgcaatgatggagggagtctaccgatggcatggcgtgtatcagcatgctcttgacacctgatgggaggccctggctgctcacgacctatgactgactgccttgaattcatgacctggacctgctactaactgacctttacatgcatcggtccctgagaccccggaagattgatgacctaaagctgacatgcgtgctgagacggatgtttactgctgcacggatccaggctctgaactgatgttgactccatgacacggcacacttagggaggctgagctcttggtccatcgcgcactatttatgacgcgggaactcatcagagctcgccatgctcggtcactgatattcagatggctcatgggccacgtgctgccttccttagatttcaa

SEQ ID NO: 14759 - DNA, 1534 bp, Emericella nidulans
aatgcgcggcggcacttccggccatccttgagcgtcgcccgctgacaagccgttgcacataaataaaaaaaaaagaaaaaagaaaaaaatggccgtaaaaaatctgaaatataatgaaataatataccctagacataagcccgtgtctaagacatatgttttagttctacttcacgcggtaatcgtggcaatagggctgtttatgattgccaattgcacgtgaagtatcccctccatgttctccggttacatgcattagagctaagaatggcatcgatcagttacgtcgtcgctgttccaaatagagatgcattccgaatgctaatctgtctctgtgaggttgaactcgacatttcaccgaattccaccgaacccaggaacacgcactctatcgaacatactctgagtagggcaagcttgcacgctttgtcgtagcgcacggagccgaagcatttaactcgtcagaaagctctcctggggtaaacagagaacgtgataagtttgtatgcggctaaccatgggatgcttcaaacctagattattgattgatattgaatacactagagtgcagaatggttggagactgagtctcccagaagttgttgaaagcctctgggatactaaaaatataaaaacattcggctgcgttaaatccttctgtaaacgccctagtagagtcacccttgccatctattgcttcttcagagacccaggcgacgcatatgcacagctttgattgccaggtaccacatctttgaagcttgttaaagcagagtggatagcgtagaacgcacccttaggattgtaatactcgtcgaacatcaagggctttgcaccctttacccaagtataagcgtgcttgtcggtaaaaccccagaaactgatgtcggtaattcctgaatcgagagcctcaaagacaatagtgctgtagatttcggtttggagcgtggtgttgagcgtgtggacatccatttcagcgattgttactttcaatacgagcgccttgaaggactcgaccatttccctgattacacctggttggacaggaatgcctaccgagacatgcatctgcaaggtatctgcgaactacgagacgccgggagcctcgagtttggagaccatattgaagagctctggggtcttaccgtataatgacactaccagtgccttggtgaaaaatagctcgtcttcgggacagccgcacgggcgatctggaaggcgttataagtatagctaggaccgagggtttttatgaggacgtttactgcatgccctgggagaggttgttatgggtcgctaacaagatcaataaaactttaataaagggatggcttgttggtgtataaaggtgcctacctgaaataaggaagctctcgtgccgaacctgcaaggggctaggggggggaacttggggcccccggccttcaaggataaaggggttgggcaatatatatcgtaaaggggctaattaagcctttttgggcgggcctttcttcttttaaaggccctggttttttcggcatgaatttttttc

SEQ ID NO: 14760 - DNA, 583 bp, Emericella nidulans
atgtcttagacacacctgcagctggacactaactcggaacgcgtgtttgcccagatttttttaatggggtgacagataatgggaacaagtgtgctcttcgagacagtattcagtataacgccaacatagctgtcataaagtcggtcaaaacgtacactggggacccgtcgtcaggcgtccaactgaggcagaaccctcagaggcggtgtggccccctaagggaagtatcatacgcattcaccgatgtaaacagacaatcaagaaaacactacttgtgcatgcatacggacgctgcgctatgagaatgactactcgagttcaccaaacgaccaggtcacatatagagccagccagactggtcgccactatagacactcaagcacgaatccaggttgctcactggaacggcaacgtggaaggccaagttaagaaaacccccgggcgtgctgagcttagactgaccggtatataggagctactgaattctagctcacaggcatgcagaaacacttaaccccgaggcgcccaaatctggcccaattcgcgacaagagccgaacatagagtcgccaaaccctggagac

SEQ ID NO: 14761 - DNA, 3306 bp, Emericella nidulans
cacaaggcgcttatgaccgaccattgtcagtgccattgaggcaaacaaccatccatcctgttgtggaccagaaaggtttttacgcttgagcagacgaaggaggcttatgaatacatggtatgtcttctgattcgagctgctgtactccagagtacgtgctaacctaagacttctcaaatagtggggacagaaccacttcggtaagttggctatcaagatcgagtaaatcgccagtgacctgcggcagcggtccatagggtccatagaaggatagacgtcactacattcttcttgcggttacttggcctattgtcctggcgatttgtgggtatgaatgaatgtaacgcagtgatatagtggagcccatcaagggcatcccagtgaaaatatattcctaattttagtgcataaccaggtccttgcccagtaatgggccgttagtgtggcaaagttatgtcattaatgtggacaactttgtcgctacttgtccctgacccccttgatctggcgaaatggatgacagactaaacccttactccttatcccacactatggggatagcgctagttgggcccatttcatgccgcaccgatacccactgtttctgaatgccggcggacccttgagtgatctcatatgcccgaacttgataggagctactgcctgccgcacaggacacaactcccaggcacctagtgtccagcaaagccagttccaaagttatcccgtcgagccgggaaaaaggcgcttcttaatccacctatcacatcagaactgaaatccatacctcattcccccaacctgcctcaagtcccagcccatgccacgcctcctcgacatcaatggcgaggacccttccatcctccttccaaattgtcttcctcggtaccggcttccccgaaacaagtaccatgaaatgcttgtctatatcccaatcttggaggcacgagaagtatatccccaatacacctagggctttgatcccaacatcgacacgcaaacgcccagtgtcctcaatatatatgtctgagctgacaagagctgcaacgccggtcatcttgcggagaaggccgaggatcgcgacatcgacagaaacatctgccgtaggcatgctactctcgttctccttatcttttgagttcattttgaatgtgagcgttttgacggggtacgctgttagcacctcccatctcctttcattcaatgtaaccgataccgccgatgacgaatggagctcccccacaattctccctgttctgtgcgcacgaacaatataccccgtctcttcctgatcatcgtatatccccggaaaatcagcaaccgggataatcaccgactcgactctgttactgacgttaaacactcctataataccgctcccagatcccgcgcggccgtggtatgtccccacgcagagaatatggccttccttgatatcgtggtacatgtctagcgtacggccgctatgtctgggcgtacgtgattgttgtgccctggatcgtggacgcggtcatttgtttgatgagtggtatatcatgctggcctggcttgtcggtgatgtagattggcccgccggagatacagcgtgctgcagcgtggaaggatgcatagtccagcccattttcgggaagcgtctggaacatatcccagtccggaagaccgttcaaatagcgcgttaggagggcgttgtgggcgttacaaaacacatgccacgtgtgggagtcgtcgatatcaggaaagaagtcgtttgagtttcgaacacgattgttggcttgttcgtgggaacctgcgaatggaaaattgtttgggggatctgggacatgcaggatatggcttttggaccgaagtggcgcagcgatgaaatcgtccaggcgtcttggtaggcgtttgcgtaggatcttctgtcctcggggtcggcgagcagatcgaggaatgactgcgcgtccgttttgacgcctgatattccggatctggagaggaaagcgtagaagtcattgtaaaaacgttggatatcggaaggatcgattgttagcatggacggccttgtcgtgctattgagtgccacttctcttgttttgtagattgctgccagggatccttctggtgaaatgccgccccagtaaccgaaaagcgcatgccacaccacgatatactcaatatttctatgttgctcccgtatggtggtgactgccttcgcaagaccatttgggaatgctttggagtttgcttcaaactgggtcaaagcacggtgccatgaacctgccccttcattgtcgagtgattgccagttgtcatcaataataagtgttctaattctgataccggcggtttttaggtcatccagggctgaaaggatcttttcttcagacaggtcctgtccaagtccattccaggtgcagtacgccaggccgtcgtaccattccgagagccattgtgttcgagggccaccctgggctgtattttcatacggacggacaagcctccttgcttcataaatcaaagcactcgtggcaacctcgaaatcggcagcagtagcagccaggacctggaatcgagacggcgtagcattatcattctgcgacttgatgaccacctcgcctgctgggccggacccaagaactgtaagagtgtcgtctacagtgacgcccaaaagcacgacatgtaccccgtccgtgcggaggaaggagagtaggatagcatcctctgtgaaattaagtttgtctttcccctgtctcgggcccagccacgagggtttccacgcgggcaagggcaaagaatcttgacatggaggaaggtgtgccgagcggcagacgaaggagtcccgagtgaccatccctagcttcctcgactggaccggaaatgttccacaacgcggccccaggtgcctcgctcttcctgacttcaacctgaatatctggggacaggccgtcaaaataattcgcgaaatcttgcgcggaagacaatgcgagttccgatgagagaccgcgtgagacgatgaccagttcgccgtcatgacagcctcgttccttgtttgcccatcgccattccccttcggaaccctcacggtaccgaacggtgaacctgcccgcgtatcttgcctgcggacaagatatctcgcctgcaaaaacaccgcgattgcctgggtcctgtcgactgcttaaagccgggagagcggccgatggatactccgagagcggcagcgctgcccactcagagaggcctatattatgccaaatttggaaatcatatttgtcttgggatgctggttctataggatggtgaatctgatctggttaataagcggtg

SEQ ID NO: 14762 - DNA, 2316 bp, Emericella nidulans
agcctgtctcgtgttcggcagtattgctgaagaggcgtatataagaatatgttatttgtcgatatcgctggccctgactctgagtctggatccgtctcatatattttatccatcatttcctgttaagataaataccccaggcgcgcgaaacggctcgaagtaacacattgttactccaaccaccaactcaagtcggacgttcccactatgcggcattcagtttattcttggcttactctgtcggccatgcgcggtacaattagcccggtggaggcgctcaatctcactgccctctatggttcaggtctctcagacagtgcgcaaatattggatgcatctgagcctggtttcatgaatatcacgccacgatggacccagtacaggccgccaatctactacggcgctatcgtcccagctactggaggccgacattcagcatatcgtgcgcacctcggtagagcatgatatcccgttccttgccacaggaggcgggcatggcctcacgacaaccctgggacagtttagcggtatcacgattgaactgacccggttcaacaccgtcaaactaaacaaggaaacaggtcagataactctcggtggtggaacgaggtactctgatatctacgagcccatgtttaacacggggaagatgatggggctgggcaacaccccctgcattggggcagtcggcgcaacgctagggggtggaaccgggatagggcaaggcatttacggcctggggcttgatgccctgctgtccgttcgtctgatcaccgccacaggtgacattgtcgttgcttctaggactgaaaaccaagatcttttctgggcgattcgcggcgctggtgctagctttggaattgttatctctgcgacttttcagcttcatgatgcagtcaatggtggcattgtcgcactgaccatgttcacatactcaccagagcagaatcggtctgtatgggaagcacttcagtcttacgatgaaaatattccagacgaactatccttcaatcttgctgcggtagtaaatgcgacgacaagagaggtacactaagcactccaaatttctttaattcaagtccactagcaattcctaacaattgcccaccgcatatataggctttcatcgttgccgaatcagagtatcacggtccaccggccgaagccgagcgtttcctgcaaccttttatagacatcggacccacctctgtccaatcgacgactttaccatggacgcagatttacgacaccgtccatagcacgaaccaaagactttgcacgccggggcaatatttgaacgaatacaccatcgccctcaagcggacagacgtggacgccttcacggcttattacaatgagttgtatgccctttgggtaagggaagaacgttacgaaggggactggatcatcgcgaggtctcccattcgcgttatgagactggtttctgatgaggagacggtgtttccgcatcgtcacgccattacccatctgtatgatcctccacttctccgattgtctctcgtctcaaccaccttagctcagaatgactgacctggttcctattcagcctcttcggcaactactacagcagcccgtcacttgattcaaccataaacgcatggatgcgcaacgtccgcgcgagattccaagccacgagtggctacgacaggctccacgcttacacaaactttgcacagggcgacgaaggacctggggcgtggtatggctctgcaaatctgaagcagcttagggcgttgaagagtaagtgggatccggatggggcttttaataattttaatccggtgctgccatgactcagctctgatgtcttagtgcgatgtttgttgtgtagtgtaaactaggtaccgcaatcaagcaattccagggacggtcaatactcactcgattgtcgtttgcgcttttctgggtaaattggacggataactttgctatgccctcctcacgctctgatggttgagtttgccctcttacagtagacggagcgttgtagctgatgttggagttatatgttggtgtctatatacctccacatacccccacattctcacccagaaaacgataatgactgtaggataaatccaatgataaatatatagactgacctatttgctctagacgtcgaaaatgaacagcgatggggttaacaagtcagagagttaaatccctgattcggaggtgttaagcagggcctctggcttacatatgaagccgcttaaaatggacgagaccataccgttacggcaggccacccatggcgcgtactaactatttatgtcgtcgcggacagatatgagt

SEQ ID NO: 14763 - DNA, 788 bp, Emericella nidulans
  unsure (1)..(788): unsure at all n locations
caaaatcaatttatacttctctatcatactatgtaatcctaaaaacaacaagaaaaacacaaaatttatataatattatttgtctcnttccagagtaactggtgaagaccaacctcgctganaaagcggtccaagacaacactgtcattggaagggactttattaccggtcatgctgagcggaattggctcggggcggacagcgcgagctcggttgaccttgacccgggagatagagcaaagaaagcgggctacgaagatggcaggcgccaatcgctagactgatacaaggaacaatgcatatagcatgcctggacacaaaacacgacatctacaggcatactcgcagcacaggcactcacaatgaagagccgcctggtctgccacctatccgcaagaacagcggtcgcaggcacatcgcagttgaccactatacttgacgaacggaattgacatttggctatcgaggcacatgcagatatggccaatagatgtaactccatggaaatgcatggcaagaacgagaaataatgcatgcacacagatagcgagactttcatcgccatgcggtacacaatacattaatcatgcgtacctttatgaagggcctatgatcagacaggcgacaaaaattaaagaagagtcagcgcatgacaataatcaaagccgaaagtacgagcataaccttatgagagaacacgcacgcatgaaggagctgtcctgaccactatgagggaaacaacattaactcgttaaactcgctaagaagacctgtgagtaaactggtta

SEQ ID NO: 14764 - DNA, 2368 bp, Emericella nidulans
tttgagcgacgagctctgctgacaaccccgtatgaccagaacgccaacgacgcatagaaaacgctgatggcaaggaaccccgtgagcgagccttccttggccatggacatggctctcgcggcccggatcacctgcccggcatgccagatcgctttacgactgtcggcgctgccaatccattccagggcgctgtcatacacgcgccgcgcttcgttcctgtcctcttttccggcgaagagctggaggtcttcgagcgacatgaagaggaacatggagatcacctcgtgcagaagcgatatctcatgactggaactagggctagacatagcggtggggtctgtgtcgacgctgatcatacgaaaatgttgcaacacctgctcgagctcctgctgtctggaattgatgaccagcgcgttccagtgttttgagctcccctgcgcaattaatttgagccggtggtattcattgataagagccgagaggccatgcagaatcaccgaggccgagagctggtggtcgatacggccctggtatgcagacatgtctcgtagggtgtcgacgagagaggggagtctctctggagccaaggctgatgctgacgtagcgatgtaaatgtctcgccattcagttgcagattttgcatcccagagtgctcggatcatggggagagggagttccaggtctgcgtaggagataagggggttaatattcagcatcaggctggattgggcgtcgtggagaaagaggtgatggacgagtctaacctgccggtcagtctgatagagtacgaaggaggaatgaaacgggcagacctcttgaatgactcctgttccgcccagtcgcgccatttgcgctctaatgttgacggcgtgtcttctaaacacggtacgatagtcgggtagagcgagcgtcggaaacgcagcccgcggcggagcatctagatagccacgattaacttaggtaacttaggacagagcacagggtaagtgtattgatagaataaaatcataccgtaaggacgggctgctggaagctctcggcgatttctgtcctccgtccactcccactccacatgcctatatcgatcgtcagggcaaacgtctgcgacgcccggaggtcgcggattgtagtgttgtcgttttcatactgtgaagcctattatcagccacccagagaggcatgatttgcagtaaaggcaaagaaagtgacgggctaccttcaaactcatctgcaaccgcacaacctccattaacgcataccccaacttcctaatcgttgggatagtcgacttgactgcagccgcagcagcaacgatgcctaccatatcagggctctcctcgttcggatggaaggtcggcccatggatccacgagtccacctgctgagcctggtacgcaaagaaatcctggatcaggctgtcgagcagctccgtgctgggaaacgacttcataatgcgtgctaggttagcgcgctggctcgtctgcaggaccattccaaagatgagatcacgactacccggtgacaaccgttctgaaaggatctgatgtctgcactgcgcgctcgcttcagggctgtcgatcgacttgggcacggacaggtcattctggtcggcgaaggcgtggtcggaatgccctggcttccaggctgagaggctggaccggctgtatgcctctgcgccgagggcaatgccgctgtctctgtctgcgtcacagtcggtctcgtcgggctgcaggggagcgggattggcggagcctcgggagttgtagaagtcgatcaggccaaaatcaacttctgtcagatcgaagtcgaatttaccgttatagtcaaagagtccgtgggcgtaatagtcgttcggagggaatgcggatgggtcggcttctccaggacgcgataatgagacgagggagtctgggataaattcaggaaaaaaggtcccgtcgacgctgaaaacgccgctttcgtggtcgacaagagaagaaacagtttgagctgggacctggtcagcttgcgtctgcgctttgtccaagcatgacttgccatcatatgcgggtatcggcggcggagggcctggattcggcggcaggtaatcaatctgcacgtcaggcgtaaccagttgctggaagttcatctccggattgagcggcgaaaaggtctgcgattcaaggggggagtattcctcctgctcatgctcatgctcgtgttcatcgttggaccctaccctgtcagtatgttcacccgcgtcgccccgagtccatagactggagacgtaccttgttgctcaccatcctgtgcattcgcatcagcataatcacagaacagcttccgatctcgacatccgcgacacggcttttcctcgtcgcacttgagt

SEQ ID NO: 14765 - DNA, 2718 bp, Emericella nidulans
tactatgccattgcaatgccgattagttttgtgcacggcattgtggtcttcattggggtctgttcgggctgtggagtggggttgctatcgcgctttgcttggtaagtgggattgaggcggtgttcttgacgcagacggattggaatcggtctgttgaagatgctgttaggaggaatgcggcagcataggctggatattattggtatgtgtgagagagattatatgtgcttgatgatgagatgatccacggctatggttattatgagttgcacacttttgcagatatgtgagctgcacgctagatataaagtattaaagtgtatcagagtagcagtgagggaatccttcatttcaatcccaagatagtagttttggctcatcaattaatactccagaataacccaggtctgatcgtccacggtcgagaacaccatgccagcattgatcagctcatcacctgcacgcacaacgtcttgcggaggaaggcccagcttcgccgcaatgaattgcgcatgcaggccctcattattctgcggctccgtcctgagcaggttataaaccctccttgcagttgcagacatattcgccgggaacccaccaccgccaccaaccccggccccatcaagccctcccatcgccgcatcaccaccatcgattttcccggtagcacctgcagcgggccctggagcgcctctagtatgaaacaagtgcaccgcggcggcctccaaaaagtgaacatgcagttcattgatatccgttaacggccgcacgcaatgcgtgttaacgaccttgcggtctccaaataaactcttcagcttcccgaataccttcgcatagccgttgatctccacaccattcaggtccttcccttccttgccgaaatcttcggtcgtgtccatcgcctcggacggatttatccactgcttcgcttcaacctcgcccgtgccgtcgtcaagtttgtatgtgacatttgtggcttgtgtgctgatgttgcggacttggcctatgaagacgatgctggatacgtcttgtccgtcgattgtgaagtttgcttccgggtagggctgcgttgcgtcgaggatttgtttgattgttacggggcgaagggttgtgttgttccattcttgctgcacattgaaagagagctgtcagtattgaggatttggaagaagggaggtggaacgcattgtatacccttcctccagacggactggttgtctcgccgggcatgaagccaccaccgccacttccatatgagttacctccgtagccgccgtaggagtctgagtggttagtatcattcgtcaaaaggcggaagatgtcccgtacccatggtgtctgaattctaatatggggtgatgctcaagctgtgcaataatattggagtgaagctcaagtggacgcagtcattttacctcttcgggacgtgttttgtcgacgcgtcgcggggagaagtcgattgtttgtcctgtttgcaacgtcacccgcgacaacagatgacccggccattcttcaccgccttggatttttccgtcgttatcaagaaaaaaaaagttgagccgataaatcaagacgacataaaattgagaaattcagtgaatattgggaagcagaaaaaatgccttcccgcgccgcctctccggcgttatcggagaatgaattcgacatcacaggcgcgcttttccagaatgacagcgactccgatgccgagacgcagaagccaacgaaacgaaagaaggtaccggcggcaccgaatgtcaatcttgattttctaggcgaagcaaatgcaggcgactcggacgaagatgatgaagctttcatcgcggagaagcagacatccgcgaaccggaagagtgcgaacctgaagggccgaacggtgaagaagggcggtggtttccaggctatgggattaaatgcgaatctgcttaaggcaatcgcgcggaaggggttctctgttcccacgcctatccagcgcaagactatacccgtcatcatggaggaccaagacgttgttggtatggcgcggacaggatcaggcaagacggctgcgtttgtgattccgatgattgaaaagttgaagtcgcatagtacgaagttcggcgctcggggtttgattctgtcgccgtcgcgtgagttggcgctgcaaacactcaaggttgtcaaggagctgggaaagggaaccgatctcaagtccgtattgctggttggtggtgatagtttggaggagcagttcggcatgatggctgggaacccagatatcgttattgcgacgcctggtcgatttttgcatttgaaggtcgagatgaacctggacttgtcgagtattaaatatgttgtgtttgacgaggcggatcggctcttcgagatgggtttcgcggcccagttaacggagattctgcatgggttgccgtctacaaggcagacactgctgttttctgcgacactgccaaagtctctggtcgaatttgcgagggctggtttgcaggatcccacgctggttcggttggatacggagagcaagatttcaccagatctgcaaaatgcgttcttttcggtaaagtcggcggagaaggagggcgctctgctttatatacttaatgaggttatcaagatgccaactgggccgacagaggcgtccctgcgactaaaggaaaaaggccccgaagactcgaagaacaagaagcgcaagagggcagagatggaacgggacagtgaaca

SEQ ID NO: 14766 - DNA, 339 bp, Emericella nidulans
agggcaggagccggcgggcggccggtgtgatagatgcaccctaacatatgtgcctttacacaggggacctggcccgcaggggtaccgggtaactactgagatcccacaaagaggcaagatgtgtaatggacaagagtgacagtgacgcgcgctatgggatgccatccttaggaggctacatccatgctgacgctacaatttactgacgacctttcttctatgaggaccacccacctaccagacaaaatgggcggcatccagggctggccacaacgcctgaggcatcaagcgacatccgtttcaatggaacacaaaggctcgccccccttctaccgatag

SEQ ID NO: 14767 - DNA, 2014 bp, Emericella nidulans
tgtcctgtctgatcatcacgatagttagagccacgaaaggacgatctgagaatacacgcgagaatggcagtttgcgcgcaggacacgatactgtctctcgagaatcttgaaggcgcagagattcgcgcgatgactcaatgactgaggcacggctattcggtaccggtctttaagccgcaacaaagtagcgggggaagcctggagctgacgttgatggagtggtgtagtagcctgctgcggacgaccctgcatatgcgaggaaattctcattgagatagcctgtttaaaagtcagtaagctgctgaacacgccgtgggaatgagagggccaagtacgttgtagctgttctgcaaactgcaagtagctgtcgtcaaatgtcgcctcgtacatatccagcagaccgctagtcagaaaagcatagtcttctgcgaatcctggagttgttcctttgcttccgtctcggtaaatccgccagagctgacctgtggctttgtcatatagagtctccttgatgaagttgattgccttggccgccgcctccctgcattgggctgattttgaactatcgatttcttcaaacaaaacactgcacttggccaaagcgccaatcgccaatccgttccacgctacaatgattttgtcgtcaaggtctggccgtacgcgatttttatccctatactcgcgtaacctttgcctacctgatttgataattcgcactacctcatcctctcctaaaccgaactccttagccaacttgctcggtgtgaccttaatggaaaggacattctggtccataaactcgtcatgcggatcattttcaggtgcgatgttcccatcagaaagaacgccccagtggcgagcgcaaactccggcatctcgtggccccagaacctgagtcagctccttcagagtccagacgtagaaagcgccctcccgcttctctgtatcatttggggttggtagactgtcggcatcctcggacgagtggaaaccgccagtcgtcgactggattggggcggatgtaagatacgttatcagatcgtatactgcaccaagaaactcgggattgtgggttatcttgaatgcatcggcgtagacatccaagagttgggcttgatcatataacatcttttcgaagtgaggcagcgaccagtccgctgtcacactatagcgcgcaaacccatggccaatgtgatctcgtatacccccgcgggccatactgataagtgtgctgaccgccattgccgtcgcgttttcgcattcctcttgcccaacaatatcagtcacggcgctcgggtagattccgagacggagcaggaagctcaaattggctggcgtggggaatttcggggcccttgagaatcctccattgtttatatcgtatcgggatgcaaagtgctggtacgcctcctctaggagttcaacatctaggtcttcgtcggattgatcaccctgaaacgtgtgtgtgccttcttcggcgaactccctcaactgctttgtgatctcttttgcgctttcgaggcagcgttgccgctgagtctgccagacatcacgcagcttctccagaatctcaataaagctgacagtttcggggccaagcaacgatgccgcgttcggaccgggccagtacgtgccgccaaagacaggctccagatcgggtgttaggaaaacgttcagcggccagcctccggatcctgtggttgcttgcacatagttcatgtatatgtcgtcgacatcaggccgctcttctcggtcaactttgatcggaataaatgattcgttgagaattgaagccacttcttgggacatgaacgactctttctccataacatgacaccctagaagatatcagcagccgctctaaataattgcaggagaatagcagggacgtacagtggcatgccgaatacccaatgctcaggaagatcagccggttatgtcgccgagcgagctccatactttcggcatcccatagttgccatgctacgggattatgcctgtgcgccctcaccta

SEQ ID NO: 14768 - DNA, 685 bp, Emericella nidulans
  unsure (1)..(685): unsure at all n locations
aacaccacaacaaattgtacacaaatccccccccagagtagagtgatganagaaacaccccagaaaaggagaacaacccaacaactatattaagaacacaaaccgttttttttcaacaggcaggccacagagtcaggctcgcaaacaagagcaaaaacaagacaagacgcagcacgaggcaccgatgaggaacaaagacagagcgacagaaaaaacagataaccgggcggccagaggaggaagaaacgaggcacaggaagaggatcgggcaggacccgggacagaaatagatacggaaaaaagaggccacgagaacagaggaagatggaccggacaacaccagaaagaagaaggctcctaccccctgaaaaaatatagcggggagagaggaaaacacacatgaaaagcaaggaaggaaaacaaatgacaacaagaaaggaaataaacgacacaaggcagaaggaacccaaaacgaaacgacaggagaacacgaagaaaaaaacacccacacacacaaccaagagcagcaaaaaaaaacatcacgaccacccaggacaccaggataagacaaacacgaagccagcaccaaggggacaaaaaaagccaaaaaagcaccaacccaaaggcaccgaaacgccacaaaccgggaaaccaaaaccgaaaaggggacaaccagaaacccgac

SEQ ID NO: 14769 - DNA, 3065 bp, Emericella nidulans
tcaagaacgtgttattcacgcacaaaatgttgcgctgccgtttcgcgtgtgcggtttagacaaggcccgtcttcttgcatatgcggcacgtttgcggaggttcctctctcgctcagagcgaggcatatcttttgctaatatcgcgttcaatctcacgcgaaaatcgaacccggccctggagtgccagtgcgtcttccaaacccgatcagagtcggagcttaaagacatcctgactggtctggaggaaggggacaataaatatataattcaagtgaagaaacccaaacgcccactggtgttgtgttttggaggacaggtagggagaagtattggactcgaccgcacgttctataacgcatttcctttgttcaaacatcatctcgactcctgtgatgatattcttaaagcgaatggggattcaagcatctaccctggtatatttgcaacggcccccgtactggatattgtgcagctccatacgcagctttttgcattgcagtatgcttgcgctcgcagctggatggattgtggagtggaggtcacagcggttataggccacagcttcggcgagctaacagcattgtgtatatctggcgcgctgtctctaccagacgccttgactcttatcgtgcgccgtgctgttctgatccgtgacaaatggggtgctgacccgggtgctatgctcgccgtagaaggagacaggtctaccttggagaaacaccttgaatcgtcctccgcaaacatagcatgctttaatggccctcgaagttttaccgtcgcagggcctaccgcagttattgacttccttcaggaagaactgggggctgattccgcatttcgactgaagcgccttgaggtcacaaatgctttccattccaccctggtggacccgttgcttcctgcactcgcaagtgccatagatggtttagctcttaacaccgcaactattccgatcgagcgtgctactgaacaccaagcagcagatacaataccgttgagcatcgtggcagaccatctccgtcagcctgtgtatttcaataatgctgtacagcgcctcgctgcacgtcatggccctgctatctggcttgaggcaggctccaactccacgattacctcgctagcacggagagcgcttggtttgggcgtctctggcaacactttccattcggtgaatgtaacatccacgtcggcattgatgaacctcactgatgtcacggtcgggctctggagcgataatgtgccttgcacattctggggttatcacgctcgccaaaccagagaatatgctccccttttgctaccaccttaccagtttgaaagaacgcgacactggatggaaaataagccccttcccttgaaatataaccaggcgcaagcggttatggaaggtaagatggaagagcctcttttttcatttatcggttacgaagaccatgcccgtctgttgagtaaatacctcatccatacggaccatccaaactatattgcagcagtctccgggcatacagccgcgaagaccgccccaatcgcacccgcaactctgctgcttgattatgcaatcgagctgctcagatctcttcccaacaaccaaaggaaaatacccagagtgtttgatgtcgggagtgatgcgccactactgctagattcaaaccgcgaggtgtggatcgaggtttccgctgaagatgataaaaggacttgggccttaaggtttcagagtcagacgaaagggggtcaatctgactcccggcttctacattgcacagcacatatatcgatgcatgacgtccgatgctctaggttacaaaccgagttcacacagtacgcaaggctagtcagccacgccaggtgtgccgacctcctaacagacccagaagttgatgatatcctgcagggccgaaatgtgtatcggtcattcgcagaaatagtggagtattctgagcagtatcagggtgtgaaaaggctagttgggaaaggtagagaaagcgccggtcgagttgtcaaatcatattctgggaaaacatgggcagatccctttttgtgtgactccttcagccagtgtgctgggttttgggtgaattgcatgaccgacagagctgaagacgaagtttatgtcgcgagtggaattgagcagtggatgcgcacgccattatacgcggatatggcgactgctaggccggatacctggcatgtatgggctcgtcaccagcaatctgagggattatatacaagcgacgtctttgtgttcacacctgatggagagctggtggagatgtttctcggcttgcggtattcgcgcgtagcaaaaagcctgtttacccgcctacttcgtggctccacgctgaaagttgactgcaggacaaaagatactgctaaccaggaaaataactcaataaaggatctggtcagtcgtgttaaggctgttgtggccgagatctgcgcggtgaagcccagcgagatacaggatgatagtcatctagccgatgcgggcgttgattcgctgatggcaatggagcttgcccgcgaattagaggttgccttcaaatgcacgatagctttggaggcgctcgttgaggcagagacatttcatgatcttgtgcaagcggttcaaagtgcactgggagagacgtatgaagactccagcgtttgcagtggcaaccagtgcagcacaactgacgaggccaccgaattccctagcactagctggtcaattacaagtgtatccgatacggcagacttggtactaccgcttgatggcgtactggatgctctggatgaaaccaaaggactgaccgatcagttcctagcggacaataaatgcagtggtcgtcttctcaacttcactcctttgatggttgaaatgtgcattgtattgacactggaagcattggaggaattggggagcaacatccgatctgctcgtgcaaacgaccgcctcccgcgcattgaatttgatacgcagcacggcccactagttgagtacctatacgggcggctattggaggcgggattgataaaactagacggatcgacagtcattcgcacggagatctgcgctccaacagaat

SEQ ID NO: 14770 - DNA, 3363 bp, Emericella nidulans
gaccacccgatatttgccggccatgggcattcccagcggaaggtctttttcgaagagcaggcgcagtatatcagacatctatcgaatcatcagcaggtcatacgggccagaacactgggtggacgctcacagaaggatgtcgtagagaggtttccatttccacctgtccttacccgctgaaccactgtttcccttcgttccttgtcaacgctgagtctcatagagaccaggcctaagaggagggattttatccctcgactgagatgctagtatcactgggctggaattcaggccccaaaagaggccaagatgctcccttctaggtggatgattcggctgttggagagatttgccaatttctgctgaagactgaacttatgacttgctttccttcttatatacctcatgatgagtggctgggataaagaaggtctgccgaaggttcatcaactatctctcgatgcgagcgttgtgttgtgtagatgggagttcgaggtgcggaaggccacagtcgttgatgggcagtgcggggtaacactctttgagcttcctgagttcatgatcaacgacctaaggcgcaaaaacaaggatatagaagcaccagagatactttatcatgtactgggaatatatgacttgtgtgaagtctgccgaccgagcattgatggagggactggtggtgcgaatgcggtggtaagcatgtctgacagccgcctggagacaaaagtaactgccttggcttgtactctcctgaggcttcacgaaaaaaggcaacttggcctcgaaagatgcgcttctcccactttactttcctggctttacccagctaaaccctactaacagtgtatacaatccagtcgggcagtggattctaggtgatccacggatccactttcgcggtccaaattttgtagtccagtgagattctcaattctcgactgccattccggactctccatcaacattatcctcacgaaattcagtcgaccccataatggcctccgactctctcgacgatatcttcggttcctcgcctccgcgagccgaacaacctctcccacaagcgcacaaaaatgcaaccgttgaaccctctgagctcccctccctccgccgccaacacgtcacagccggttaccgtgacggcatttccgcttcgaaagctgagcacgtccagaatggcttcgatgccggattccccgtcggggcacagctgggtatgcgcgccgggacaatactagggattctcgagggcatactcaaggggtacgagagcagtcctgcgacggtcaagaaacctggtcagaagcctccgactccatccacaacggcgacgaaagaagcggatgaagcgaagaaagccaaacgggaggagatactccgtctctatcaacaatcagtgaaggagctgaacgtccaggccgttttcgccggtgtggatggcggggcgttacaggcgcaagggtcagaggataaaccagagacccagctcttgcacaagggcgatagggtcgtgagtgcttgggagagcaaagtccccgttgccgcttgggaagagcatgtaatggacgttttggaggctaagagtgacgacggaaacggcaaggcggatgagagtgaggatgtgaggaaagggctggaagcttgaaacaagctagtcctggcgacttgtggcctaccatcttcggagcacatacaccgcagacgactgctcccatcgacgacgtcagctctgcgctcgataccggtcctcgaatccagccattcggaccatctgtgaagaattttacctgcgcctgcgccatgcgcattcctcctgcaaaacatctacctcgccctgcaggacgtctcggggaacccagcgaagcggtccctcggcacatcaaatcgccagcgctgcgcaaatttggctgcaaggctgcaaggtgaataacatgaaccacgacgccactcgcagactaaattctcgagcccagccttgctgtccgcatcttctggaaccgcggcactgtggtaatgattccgcgggtgctagttgagcaagggcgcgaatttcccgatagggcttcgattctcgttcttggacactgaacagggacactatcttgctcactctagcctctggctgagtgatggaggtcgagttttcgctgaggtccacatacaaaatatccattcctatagtcttagcttattacgatacagattattgacgcttatagaacgaacacaaaagagcaactcaattagattgaaaaggaacatagtacaaggtacacaaaacgatcctgcgctcctgcgcagtagctagtgtctcattacataccacataagtgacaccctagtaaaagagccgtccgggagcccttcccactggtccgcgttcactcttgggaggtttaagatatacctagacaaccagggcaggagatgcagaaccttattaccaagggatacgatcgatccgcaaagggggatcaagccgaaccaaaacaatacaaaataatgatttcaaacccagaacccatttaacgtagtcaaagcagagtttcattctctcaaagcactgatacttacggcaacagagttagagtctaaaaagtacaagtacgtagacggtatgtctgtgcgatgttacctatagcacaaggagtgtaaaagtagcagcggggaattccattcccgggcattccagatgggcctgagcttgttttatgagactattgaatctagctgctagtggtttacagtgaagctgtgtagaatgcggttgaagtatttgaagatcattttttgttcgtatgagacagatgataggaaaacatagcaaggtagctccagtgtggaacatggcagaaagagatatatcagtgagagtctgcctcttgtgagagtaatttgaaggaaagtgaaggaaatgttaggtgaaagaaaggcgggaaaacagagagagaaagagagaaagataaaggcaattggccgtccataagtgaatgttgtatgcatcgagtcttgtggcgagttatggatctcattgtcatatgagatatccagcgccggagtcatcagtcatcgtgttcgctgcgcatcccatgagcccacgccaacttcgtaaaaaagatccatcataagacattagttcagaatcaaggaaagacatagtcgtttgacatcatttcagcgaatgcaccttgccatgtggtaagcccgttagaccgtacaaatcatcccaacgccgtcccaactttttcgaattgcagacttctcgaggaaatggtagaatcacattcctttgcgaggacgcgtagttgttatttcaccgtggcatgcgagcactcgcaaggattcccagactcgtttgtatag

SEQ ID NO: 14771 - DNA, 1686 bp, Emericella nidulans
ggatccgtttggggataccgccgggtatccctgggagggagacaggtaggagcggacccggaacttttccaggaatccgaatctagaagacgttggattatgaatcgggcgtttaggtaagataagctgatggcaggctgtatattgcattcgggactgctttgctgtgatacccatatactgcacttcccagcagtctgggatagtgaattgctgtgcgatataagaaatctccccaagcattaatagcatctaactttgtttgaaatttcatatctggtaataagttcctgaaatacctggcgcttccattgtcaccgatttgtgttgaccaatccatccataaaacacccatcaaatccatattctacatatttactacgtagcagagagtatcgtatcacgtaacgcccagaaagcctagaaattatagcctccgcgattcataattcctcctctgttcctcagtcatatgccgcgggtcaacgtgcggcgaatgtccttcgagcgagttcctatccgccgccggcgcatactcgtacacctgaggtagcgactggttataagaagtcgtatgctctaacggctgcaacgaagactcaggctgatcatagcgctcagagtatgtatagctgtacgggctttgagactgctgttgcgggtattgttgagagtattgcgacgacgacggctggagcggcggtgggggctgcagatgaggaggcagcgcagactccgactgcatagtggtgggagaagcaagggactggtttgctgtagtcattatgcccgccctccgacggccggttgatgctgtggatgctttacgggctatggagtcgtggctgacgcccaggtggcgttccgtgacgggcgaagacatggagccatggtagtggtctgtgtcccggtcacccgtgttgggtgtaaagctgcgctggtagggctcgctgacggtgttgttgagagtggtctcgctgtaggcgctgccagccgagttatttccggttgcagcagtagcacttgcgcctcggcgttgaacagatcctgggcgacccagatcgacgccagttgatttggaatcagaagggaagctgtcgtctggaacggtgggatggcgtattccctcgctgatggaggactgacgagccgggggctgctcggcgtcatcaggcttgtcatcaggcctgtcaccgtccgccgcagcggcatcctcagctgcagcgccgggggtgcggattggaaccttcttcacagcggcaactagagcgaccatgaacttggaacggcgcgcggcacgaacagactcgatggcccagttagatttgtggaataggcctacggtgagttctagcttgtctagagcacctacacccgagacctcaatatcaacgtcagggtggaaatcacgcttgttatccgggctacggacgaaggtttcaatttcgtccttcaatgcctggatttcttcggtagtggtgtcaatgttcacttcaatggtcagtttttcctgcatagcggatgagcgcgagtaattgtcgatccacaccgtgttgagaacaacgttcggaatctgagttacacggttatcattcacgttgcgaaagacgctgtataagagcgagatgcgctgaacaatgtaaggctagctgtcgatctccacccggtcaccaatgtcgaaggggt

SEQ ID NO: 14772 - DNA, 1256 bp, Emericella nidulans
gccaacccaacatttgcgaacacgtttagacttggaattgattctggcgggaaaatggaatctgtgaaattgggacacggcccattactgaaggaccaagtataataccggctatgacttctgcgataacgcgaggttggcgaatcttggacagcggccaatggagcatgcgacagagaactatgattatgaaggcctgctataatgttagaccagactatagataactgatcccttttaggacccattaacctggattataaagatgacgattgggtttttgctgtcatactgggacgggtcgccgccctcaaggataccaccttgaggcggagcacgattctcagtcgagctgtcggccatggttggcaagccaggagtgcctgacttcaaggacaagcgatgtccctacaatataaagggcgccagtaagcacgggacaaagacgactagtagacgggacccgggggtctacaagccggacccacgtggttggcgtggagagagtacgctggagtgttatgggaggagtcaatgaatcatattcaaggttacctgcggatagaatccttggccatctgtcggtcagcacttgtttggctgtgaacaagtcggatgatacgccgccgtttgcgtcattcatcctttgaccagaattgagactgaagacgagcatctgaccgcttcctgagtgacaggaagccaccctagtcagagtttcattagaatttaaccaagttcgactctcgggtgggaggctgatagcccaatcagtgcattgtttcaagcgccaaacagccccagtcaattcttaggctagactaagcgacgttcagagctgcagcagtaaaagaggacgctcgcgactgccaaggcgttggaagcaaaagcggctgtcacatgaccttattgaaccccgcactccgcctctccaggttgggtgaagttgcgacgttaaggcaaagaggccatgtccgtaagcgttcaaagcaaggtagtcgtaaaaatcatatagaatccttaagatcgagatcgttggtggataatgccgggggattttcgatcgtccattccgagaggtagaaattactagctctacgaaacgggaattgcagggcgtagatcggtgcggggtgttggtccagctcctaccgggcacctgcatttgtccgttcaagctccacgcaagcaacagccatccacaggcatcagatccggacacgtaaactatatgtcttccattgcacgacaatcca

SEQ ID NO: 14773 - DNA, 962 bp, Emericella nidulans
agcgcgagatctgcgatcaaggatgccagccaacagtgcctcactgggacctctggactcgcaataataccttcgtccccgccgttcgcagcttaatgcagaccctgaatgccccgaagcaggaagaagcgctgttaaaactcggcgacgacgctgccgacatcatcaagcggcagtgcgggccaaaactcgagggacgcgacatctgcgccgatggtcataccctggctgcgtttgggaactgtttcaagacgaatttcctcaaggctgccatcgctaatctcccaaccctgctcccaatggtgtcggagcccgtgtgccgtaagcagctggaatacttgaagtcagacgagctctgggaagagatcatcccaaacaacatgagggaatacgccaaagtgtgcaagcagttaacataccagccggtgatggagcagatgtataccttctgatagaataatctacctacattttctggttctgggtgtaattgttggctggtgatgttatctccgcctcggggattcggcggcaattccccgatctcagatctccgctgctcttcatcatcattacctcgtgccatcttcaaccacctttatatacccatagatctggttctgggtatcgccatgatacaccgtctgctctcttgatttccgtatggcgtctgccactctttgccgggcactgcgcccgggcccctcccctccaccgtcgctcacgagcattacctttactcagcgtcatctccgctctctacctcctcgtccttgtccagcccaaccgctctgtcaccaaagacatgtacattctggcgggtttcaaccattcgtacctatatcaccgagctccttagggaagccggttcccgcaaggacttaccgtcgaacccgaaaatggcttcgtcgtttcttttaccttttcattggcaacgggcatcgtgtacgtcttcgacaatc

SEQ ID NO: 14774 - DNA, 2415 bp, Emericella nidulans
aactatgttgtctctacccgtgtttcgttgagatggttaataactagaccgtccaagagacaagatcgtcacgaggcatggtccacgatccacataattcacgctgatttgttttaccccgaagaccctgattcaactccatgaaaatcgccagccgggctcttcagcttcaaccgaactttcgagtctcaactgtgaactgacacccaaggccgccgagtcgctggattattgttacctaacacccgcatactcggtgtacaatcgattcggtctgtggttgcacacctgagaccttgaagtggactcgacaggcgcagattcacccattggctcagatgtctcttaaaagacagggtcagccttatgccaatacagagtatgccaagaagattggacggcgcctcgttgaatagcgtcagttcagagcaggggtcgtccactaaccgtatatggatataggcggcacggcagagattcaggatcatcctcgatccaaagtcaaaattgcaggatattactttcgttgacgatcttttcagtttaggagaatagcagttaccctccccacacggggtacttgtcgcaacatcagtgttgctgattcgagatccgtgattcctgcttcattcagctagcgttgcttcgccgagcggcgtgaatgcccagcctctggcatgatcagagtctgtgctaaaacctggcgtctcagcgtcctcaggccctcagaccttcaggatttagacatggacccactgcgttcagggactcgatcgtctaaagttccaggctgaaatcttgcctgtgggtttatccgcggggcccggcataaaattgtgcaattgtcgttgtgggccggtgaggggaagcacgagtcgacctgcgtgtcctgactgcctctcccaagctccgctgcgagaacacatttaccttcagtggctgcctaggcggagatgaagtactccgagtcgggtacgtaacttactgtgtatgtatgggcttcactaacgttctgggttctgccgctgcgcaggctaagctctagctaggatgaggcaggaacaccttatctctgtggactagaccatgtacggcgtagatggggaaggcgtacgtatgcatcgcgtgtacggcgtagtctacaatgcgcggatgtgaccgtctaaccgaaagaagcccatagttccgggggttggtatggcctcaaagcacaaaataacggcttgttcagcgatagagtttagacattcgcttagatacgtaagcctcttcagccacaccgtccgtgaagggacaaacacggcgaaggggacgcacgattcatgaaaatcatgccgcgttagcctgcgctttgcatttactttttgagaacaaaggtatcatcaatgggtgatatcaatattgtaaagttattctcttgcatatccttatacgaaatgtggactcgaccagataatcagttgaaatcaaacacggataaaggtatcgagggtcgtaagttatgcacatacaacgcaatattcataatttgtgcaaggtaatgagccagggacttgtgccgggctccgctcgaaccgtacccactgccgattaatcagcgcaaattataagatattattataatttaccgaaaataacccaactgtggtcccaacatggagtgtttcgtgtcctttcttaaatccgagctcggatttcgcattcgcattcgcattcggactcggatttacacccggggcctggctgtaccgcagcatgagcgaggcacagcaacgaccggtcacgcagtcggtacgtcaactggatgaggtccgtgggtagatggcgagctcttcttatgtcagtggtatatcggtcagcgcttactattccgtacagtagtaggggacccttctgtcacagactaatgcagatagcaccaccacccgcggttcagcagcgtggttaaaagcttgtccacagggctctaaccttaccggaatagggaatgataggcacgtacctggctcggtcttacggtatttttaataccgggtctgggcgggtagttataccctgaaagacggtcgctgcgcccagcttactgttacctgctattctcgcgtgataagcagaccaagccttagcatccttgggtatgggtcgaggattcgcctcatttgatgacgaggctggaaggaccaacagtcaaggcgttattctcatgctatcccgaacttacgtagccttcagattgctgctagattggccgtatacttagtgctattgctgacgacagggacacgtactaggcagggatcaaatgggttaggtctgcccatagtgcgggctggggaggggtgaggccctgaaggctaaggggttcgacgcctcttcaaacaggctgatggagcaggattacgggtttgtggctga

SEQ ID NO: 14775 - DNA, 498 bp, Emericella nidulans
aggaaccctgcctgtgctttattagtgcttgcggggcgggggcgcccaggagacctaatccgcggcgggggtgaagtttttggtctatagcggggggtccgacccactggggcgctccaaccacagcgcattcaaaaagaccttgtgtactgatacagactatttaccggcactgcgggcagcgcacaacgttgcagacttgacacatgtagaccaccggtaactagtatggccctgtcactcagtgtaagggggctctggagacggaaaaagcctgaggctcctcggccgtgctgagatggcatgcctgtttatggtcccagctggttatctcgcctagacaaagtccgcaatggcacctgagggaacacaccgtagccagggggttaacattcacttagagcccggcgcgcatacttttaataccaagggcctcttggatgacatcctacccgtataaaaacacccggagtcggataaaaaaacattcagccatat

SEQ ID NO: 14776 - DNA, 1863 bp, Emericella nidulans
gcgccttgtttttttatctcccactcgggcagctgagcaacacgtctacccgtctacccaaacccagttgtgggtcagtcctcacgaactatttctacgccttatatcgcactagagtcgccatggtgtcgtacagggcatggtcgtgcccagaaaggagtgcagcgagctctagctccaccaacagcgatacctcggaccggtctaaaagcacggctccaactatttacagtgaccggcccatgtcgaagcggcacgaagaggaaatggatctctatgatgatgatgaagacttagatcccagggactccgcgtcaacattcgattcatctacttcggcggatgagattgacgaacccccgttgttcgaggtgccggatcgccggcgagttatcttcagaccagatgtgatcccctcgaattcgtcgagtttcgccaaactatttccttcctgccgaaggctccttattcgacatgacgatcagacagatgacggaaacatgcaactgcgggtggatacaagggttccgcatcggggagggtaccagcaggacgtaatcctttttcatctgcgcatgtatgacttgtttaccagaaagttttctttccgtcgctattgtcgggaatctggccgcgaagtctgccactcagaaaagagggcagcatcatcgatattcgtcgctccaatgcttcagcgctcgtggagcaatatgctggcgagtttgcgacctgggtctagtggacatggtcatcacaaacgacgagggtcggaacagagcggattctctgaagatggggttgccagtggtcttgttcggcctgctacactcgccgatagcatcatgctagagttttccaactacgcccacgtagagttgaagcgaagaggcgctgggaggacgaagcgatacgagtacgagtactgggccacgaaataccaatggcgacgtaaatcgcgcagagaggacgggctgcgcgaggtatctttccatctcgttgacatgcgcacttccaaaaagatcgcccacattgtccccgagatcttatcaccccaggaagcgattgaggaggaggccaaggggggctggatcccgccttcttcaatgtggattaatgatgtgtccacatacaagaacatgcaagacgtcgccgagtaagctaaacccctgcacccaaagaacgccttgaggaaagttgaactgacatcatgtagtgtcattgtagctacaggtttagtcgtgctcgttgatgattgtatccgtagtcgatggcctcatgggacaagcacgccacgccaccaacacctcggcaccgaccaggcacaggcagtctgacgtgtaagtatatcggactgtcccgtgctcggcttaacgacttttcttgtcacgttcatgtacacgagactgtattacctttttttgaccctcatgacgatctgagcgctggcttcacacgctatggttgggctatatcgttcacacattatagttggtccatgtatgcctgaatgaatgggcacaacatgtatatgaatctaggtgttggcggcatcaggcagggactcgagagatgaaaatagaatctggctgtatatttgtacagaactcgtggcaatggtggtttctgcccgatcctggcccagccgttacttgttgtctcatttttatcccattcccctgctgctattggatagattaccggcgaatcagcgtgccatctgatgtgaccgggaaggtgtcaggcatagaggggagtgaaccagcgctttcctaggcataggaatgtctctataacgacatgtatgttccgattgtccgagaagtctatgcgtgcggtggcgctagctatgatcgagtctcgtca

SEQ ID NO: 14777 - DNA, 1065 bp, Emericella nidulans
aggtgattattggagtggtctccaactcggacgatcggatttcttctgtgctggagtcgctgggtgtctctgtgcgagagacgcgcgcaggggaggagaagaccagatccggtggtgacttacccgggttcgaggaggagagggagaaggagaagacagcgaatctgccgcaggatcagaaacagaaagatattgacttcgtccttactagctaccaggtcggtgctgagaagccggatcccttgatttggaacgtagcaactcgtacggcgctacagttgactggtgaatctgatgcagcaaacgacgaagctggaggctgggaacggatccatatcggcgacgactacggcaaggactatcgtggagctgtagacgcgggctggggagcgtactatcttgcgcgggaggctgaagcagctgcgcaagcgccagaaggcacaaaggtgatcacgtcgttgttggatctcttgccgaagttgagtgcgggcgccttttaatgataggcatagttgtataaccttaaccaataatgtgtagtataccaatcaactcacaacatgcagtaagtatatcaggatatgtatgtacgcccgcagtccgttccgagcccatgctatccaataacgccggctaattaaacaaagacaaatcactcccactccccttcatggcccagtgtccccataccagcccggttcccagcatgtttactcaacaacgcctcgatattcgacccccggttcctgtgctgtgtgcgcaactgcttctcacgctcccgttcccgtgcagcagtataataattaacagatcccttctttgcgatcgccggcaccggagccttcgtcacgctgcgggacgagtcagacgcagaggtagaactggatgaggatgaagccgtcgtggtcttgcgcaggatcggcggcctgaacccaaacgaagcagccttttcgctggcggcgccggtgtggaatgcaagtcgggaattgttggaacttgaagaggagaatgaggatgcctggcggagaagggccagacggtcaacaacgggtccgcgggtcgacg

SEQ ID NO: 14778 - DNA, 1128 bp, Emericella nidulans
ccgcgcggatggatcacggccctttactaggcggccaacggtcaaggctgtcacgtcaaccattgcaacaatgatgaacatggtcgaaagcaagagcggtgacattgatgttttagaagttcaaatgaaaaagctgggctttgatacatgggttgctccccccagccggaagggatctcctttcacgaccccgcgaaagggtctgagcagagttcctgctactcctggatctcgcgggactctggaagatccagtcagttcgtaccacacaccggattctagttcccgaggcataaatatgcgttcgagcatcaacggctcagcaaaagcgagtagactccggcttgtggagcttgtgaacgacggaggggacagaagggaggtcgcgcagtggaaggccaaaatgcagcgcaagcagcatcttatgggtagcctcagaaaggccatcgaggagaaggagacgaaggtccgaagcgtggacgatatttaggactctacacgctgtctattgcatattattgggatgttctattcttgctacgaacagtgaacccgacgagtcacggcatggagcaattggggacggtagtgtagttatttgtactgtacatagatcttgctctttttttgcttttgacaccggcaggagttgggtcgctgtttagtctgctaataaaatgatcaacgatattttgttggatcttagtgacctagcgcaaatagatggcagagtacagatattaaatggcttgtagcacctgcatcattctcatgaaggtatggaatgcttttgcaatggattaggtatattcttccgcaatgtttcctaagacacccgcttcagagcatatcaattagagggttagacattctagtcaacacaacaaggctaccaatcagtcgtacccaactcaacaacagctaaattcaggggtctaacagatcagcctttcgataatgagggttaacgcgccaatatcacttgcaggtctcgggcggaaatgctttatgaccccatatccacgtgaccacgcgacttttcgtggagacgcgtgctgggaaccactcttattatcgatctcgcaaaaccgattcgcagagcgaacgcctatagcagtgtccgggtga

SEQ ID NO: 14779 - DNA, 499 bp, Emericella nidulans
ctaaggaaaccctgcctgggatttattggtgcgtggggggctggggttcccactagacatggtcaccgacggccgtgaaggttttggtccccaaccggaggcctgtctaaccgatgaactcctgccccagggcatgatagaagaggttgtctgctgacgcaggagaacttcttgcactgcgagcagtctacgccattggagagagatccctgggatgctcaccgtataaagcatggaccattcactcgatgtaatgaggctctgtcgactgagccatacgtaggccgctcgcacatatggcacaatcataccattgtatgcatctaacacatgacctgccaccgagtgattaccttaagaatccccattgggaacacccatatagtgatctgctataacaatccatacaaggccgagtgtgcattgatatggaaaccgaaggcatcttgtgaaatcaccccgccgtaataagataatttgcaccttgtggatggaacat

SEQ ID NO: 14780 - DNA, 497 bp, Emericella nidulans
agaaacccgcagagattcacaggccagatcgggcctgggcgcccgcaatagccgtgtgacgtgctccggacgcgttttgggcccgaggcaagggcgggtcacctcacggaccctcaaccctaggatgtgggcaacccgggtgtccccctgtgagccacaatttgaggagcagcggaaggcccctgctacatggaagaactcgcatgctgcgtcatcggaccccagagcgatccacactctgttttcatgcaagctcctcagaagagacttacgggagacggcatgcacctacggccaaggtggaccaccttatgctactgacaaaaacctgacagctactgattggcgcagcgagaccaaccataacgaattctggaccgctcagaaccttatacctacaaagatctgctactggactcgatccccgaaggtgacatggaactcactccggccagaaaaagctaaacgcggcacgagagttgaagacagctgaacta

SEQ ID NO: 14781 - DNA, 522 bp, Emericella nidulans
ctgggctgggtttacagacacactcccgggggggcttccacctacagctcgatgcggtttgcatcaaaatttttgtcccccaccgtggggaactccgaactggggcgcttctaccactggtccgggcagcccccccgggccaaaaccgcaagagggccacttgaaccccggacgagccttgactgcggtgattaaacccaacactcccggcagaataccgccgggatctcaccctactgagattccagaccgcccgccagagctctcctttcaactaaaacagcacctgaggacgccaacagaggtagtcaccctacagcaaagccagccctcagtggttacctgaaaaaaaccccacgccaatctggaatactaactgcatcgaaagaaccttagatgggggcttggttgtgctatacccatacggtgacgtggacaacaatcgaattctcccagttaaacttgcgcttggggctggcagctacctagaccaatgaccggacaggggcacacaatgtaaac

SEQ ID NO: 14782 - DNA, 623 bp, Emericella nidulans
  unsure (1)..(623): unsure at all n locations
cgcagaggccggcaggcctatatgacacctaccgcgaggtgctgcgcacgccaagccgcgcacaacctgcgagggtcctttcaatagtgccggggtgggcaccctgaaaacaaggagcgaagcgtccgcacaagctccgaagcagtcatactatagccgctgagcaaaggaggacctagatctagcaccatagtcaatattaagactccatattcgggcgcactgacttcaactgaggacccatgtactccgatcgtggacgccaaccaatctaacagataaagagtgaggataccactggggagaccagtgtactactatggagaagacaaccgacgatagcatccaaggacactaccaaggtacggaggagctgcagactagcactgaagcaggaggcctactgcgaggtggtatgtcgaccgggaaactcaccggcgctgaaaagccaaatgcacccacgcctctgaacctggaatgtactctacgtaaataccagtgttgccgcagcgcggcgctgcacatacacacaccgatatctgtcctagcctcgtagacctacgattgagggacgattggagacatcatgcnggatcctgtctgccttcaccgctgacatcagg

SEQ ID NO: 14783 - DNA, 2339 bp, Emericella nidulans
gatccaacctgaacagtcccttcataagtcagggttccattgcgatgtttcgtgacaaaatcgtcaattaaatgtctgtacgcccttgccgctggtttcgaaaacgtcttcttgtcaagataacccttccgcaggccggcgagccagccataggtgaacatagcggccgcagagctttcgaagtagttcccttcggcaccaacatactgcttgctcaggattagataccaaccgtctgtctccctgtcctgggcgcgaagtatcgccttggcgagcctcttgtagtatcctaaaagtcgtttgtatccgggtaggtccttggggtagatatccaggacctcgatcagggagacaaaataccacccaacagcacggttccagacaagaggcgaagctcctgtaaccgggtccgcccagacggcggccttgctctcatcaaacccatgaacgagtagcccagtgccaccgggatcccgtgtcacggcttcaatcttatcccactgcaagacgatatcctcccacgcagttatattcttcgcgtcaaagagctttgtccacttggcgtaaaacacatccgccataaaaatgccgtccagccacatctgatgcggataattcggctgccggtgccagaacccccccgtttccgtgcgggggtgccggtcgagcattgcgcgaatgctgtctgcggccagacggtacttctcttcgccagtgcgctcgtaccagtacaggatgttattcccgatgcggtagtcgtcgagcgaatagtacgtctcgttgaagtcgacgatactgccatcaggggcaaccaccacgtcgtcaatctgcgaccggtaccattcaagcaaggtctcgtttccgtagagcgagtacgcggcttcgtagccttcgtaaattgtggcgcggccataccagtaggcgccttcgtgttcccggttgttgaggatccaggagtcagccatccatgacaggtatgagcgagctgcggccggagccatcaggagaaagaaagtagagagcctcatggtgggctactgcgatgcccaggatgtgattgatcagcagaactcaccttccgtaggggagtgcaaaccgcgttttatactcccatacagcacattaccagacgcgatgagaccctatccgaggtaagcaagataatctatacgaggacactatctcttatgcggggacgcgatgaaattgtccggggcgagctggacaagacaagacggcaagttggattcacacgaataggcgcaggtagactccaaccggattcgcatcttggcaactctgggcaattctgcatctgatgaagacgacccgtcactgcccggttacagtggaggcccctgattctgaccggtaaattctccccggatacgatggctgtcgacaagaatttctccggcgcggcgtgtcccagggacttggccctccactctagtgcaggttaagaacttatgaaaagcggaggggagactactgtaggacagtttcagtgagtgctagtggcctttctaggattctttaccgtggaccctgtctggtagttgccctttgaatcggcacgctaaggattttggttcctatcatcatgatcaccaccatatgcaatttgcaccctcgtaactgttgcctcaagggaaataaactagacttcttttagcgtattatcttcaaggggtcttgggcgattttccacatatccgttgcgatccttgttcgatttacttgacacattcagattggatttagtctttaggaggatatatacttatcttgattctgccagaatcttactggggacctgaagtaagctctcaagttggatgactatgtgcaaaaaataattactttaggtatgaggttctctagctacaacgaaacgctgaccgtcggagatccagctgttgagggttcggattcgtactgaaaaaaaaaaatgtgccctcgcctcctgcattgtcgccggcgctcttgattgagatcttgtccagatgtcaccgcaaatgttgccttgcttgatggctcttccaccctggctagagcatgcttaaagttaggggtgcactcggtgcgggttgacatccctacttaaagttattcaggaaaactggttgcaagatcttgggaattaaatacggcatgaggaacatcaggtgatgctcacggaagaggaagctgagctgcgtgtcgagccctatctagtacgcattatcagctaatgtcacaccgtagaggaaatctcacccatttatggatctcactattttccactcagttcagagtcgcttgatgtcacccatatcatcgaacctaaccaacacgcg

SEQ ID NO: 14784 - DNA, 1998 bp, Emericella nidulans
gcattgcatcaaagcaagtacacagggggaatatgcaggagatcgggacgccgataactcctcttcgtcgcttgtttccgtgtagatttctccctctggctagtgcaagcatcccgggccctgacgctttctcccacaagtgaatacaatctgtgagccagtgggtttagagaatctgtgggtatctctggtgtttcgaatgttgtcggtgttgtatcgcccagctgctggtcatttgccgagcttagcgtatgcgggattattgacaataatgctagagggtgagatggtgtatcttctattccatccatgtcgtgagagagttggtcttgctcggttggtgttaaagtatccatcagtgcatcgaaacctagtatttgatcgtctcgttgggagaccagatgccatggttcaccgcagatgaatccaagtacgaagtcttgattggcgtatgccgcagccatggtgcttttgcggtattcaggagtgaatgcggagtccgtagcggagggaaggcagagaagaatcccacgggcgaggagcggtggtggaggaaggtcggtgtcgattgtgggtggtggtgccactccaaagtcccagacgtcctcgggctcataggactcggttcccatcagcgcatcagtcgactcctcagtgtgctgagttatcgttcgagtgagagagatagtggatgctttccgtggggggagcgccaagctattatgttcgccttcccctatcgcataatgtgatggctgacgttgatggctggtttcaccatttgtttgagctccgaaagagtcgtgtggactaaatggacggttcgagtcgatgaccgcggtgatttctgtcctaatagtctggacagcatcagcgacggcctctctggcagcagccttcagagtcgggatcaatatgtccgcagcttggttattgactgctaccccagaggcccaggcagttgaaatattcgcccaggaggcgggtttcaccacacccttggtgtatttcttgcggatcaggtcaaccaacgtattcctcacttctctcgactctgctctctgtcgaccaacgaccccaatagtggcattcagaattcgaccgccttcccagatcaagaatgcatattttttggccagcaaagtcaattggcggatagtatcctcggaccagtcatcgataatgtccgcttgaacctgcaagatagtgatatatgggccgataagcgatgctaagcggagaagagcgtccgtgctgttgacagtgtgagatggtgcaacgcaaacgggcagtccatacggcaatccctttttggctttagcaaggattggatgtaggcaatcaggcgattacctgggagagccgaggtggttgatgagtccattttaatgacgttggaaggtctggaatgctgccgttactgaaacgaaggagatagagagatagggagcgacttccacgtcttttgctcggacagaaagaagagaacagaggggttaagaggaaaagaaggaaagatatgaaggggaatctgaagctgagctagagcacggctaagctggctaactgatcctgcaggctctccaatctgcggccaagaaaagggattgacagcttgtcaaagtctccacccagtagtagcacggagttctgatcacttgagcttgcaactttgcagaccaataaatggcagactggtgacaacaatgatgagcgagtccgttattcgagcccggccttatcccttaatagggagtcctcgggaagttgagacagaaagaggcggatgacacgaccccctggagcttatttaactggccaaccgtcaacagtgatcgccctgagatctggaatctagacattgctgtctttgagtttcggccatctactcagcgaattgatgtctgtgctggtccatttcttttaggcatttgctttttctttcgcttgacctataaacaataatgctctgcacgacgatcacccagtctgttttac

SEQ ID NO: 14785 - DNA, 562 bp, Emericella nidulans
accacactaacatgtcacacgtaactaccgataattcactctacaaatttataccaaacagaaccaagacgaacaatatcacaatattatatataacaaaaagggtattgcgccctgactttggctgacagcccactgcctggcgaacccccacgcctgccacacctgaacgccagaacttaacttgaccgcaggggccaccgaacgcgggaacgcatgaaaccatgaggggaagggcaactccaccaggcagggagtccagagggacaggggaccctacccggaggcctagcacgagaaaacgcgcgcagagacgatcaaccaccaggcaaaaagatcgacaaaacacagcaaagtatgacggacaacgggaaccaggggctacgggagggaaggctgaccacatcaggaggagcacactgccttggggccgcaggttcccacaaagcacggagcgacaccccccagccaaaacagacgtagcacctgagaggcccacataaagtcctaaggatcggaccgcataagctagggaaaccagccaaccccgccaaatcatcaa

SEQ ID NO: 14786 - DNA, 435 bp, Emericella nidulans
cgatcatccagctgaagtacaaggcaactaaacaaaacacaacaagcaatagtctatatggtagtttggttagcgtcagcaaataatagataatagagtagttttaaaagagataaggtttctagcaacacacggaggatgggaggaagagcatcccgttctcccgctctcctcttactgccctactcaccctctactctcctccttctatcccttctatctcttccctccaccctttctccccaccctctctcctctcttctctcttttcctctctccccccctcccttctcctttctcttcctctcccccttctttttctctcctccctcttctctcttctttccttcctcatcatctctttctctcctccttcctccctctccccctcctcctttcactccctagtcaaccctctctcacccattgctcttc

SEQ ID NO: 14787 - DNA, 424 bp, Emericella nidulans
agggcaaaggcaatgatagcttcttaaagggacgaaactgcatattatttatctttccactgatacctcgagggaggtgaggaactatcggggggggggttgtcctttcaaaccaagttggggttaccaaacccaccttcagggccactaaacgctcaggactccaggcaaaagagggcctcatgaggaccccacgcgcgggaatttcggcatcgcagatgcgaaaggctcttatccttccaagggttggcctgacgtgcggacccaaagcacctgggctgggtcctggctatcagttccattgagagggagcttggacacattaaccacagaatcgaaatgaggcctcatggggacacccttgaaccccgggggaggagccttgggcctcgtgattgagaaagtgcagcccaaccctgagaac

SEQ ID NO: 14788 - DNA, 510 bp, Emericella nidulans
tctaaaatgtgtactaataacaggggggggaatcacgctacccccagcctccaattcccgctaagtttttgatccccaaccacccaccccaaaaacggggccaccttcaaacccaaagccggttctaacaccctaactcactcttcagaaaacccgcccacacctcgcccagagcacaacatccaacacagatcccgatcccacccatcctatccaggatggaccaaccaccctgtccaaaaagccgcagaagactgaacaccacggaatatccacgcccacatcgaccaagcaaaccactccatgcacccaccacatgaccccacacccgccaattaccacaaaacccccatgcctaacaccaactagcaactacataaccaaaccctataacccagatgcggaaccttttccaaacacaccgcaagatggcttacacctaaggtctcagagacagacctgcagaaaagccccgcaccaacaccccaaaaatacccaccatcctaccac

SEQ ID NO: 14789 - DNA, 1546 bp, Emericella nidulans
ccataccagtaagtcatgattgtctcctgaccctccaataacgtatctgccatctggtgtgaagcaagcatctccttgaccgagaggctttccggtagttgaaaccggtgcagctctgcccggtgaaccattctttccaaccagaaaagccttgagctcgccctcgaaggcgtcgaggacgaaatgaccatggtaatcggtcccgacaagtaggtattttccgtcgtttgagaactcaaggcgagtccatgctctgccgcgcgtcgaaggcgtatatctctcctcgtacttagcaagatcaaaggtcgaaaagggagatttgtcgtaattgcggaagtcatagaggaggatagatgatgtcgattgggaggcaattgcaatgaccgatgcgctcggatcaaaagccacgaggtatggagttgagagctttagtttcccttgcgcgtatctagagcccaaatcccagatggaaaccgtatcatccttggagcatgagatcaccgagtcgcttccgggcgatagagccaaacacgtcactttatcggtatgacccgagaagtagcgtatatatgattcgctgtgtaaatcaagcaaacgtagagaatctatcccagttagcatgtatcaatcctagctatactcttcaacgtaccatcgactttggtacttgcgtggaggacctggcgagaatgatgggtgaacctagccagatgtgcgccatacttcttgctagggatagacttcgtcattttaccggccttgacgtcgaatatttggataatctcatcgtcgccgcaagagacgacgaactctccttggtcgtcgaaatcaagagacgttacaaagctgtcttgcttggtcgatttgaacacctagcaaatggttccattagacctgcgaccttaagaggaaaacctatccaacctttgtggaccgataactacggataacatccgacaccttctgtgtctgctgggcagcttgttgcggaacctgctgtggtgttgactgaccaccgtccgccatttcgacaaagggtacttattttgcaagaccacagtctagtcgaaaagaaaactttcaatgctaagccaggcgacaccttacagaagcccacggtccagtcttaagcttctgactttccagcaccttgttcctggtgttatgaaaagcttccctcggcgcgtttgcatgtcgcgcgtattaacgttattccggttccggcggctattgtcggagtgtatgccgagatcggtcggttcgctgggccaatcatgcgaatagtttccagtcatcactccgtacaaatgcaatccgagtcgcggtcagcacgcctataacaatatcttccaaccgcttgatcaccatttctcagtcgagactcatagcttcgttcttcgcgacgagtgtttcggactttctggcttgttgacgggccctcacctctgtttctcaccctacctcgccgctgcgaaatccttgacccattatctccgcttacggcggccgaatcgaatatgtctacaactaccgggtaggccacact

SEQ ID NO: 14790 - DNA, 454 bp, Emericella nidulans
  unsure (1)..(454): unsure at all n locations
gtactaactgttgtttgctggactgccgaagtgccgctgactgcagctagngacccgtacttttaagaggtggggttggaaaacccctgactctacagtacaaccctgagatgacgctgtgccactcagggactaaaatacgtgcagaaagaccaatagaacccaattgtactattgctatatcacaaatcgtacaggccggttgcacaagataggtaggttatccaaagcactccgctcggccaaacggaaacataaagcaaagatagggaagggacatgaaaaatgagagaaagaaaaagttttcattgctcgtttcaactaaactttgggggcttgatttggacttgaacctgagccatcttgccggttaaacagtgactgccctgtctattaaagcctccgcgttttttaaacgtttgctggtgttgggtataagttgcccattgtcctc

SEQ ID NO: 14791 - DNA, 3108 bp, Emericella nidulans
  unsure (1)..(3108): unsure at all n locations
tacctgacctgtgtgaaagtcgaagatgaagatattccatggtgtatgatttatgaccgaatgaccgaacgaccgaaatgacgatgcgatgctcgatacccatctcagcatttcagattttgcttactatgatttaacgaccacccggccatgcttttactttgtgaccgtaaccaactctgtctcggccttcttatctctgctccaatctattggatttttttgcgcccgtttgatgaagtgatgatttatgtttgttagctgttgggaactttacattccaactatatgagccgtacttattgttgggactccacaggaccacttaacagaccagagttatgtacagaacttgtgccttttagctacgcaaaacctaatgacaatcccattaccatttttaagacagactataacgaggcaacgggctgcaagttctgccacctaagtttggtgcctgatatgagtgtaacagccaaggcaccaatgcttcttcctcacattttgactgtcagcgcaatagttcgtaccctacccaatcactcttcatcagcagccaaccacactcttttacaacacgccttacgatacctaataccaataacagccccctacacagttcgtacatgggccccgcactaacaaagcccatgcagttacaaatcgcacatccacatcgtaaatccaattgaggactgcgccggctgggcataggggatctcgcgcttcctcaagtccagttctctttctcaaagatcgtcatccttggttcccaaaatccaaagtactgagtactgagtttgtgagccgaaatacccgatctatgtgcctgttatgatttgtaggttgagtttaaggataaagtcggaaatggagtgaacaaacgaactttatcctctaaagggtatccccggccacgttcgccgtatgacttaccctctcagcaatagaatgaaggcatggcgaaataagtagccggccctttactacaattgcgctttctgacgactgagaacgtgcagagtgcaatggcccccgcgtgcggcaggcggttattctattgatgtgagatatagagagaagagcgatggcaggatcatttaatgcatcattggggtccaacatcgcacggcctgttcgcaccagatacggagagctggaaagcaatgacgaaaggacgacgtgtctgctgccattcagagtcttcgacacatcggcgcagctttccggtagcgggtccatatacctttgcacatgaaaacgaatgtagatgcgtcaatcactggataaggatggcaactgtaagctagggggccctattgatcggagaactcaggactttatccagttggctggaagtatatccttgttcgtgcatgattgatagcctcgaacataggagtggtaggcgcacatgaaggacttatgccagactatagcgagccgttgagtggtggaggaatcaatatccttgaatagtgatttggggtgaaggggtccttgagagaggttgggtagaagcactgaaaaaggtagggtattgttgatgataggtaggtatatcagaggcagtttaaccacgaccaggttggtaatggcagtgtgatatagttacattattatacagatcgggaaaatcagttttagggttactttccaataacttctgcgcctcccatgaagggtcgcagcacttcaggtaggacgactacttttcgttctgcatcccacccgttctccaggatagcagccaggactcgcggcacggccaccgcggttccattgacggtgtgcgggaagacgctcttaaccccgcgcacgcgggttcccaatcgtcgtgattggtagtctgtgcagatagaagcggaagtttcttccccccaggcgtcttcaagaccattaccacgcatacgagacgggaacaatgcctcgatatcacgtttccgagtagcgctggctccaaggtctgaggtgggcatctccaggatgcgacaaggaagttggagagaggtcaagatctccttttgcactgtcaggagaccctcgaagagatcgtctgaggttggtgatgacgatgtaggggaactgtcagcccagccgaacatctcaaccttggtaaattcgtggacgcggtacaggcccttggtgtctacgccgcgagagcctgcctcggcacgatagcagcgactgggccccactagtttaatcggcagggcagccggatccagttcattgcgggcatgcatggcagctaaaggaatctcagctgtagccgcgagggaccgcggaggctttgctttgtccttctcagcttgctcaatggcccatatttgttgctcgttgttctggtcgcgcggttgaaagccgcaggcttctgtgagataagaccagacgattgagggcggagaaatgggagtccagccgtgacggcgcgcaacggacaaagagtattgaattagggcttgttctagaagagcgccgtcaccggtgaggaagtaccagccccagcccgtggtggttgcagcgctggtaaagtcgatcagaccaagatcagtgccaatagacacatgagatcgtaatgggtcagggctgctgacccatgctggcggggattgagggtcgaaattgaggtattcaaccaaggctggctccaagccgacgggggtatggggggaggtaaggtttggaagggagagggcgaggaagagaatangtaaatattattatagaataacagttattattgtctatgatatgtatttgagatattgagattgacatttaatggtgatcttctgttttttatttaatgggctgaacatcttattatgatgttttttataaagtggtttagaggtatatacttctagtaaggatggtattacgtatctaatatatcttgtgttagaatttaaataactttgtcttcttgtactttcaataaagttatttcttcatgatttgtatttctattgaaatatgagtctgatttcaaaatatactctctaattgaaagctattttttataaaacttattagattcatcacattatttattttaatatatttttatttaaatttacatgtttctgacatttataaaattag

SEQ ID NO: 14792 - DNA, 584 bp, Emericella nidulans
  unsure (1)..(584): unsure at all n locations
catcaccctgcataaacatgccatcacccaactccatatttaaaaccaaaacaacgcaaactcaacaacggggccgcttataaaaccacatcacgcactgccccacaacaaaacgtaccctnaccgctaggccaaaccacgataccaacaccattacacaaaccgaaacccatccctccaccccaacctacagaacaccacaaacccctctacaacccgaacactagactcgacgcccaaactaaggctaaacaccctaaaaaaacaccacaaccaaactccaaaccctacaccaacacaaccattaatccccctaagaccacccacacacactacattataccaccaaccctttcaccatccaaaacattttaaaacaaccacttcggcgcaaccccccaaacaacccaaatacaacctcatccaaaccatccccatatctaaaaccgccagcacaaggactgaaaaggcttaaaaggcaaacaccatacctcacacccatgccccaaaaacctcccccaaggacacgatcaaaggcccttacagaaaattgcagtacaggcccccacaaaacccacctaaac

SEQ ID NO: 14793 - DNA, 515 bp, Emericella nidulans
tgaatttctatgaaacgggcccgggggggctaccacaccacccatcgccaccgtcggccaccaagtctctggtccccaaccacacccccaaccacggggggcatttcaaccccaaggcggtttaaaacaccctcactgcccacacgggagaactcccggcactgcggccagtccacacctctgcaaatagcccccaagccgccccaccgtacccaggatcgacctatcaccctcttgacaacggctccacggactagatacccagtagtccccacgcacacatcgcacaatcatacctgactatccagccaaccatgacccccaccaatcacaccctcagcacccccatacgagcacaataatgcctcctgttcaccatccccataagcccgcctgcagaaatgcaaaccaacgggctcctggaaaccaccaccccttcccaaggcccacggcccctaggcctggaccacccccccgaagacccccctcccttccaacaccaatgtatgcaaccc

SEQ ID NO: 14794 - DNA, 2959 bp, Emericella nidulans
  unsure (1)..(2959): unsure at all n locations
taattctcagccttatgtcccctgtcgacccaacctccccaactcagccgcccaacgccgcagatccatctggcaattacgacccgcacgccaaaccaggctcgtcgggccacttctccgcaacgctcacgtttccgcgctccgcaagcgtcctgggctactgctttttaccacttgtgctgacaagtctcttgggtatacttgtgcctatggacacaatgtttgggtacctccttacaacggcggcagtggggtggtgtacgtattccgcgtctgggatgttctgtgctgtggcgcgtatgagtggtatgaggggtcttgtggcttatcccttggcactgttttatgttgtttttggcatcatggggcttttctcttcaactgggagtggaactcttgcagcgaaacccgaggcggcttagctttcatctagtttgttccatcttcttatctcaggatgacgcttaacgaaaaacaaaggttctgaattcgctttctttagagagcgaaggatagtagtttgtcaagaggattttgatctatcttgtaattaatgcatggctactaacagatttatgcatatctatccttaggagcgcctgatccatttttaggatgacctcctgtagctgttactggttgcaacagttcaggtaactagttactgctattagatgtagtagtttgtatttggccataataagccttttctagtagaccgagtataagtcaagacacaataaatcccaagcatgaggaagtagactatttcacgtgacaatgagagctctagcttctagttaaagcggcgatgctggaacacccgtgacgccgccttgggctacctgttccgcgacaccttgctccgctaactctaacctcacgaaacttctcaaactaacttgaaaccgacctactctatccagcgaacaaccgcagcattcccgtttaattgcaataatcgaagttcgtacggcgggttgtgagtagcaacttgctgacgctgatccaaagagctccgttcatcatggcgctcgacaactactaccgcaacaagatcgagagcatgaagctcgagattattcaagggcaagctgtactacgacgacttgaagcgcaacgcaatgattataactcgcgggtgcgcctactgcgagaggaactaggcctacttcaacagcctggctcttacgttggagaggtggtgaaagtcatgagcacaaagaaagtcttggtgaaagtacatccagagggaaaatatggtaagccacccttttgctttcctccaaactctctagcttggtggcttggtgctaactaagtccaacagttgttgacatcgcggatggcgttgacattggcaagctgaccgtcggcaagcgtgttgccctgctctcagattcatacaaactggaaaagatgctcccgtcatctgtggacccgctggttttgctcatgatggtcgaaaaggttcccgacagtacatatgatatgattggtggcctcgaccagcaaattaaggaaatcaaggaggtcattgaacttggcttgaaacaccccgagttgttcgagtctctgggaattgcacaaccgaagggagttcttctttacggcccccccggcaccggaaagaccctcctcgctcgagcggtggctcatcatacggactgcaggtttatccgtgttagcggatcagagcttgtacagaaatatattggtgaaggtagccgtatggtccgtgaattattcgtcatggcccgagagcatgcgcctagcatcattttcatggacgaaatcgacagcattgggtccagccggatagactccgcgggctcgggtgactcagaagttcaacgtaccatgctggagcttctcaatcagttagacgggttcgaaccgacgaaaaacattaagatcattatggctacaaatcgactcgatattctggaccctgcattactgcgccccggaagaattgatcgcaagatcgagtttccacctccatcgtaaggctatacctttgtcgtatgagaaatgctgttactaactgtcctcttacccacaacagtgtggaagctcgtgcggatatcctacggatccattctcggtcgatgaacttgacgcgtgggatcaatcttacgaagatcgccgagaagatgaacggatgctcgggagccgaactgaagggtgtatgtacggaagccgggatgtacgcccttcgagagcggcgagtacatgttactcaagaggactttgacttggccacggccaagattctcaacaaacatgacgacaaggaggtagctgtgtcgaagttgttcaagtagatgagcaaacggaacccaggcggatgacgatatgtaatactactcctctgcggattagccgcgatagttctaggtgccagaattgtcaatctagtacagccgcgaatacagtcgatgtaccataaagggtagcgtcaatcggtctcaaatggccgtacatcaaaaaatataaattgagaatcgtcgtattgaagttcacgtaggtaaaactacactccacacacagcattcctcagtgagctcccaacttgcccttgattccagaagggtatttcggaaagacaactcagcgaggagcccgtcaaggcaccgcaaagtcctactaaatctggacgtatagccgcaagggagatgagattggcgcccaggaagcttggcgccatggataacactgcccgcaacgagcattttcatgaggccccggtgctgagctgtcttgttgagattagctggatatatgtagtatactctgagcacgaagtagacttctttcttttgccgagttatgcgattcaggagaggataaacttgtactcttgtactccatacattattctctatagntacaatnagggtgcacttatagtcagtgaccctagactatactactatagtctttgccatcagatgat

SEQ ID NO: 14795 - DNA, 522 bp, Emericella nidulans
taggaaaccctgcgcgggatttggtcaatcaatggtggggaccacccggcgcaggaagggctgacatggagggacagatttatcaacgacagggacaaactgaatgtgagggggctctttatacacgattggggttataacaaactaacaaggctaagagattgcctagcacaggcacggtgtgaccaaccacactccacataactccgacggtacccccatggcaagccaacggcctatacgaaccgtacacgcatgataccaagatgtgaaaggcaccccactgtatacctgcacctggcggtaccataccaacgaggggtcacaaggtggtacccatgccgccgcgccaattggacagacaccgaaagccccacctgccatcgacatcgaccaacccatgaccgcctgatccgaatacgacacgagaacggacacctacatagaccatggagtgatgccaagccaacgaccgcggagcaaggagacagaaggcgaacaaaccaacccgcatatcctagg

SEQ ID NO: 14796 - DNA, 3266 bp, Emericella nidulans
ctcatcatcggaatactctgtagacgaggaggaagaagcctcggctgtggggtaatcgctagccttaccggagtattggaggcgggagctgttatcactcagcaagggcgtagactcggtagcactgccgtgaacgggctgaccagctggagaggaagtgacggtcatactagggaaagaaatgtggttgatgagcctcaagactggcttgacagaatatcgttgtgagatatgacagatgtgaggaagtggggggagcttgtctgataacttatacgaagcttacgggtcgctcgagcgttaccggtggccaacagaaaattttcaatggcgaaatgctgcagacagcgctaatgcacgcaatagatgacttactccaactgaagagtccatgggtaatgtctatcattgattccctagcaatgaggattggtagatcaaatcagtcttgcaaaaatcctcttagtgtctgctatactataaagctcccctaggcacatgtatgacgaggttgccccgtgcatatttgtgtattgaccggtccggtctcggcggggcgggcgggcgcaccccgagcttgtccattttgggcttagcctctttggctacagtggtgttggtcctggaccgaaattctgcgacttttcagtctcacccttgattctgagatgaagactgaccccgcgcctttgatcggtctgctctgacgactagaggtcagcatctatgcaacttgagatggaaagcgcccggattgccgcaagacagagaacaggcccaatgccgcttacctgcgccgtctgcccagatacctatcagcttgatttgaacgtccgatgaccggttgcataaacaccatttacgcttgctactatgcaggatttaccggattgtcctatgcctagaataaccaagcgtcgttcggaatggatcccgctgataccatcgacgctttcgcgtccgacgcggatggtgcagctctgaatattcctccgttacctgtggctcagttgtccgcgagtgatgccgatcgtgaaagcgacgtctcgatcaagaaacggaaaagagttcgcaccgggtgctttacgtgtcgggatcgtcatttaaaatgcgacgaagctctgggtcaatgccagaactgcagaaaatcgggcaggctatgccgacggggcgttcgtctcaattttgtggacacgcaagtggttgcgcccccaacctgcgtcacgccgcccgcgggaactggtgtaacctttcgtgacgactcgagaatcatagcctccgagtacgtcggtggattcgagaggtatcctccgcctgaacaggatgctccagtggaagatgtccgtcagacttcgattccagtccaacctggaatcaatccgtttctcaatacacaataccagatcagtcgccatggctgcttggatgaccccaccgaattgtctcttttgcaggtattcgtgaatcaaatcggtccctggatggatattgtggatgaagcgaagcacgtaagttattagcatcctagaaatttgcagtcgtttatctaactttccaagttcacgcggattctgccattgtatgctgtcgaacagccgcttctacgcgctgttatggcagcttgtgttgagttgtatgtctcaatacatctgtttaaagaggcaagtgagcgaatgcgccactacgatgccgcagccctgatgctctctgaatgtatagcaagcccacatcgtgacccgtccttgtgtgcaaccgccgcgctcatcattgaaattgctgaaatgctgattctcgggccgatcgagagcggaatgcgcatccgtgccggcaactcggccagatctttgattcgagattgtcagtggacaacccgtacacagggccttggcggaacgtgttcttggctcagcattctcatggagttgttcgattgtatagccttccggcagacagtcgtctgggaccctgacacctggggcatcgatatgggctttgttgtcgaaccatccattgctggaaatgaggagttttggatgcagcgcatcatctacatttgtgctaaggtctcagatctccgctcttcgaacttaaaagggatcggtaactctacccgctacgccgaggcgcagcggctcgaacaatggagtctctacaatgaatggtgtgccaggtggttagattccatcccaaggtcgatgttaccacttggaaatgtccagccttggcagagaaacccccagtcagtctttcctcaggtatggctgcttggacgttcggctatagtagcccaaatgctctaccatattactcgaatcatgctcctcgagaccgatccgctccaacaggaccatcttcccgaactacaggaagagcagcagcgccatgcgtacagcgtctgcggtatcgtttcgaatgacaagaacaatgggatccctgttttctctgcacatcttcttgctgttgctgcggggtatttggttgacaggaaagcgcaggaagaggtcgtcgcgatcctagatcagctgagacgcacgagtgggttgagcactgagcacatcagagacaaactccgggaaacatggggctggcattcacacgcccatcagtcatttccagacaccgtcgatacatcaactgtgtctatcgggatccacacgtccgatcatggccatgaattttcccaagtcggcattacggacccttttacgtactccttggtggaaactcatcagtatctagatcaccatctaatttacgaccagtcccaccaaagcctgtagtagcccatccactgcttgatcatgtgattcgaggggctagcaagaggatacccagataatggggctttatgtcatattacggtgcgtcttatatctgtattagcggtagatgttacaaacttagaatccaatcgttggtacattctgaatacatgatctgaatgcgctcggatcgtattagtactctgtagacgcttggcggtgtacttgtataaacatcgaaggtatctggtacgagtgtaattcacagttctactatctgaattactatagatggctaactgaacccatagtgactgcagatatagtaatgaacgtcgcttgatgctgggatattgactcactgtacggtcgtgggtgtgggagcgcgatacggggaataacattggttgaaatggtctgcgagctctgctctggaattggagatattaaatcagctcaggattcgtagaagaagatacacatcagcagccaccttgtgttcgt

SEQ ID NO: 14797 - DNA, 2017 bp, Emericella nidulans
aagatacggccgatgcacgctgcacagaaccctctcacatttagtgcgaccggtatctcttggccttgaccgctcaacttgaatgagtcgagaatgaaagagactcgaaactgaaacatagggagaggtcctgcgagcagaaatggaaaagaagacgagatacgaacagacaccggtctgattcatgacgacgatcatgctgctggcttgccccaagacacggggactctgcgttgccaagagctcgggtcgtgcacctggattccagttgcaggcactgccattcaattgggggaggattatctgcgctcaacgcggcatattaagtttgctgggagcggcattattcacatcttgtcttgggcttcctcctggtccatcctgtttcgtcctgcttcgtactgcttcgtactgtggctccacggctggacaactcactgcggtattctgtcgtgtatcattcaataatcaggaagacattcacccttcggccttgtaaaataatggatgcacgcagctggtcaccgccccgtgggggaaaacgagcctgatctacagccaagcaaatgatccaccgatgtgttttcttgtcaaggataggctgacggtgaagtgcgatcaataactcctgtaactcctgggttcggggatcttcaagaacccgtaagctgagatgagagagatgagagtctgtgagatgatgttgttcaatgccgatatccgaagatgagtagtaggttgtagtccaccctagtgtcaatgatgtcagtcggtgggtcacgctttctacggattatctcccgactctcgtcctcataagtcactcaggtcgactcgcaagagtcaaggggccgctcagatctccttcaggaagaggatcaccgctcatcagcgtacggagtagtactactactgcctaccatgccaagatgatggtgcaacccccgtgttcctcattcctgaagctattctcgacaagccccggtactagtcgggcctccaccaaacgccccgcagctgtcgctcctggcccccagtgccgcagtcgcagcgaatcccctgctcgcccaggtacgtaaatagacccctatctacctcgtattcccccagatcccttcgtttcttctttctttctatcatgcatttctgacggctcccaaattgacccaactcgcgttcatagcaatcatggcccgcttccgcactattcaacgcaagaaatgcgctcggtctatcgcctctgaggacccctggaaagtcgatacgccgtttggcccgcctcggatctcgcaccttcacgtcccgggcggtatacgaaggatccagaacaccttcgccaagctgacacctgctgcacgcgccgaacgggagcttttacggcagaagaatatgtgcaaggtccccctgaccgagcggaatatggatacctttgtcacgcggcaggaatttgcagaggcttgttatccgaatcgacatagtaatgaggtgcaggtcgttgcttggctggagcggctgtattgacggatctgatgggggagatctctgcttggctgcatcgtggtcgtcgttccgctgcggcgtacacttgccggccggcatcttgggctgtgatcgaagttcgaatgatcaatcgtcccgcttgacatcattgtacagtttcggtctgatcaacctgcatttgttgtcggctcttctgcattcctagcatcggttctcgggtttgtgtcatggcctctgaatggcaacggtctgtacgtcatccgcttgcgaatactccttggcgtgaatgcttcgtctattgggttggcgcctgccaagcatgcaagtcaaggacccctgcagacgcgaacgacgaccaattcagagtcagcagatgagtgtttttccgcgagtataaacctcgctggcttgctgcgtcttccgagaagtcaaccagtctagactcctcagtgcggcatacaagacttaaaagatgagccgaaacattctcacgtgtggagtatgcctcggcctgctt

SEQ ID NO: 14798 - DNA, 275 bp, Emericella nidulans
ccctctgaaacacaacccatcttcacctttaccactatccccggcagacgcacacaaaagactatccacaacagcactgcccacatttattttaccacctcgtcatacatcacccacctaaagccgggcattatttaatcccaaaccgcgggaaccatacaagaaactatggacccatcatggcccaatcaagcctggcacctatggaacccacaagagagtctactgcacgctacatgccaacaagcacgaggaaaataacgatcccaccctgc

SEQ ID NO: 14799 - DNA, 2357 bp, Emericella nidulans
  unsure (1)..(2357): unsure at all n locations
gcgagggtctcaaagtcagacaatgtacggcggcatgttgtcactgtgtacattgttgtatgggcaggcacatcttggccgtcaataggaggtgttggtgcgcctgatttgagaacaaagcggactgttgcgtcttcgacgaagaaggagcggactacggttgtgacccgtccggatgactcgtcgtgggaagaaggcggattggaaaggaggattaggtcgtcaatgcggtttcgaacttcatcatccttggcaagctcgatagcagtcaatccacgggattccttgaggtgatgatccactcttgagtccgagaagaggatgcgaacttggtcgacacgcccatatttactggccatcattaaaggcgtgaatttcttgtcattggtggcgtttgggtcacagtcactttctctgaggatgcgtatggtgatttcgggatcgctgacgatgtgcaggagagtattgcctctggagtcgacgtgatcgtcgaggtgcaaaggctcgccatccccttgagactcttgagctgctgtgagggcctcgttcaccattgccttgtattcaggatggtcgtatgatctacacaacgcgaaaagcggcgtctgtccaagcttatcacgttggcgccaggggagtaatcctttgagtcttcgcattactgcgggcgtgctaaatagataatgtgcggctgtgcgccctcgctcgtcaaacttgcgtaaataagatgtgatggcaccctcgtcagctgccgctgttagatagtcgagtagaaggtcaacaatctcggtttgagcaagctgaacagcagcactgagtaaagtggttccatctgtgttcgtatcctcaagtacgtcagtaaccgagtaatactcgcccaagcttaggagatatttgagagcttcagctcggcgactctcaaccgccatcattaatattgaatcaccatgcggatcttgtgtcttgaccaatgtctctatcgagctatctccttcaatggcgctgctgattgagttcagagtggtagtccgtgacaaaaatgaaatgcctgatgactctgacaggctcctgacatccatcgacacccgcttaatgggaggcttcgtgtcacggggcgaagaagcctcccacgtttggaatggaaatacgtgtgcgagaggaggcgcctccgaagctgcttccagaccctcatcgcgtgtttgtatttggtctccaaataggggaagcatccgctgggaatcccgattgggttgcccctcgtccaatggttgctcctgcgaatcagcagcgtcgtacgcctcaaagaaggattcgtgatagccatccggctctagaatagccttcatatcagccacgcgcccagctttggtagcattccacaagcgtttatttcgaatgctggctcgtcgaagtcccgcaggatcagccattaaataggtcaggaccgcttcaaatgtgctcaaagcatagcccatctctccactatcaacatcatcaacgtagatgaagtgttgcatgtacagcaaccgagcttgaagattcttcacttgagatctgatcaccacgatcaacaagagagataccaagatgtcggcgtttatcgtcacaggggctgactgcttttcatcgcttttattgtattcgcccggataggatagaaccttcactgtctccagaagtgtattaagcatatcgtggggacacttcgcgtccagcattttgcgaaattcctccactgccctaccaagccgcagaagaagctcgcgtttaccgtcgcgcccaccctccacaacaaggccaacctgggaaacgtcgacatactccatttgtcgaatcctggcatctagttctatatcttccggttgtcggaagctgcacagacgcgggaaaaggagcgactcatgaacctgcaccgcaacatagcgttcaatatagcgctcaaccactgggcctgttaggcgggtagttgctccagaagagacagctgttgctgatcaacctggcgaaatagacaaattgagctgtaacagcattttccagttcgacgcattaagtttcttaatttcaagtccttttaaattgatggagaccctgtgcggcgganattactttgttgagcgtttatggcatcgttctccgacctggcgattttttattatctgggaccccccgcgggggacggttctgttttcaatcctacaccttcacccgtgtttgcgcattaggaattgcacttccaagtggtcttttggggtgaattcgttcacatctccttctaggtacctactttcgacatggtttttggttcaacccagtctatttattattctttattaccgtgttttgggaattttttt

SEQ ID NO: 14800 - DNA, 1604 bp, Emericella nidulans
acaccagttgaggagagagttaggtgcgtaaggtttttgcgaagcagaggacttgagaggaaagatatcaagcccgttattgtgatggatggtgtattgcggagggtaagtcgttggatggcgggaaagggcggaagttgggactggtctgacgcgaagatggagtcgtcaagatagggcgtattatcgattgtaaggtttcgaagatacgggaaggaagcgagggagaggcggagcgttgatggctcgatctcaagttcctgcagctccagaatctcgaggttactccagagctgggagttggggagctgtgcaaaggaaccctctgcgccggatcggtaggtcatacggcgcaagtccgggcagcgtgccatgagctcttgcttcaacgttagacaggctgggtcgtcggtgtagatacctgaggggaggtcgacgtagcgcaagtttgggagaacagagatggtgcgggcgatttcggccttattggcttcgcgcgtcatatagggcatgcgaagggagaggacttggtttccgaggtcgcgggagagtcgcactgagcgcatgaagagggagaggcgcacttgtggagggtcaatggggtcggcattgcggtcgaagcgggagcggcgcttgcgcttcgctgcaaggatctcttcaagttcgcagtagtgaacggcgtcgatacggacgtgagagtatctactaattttagatcgcttcaggacattggtatgaggagcgtggacttgcagcaatgactgagcaatggggtgccaacggcgggacaccagcgcgcagtgcgccagatcgcgcatgtcacagagcatgcagccatcctcggtcatggattcttccgaggtatcgtaagagttatcgacagcatgcgggcaaacgaacgagaatatccgcgcgagtactggtggcggcagccgtttggtgaggtccccaaggtatgaaggcagaggagggacgtcgcggttcatgcggaggtggtcgtaactgacggcgttccccgcacggctctggctcttggaacgcccgcgaagtcggctcaagagtcccatgctggaggagaggacatcggtgtaccagctcttaagggtccaattccgtgatagattagggccagaagtagaaagtaaaagtggctgaagatgaggcgactgcagactgtcggaaataaatgaaggatggagcggggggccaactaagcgagtcgatctggaggaggcccgtgttttttatactcattactcagagtcgcagcagcagtccaatggtcgaaatgatcccagtaatgctcccaataatggtccgaatatcatatatcttgcgctcctgcactaaaccgtccgacgatcaaccttggtgtcgtgttggttctcctgagccggggtccctcgtcttccattattggctgtgactgtgctggccatatttataaccacgaatcatcacagacgacaagacacagaggcgccgactgtcatgcaagcgtgaggaaacgtcgacccgcgaactggcagcggcgtttatctgcgcttcaattcgtttcaggctggccatcgttttcgtacctagaatgctactagatactgtac

SEQ ID NO: 14801 - DNA, 1438 bp, Emericella nidulans
ccttgtgctcacagatcctgttccactttgctgggcttgacgcgccgtctgggcgtctttcccaaaaggatttctccaaggtcattgatgcctcatggcgcattcctgttgccgccgccgagcaggctattaccactgcttccggtgctgcgcacaaggccgctgatgccgggaaatccatgcttcacggtgtcttggagtctgtccaccatttcgctcttggcagtttggctggtgcttttggcgcgttcatggtctaccccattgaccttgtcaagacgcgtatgcagaaccagcgatccagccgtgttggtgagagactgtacaataactcgattgactgcgcgcgcaaggtcatccggaacgagggtttcaccggtctgtactcgggtgttattcctcagctgatcggtgttgctccggagaaggcgatcaagctcaccgtcaacgatctcgtccgtggatatttcgctggcaagcagaacggcaagctcaagacctggcaggaggttctcgctggtggttccgcgggcgcttgccaagttgtacgtatacattccttatgcttccagacttaagcgtactaactgtatccataggtcttcactaacccccttgagatcgtcaagattcgccttcaagtccaaggtgaaattgcgaaaaacgccggcgtggaaggtgctgcgcctcgccgctccgccctctggattgtcaggaacctcggtctcgtcggcctttacaagggcgccagtgcctgtctcctccgtgacgtccccttctccgccatctactttcccacctactcgcatctgaaatccgacttcttcggcgagtcccgcacacacaagctcggcgtggtgcagctgctaactgctggcgctattgctggtatgcccgccgcgtacctgacgacaccctgtgacgtaatcaagacccggctgcaggtcgaagcgcgcaagggcgaaaaggcatacaccggtctccgccatgccgctgtcacaatatttagggacgagggtttcaaggcgttcttcaagggcggaccatctcgtatcttgcgttcgtcgccgcaatttggcttcacgctcgctgcgtacgaggttctgcagaagtggctgcctatgccggggtctgaacatgatgtttcaccgacgggtcaggtggagcctggtgtgggcgttccagttgccaaggagccgctgccttatctgaggagcagaaatgcgctcaagcttattctggatctcgacgagaatattggccgcctgccgatccccgattaggagcggtggccgaagttcatgaggcctgctgcaggtgctgaaaaataacttgcatagatgcgattggaacgtgatgtgttgtgttgtttgtttaatagcgcttcgatgaattgatttcttctcatcttggatttgattgcttttaagatacaatt

SEQ ID NO: 14802 - DNA, 490 bp, Emericella nidulans
  unsure (1)..(490): unsure at all n locations
agacacctcgcatgcttcccttcccctcctcccctggcggtaaactatcttcatctgccaagccctctttttctcctttttctcacagaccaataaatccaaacccccttggtaactctaaaccttatgtgagtgtccatcctatcctctccatcgacggcttccgttgctacttaccataaacactggttggcctctacctactgtcttccaccttatctaaataaaccgctaatccttcatctctctcacacacacccatacatcctacgtccatcaaactcatttctcaggcactggaatatgacattcttcactaccacgtgcctcccgcccattttatcataccatctactctcccaccttgcaacacatacaacccatgctccaaacgcttgtctncctttactcattcctcgacctctcaacgaaggactttctataccattcggaactgacatacccacatctgctgacccccgaatacaag

SEQ ID NO: 14803 - DNA, 509 bp, Emericella nidulans
gttggtgcagatcccgtccggcgattcacgggacgaatgcacacatgccattcgctgttttttgagcggcctgcgaacaagagactctaacggcgaggacaacccgggggacctcgaattgcatactaggaatggacccgatggccctgcgaggaaagccgccgtcttagctgaaggaaccatggataacacgaggagctgagccacatccgctgagaacttgtgcaagacatgcacatgctggtggacagcaacccggtggtgcatgtgcgacaccacgactgcgttgggctggcctagaatgtgctcagggaattatacggatcgtaactgggccttgacactgctcaattcttagaggactaacctttggatcctacggttatggcgcctgctgtatggatgtgcaaacccacagacggacctgaccgttgctaacacaacactgtgcactcacataatgcaacatgagcgggcccatatggccactaatttgagcgcctacgact

SEQ ID NO: 14804 - DNA, 2826 bp, Emericella nidulans
ggtcggggtcaagccgccaggttatcaaggccaatgttccctgggcaacaatgtcgttcttaaaggaaaatctgtgaatgcggctcggcctgctgctgtttctgccttgcgcctgatacttttgtgtgccctgaagtcccgggctgtgactgacttgtcctggcgaagttccttgggctgattgaagtgggcgattttttggtagcgctggctgaagtgggtgagaaggatagtgcgagcgcgcattttgcggcctacttcaatagcttcttgggcggtggaatgtttttttgcgagagcggagccgaccatgtcatcgctaaatgtggcttcgtggataaggacggtagagtcctgtccaatagtcacaaacgtaggcgatggccggcagtcacctgagaaggagactttgaagccatcagggaagatgagtgagactgccattgcaccacggcaatgggagacgtatgccgttagaatatcggacagacccgtggctttgcgaagcttggcgcttagctcctctcctggtgatcctttgcagttaaatttcagttcactttgttccggttttatgtgttcaacttcccgcccacgataagagccgtcggcacggcagtggcggtatttgaatgaccatttcatcccctcgtcgccagtcctgtatagataggcagatagaggcgtgagcttggcgaaaccaaaatcttcaacaccagcatattcctccaaccactcaatcatcatgagatcagatacgacaaacaaacgcttctcctccaggatcttccctatgtctttttcaggctcgctcagctgtgcaactccgctgggatagttttcctggtaccaagcctttataacagagactgtaccaaggtggtggtccgcatggagatggctaatccagattagccgcaggttttgaagaacttcacgcagctgctcagggctgaacatgcgcttaagctgaccaagcgtgccctcgccacaatcaaatagataatatccccgacctggaacatgaaccagggtgctggaaacattcccgatattttgaaggtgcagaagatcccgttccgagcgtgatgatctccgcatcggcaccaggaatgtcgctcacaaattgctgaatcttctcctggcgtagcggatgttgcagcctcttggtaactagtcgagcccgccttacagcagactgcggcatctttgtcaggatgctacctgcgttcagtcgtcgcggtacttcatctgagtttatcttgaactcgggctccatactaacgatgagtccgggctcggctcgttcgaatgaatggttttggctatccacggccatgcgatcttccagactggattgcgtttgtggaacactgttgttgtcgtgtatagggactaggtaattatcaggccttatccgggccatgcgaatggccgacccggcaacactctgcatggtcagatcgttcgggcaataatccgtgctcgagacgatgtgtttgcagttcggcattgaagcgacgaattcccgaagccgagggtgttccccgacaccaggacccaggatccaaaagaaagctgccaaattgcttgcaactgagggggacttccattcgggccggtttagcaggctctcgacataatccgaagtcgggaggtccattactgccagtcctttgccaggctttgtaggctccaacaccatttcaggtgtcaccatcgttccatcagtagccttgacagtttcaccccttgtcagagcaccaaagtcagggccaggcttgacattcagagcgattgccttcttagcatcaaactttccgcggaggtcgtggttcttgatgatgtaacatagactctcaacgcatggtgtggttgttgggatcttgctgatcgacgcgccgggccagggtttacggacaagaacggtcatctcaggaacctcctcatctcctccaggaagcgggcctgtgtacttgtccaggtccttggtctccggatttcgtacaaagatttgcgctggcattttgacgtcggcaagacgggtttcctccaatgcatccagagtccaagttgagtcaaacatatgagacacaacagactgccgcaccaattgatccttggattgctggtccacctccactaaaccccgcacatcttcgcgaaattcgtcaagactcctctttttagggctttgcgaacgtggtgtagtagaagacgggctgataggcatggtccagaccttgatgttttcatccgagaaagtcggcacttcaaaggggtcgctttgatcagtgcgcagcctctttgcaacactttccgcgtcgtactccttcgtatgcacgggcaaaccttgtctgaagacaaacctccgcgcagtagccagggtatgagcaagattctttgaaccgtggacagtcaagtcgtgctgcggatcttcgagctctgcgttggccggcgtttgtttcgtatctttcttggtccaccctcgcttctgtcgattcgcctccttttcgcgctcgagggcttccagagcctcctttgaactggcgcgagcatcggccttcgtaagaatcatgccaatcaagcctccagttgtgtcccatcccatccgacccgacaggaaaacatcagacacgtccgtcaactttgtccctcgttccgtacatgctcgttggaacccctctgcaatttggccgaaaagataacgtttccctgggaaatgcaggagaagcgccgagcctggggtatcagccgtcggcgtcgtcaagatctgatagtagaacttcatttgcgtaattccgatttttggaatttggggtggtt

SEQ ID NO: 14805 - DNA, 458 bp, Emericella nidulans
gatacgagttgtttacatccggaacgtactaggctgctggtgacgatttgaggttctcatctgacgggatatggttttggataaatcagtcactgtggacacttggactgcggggatcgctacacttgccgcgaatacagttaatggctttgtcataggttacactaacgcatgcatatgcgacacacgatctggctaccgtgcgactggcatctgggcagtatgtcgcgtaagcctcacattagacagcttacccattcctttgtgtctggacggacacaggctgtataatctaggctggcattgatccttccaatcgaggctggatagttccttgctgttgcgacactgagattgttatgttgcgcgaccttcgagagaggcacactagagagcgagtgccgaccttgctctgacttggtaatatgaactctaggtgggctcgggtataacagttc

SEQ ID NO: 14806 - DNA, 565 bp, Emericella nidulans
gtctcttctccggcccagaatgcctatgttttctagccatccctcggttcagagtccaaaaccgcgctttcagtggtgatctaatggctgatccctgtatcttgatgacgatcttcagttgtcagattgcagctaatggacctcatcattttgatttacatcaatccggtccatataatatacactggctacagtcgagtagacggcacttgtcagctgcacaacttttcctaacccattcatatctacacatatattcgtctagacactgaagaaagctacactacctagtactctatcataatgttgatgcccagtcctgactctggcagtcccaagcccgccctgacagggcgcaggggactccagtttagcgcgctacgtaaagccaaagacacatggtgccagtgcaagtcactcctagcggtgcgtgggtataagtgcactgggtagtggcggaagcggtggcagatggacggcaaaaaacggcgtccactgcggccgtttttggcatgccagatgccgttttcttagttattgagtaatttaccaacagactattttg

SEQ ID NO: 14807 - DNA, 1564 bp, Emericella nidulans
gctccgtcgaccggcatccggctgcgggtagccggacggcctctccatgctgtcggcgccagctagctatgtgtcgggatcggagtttaagaccaaggtctggaagtaagcgttttgaatcttgaagcgcgggcgactatagctactatgactaaccggctctctagtatattcgcatcgcgcgccagtgccggagggggtatagcggggaccttggactgctggactcagaaagacggagccatgaacaagagatgttcagaactcctagcctgaacctatagttgcttggcaatttgccagataacttgagctgacggggcgatgaaggttaaagcaggggtaaagcaattgaatattgtgcaaagtagtgaaccgaaaaatgcacgcgccattgccacagccgaaggggaagcatagttatattcccccattacgtcagcttccatgtatctcaaccgccgatcttcgtactgcgcgccaaaaggcaattcatggttcggttgagagtcaaagcgaatattttgcgattattcatgttaatgcatgctcttactggtcagagaaaatatgctagttgttaagaagttttctgttatatctgatccttctccagccattttctttcagataacaagcagcatgcttttcaccacgccgtatcaaaactgcagaccgtaaccaaccaagtagatgtatcataatcaggacacggcatattgggaatcaagtgagagagtcgagacaggcgtgcgcaaaatatatgtacaagcgaaagataggcacctgccacaagaatagaacaaacgcagcagcgtggacgagacgagattaaacaaatatagcattaaatcagagagatcgcacattgggagagcaatagattcgttcaaagagtccaaataaggtcgtgagcggagataatcagagtagatcgctctgaagagagtggtagggagcagcggttagatctcgtcgaacatctcgtcgagttcgtcaacgttcacgctctccggactttgcaactcgcgccatgagtcgagagccatctcagatggagggtttagaggcatcatagcattcacagctatcttatcgtctgcatcggcgagatcagacattctcatgtctaggtccgggagttcatcgtccagcatgtctattgaccttttcagagtcgacatgcgcgccaggctcgggtcttccggaagagcgatacgcggagcagtcccgagagagccaggaccgctttcgatatctgatccgtcatctgaaggcgcactcgtgccagacgagatggacaacgcgacagaggtgagggacggagagggggaagtgccgaaaagagcagcggcagcggcagcgttttcacacaggtcctgctgctgcaggtgttgttggagacgagactgctcctggtgctcctctgagaggtagttggtctgggtgtgcgccatctggtcgtcgccaaaggaggagagagggctatcatcaaccggtgtcccggagatgctcatgctcatgtcatccaacccctgaagagcctcggtgagggccgagtatc

SEQ ID NO: 14808 - DNA, 561 bp, Emericella nidulans
ggggggtaattacagtaactacacgggtatagagagcttgatatacagacatcggacagatcttttctcgggtcatcaaagactggacaacgggtgaaatcagtagacaacgcggacctgaactggacgtcgaaagatcacaacccttgatgctcgagcgatgtaagggagcatctcctatgaaagtagctgtcacatatcatcacatgcctcactagattactctctccatacagtcgggcagcatatgtgatcgggcacgtacgcaaccttgtacaccatggcctcgggcctgaccatcatctcacatgtgaaaactgatgcccttactctgcgcacttaaaattaccttgtccagcacgctcttgctgtacaatcgaaagctgtccgtaaaatcactgacacgaggcatgagcattacatgcgcaatcagattcgcagtgcgccacttgaactagcggaacagatccgaccattacaccccgacttcaatgcctgtagaggagagcgaacgcgtgccagtgacaatgtgggcgtctgactgttagtggatgcggacca

SEQ ID NO: 14809 - DNA, 2714 bp, Emericella nidulans
caccgtttccacaagcaggccgacgtcacctgggacgagaactctctggtacaatcccatgacagctctaacagctctgggccgattgctaactttctttcaccaacagttcaagtacctcgagaaccccaagaagttcatccccggtaccaagatggctttcggtggtctcaagaagaccaaggagaggaacgatctcatcacgtatgtaacgctgcttaccacggatagggcacataggctaacaggatgcacagctacctcaaggagagcactgcttaaatcgttcgcgattagacgagataaaccgccccctggggatcgccgggcctctggctaggtgacaggcgggtactgtaacattacacctagacctggttttgaagcgtcgggacatggaggatattatagagtcttgtttccttcgccatccttgtctatatgccttattccctttccctttacccttgacggatgtgttttttcagcttttgtgtatcatggtaccataatgaataaagagtctcctctcacgacatccagtttgcctctacccttctacctactaacgtgctacctagttttaaattctgaatttcgtcatttcacgtgacacgggttgtttatcacgtgtcgggatgactcgaaaagtcgccttgttataaaaatagctaatcaggttatcagtttactttcgatctacaggccacagcacagcctatgatcatggcgatggcaacgtctcagtttttgcttgccaagctgcccaataatgatgtactcgtcaatggacgatggacgatctaacccaggaatgccattgtagcctggacaaatgattggctggcagcctaggatgagaaggagttccccaaggcctgactcttgcctactctggacaaagtcaaagacaaccttgagtcgtttgattcgtgcatcagatagttggggacctcgaaaggcatcgagacaatccggagcagaccggctcgttggctgtggacaggttgacatacagcacatgaccgctcgcgcatctcgttattggcccagcctcctcctcctgcgccccctccataaattccccagcacctcgattgatgaacccggtcgaggcaaagtcaagacagagaagaccgattaagggcgcatgcgaggggcttgcaagcatctcgtcttccgtcggacctcgtcggttactcgctttacttctgcgctttttgatattggatgaaactcaggcatctttgctggaatatcggcggtgcctttccagcaccaacactaacgtggtcaacagttttgaaacacattcgtgagggaaatacccaggttctaactatataccgttcaatgcaaatcgtttgtaactcctgtctcccttccggtattcgtgcgtcgtgacttgtcagccctgctcgctggtcctcaggcatcaatcaaggtctctcccgccgtcgcattattcttcaacacctgcgttgtctctgcagcatctgctagcttgctgcttttgtgcttttgtccttatctcatccccgctactctgtcctgttggactcgattttccgcacctcccccacctacattctgctagtccagcaacctatacgttagcgcccttgcgaacctcctccccctcccttcgtgaaccaccacttccggcggtttattgaagacgtctggggaattatagtgttgagagtggccgtatcacttcaggaacccctgcgcgcaacaccgtccatcatgctggacgagctagataatgttttcgacgaccatccgtctatggatgcgtcgctcgaggccattgagcacacaagtaatcgccaccgctcaccagtatttggtctcccatcacaacactcaggtttttaggtcggaagaatcggactgcgaggatgaagatacaacacccgtcgatgaacgctggtcgccgcccggctttggaagaaggtatgattttgtcccatatagcgggtggtatagacaccagccctatacgcgcaagatcgaccacgagcgattcgggctgaaaccaaccgtgggagttagtccaacacagtcgcgcgaagccagtccgcagtatgaagatgcgccagaggctcccgcagtaggacgccgtgccgtttccaccgagacgggggacgtcatcgttgccgccaacgtaccgttaccgccagaagcagattcaccactgaagggccggtcgcccagtccagtgcgaatgcctttacggccgatccctgacgccgagactgtggacttcaagcccgaaaataacataagcaattgtaggctacccttggtttgactaccctgtccagcttgctggcgcgggatatactaacacctagacctctcaaagatatccggttcgctgtgcgcgcagaagttcagcaccgggaaccgttcgtcgcattctttacttacctgcgctctaagttcgatcgcatcaccagctccaagtccaataccaccctatccgtcctgattgccctgctgtctatcgctttcttgcgcacattattcatgccgagtatcccatcagcaattccagacctggtcaaactgtcgggctttgcgcgctctttcgagccgcttatatattactccgaaaatggtgtgcagcagattggaacattacaagagactggcgtggctgtctgggatctcagcgaatcggtgcgcgggaccaatatgacaagtgc

SEQ ID NO: 14810 - DNA, 1616 bp, Emericella nidulans
aaaaggcagcaatcacgtattataggagacccaaacgttaaaaaagccacagggccagccagcgaccatccccaccattcggaggacgaaagagaggatagggcagcaaaaagaaagcaacgaagtggaaagaggccgcggaggccctggttgaaaagcaaagaaagagaaaatggtgtgaaagagatgagtagaggatgattgatgcaatggaatgcgaccatcaaccaggcgatgtgacgctgctgcccggtcggctggatgcctgcgagcctgggacgaccatcactggaggctacagtacatcccaaattgtgctgcacctgtgaatatcgccgtagtagtgccgttgcattctttaggagaacaaggcccggagtttccccatttgctccgctgaagtcttacgtagccacggagcagtagtgcacctagtcctagtctatatctcagtattaggactccgtattctggagactccacttcaacttaactacctgggtacttgtacctggacgcgtccaagctaactgcgaacagttcgtgatacgactggtgagaacagtgtactactatgtccatcatcttcgacgaaatcgcccaaggtcgctacgatcatacctatcatactgtcgctgactcactgaagccagcaagctatctgccatgtggtagctagctagctggtggggccgggtcagaacaggccaactgtgacccccctctcggagtcgtgacaagaactatatttaatataccactgctccgtacgggtgccggcttgaaggtcacccaatccagaaactctctccctagaccctgattcgtccagggtctgggtggatcgatcggtgagtccagagtggtgggatgcgtctcctgcctcgtacctgctaagtattccggagtagtctcagcagcttgcagattctagcacaatacgagcctgggctgacccgcctggactcgtgcttcgagagagcaaagtctccgcgaggtgaagactttatcatgtcacgtcgtttcctctgagccttcagccacagacttttggtaatagtcaactgaccccgcaggtgactgtcggcttggccggatcccgcgcgtcgtgacaatcgtcaactgcaacaatatggatggacgttgggaggtggatcaccgcaggactgacgcgcaattgattgtcagatctcgggaaaatgaggaatggttagcggtcgacgctcgagccaggcgctgcactcacagtaagcctcactcaggcttgaaactctgtgaatgtgtcatagcacgccctccgaagtcggagctggggaacttgcctttttagcgagccgccatagtagtttatcaatctctcgaccctggcctgtcgagtgttgcatttttccgccggcccattgcccaagaaaaggaaaacgcgctcaagctatgaagataatcacagacgactatatagatgtatcccaccatgtgagcagagcccagctaacaggtcgatgtaactctgcctgcgggataccatggagttcctccaccggggattgacgccacgtctctgtgaataaacccaagaggatgattgagcggaggctatcagttgagcctgagcccgt

SEQ ID NO: 14811 - DNA, 1221 bp, Emericella nidulans
catttccttcaactactagtcatcttacttccagccacggggctgtatcaggcaccatgaaaccatggttaaaagcgaaatctgatgctataacctcgtttttcagttcgataaccttttctccatcattcctggtcggacgaataccagaatcttggtccgtaacgcctagcactctatccgcaccgcacaggaatcatgacgcagtaatcgcccgttagtctgagagagcataagcagtgatttccattttagccttgactaatggtctttgacgtcagaaacaacttcccctgacattgaagaaccttaggatcatcaggcagcagtgactgctcctagatgttatccattatatgacacgggtcgttgaccagtaaatcatccagtgtcactccttagatacgtactactcttgtctaagcattcctttagacactctagacccaatggttacagcaggcttctgtgcagactaacgcagactgccctatcatatgagggtcctccaggcggcccatctggtcgagaataagtgaaatgagtcgaacatgcccagggtcagcgctcaagtgacctcaggaacttctagcctattataaaaaaaaggccagaactcttgtctgtacataacctgaggttgtatgcctgggtataagtatccagttgatattctcagcatacgaaccaggtcgaacaggaaagacctggctgggctaacggaggaagaatattaggaaatcatctgaaaaagcgagtaattcttacttttcatgtaatccatttccagctcatggtatttctaatctcccactgccaataggtagacgccggaattagattgggagtatagctttcaaatccgtgacctgccactcacttttcatcacaatgctataggtgcataagagatgattccttaaacatcgtcgaaagttcgacagtcgttggccttggattagaaacttcaggttgtcatagtttcatggagcattactagtaggaaataaagcagagtttgcatgttggcatcaaggcggcaccaggtcccttaggcctacgctatctggatcccggtcatgagcgaggctacacccttgggacccaggacgtcctccagactgagccaagaatgcaccagttcatccgattcgctctcatcataagcatcatcttgaatcggctttttgttcttgcagaacactctcagctctttgcatg

SEQ ID NO: 14812 - DNA, 522 bp, Emericella nidulans
  unsure (1)..(522): unsure at all n locations
acgccaaaggtttattggaaggaacacccgcaagaacccagccaacacaccccgccgtagcgagaaacggttacttcacgaggagacacacggggaaccggagggaccaaaaacccgcaagcggggggacaaacggcggagaggagggaaggagccggccgacgcccacaaggcacacaagcggccagcagaaagggcagccaaagccaggcacggcagcaagggcgccccaagcgcagacacaagnaacangggacagaaaagcgcgcgagcaccngaacacgagaggaagagaactgagaacgacacgagcagccgaccacaggccaaacggcaccggcaggaaaacgaagcacagacgaacccagacccgcctagccaaccgacacgggcccaacgaaggcagacaaccaggcccctagtcaaaagcgagcaagcaggcaaacgcagcacatggaccaaaccaccggaagaacggacaaacgacctatgcccaagaagcccagtactggaggacaccag

SEQ ID NO: 14813 - DNA, 515 bp, Emericella nidulans
agataccgccagacctttattgcagccttacttcactggcgatcgggtcctaactgacacctcgaaacgccaacctatatttaactacgcaatacgctgcccgactgaaactgcggaaacattgtcgaactcaacggggcacgccacatgctgcacaacggacccaatcatggccatgtaacaccgggaaagcacaagcacatcggtacatccctgctcatgaccgcgtgtaccctatattagttcatgcatgccaccaccgacattgccaaaagcctgtgatatgaccatgccaccgttgcatatatttgctcacccatcctacatgaatgaccggtactatgcacctttatcgcctgttgctccttgccctgtactgccgacctatcgagacgagactatgtctgtctgatcatccgccctgaattgccgcttccacaccatctatggatacggagcatgcaggataccctccaacacgccgcattacgaaatgcacattctctctgatactg

SEQ ID NO: 14814 - DNA, 629 bp, Emericella nidulans
ccaacctgaaaagatgataagctagcaacataataaaacacactgcagcagactcatacgggggggttactaaaaacgcccggggggtaacacaagaagcccgaataagccacgagagcaccccgagcacggctaagagcaaaacgagaaaccccacacaaaaccacaaatacaaacgaaaaaaccataaaaccacacataacaaccacaaaactcacaaaacaaatcctacaccaaataacaacaacaacatacaacaatacacaacaaagcaccacactcaacaacacatacacaacacacaaccagaattacccactaaccacaaaccaccacaaaatacaacaataaaccaaaaacaaaacaacaacaacaaattcaacaaaacatcaaaacacaaaccaccgaaaaaaaacaacactcacaaacaacaacaccaatccaacacaaaacacaaaacaaaacactcaaaaaaacaaactacacccaatcaaaacaataaaaaaaagacaaccaaacacatacaccataaatctacaatacaataaacaatacataatccaaacacaacaactggaaacacacaccccactacaaatcacacataaataaacacacaaacacaaaca

SEQ ID NO: 14815 - DNA, 2048 bp, Emericella nidulans
agtcgtgggcctacaatattaccatgcctgtcgcattatcctagcgacttcaaataaccaccagaagattgtggtggactacgaacgcgctagacttagacgtatagaagaggttcgttctgagttggacttaactcggcattatctgaccgttaaagcaaactatcgcgtaccacctcgtcaacgtgattggattgtcaaagtcaaacgaaacagttatcaacgcctattttatgggttgccatctactacatcgatgtatgcattgcgctcgtcgaatccatgccacgctaacagcacatagatgggttctgcctccgacacccagctgagcatctgggatctactgaattcctcgaatctgtggaaaagcaaatcggctggccaacagcctggattgtccgccagctcgaagctgagtggaatgagcttcataccctcgacagtagctggagcccgcgtttctgacgggccctctattttcttcaatatctctaattgtcttatagatatatatttctttctctcaagatttctgggccttcccgctattgccgcagagctcggatacaactaggatatagcaactacaacgaagccacttgatgtccgggttttctccgttataaccgaattagacgatcacgcgtggcgtttccaagcctagcaaccctcagcgttttcgtctcggcagccccatcccaacttaaaagtgccgtgccttttagccgtttaaaaccttcctgctggattttaactctgagttgtccactattacactctactctccacacagacacagaaccctgtcatgtcagttcgctcgtgccagcgcgcttgtatatgcccgtacgctctatatacttacccaaagatatgtatacatatgcagtcgccaatagtcttcccataggagttttggatatggtacttgaaaggcgcatacttgtaacaagctcagacgctatggaagtactcttttccctctccggaaactccccggcaatatcctaaaagatagctttgtctctgcgctgggtgccctcataaccgccactccatgatccgggaaaaaaccctgcatgttgttaacctctagttccagacttagacattggatggctaagccacagtcctgaaccggcgaagcggcagcggaccaccacagtgacattgtctacaggactatcacctgcactctaggagtagggtgaccaatactagtagactcgaggaccgagcccagaaatgatgttgcctggtttaatgcacccgtgcggagttgcaattggggttccgtctcgacaagaatagatcggattgggaaggtcgcgactcaatcgcaactggactacgctttacccgtgggagtacgattggtccctaagcaggactatggaataagagtggcagatgcagagataggtgggtcaaccagcgaggcagtgcgggtgttgatctttacatcaaagctcctcagtcccatcaggcaccgctgttccacaaccgtagccctagacagtcggcctttggagtgggctctggtcctatgcacgccttctcagtagccagtcagctggaagcttgagtagtaggttagaatttcatgcgagattagtttctggagaatacaagaacagatcagcaatgtccaagtgcagccaagcaagctaaagtcctagtctcgtcgactgcagtgaattcagattaaaacaagcccctcaggcatcgcatcttgttctgagctcatgatgcatttctttgacagtctccccatgccatgctaatgctatccctactcgttctctgcgcgcttacgggctccctgcctgtctcagcccaatcctgtacagccgtctaatcctaccttctccttcaatgacccaactaacaaccacgttttcaggtgcctctataacaatatcctcacaagcatccgcagattcagcattcgacaaatgcagcagcataagcggcagcgtgacaatcgctccctccgcatcagggaccctagccctcgacggactggagcgcatcagcgaggacct

SEQ ID NO: 14816 - DNA, 676 bp, Emericella nidulans
acggcagagcctagtacctggatatttccttcggcgtcaacggcatactagatacctcgctaatcgctctctattgcattcgtggcatcagcaaaaagtttctcacgttctttctcttgctcagtccgatctgcactggttatcttcttccgaagcgcataaaagagcagcacttatgtcaccgtctgtacctaccataattacacttctcactcaccaaaataataccgatatatcatccactctcgtcccgcccttcacctcataccttcccacaatcacgattaacatctcaaccctcaacactcacatcaccaaccatatcctctcaaatttgaacacatgtcaccactctctctaatatctcactccacatctcccctatcaacgtccatccactgcatgaaccattttcctctctccatgtatccatcttacacctctcactcactaataatcaactctatttcacatctcaatatcctcttcaggcaacacaccaaatcttaccccttctatcacctctttacaccacgctcacactcatctcgcgtcaacacttacgctctcgtcaccaatccttactctccacctcatactctctcctccctcatatgtcacttcttcctcccatgtattataatacaccaccataccataccataactctctaacc

SEQ ID NO: 14817 - DNA, 5314 bp, Emericella nidulans
tagatcttcggtcaagatagcggtcgactcaaggaccataagttgagctaaatggtacttccttttgcagcttgcagcataccccccatacccacccaatgtaggtatgtacaacggaaaccctcctcaagaataatgcgggtagccgatgcaaggggcgcccacgagctttgacatattagcccggtggtcttatcccagtagagctgctggtgttgagggtcggagtcatggcttaacacatttctcaagagatttggtcgtagttttccagtgctaatttgattttcgactgttttgacttctaagcccgcagcaacgatgaaaatgatgacggccatgatggaaatcttcacaagggtgcgggcgaagctcgctggaacgatgaccgttgatatttactgagagtacaaccgtcaagctggcggaagcgtggtgccgatctgccctgcggaggcatgactaagccgatcatccgacacaaatctggactcgctcattcacgtctctccaagagtccatcactaccgccctgctttttcgccatcgcgtcgttttctatcacggatccggtggcttgcaagcacttccgggtggcgcagtggcttatcgatcatagtcaaccgtactctgctttcacgggatccggcaagccgtattatcgggccggtctgaccctgacgcctgacagcaggtacctcggcccactccgccctacagcgccatgcgctgccaaaaacacatatgattccattactctctcacggcttctggcagagctatgcaactctcaatgtcaactgctagcttagggcctgccccgatttccaacatgcacgaaactgctccatcgaggaatggtcatggttttagattccaaggacgtaaaccactggtaagcagaccttcatgctgttctgctgagcaccatagtaaagcggctctataggcttgtgagacgtgctacaagcggaaagtcaagtgcgagtttgatgagtctgccgggtcctgtattcaatgtatgcgccgtaatctccactgcaaagtctcaaaggggaacaagcataaaaggtattggctgatccaactttccgaggactcccgttgactaaatatgtcagatcgtgttatgtaaagagcttggaggagcgtctcagaaagaccgagtcactgctcagagccgctggaatcgcggttgaagaagatcatgatgctgaagatggcagttccgtggatgatgacgattctctttcgagcaatcatcatgactccggccgtgaggccgagtcgagaagcatgaccggcagagccactggtgagaaaggcttgttcaagtcaggaaacccagaacaatccttcaattccaatgcattggccaagttctacaggcgcaggcgcccaaccgcgaaaaatacaccaccggtatacagagcggagaaaggatactcaatgtatcatggtacgcctatggccttgctcgtcgcgcttagatttggtgctaacctctcccagggcgatgctcgcctctgtcgctactgaccagggaagggatggaatggatcaaaaccaagtctggcgaatcaaactctctcgacagtttattgtcaaactcgaatttcgatagcccctgggcctattggcgacctgatgtgttctacgacgtattcgcttccaaggtattcaaaccgctgccaccaagggcggaggtcttctctcttctccaggaatattttcgaaccttgaaccttatctttcccctgtatcatgagaagactttcatggaactcgtcgaatggcagtacactcagcagacctgcgacgatgctgctcggtgggccagtatcaacatcatcctcgcgcttgcctatgaatatcgctattcaaatagtcagaaggcagaaagggatcgggaaaaggcatggctgtattataagaatgcgctttcagtattccccgagctggtacttcggcggacagatctgttgagtgtccaggccctccttggcatggcgatctttcttcggggcaactctggctcccaagcgacaatgcccgttgtgaccgccgccatacgagcatcccaccggatggggcttcatcgtgaaattcaccggccctatctttcaaggctagaacagcagcaaaggaagaacgtattctggattgcctacattattgatcaaaggtaaggtattcgacacttgtgcctttcacaccctaactatttatagcatatctatccggctagggagcgcgccgacgcagcaacttgacgactacgatgtcgatttcccttccgacgacactgaaggattaatgttagtcggtaacaagacggtcttcccgcaattatgccgcatctcagtcatcagaagccgaacatacaagcacttctactcagcgcgtgctttggaagacaaatctacagccgatatctgcgaaatggtccacaaattagatgcagagctacaagattggagacgtgagagccagtttgatacttcgttaaagcaaaggggtagcggccaagactttctggttggctttgcttctgctagcctcttcctcctgtacaacaacacactcatgatgattcaccgcataccaacgctaatcaatttcgtctaccaatcacgcgccgaacgcatcccagagcttgatctgaggctgatattgaaccagtcttcctcctcggccattctttgcgtccaggctgcgagagatattctcaatttgataaatcatctaccgtggggggatgttgcgtggatatggtaagctcttgcctcaaatcacattctactttctttgtcactcatttactcaggtcactactgtactatatattcctagcagtcatgacagtcttcgtcaatatcctccgcaacagccagcaacctgcctcgaaagacgacctcaagtccctaaacatggccgcaacctttttcaccacccttgtcccagctgatgggccatgcaactacgtacggttcatgactcgcatgagtacagcctttgagcgtatcgctcgcactgttctagaacgagatcagaagacggtccgaccgggcccagatccgcttgtcaaagcgaaagcctctaaaagccgcgcagcaaacaactcgcgaagtcaaccaccaccacatactctgccccagcatcaatcttcctccgcatcagcatctgcaaccacaaccgtcaacatccccaacctcgaaggtttacctccgatcaactcctccggctacgtcgtcattgagagccctatcattagtcccgatcaaagcccacctccaccttcaaatcccacaagcagcacaaacacaaaaccaacctactcaagccaaccgcaaccacaaacacatgcatcaaatccctcaagcgtaccccagtatcagtatcctcccacactccactcccaacaacattcttttgcgccttccaccatacccacagatacgacaacatctttccccttaccaactcttgaagaatcctccgtcacgacttcattacccgcctccttcccataccccttttcccagacaaggcctgaaccatggcagatccctctaacggcagaatgggagttcggctttgagggccaattcctcggcatgggcatgagcatgggcatgggcgcggggcatgggtaatggcatgggtatgaataatatattccaacagcaggtttatgctttccaggatccgactcatggcttgggttccggatccatgagtatgggctcggcggctgctaacgtgccaatgccgaatacgatggtcagcacacctcatatggagtatggatacggagcccggcatcgaagcaatggcactgatggtggccgtagcgatggtgccggccctgcgccaacacccggccttcagtcgcatcagccgatgtggtttggaaatgcgttttagttcaatatttatccatactatctatctggcaagccactttattggcgaaatacagatcaatacgaaatattaagccatgagctgttatcaaagatcattaaatgtttttactaactcaaattggtatcaccatttggacaacgataaatgcgcagaacatccttataggtactaacgagcacggccgtaacagtaaagcccagttgcatgaatcgattagccagttcaaaccaaaccggaacacccgcttaatcatcacagaagaaatcaataacaaagaaccttaatagaagcggcacaagcaaagtttagaataccctcccctcaagcatttgaacggccttgctccaaactccgctcccgaacttaacgcctgatttaccattccctctcaactccttgctcagaatgctccgcatctccttctcagacaaccccttgctattatccgttccgaagccgtagactttgctagcgatgacctcagtttgaatgtctaggacgccgagcgcattcccgtcgtctctcgcaacgatgcatgttgttaccgcaaagtctacatcaattcggcagttttcgttcgtccgcttctgtgactttgataaaggggtagaatcgattggaggagaaacagtgccgagaagagtgcacctggctctgagggagggtttttcgagttccgaaagctgaagattggtaacgccgtggaatccaagcatgcgggcttcttcttccgcctttgtcgcgaggtcccaggctttcgagacaaagcgtaaaagctgttttgaggtgagctctgactgagtgattgtggcgatgtggttttggagggatttgagaatgagtaacatgattggagagagcgaacgcgcgtggctcggtccactttctttctcaggagagtagcacagctcaattggggtgttttccttttgcgacaaagagtctttgctttcgccctcaatgtaaaatgaagctggatagaacttgagttgtaattggtgtcggtaaaccatggtcactgccagaccggtctcagaagaagatgcagaactgattgaccatccagtccgctgctcaatgcgatggacagagtctattaccagcgtcagaataggctcaactttagatgtaagacgataaacatacccttcaattcgcggatctccttggcactccatccacggcattcttcctttaccctttcagcttcttggatttgagccatgacttctgctttcaactctgtccctgtctctatcgtgtctgtcttgtcctgtatctgcgtctggagtcttcgagcacctgcctcttcgccgcaatctcctcttccaagtcagacagcttgccccgtgcattccagagttcatcctggtcacagttctcg

SEQ ID NO: 14818 - DNA, 1302 bp, Emericella nidulans
gaggcttcgcgctttcatcgtcgaagacgtcctttatcttctgcgcggtagactcgggaacaacatccttgatacttttcgaataggtgttctgcttggccagttccatgaccaagcgagttattgcgataccacttgacggcccgagatatcgggcttcgtcgtattctctgaaccgaatgcggccagctccacgaatgatcaattcagcatctgccgcctgttggaaatccttttcctcctcttccagctctttctctagcctgcgggcagtttcacgtagctggacgatgtacgtcctcgatattgtacgtctccgagcagagtcataatatgcgcactgtgcattggtacgatcgcatgggccgcattttgggattccggggtcgcatttagtcttacgctacaccgaaaattagtacataagcttggctgcgcttttgttggcgtacctgtcggcacctggtgcaagctgccaaagtgtgcgcaatccgaccatcaaagctagggctgaactcttcggacgtttttgagggagaggtttcccatggatttgtgaatcgaggttttgtggtgtttcgatcaagctgtgacgccatggcgggttataaggctacagttagtggcagaatacgggcgagtggtaagagtatccggcattccatataggctggaacgttgcagttgctccgtctcgttatgatcaaaaggaattcgtctaagtgtggattaagcacatgcgactgtgttgaaggaactgcacacaatgcgtagatgcaacttcgacataatagtcatgatagttcttggaggcggcgtcgtcaaacgaaagcgtgaggataagggccgaacggcgagcaagatgcgatcgacacccgcagctgattcaaggcatctgatcaccgtgatactatcgggcgttgccgacttcggtgaacgtctctcaacaactgtttgtagtcgcgatcgcggagcctacgagggatgaggttgtcggccttacggcctgggcccacttggtcgccgcttcgatcgacgagcggaaagtcagcgacactggagagccgcggtaagagaatcgaagcctagagtgtcctgaagggttgggaaatcgaatctgaggtgacaaatggaagtaataggtcaaattccgggcaactctggcgataaaacaaaccgagaaaaggtacgaccaaggcggccttccctgaatcatgaaggagaacggccgagtcttaaacccaagccacaggccaatcaaagcctacagatgccatccgggctagctttaaaataaccggc

SEQ ID NO: 14819 - DNA, 533 bp, Emericella nidulans
gacgcaatttgcagtatacagacgggtgaccagacgcctcgaagctatgagcttctgaggacccagaaaaatattccttactttctaaatgtctaatccgattctccagagtcgcaatatagctggttagaagcattagcaagaccattctacagcaaacaggtatgccgtactcctgtgctgccttcttcttctccggctcgcttgtgtacttgcattgagcgcctctatccgctctctttgcacatggcccacaaactgcacgaaatacataaagttagcagatggttccttactggagttcatcacgcaccaggttgaacgccgtcacatcgcaccttgcgcgagcggcactcgtcacaagctaccgcaatcttgcgccgcttcggccggttcgaggcgtcttgcggcggcgtcggggtggataaggtgtcactcatactatgttagaatactggattgaaggctgtgttgaagtgaagtcatcgggatgaattccgaggctccggaacaatgggaacaaggggcttggc

SEQ ID NO: 14820 - DNA, 639 bp, Emericella nidulans
cggggcatgattttctacacttgacaattctctgtcgcatataggtgcatgcacgcatatatttgaccatggttttgaggggcttttatacatagctaggcgcatgaaccggaagagttgcgatgataccagacctgggttatcatctcgcgcagaactgcatggccttctgagctgccgcgctcgcataatcgccgttatttgcgcaatatgcccccagctggcccatcgtctccttttggcttaccttctaccagtgcagcccaataccctcccatccccattcaccctcctttcgtctcttctctctcctcatttcacctgcttctcccctttcttctacttctcgtttttctccctccccccactcctacctactcttgtgataccctcctactcttttcctcttcccacctcttctccaatcccccgagactccactactcttcccccttcaagctccttcttctttctcccccatttatatcctactcctccccctctctaccctctccttcactcctcctccgaccctccccccacatactttcgcgggggactctccctaatcatctcccctctctccactacaccttcttgtctacaccctgcctctcactcttaatctcactcacaact

SEQ ID NO: 14821 - DNA, 2186 bp, Emericella nidulans
gaacttcgatgtatacgtttgcatgggcgatgtgctcgaattgcgcaatcgactgatgtcaatggttattccatggaagagagctgcttatacgaagttatggcgtatagaaatgcaggtggaccctgttcaatcgcgatccgccagttgaagggccggaattagggctgggatgtggttcccgatcgcgatctcgactcagggtacaggtcatctccgcatcagtctgacatcaacgttcgaaagactcagagtatggtcttgaacattatcctggagatggaattttgagtcaaataatggttgctgaaacatttgaagttcgtgtggttttgtgatgaacgtggttgcaaccttcgtgcaaaagtgcctatcttctcaattggagtattaaccctaagtatcctagttttcttgcagacacttacgcgcaagataaagatgtaggaaaaccaattctcctcatatctatcttatctagcccatggtaagaacacctagagctcgagttaagcccaccaacagggccgccaggtagagttagcacccagttcacgaagtccagcaccagtttctcaatttctcgctagaacaccttcttgagaagacctggcttctggcgaagggcgctgggtctagtgctatctgggtaatcctaagcgcatgtcccgtggaccacattcgccagtctgtagattctggaggaacattcactgagctggtcttctaggcggacggtaaactcttatgacaatatcggtataaatatccatctgcaacatcctcggggcagaaacgcgcgcttgcgacggctgatgtagggcaaaaacggtctctgacaatgtcggctcgcatccaaagacgatcgaacgtatcctgaggtctgagcatgctgcagtggtctacgcgtatgtttaataattcgagatatacaatggcttttccttatcaaaccttcgaatgacaaaagtatctgaacgaagatcaagtctcacatgacgggcagcggcaccttatagccataatgacagcagtagacggcggcctctttctcatgaggccattaatatccacgaaagcttccgattaaagtcggccatttgtttgatcgccagtgcgttcagattgacgctgccgtccgggctgatggactcgattcccgagacgagcttggcccgagatggatttttcctgtatattgagatagtcacggccgagccgtcaggaaaagacggttcttgaaggatctgaacctgtgacgagccacgacgaaatcccgcctcacactgaattctattgaagctttgattttcggataaattatatctttgagcattgggcatctaggtcttttgcacaatcgctgacacatccaaggcttcaaccacatgttgggggcacctgccgtgaacaaggatcgagagaatagactcagaggttcggcttcgcagactattgtgacgcacagccatcaatgatggtatataggacaaggccttgtcaaggagttcagcagtcagcaggtcacaaggctgggcctgacgccgaactggccatcatgctgtcgattcgatatgaaagccaataaaacttaggggtttgcatccaatctcacataaaaggtgttttgctgtgggagcgaagtgaaggtagacgctgaagaacagtacttttttctccctatacctaaacccaagaaatgtcgttcaccttagccatacaatattgaaagaacagactgtagatctgctgcctcttatgactccaccctcccccagagcttggcgcccgtattacgtatctccacgtgaccgcccgtttatcgataaccagagagcgcgcagtgacatttttgagcacgcctcgattccctgtctacatctcgctcggaactacaaggcttacagaagggggaaatcatggcgtccgactcacaatctacgccgccgccttccaccggtaccttggcgcgcggagaactcacgccagaacagcgcaagaggatcgtacgtaattgagcaactccgccaccgtcagcagtcctaacgcacgcttcattaacaggaattaaaccgcatgaaagcaaaagcgatccgagaacagcgcgaaaccgagcagcgcaccgccgcctctgagccaacaaaaggcgtaaaacgcagctactcttctatacatccgagacccct

SEQ ID NO: 14822 - DNA, 3481 bp, Emericella nidulans
tagtcgtcgtaatcatcatcatcgagctttctcgcaggtttcttggggggtgccggttcgtgggcgcgtttgtcctcagcttcagccccctcgaggacggcgacggcatcgtcgagagtgtcctccggtagcttttcacccgaaaataagccgttaattttcgcctcagtgcgagtatacaagtcgcggaatagagcgatacgtggatcttcctccgaaacagtgtcggcctccgatatcagattgcccgtgtgaggaccgtcggcgtcgatggagccgcgcatttggggtgttctggagccggaaaaaggttttggatagccattgaaggtccgcgcatcatgcatgtcgtcggggggccggaggtgacctggggggagccaggcgttgtggtgtccgagcgacatgctcgctccaaaaccccggttctggggcgggcgagggggctcgtttctccacggttataatcagattcgggtaggcaacaacgagcgggtttgaacgatgaaaaaatacatagagataaagtacaagttatagagaaacagaggacgctgtttccagagccctagaggatgaaacggcgaggatttggatggcgaaggcaccggctttgtacaaggttctctgcgcgaatggatgaggtgaagtcaggtcggtgccgtgaccagcaagaacggtcgccgcagtttcagaccaaccgtgcaattttgaaggaaccagctttcataaggacaggacaggcacagatgaaatagatggagtatactctgatcacttatattccttcagaaaaatagttatacggagatactggccaggcattgtcagtccatgtcattgagaccggtgttaccttatggatgggacggtgcccttcataattattcatgcaatcttatccagctttgtacaatcccgtataattgcacatgacgtgaaccaacatcaggcaagcttcagagcttcaacccgccgagctgtcatcattctccttcgcgataaccattctgtctgattccaccatgcgaatccgatatccttttgcaggtacgttcgctcttctccctttttcctggcaatcaggtcgttactacctaaacgcgccggctctatcagactacttcattgtagcacatccagctaattgctcatatacaggggccttcatcttcctcctaattttatccgcctacataggccttcttccacacagcgaatcgtcctccattcctgccaatctacaaccaaatgacaagctccttcacgtcgtcatcttcttcctcatctccctcattttctactggattcccgacacctcccgccggcgtacgctccatttgaccctggttgtctgcacccttgccctcggcgtcggatccgaaatcctccaaggaattctccccaacggtcggtccttcgaccctttcgacctgctagccaatattgtcggaagtctcggtgcagtcgggctatgcggttggtatcaccggcggatgttggaacggcggcgcaagtcccgattcgggtccctcggtgagggcggcgaagacgatgtcgagcttggtatgagcccggatcaccgtgagagagagcaactagagccgcaggaatctggtgtggtcaatctagagcaggaggttgataactgggatgagaatgctgtcgacacttgggacacagaagatggcgacgaccccagtagcggcttgactgggaaggctgctgcagataaagatcagaagggtcttgcagaagggaagaggaatgactaagttgggtcagcttctacatttgcctcaatactgcggctgtttccgtgctgctggtatcgggctatgtagagaggttcctagcagaagtgaactatgaccctttcccggaacgattttattctttcgcgtttcgctatcatgatcggtctgatgatacggcccgagtagccacggttcttattttagctctactcatgatataactgccctccgccatgacgccataatcggtacctgatgtccctcggtcttaacacgttgacgaagaaatgctacgtactcttgtcatgacagcctgatatgatttcattctacggttgattctcctgactcttcacgctatgactcacgtttgccctgtgtatatttggattcgattttcgttggcatgatatatggagttaaagcgtgtaaataagccaccgaaggggtcagccgtggttgtgtccttcctctcttgttggatctactggatagttttgtaggtaaaaacttcagctgcaagagtatactttcgcagtattctaagagttaggaaacaaaaattcaccttcaagttcaagcaatgatgcggaaatatatatcgggtcataccttcacatcgcctaatcctgtttgagatttacgagactcgatacccttaacccttctagaacaccttggatatctaaaggaagtttcgcttgcttcaggtttattcaaaatagacccaattgcgctggcctacggcagatttttgagcctcttgcgtactataccggtcaaacgttggatgcatgagttgggccatggtcgactactataacttccgtgctctgtgatctcgacgcagagttcatctgcatgggtagaagaaagtaggtaatgccgctcgctctaagccatggatcctgatcatcgaagccaaatatgatacaggaattctaaggctatggctaggttttcctagctaaagaaacgacatacaacaagcgattctggccgtcacagaagcggcccgagacctgcgaggaaatagaacaacagtcgcaggtacagcaataaaagtcagtcaagataacgaattcgcaaggccaggcgcagaatgaagagggccacgacattgtatgaggagaaagttcatggctagtcataaaagaacgaggaagtgagaggggacaggatataagatatcacgcagggcatcatataagcaagccgtccgaaagccaacagctaccattgcgatcagctaagagttcaatcagtatcagagtgctcaggggccctggtgtcagaaaggtccccagcagcctccaactccggttttggtgcaggtagatagtcctcttcggagagtttcgctattttagcggacctggcaactgaccgctggcggctgatgccatatgtcttctctaggatgatgtcacacttgtcgcgcaagacttcgtatataaaaatcagctgcatctcgttatacaccatcatcattcgctgtcgcgcatcaggttcaccgccccaaacaccggactctacgtcttcatcattgacctttaatagttgacctgactccagttcctgtaagagatggtcaagtgcaatgaaggtgccggttcgccaaactccggcgctgcaatgaacaattcgaggattctgtggagaggaagctttagaggctgacagctttatcaggtggaggagtgcatcgcgatcgtcgccaacag

SEQ ID NO: 14823 - DNA, 1907 bp, Emericella nidulans
agcctagcctacaaccctactggtagcatggggataaacgtagagatatctctccattaatgctgccattcacgctcgtccgcgctcatcagcagtacatagggattgtgcaaggcgtgttcccagcaatacattctcgctcaacgctggaagtgctcgctgcttcgacgctcggtgctgtctgtcctagggtaagagcaactcctgctgcattcaacgctccggattaggtgtctgcgaaaaaaaaaccggtgactcaattcaaagatggggggacaaaagcgcgttacttcgacagtgtagagagacaatgcttacgacttgactacctcatctgtcggccgactacaactgtaatctaaaggcgatcccaccatgatgatcatgaagatctcagatataccattgtggagagcaaacaagtaaaactgtcatttgagtcgccttggttcaagcattggatccactctccccacgtaaaaccatggggcccaagagaacaggttgtaagaggagaacggtaaaccactggcgttgctccattcatgagaagtatatgctgcgtatgcaatatcggacagtactgggctaacagttctgggctgagctccacggcctacctcgtaaggtgtgtacaatatgtatatctcatatttggacaagtgacttggacaagtgacttgcacccagagtgaccatcttgacaatgggtaatgaatttgccaagtgatatagaaatattatgtatttatcacgacttatgctattgctgttaatagttaaattacacccattaattagacaacgccagctgagatcatgacttcacagactgataatagtacctcgaaaggttatgctgcacaaacagttcctatcatataccttgtttggacaagctgctcttccgtaaatttacgctgcttccgcagctgcgctgaattcaaatcgttcgtgtcctatcgagttctagtagactttagggctattgagagtaaaacgaattaagcgccctcttcctcgttaatgcggattgctccctcgttgccgagtccgctagaccaaaagccgtctacatagaggttgctaagtttgtcagcacaaatcaatcgaaaagaatgggaaaaaggtaattaggcgattcttacgttccagtagcagcatcatttgcaatgacaagccagtacccgaggattccttggatgacgatatcgtgaatggcaaagaggatggtctctccagtgaggccaagcttgagagagagcgggccagcagccagggtactagtttgcgtcagtatcgaataatcaagagcatagaacaaaacatacatcgggtacaaagccttggccagaagtgccacacttgcgatagccgagaagagtcggcgggtgtgcgagtcccggttgttcgcggctctggttcccttgatgccgatatgatagatgagagtgatgaaagcaatcgcactgagagcgaaccagatccacttgcgcgatgtgttgggagcataagtgccgaaaaggccagttcccagcattacccaatcggctacaatggcagcaaagagcgacgcgccagggaggccggagaggagggtcaagcttgcgagaatcaggggtccggtaaggaaccaattgacatagcgcaaccaaaggacctggcggacgattccatattcagtgtccggaacgtgcttgtgcttgtggttatatgtatcgtatttccagtccatgccctgtcccgtagcaagagcaagatagatgataaatgaaactgtggttgcggtagcgactaggtagtgaatcacacgttttggctggagaatcagtagctgatatagtccgatataacggtaaaacttactagcagtacgcgattgctagaatgtagaaacaaaaacgaaa

SEQ ID NO: 14824 - DNA, 689 bp, Emericella nidulans
cgcccctgtaaacatattgtacgaactctggatctcttggataaagcacggcttcttaagatccatatgcggcagatgtctaacgccagctgggtacctatgacgatgcatccccactatctggaatccgccattgtaatagcaggcaataccaaaaactgcacgctcttatccctccctccttccctatactcatactctactccatctatctatttttttctccaatttctattaaatcaatcacttcatactaaactaaaaccctctccacttaacctctatcattccacttcatcatcccatcctctattattccattttaccaattataaatctcctcttcacctaacttacacattatcaataatcacactcttctttacacactttactcttactttcaccacatctatatccctgtctcctactctattttaagtctttcataccactatctgttaccctcccaacattaatcctccatcacacttcatctccatctctatcactcaccatacatctatcctatctactattaccctctcttataaactttttctttaaatctaacataaccatacattccctcacattatcccattcagatacaccatccacctacgctctacctatttcatacacttcaaatctacacctctcatcctctctcatttcctctctaccac

SEQ ID NO: 14825 - DNA, 1583 bp, Emericella nidulans
agcgacaacagctcgtgcaagatgcgtcaagtactaaccaaacagcacggcaattcgcgcctaactcaaccctcgtccccttaattcctgactcccagatcttcggccaagacgacatgcaggcttcaagtcacgccaattaccagacgcctcacagcctaccctacttgcacacgaattttgtcaaggccgatgatcaggctcgggatgctcgacctgtcaatcaccatctcaatctcattcaacagcagcagcaacaactgcacaatgctaagctcaactgccacgatacacacgatgatcagctgctcgacaacgacgcgtgggatacatacaaacccgacatcgcgtcctcgcttcaacaaacgaccaccgatatgagacgacaatctgtccattcaaacccaagtagctcataccatccgcacactccgaaaaaaacaaactcacgtaagcggcagacgagttgacgccacttttgtaccctggctgacgaatagcacagactacttcccaatctccccagcaacgacgccgttcgacaaaacagattttgctcagtactgcgcggagacgcaaatcgtcccagcaaaagaccaaaatgctgctgatgccagctcccagtcggcctatatgcaacgcgccaagtcccttcaaggagtagcggggactagcttctcacagcaaaagattgaaatgccctctccccctagcactgattcgtttgcagttgatggttttgatacgtttgactaccagcagtgttccagttttgataacctcgctaccaccagccacagccagtactctacgtcgtccaactcaccagaagtcgctgccattccaagctctggagatcacaccgaaaagaagtccaagctccctatttgtcctgccacgcccagccgtctcagcccaaggaaacagctcgctacgccaagcgcggcttctttagtgaaggcaaaactttctccgcgtgtcgcatctatcgataacctcaacctggactcccgggtgcatgcctctatcaaagaaactggtgttagcattgatgaaatagcgtcctatatccacggtccagaccccgaagacggaaagtgggtgtgcctgcaccccggctgtgagcgacgctttggccgcaaggaaaacatcaagtcacatgtgcaaacccacctaggtgatcgccagtacaagtgcgatcattgtgataagtgtttcgttcgtgggcatgatctgaagcgccacgcgaagatccacacaggagacaagccgtacgaatgtctatgcggtaatgtttttgcccggcacgatgccctaactcggcaccgccagaggggaatgtgcattggtggttacaagggaattgtgcgtaagacaacgaaacgtggccgtcctaagaagcaccgcccagagatggatgagagacgtgacatggcaaccaagacccgacataggatcgctgagaaatcattattcaatgtcttccgaatcggacacttctcgtcgtacagccgctctcggaggtgtttgagaacatgagccttcatggctccaggtcagcagacgatatggtgacatttgac

SEQ ID NO: 14826 - DNA, 1790 bp, Emericella nidulans
cgaaaaggaaaaagcaaatcacgctgacgagcaacatatttgagacatcaacaacggtatcctcacagtccaatcatctcgaccgagtcacattaaaacaggtacctggatatatttccgtgatccaaaagacacccattgatccctacaatggtgcagaatggaatccagacatccacggcatctcatcagtcctacccccttctcaggcgcgcgtccagatacactgaggtcgattgcgacccttgctggaactctggtccagattcaccgctatttacaggaaccgttcaaccgttcaatcgtttgagaaatactgagaccattcgcaggcaagaattgaggaaatgcgtggtctccactggttcgcggtttatagtgccaggatttcgttgatcaagggtcagtcatgaaccacgctcgacgatacactcaaagcggctccttggcattttgtccatagtactcacggctgttggtttatagagcgtccgatatctactggacctcctcgagcatcgcgtatgagtttctttgaacgtcgagactaggtcccttacctgtttatctgattggcgaatcgggatttgtggcatccgcggaatctgagatatatgtggcacaaacaaagtccgtacatttcagctctgggaccgatttgaaaactgcctcatcgtctatccaatataggtggtgggtgttgatcaggattggatacggctggagctacaccacatccttgaagctcaaacccaagcagcacggcatggcccttggtacttttcgcgctgccaggtgcgataaatccctggttgcacgaacttttgacctctccgttgcaatttggccggaagtcgtcgaagtctgccggtgattcaggtttcgtccgcaggcaaacggtaaccgacaatgcaggggtatggaactcccctcgcctcgccgttgagcgcttgttacgtcaatcctttctccactcgctcgacgggtcactcggtggcccgggatccctttgagagtcgagacaaaggaatgcttaccggctggaccggcccgtagctacaagggcagcgaggggtaatccaatcggttatgaatcctcgatggtgcggctgcttttcgagccagtgcctatatttactcgcaatgagccgacgaggataagatggcagtcgggctcgatttatcattagtgagaagtgatgtgccctgtcatatacactttctgccgattcccgaaagtatatcgcgcgccgatttcacggttaacctaatttggtaaatggaggggatgcgggctcgggccagtttggtgccacaacttccacaaggctgggacagcatgcgcgtcccagctcattactcgcctttgagagcgcacgacagctttggccagtatcaggcgttgatcttgttagacctcattaaaccacctaaacatagaattttgcgcatgtcccacagcatggtctgcggtatactgttcaggtatctccgcgccaatgggtattctagtccacctctcgaggcgggtttccccgagtgagcctccaggggtctcgagcagctcgaagcttggtgattcagctgacgctggcttcgattgctgactgtaatttcgtatgctgactgggcagatctacgactcgccctcggggcataagcttggagatagtgcatcgggttgtgcatcttgatgccttgcttaccagcagtttgattgtgatggcttctgttgcgctgcttctcttgtctcattagccagaattctcctaaaagcgcagtccgctttt

SEQ ID NO: 14827 - DNA, 2125 bp, Emericella nidulans
cgtcaatgatgttggggggaggaaggagggggaaagaaaaaaaagggagagactgaagtaaagtcaaatggtagattgcggggaaagaaagaaactaaagagaaggaatctggggactccgcgaaggatcagccacgatccgccatccacataagccggatttaaggagataacgctcttggttggggaggctggaatctgaaaagccaaaagcttacctagtctcgtcctcagttcgtccatcattgcatttgtcgcccgagaatcggggatctgctggctggactcagaattggctgtagatcggcagttgttgggagtgggagtctgaaggagagtgggacgttggcccattacgtcgacgctgagggagacgcactgactctctagtctgcgacaatcagtgctggggcgccccccaccgtacccttcagtctggacgcacctcgaattgtgccgccaggatttcgaggcttccgttatccggtcgttgtagataagtttcgtccagtcagatgtgagaggaagcgaaggacccaaagcttctcccacggtaaagtgtagtcaagtagccaagtcagacacagttcaagtaaccgaaggacatctttgcggagtggacttcctcgcctaaaatgatcataagataccccgccatcgcccctatttttgggatagcacaattcggtactaattgtgtcttaagaaagggctatattggttgatagtggtgcgggtgtcgaagcggaagaggtccaaacgggtctgccccaagagataggtaagaaagttgctgcttagacacccaaatattaatggattatggggtagagcaggaccagcgagaggtatattccaataaaaacatcactaaattaccaccaacgccagcatttcaacatatagtaacaaaacgagtcttagccccctggaccgccagctcgtactgcaaaaaaaaaaaaaagaaaaaaaaaagggagagagagagagagatctacaaatcaagttatgtgagcaacagcctcaacgccagagtatatgccgcaaaacgacctgtaaatgtaaatgacggacacgcggtagatggaaacgaagtaaacggttgagtgaggtagatgtcaacgtcacagatcaagatcagcatttatgcataagcgtgtttgtcggccattcatatccagcatcagccctagagtgattgaaccatgttagtcgcctgcaaggagagtaaatagcattgaggagaacataccaatgggtcttgttagcatccatgtacgccttcggatgcttttcgatatactctgtcgtctcccaaccctccggatcacaagtcacactgatagcatctgggtcctgatagatgcgaatataatcaaaccgcaagtacgccggcgtatatttctgaatgtcatcgtcaatgggcgcaaagttccacgccatgcctagattcatgatgatggacaacggctcaagcgggataacgcgctgccctacgttgccgtttggaccgatagctcgcccgtcaagcgtccatgtcttgtcggcgccgacaaaccagctcacgttcccttgaatccctggagtgtattcgaaggcgtagatttggtatgctttgccgttgtaccaatcgttgttgaggtttgtgacgccggacatggcttgttggtagggcccgccgcgataggtgtttatttgggttatggaggggtcgtagacggcggtgaagtctggtagaacagtcagtcgaagattgtcaacacggttaataacgtcgaacagttgggctcaccataatcaggcatataccaaatatcaaatggtgccatctgcaaactttgcgacaccgatcccaccatcttgtcggcatcgccattcagcggcgaaacactggcctcaattacatcaatttctggcgcagaacgagaccgtccagggctgggatggtccgaacccggacatgtacacgccggcaaacgcatgcccgggagccaacttatgccatccgtagaactttgattcggcgtgatcccggcgtcgcactcgtcatagtagctgtatggccacatgccctccgtggtagcagcgtacccaggacgtcccagattccccattgcccagaagc

SEQ ID NO: 14828 - DNA, 535 bp, Emericella nidulans
gtaatacacacatctatttcgcaatgcagcgctttacgggggcacgggtgttaaccgttccctctaaacggaaaccttttattgtagccgcaaacactgacgtagtttacgacgggtttatatacattcttcgtggggaccgagccatactagacagatgtggcattaatcttccagtaacacagagggatgcacaatgacttgggttaatacccgactaatgacactgatttccatacttacttcaatgcatgggaccatttgccaatgcctgaacgatctgcactcttttcactctcgccgctggtgtctatggtcctcctgcctagttccctgccttgccttactgaccctgacagggagtgcgccttcacatgtgatgcactctatgaagatcacgagagcgtgctttctgatactctacccggacctgacctggcgaatctatccgatgttgaggatcttataaggtcccccagaattgctcaaacggcgcgaggggcattttcgatgtgagtgatggcaccatattata

SEQ ID NO: 14829 - DNA, 546 bp, Emericella nidulans
atcatcccgtacttgatggttcgagcattgggggggtcacgtctaccatctcggccatagtgccgattgtcttgccttcgggaagaccagcacctcctatgataagaggggcacgcacgagtgtctgtggcagcccggagggccatttctcaatacactgtggtctcccaagtactcgccatggtcggagaagaaacatggcgacagtgtccttccatagccccaggccgtctatcttcgataggacacggcgaatcggtcatctaggcgagtgatcattccgtagtatgtggccttaacctccctccacattcttcagtggcacgggtcgttccatacctctccctgattgtcttcatataacaagcctcatatcccatctttttctccggttacgagacgacattgactatttgcgagcggtcatacggatgctctacctgaaactgacaatgaggaaggaggagtggcatgaaaggaacccatggcttgaccctcgaaggaaattcgagccacttcaatgccgacagcacatctgcatcatat

SEQ ID NO: 14830 - DNA, 615 bp, Emericella nidulans
tacggttagctaaattcctaggttactgttcgcgctcaccagtaaagttgtctagcaatcaaatcgcttaatgaccttttttacctcagtggtcgtgtgagggactgcagtatcgtggagaagaatccggaaactctgatcaaacagaccatcactctacattcttcattctcctttcttctctttctctttcttcctcttctatttccttctcctctctcttccactaacctcatatctctttcccttctcttctatcttcacattcttcctttctctttcttctccattttttccactcttctccccacccttactcatttttttcttcatccactcactctctctttttacttatccttatcatttattttttctctctcctaatctctacctctctctctctctcctttttcacttccttccctcttcttctctttcttcttttctctctcccacttcactatctctcctctccctcatctcctatcatctatcttctcctcctccttttctatctctcctctcctttctcctcatacttctttaatctcttaatttccacatttcatctctattttcatctttatcattttcctttatattccctctttc

SEQ ID NO: 14831 - DNA, 590 bp, Emericella nidulans
  unsure (1)..(590): unsure at all n locations
ggggacgggcataacaacacccaaatacgccttctgcgaccaaggtttanaaaccccaccaagacacacggaccaggcgggcacttataaaaaaacgaggggggtaaaaacaacgcaaataaaagccacggtcctacgaaccgaaaccacaccaccaagagatccaagcgccctgccacgctagaaagaagccaggaacaccaaatgggcccaacgccggaagcactatgccgaccatatcaacacaccaagagccaagactggccctgagggccctaatgaacataccggcccacacacaagaacactacccatagaaaccgtcatcacaaacgatggctgaaactcaatcctcaactatcgtcaatcgcgcatccatgagaaagcccacaccacacaatcgaacagaccattttcacagggacgagacacgacaaagactaccagcagaaaacccaccacacatctaactcagctagggcaatccaccccgtccctacaccaaacatccctactctaccgaaattggattccacggtcaacaagacagaaaaacccagatcagccgaatagagaaatatggacccaac

SEQ ID NO: 14832 - DNA, 606 bp, Emericella nidulans
  unsure (1)..(606): unsure at all n locations
atatgcttgggattcacctgtacctgggcgttggttttgtgcgctataagagacctatacctgggggagtttttagcgctgatgcgcgttggatatggatgcgcaggtaagtgtgctgccatgacacagagtatccagctgatcaacgggagcgcgagatagggactaatgcgtgcggcacatgtatctatgaagaggcagggacaaaggctgacactgcaagtaattctagcgcaaaagcgcacgcacatgcagccatctaccgcgacttcattacctgctgcagaacacgtgaggcaacatgacactacgtgcaatctagcacagaggctgaccacatggatctantatggacgtgcctgaagagcctgctgctcacagcatgggcgctgggcttgtgctggcttttaggaaagtaagcgcggagaacataagacgggctagcggacttaacaccattgccgatttaagaggcgacgtttcctattgcaccgtcgtacagataggacatcctcttttattgcttgacggcaacatgaggggtaataaaaatggatttgactgatagctcatctgcctttttgccccgtcatgacccaatttacc

SEQ ID NO: 14833 - DNA, 504 bp, Emericella nidulans
ttgggactcttatggtttacgacccgggggtgggctcaccctcttgcggcgcgacaatgggcacggactgttttttgttctactccggttcatattacgtgggggcttttatacactcggacgggagatctatcgtcaccagcatcgttgacagttgagcctcctgaatacaacatccgctctgttgattcacctatataccgacaagtttactgtacggcagagactgacgcagatggttcgtcggagggattgcagagaagaatgcacttgtaaaagccaatgatccattgatcacctcgtagatctgatgggtggtaagttattcactaaatcgcacggtggcgggaggaatcttatactctgggttcgggatgcccatcaaactgcttgttacggtgtccacccgctccatcacccatcatgagagactgtgaccaggccagagctgtggctctagactccgcatagtatgggctggttcgctgggcatccatggagaga

SEQ ID NO: 14834 - DNA, 1435 bp, Emericella nidulans
tagattccggccgcaattaaccctactaaagggatcctcggccgcaatgaatagcctcagtgttaaggtttgggggttctccttggatggtggacttctgcggcagctcttcacttgtacattccattcataaggctcatgaccaagcttcgctttgctttccatgaaattcactgcaggtggcccaagaaaggtcgtaatatgtccatcgagatagtgaggcgaacttctgtcttgaagccttacgaccaggttcgacaacacgacttcagcgcggtgagccgtaatgtcctgaggatatcttgtcgcggcaagtcgaccataatactggaggtgtttgtaccagcgccaaaaacaaggatctcggggggcaccgaagttggagatcgtcaggccataagggctcttttcgcccggtttgttacggtatgccatttcagcaaacttgccgagcccatagttgtgaaggttcccatatcgctcttcatcaagcgagcagccgcccagcagcttgttcaaggaggggtactgcgcgtcgagaataccaccaacaaagttgagacaattgtccctggtaaggacaagtggcttgtccttactggtagtttcgaattgacccttcctgatcgccgcgtaaatgttgtctcgccactcttccagccgagcgcggggaattgtcacgttcagagtatccggcatgtccggattcctgatcgagtaccaggtggaaaacggcgggtagcccccatagtgctcgatcagagaactgataggggcgtaaccattttccagaaagtcgtcgtactgattccacggcctcacgagaggcaagctccagcaaagactttcagtctcgtaccgagccaccatctgcgagtgtacgtacaagaatacctccccatggcggtcaaagtcccctacattcttggagttatccccgccagcaccgcgatataccatgtgccaataataatgcgaatcattcaagtcgtagtcgtcgcgccaatacgacaacagtgcatggccgtgaagtgtgtcagctgtacagatttctccagccacatttgccggccgtcgagttttggtagagaagaatggatggtttttcaacggtggagggaagatcttgcgttgttgagcatcctttgagtgagtgaggtatatacccagcgcgtcacgcatcagctccggattaatgcgttcttctagaagttccttagcctttgaaatgccatcctctagcttcgggccagcagcgtccagcatcagggagacagctttcatggtctccaaatgttcaggagatagaccattgtatgccttgtggactttctgaactggaagcgcaaaaattcctctgatgattgtactcacccagacctttgttggtgatgcgcacgctgttgaaggatactggctgaggatctacaacagt

SEQ ID NO: 14835 - DNA, 1222 bp, Emericella nidulans
atcagttattgaaggagtaggctgtttaccgcctatcctgtccaccgagcctcccaagcgatctactacgcgtgaaaatgtattacaaatcgctgttgtggagcttggtgactcttacagcagcctgccctttttaatcgtaagctcttggcaatgcctatgaagtgagacttgctgactgaaaagcttcgaactgaaaatgacgacttggttgtgtataagccgttcttcactaactcaaaggagctgactggcttgagattcctgaaagaagcaaaccatacacttccaaagactcccaatacgacagacgagttgcaatcagaaatgaaacctcttcgcatcttaccgaacattgcgggctgtagtagcattttcatgcctgggccttcagcgggtttcattttccgagcttcaactacctcgccccattttattcgcctaagaggtggttttatcaaggggctaggttgttttgattctccagataaaggattcgcttaccttgactcgcatgtgcgtccacccattgtctctctatgatcggatactaagtcatatagggccttcatttagctaaacttccagaagggacacagcttggctacccatggataatgagaacggttccaatagggcagcaaattgacaaactgacatacgtgtctgcttccgacacgtatgttctcgggacatgtcagagatgcgaatttagattgcccgaagatgacgaattacatccagaatggcgtaacgaaggtatatcctcttccacccctacctcctccccgcctcctccccactgaccgccaaataaaaaaaaaacaatataaccttctctagacatggactgaactgcaatagaaatatcctttttgcccgaggtaaaccaaagctcgctcaaggtcgtgagtccgaaaacgtggtctgttattgacaggtatgcttccttattccttaccaggacgaaaacttattttccaagttatccactggagcccgctgagcatataatggttatgaaaaccatgagcttggaagtctctgagaatacacatgaacgcagagatatgattgtggtgggaacatcgctggctcgcggagaggatataccatcacgcggttgtatatatgttttcgaagttatcgaagtagttcctgacccagaacaacctgagacgaatcgcaggctgaaacttattggcaaggagcttgtgaaggg

SEQ ID NO: 14836 - DNA, 2009 bp, Emericella nidulans
tccatctggatttggttcgaaagaagagttgagggctgttctgggcaaaaagaccagaatctcgtccacgtaagaggcgagattagggatgagagtggtagggaaagcgaggatctgctcgagcccagcgcttcctgaacctgaagcagccaggatgctggtgatgagggaattcaatgcggacttctgtagtgcggagtccttgtaccgggagagagcggaatatgcctggtcaaattgacaggtctgcaacgaagcataaaacaggcgtgagagaaggtcattcttcaatcgggcgacctctacgtcctgctcgctaccgtgttcactcgcgagagcttgcaatgctaggctagcaaattctgaaacatgagaaaatgcccgcacctgctcaaatattgatagcacatgctggaaatactttggaagtccattatggaaacagtccactgagacaatatcgaggagtgtcgaggacatctcgtgcagattgcccagcggttttccacaagctaagcacggtcagcaccagagcgtcaatagaagtcgaagttacttacagagaaggtaggcggcttttctaaaatacaaggctgctgtatcaagctcagacatggccacgtagaggcgaccttttacataagtcgaccaggatgtacttggttgaaagcgtagaaagtcccaagcgagatcgatgttccccttggctatcaagtcgcactgtatgtataccagggcattggggtacgccacttcacctggacgactcacccatgatagcacatcttggatgccgagtgtcaaaatatagctctgaggaaggccaatggcctggcgaggtttgatgtccgtcgcgaacaaatcctctaaaatggttgtaatccttgcactcttgtcgcttgatggtagctgctttaaagaaaaggatggattcgggaagtcctccgctgcctttgagaatttgtcggtctctttccgcatatttgagcttagccacagcatcatttcgtactctcggagtaaagtgaccaactcaacaaacagttcgactgcatcgaaggtggaccctttatcctgctccacctcagcgtcaatgaacacaacaagtaccaagagatcgatcagaatctggcgcgtaaactgaatagtctcctggacgccgttcacggtaacctttaccccaaaatgcgtagggagaaggtcagagtctttcccgggaaacccaagtgggatggtcccaagtatcttgaagaaaatgtcgctagatagcatatagatgttgagcttctcattcatctcggaaattaagtcgttataaatctggttagaaatctgctctgagatatcgcaccggtcacggaagacctccatcctatcttggacagaagatgagggctccgcgaagatctccgcctcaatggcgctctggcaagctgcattgaggtcagctgagaatctcttcctgaaattggaagcaaccgtcatgagatgtgaagcttcctcatacaagtcaccaagctctgattccaggtttcgatgcctccatcgatccgcgatcttgggtccttcgctctgaagcacaggtcctggattgtgtagaaggagttctgttgagctgcattcccgtacaactgcacagctatctgaaagaagcacccagggagtctcgtaatacacatcatatgatagggtgagaggctcaaatctcctcttattcaggtcatccgcaatctgccagaattgccgccacttagaatctgtatctgaacgataccgtgagaaatccatgtcgtcatcttcgaatttccgcagagacactgtagctgcgaatgtagagcataaacgttctacaagaggggtgctcttttttgatgtgctcgaggaagacaaaggcttgagggcttcctggtaaatcgttaaggaagtctcgagtacttcagtaggaaatctgtttggctgtagaagaaatttcaaccacttctcggtcggatccacgacatcggaaaggg

SEQ ID NO: 14837 - DNA, 1874 bp, Emericella nidulans
aataagaattgcagtagaaaatggcggggtgttgtggaagtttaaggcatgttggaataatgtttataagagaagtaggagaacaactaggcatagggatgcacgtattaaatatacctctgttctgccagtagggctggtggtacttggcccagtcgcactagggcaaggatctaacccacttgtggtcggtgctactacggcagactcatggcctaggagagctatgtctagcgcctttactatcaacctccgagatgtgcgttctctttcaggtgttttgctacaaatgaaacgagtctgataaaggagactggattggacgttcagccagacgtccctacacaaaggacaaaggcagctgcagcagtacgcaagcatgcatctgctgacagcagatttcctctctctcttttcaatgttaaatatgtccccaggcggcgaactcattggcggcattgaatgtcaccaacgcagatgaggcaagatggctacatactacttcttgcagccataattaccttttctactgctcatatttctgggattgtataagtctcgattattagaaacgagtttataaccagcagagtatgcgaaattcttggccaaataagattatatctccgacagcacgaaacggcaagaccctagaaactccaactcaacaaatttcctattggggatgtatcacggccggtttaatgaaaaatatgagcttgctagccttgattcagagacaagccacagaaatatattgagagaaagcatgacggtgataagagacattggaccttttatccaggacaggtagggatcagctcatttagggctcaaagacgcccttccgcatcgtctccttcggcttctccacagtcacatagcgaattgtacttctcgtctgcttaaaatgtgttgttccgtatctgagcagctcagcaaaagtccctggctcgatatccttgccctgattctcctccctatcccacaatgaacctagcgcgggcgtcttcgtcaaattctccccgtgcgtgatcttttgcatgctgcactgggacaagaagtgccagacaacctcgtgcgccttcttgtactcttcgctctccggatcgccatctgtccgtgtggccatgatcctaaacagattctctccacgaaaaccgactttctcctcaaacccccagttctcaggcaggacatcgaaccagaggatattgttgacagcataatcagcacagctgaacccgtctcccgcgtcttccaacattgtcagtcgaatccaagccaaaacctgcgaaatgtagtcgaacaccgtagccggatcaacaataaactcccacttgaaacccctctttgccgacgcagagaagtccagatgtgcggcaaacgcaaaataacgggtgcttcgtgagtccctggaagttagtgcggtctttccacacatacaggaagagctcatgccaccgtcggatgaaagggtcgcccttgcggctcgcaacgaaatggttcgccattgttgttccatacatccagggtacagagacattgaaaggcgtgcaagggtcctctagctgagcccagcagatccggtccagcgatcgggtcagaataatgcctacatccatgaacaccccgccgtggagaagaagacaggcgccgcgcaggaaatcggcgctatggggtccagtatacggaccgtccattgtactgttcacaaacgtttcgggaaggagttctggaggaatatattggagtgcatggttgggcgagccagggacggtgtcgaggacacggatcgtccatgacggcccgcagacgcgttgccagtctgctacaaaaaactggcaccaggcgggcatagcatccagcccggc

SEQ ID NO: 14838 - DNA, 513 bp, Emericella nidulans
aacataaacaccgcccccactcaacttacaacccatttttttaccaacccccacgccaaagggcctgggagacgatctataacaacacttgttccaccaaccccctgactcccacacctggacgaacccaccataccaaccccaggcaatatgaccaaaaaacctcagcctcgtaaaaagtcccgagaccggcaagatgcccactacttaaatctaccaacctgaactcgtacagaaagtaagcttacccaaaaactaaacaactcgcccggctctatgccgctcaagcgactcatccatttggacacaacaagggcccaccacgacacccatgaaccaatccccccctgccctcaacaccaaaaactacccccgaaaaacctgcacctcaaaataaataaggccggctaaaagccgaaagccccgccagtcgctacccattaaaaagctaacttcccccccccgacactgaatccaaaacaacccctcagcttgacccaacccaaatgaaaa

SEQ ID NO: 14839 - DNA, 504 bp, Emericella nidulans
caccgggggggactgctctgcacaacacttaggcacacacaagcctctttaaacgcagagcaggaaaccaaaagggggggaacttcaaaagccaggagggggagaaaggacgaaacacgagacacgaggcacgaaggcagcactcacgggaggagcgaggccacaaggaaagagacaacaaccggcacaaggagaagcgagaaagaacacccacgcaacacaaaacaccacacacaccgaacataacgaacaatacaacaaagtgcagcgagggatgcgcagagggaacaccagaggacaaaaggccgaccacggcaacaaaagcccaggcacacatcagaacgggcccccatcgaacaaggatgaaccaaacggcaggcgcaggcgagcaacctcaaccggaccactaacacaaagaaacggcgaaaaaagccagagccccaaagcaaggacaccgccgcaggaaaaaacccgaagcaaaaagaaaatcaaagggctgaaaag

SEQ ID NO: 14840 - DNA, 1956 bp, Emericella nidulans
  unsure (1)..(1956): unsure at all n locations
caaaaatcggtcagagaccgagttaccagccccaggcgcaggaagaagtatgacaagccagcaaacagagtgtatcgacacgcctcgatgaagtatgagaaatagttgcaatcgtacaatccttccgcttcgatccgtgtgttcaattcgcgatatctccgtttaatatcctgctgagttttcgcatctagagacggatacttggcggtgtcaaggacgatttcctcccgagtgcgagcgtcgaggaaaaagggctttggttcggatgattcgctagcgggggtcgagactgaggtttcagaggacgcatactgtcgacgaactccaggagcggcgtctacagcatcgaaaatgggcgacggaggctgggactggccagaagtatcatcttcctcgctgtcggcgttttcgtcgtagtgacggaacttcccgccctggatcggaggcagaaagttcacccacggtccttggatgcggccaatctggaaagctagcatgcgctgccgagcttctacggagtgtagcctagtgcagaactccattagctggctatgaatttggcgggtagtcggggacgtacgcattgatttcgtccgtagcatcctgaccgaccatatgcttgatagatttgtctcctccaggatgaaacttgatccatgagtcgaccttgagaacgcggtcatcgaagatgataatatgtttcccagcagcgatttggccttcgatgtagcgtcgggacagaagcgcgtcttttgtatgggatgccatggtggctgtcaagcaataaccagtaaatcagtagttacctcatagcatgccgaatcaaaggtgaaaagaataaagcgacggaataaaagtttgaaaacgctcaaggacctaggcaggagcgccagattagagaaggtagctagtggtaagtagaaggagaaacggactaagcggggagacttgaaacaacgtgcggtcgaggatcagacgacgatccatcctccatcattccactctcctctcccaccttgccgcaacgagttatacaaagctccatctcctttttagcgtccttgtccttgccttttcctctcctttctctccttcattaatttctcatcatacgattcatcatggcctccctcgaggtaaactaaacccgccgacccaatattccttagcctcggtctgactttgtaggattcgctctccccgctgattcagaaatggcttgagtgggaccaggttcgcagaatatttcccgtgtgcttagctcttgacagtcagctaatatcgaccaggatcccaccacccgctcggaaatcgagcagcttcgggacactaggcaagccgcagagctagagaaacgcctgcggaagcgtgacgatcgctcagacacgtacctgagcgctcactaacatggaataggcatccagtttggcacggccggtttgcgcggccgcatggctgctgggttttcatgcatgaattctctaacagtcatccaggcgtcgcagggtttggccaagtacttgcgggaaaaccatggcgactttgtacattgcggggtggtcatcggtcatgatgcccgccacaactcagcaagattcgcggttctggccgcgaatgcttttattgcccaggagattccagtttggttctattcagggccggccgttactccggccgtgccctttggcgtgaccgacatgcgtgcccttgcaggtgtcatggtcacagcgagtcatgtaagtaagctcatcattggtaccggagctccgggctgactatgcaacagaacccagcccaagataatggtaagcttaccgagactgctgattgttcctcctgctaacggtcccaggctacaaagtgtcttnttccaccttccagcgtttttattnttctcctaacatcgttcagttatttcaagaatggctgccaaattaacttctctatggacagaga

SEQ ID NO: 14841 - DNA, 515 bp, Emericella nidulans
gtaaaacccacgggggatgaattctaattattcctaagactaatccccaattattttttaaacgcccaacccactgatttagatgggggggctttttacaaaatgggtgaccttccccaacactggctccactctatatgcgacggcccgatccaacccactctcacagccaccgaacccgaagcatccatttacaaacatatcgcacacccccaccgagcctctaacacaaaccaatctattctcgatcaatagctgttacacaactcaaaattgaaagcccactacaaattagaccatagatatactaaaacttagcctttatctctactacatcatcggtcaaccttacatacttattgccttatgacaccgactgccgcctggctcttgccaaattagctgatgcccaagccatacttccggaccccctatcactatgctcaagatctctccccttcccgaacaccgctgttttcaacctcccaaccctcaggccctgttacatgtttaga

SEQ ID NO: 14842 - DNA, 523 bp, Emericella nidulans
gaaaacgaaggaataccctacaaagcaaacccagttgaattggaggacatgttgttcacgcacctagcttgaggggggacggggatctataaacacctaatgtggttatacaacgggcctgcgccccatggagtggttgggccgcgcccaaaacctggatacgcatctgcgcggcacgactattgtcattcaaggacctaagcgagcaatacggcgcccaaaaaacttgaaagctagccaagagccaatgcaaatgatttaacccttcctgtcgctatctagcacggatttattctgggcacgctaattatccctggcgacaatattaagttattggaggaatgctaatcggggatttcaagatttgtctgagtaaggcacgcaaaagcaggctttctcctcccatacaatagctatgctggtaacccccaaggggtgcttacgttattacgaggctaaagagagctaggagaccgtggcctaaaaggattgttgaggtttgagcaagggcaagatgcttgat

SEQ ID NO: 14843 - DNA, 450 bp, Emericella nidulans
tttggtcaacgcctttttttttgttatcacgcggctatgcatcggggagggtttgattaaagcattgtcatgctccaggaaaagaaagcgaacatgattaatggcaccatcaacaaggatcaaggggaagcgcttgagaaactcaccccggaggatatgcagttcttgttccggggatcgtagtcgcatcttcttagactcatcgccccatcggccacggttcaagctggacttgcgggcagggcaagctgggctaagttacactggttattgacgcttggcaccgcggttcttagccttttaggcaacaatataactatacagtggagactagcggcagataatggtgtcaggagcgtttgatcgctcattcactcccatacaggcgggcaatgaaagacttgaaagggatgctaatggcttagccatgtaatgataatccttcacagc

SEQ ID NO: 14844 - DNA, 896 bp, Emericella nidulans
  unsure (1)..(896): unsure at all n locations
cataccgcgggatgttgtttatgaggatgttgaaggcgtccagtccgctctttggtttctagagaagctcccaccgcttgttactacccgtgaggtgtgccctcctcctttgttcttactgcctgtcgttctgctcgggtgaagggaaaccggataggtggtgtcactaaagcagtgcagatcgcanacctcaagaagagtctaaagaatgtcgcgctcgggaaggcgtttgttttacaaggaggtatggctcttccttcgattgactgaggaagtagacgctaaccgtgtccaggggactgcgcggagttgttcgattactgtaatcaagatatgatcgaggccaaagtcaagcttctgctccagatgagtttggttttaatctggggtatgttttccagttcttattctgaagctcgggactaatgtggttctaggagcaaacatgcctggttgcccgaattgtcgtatcgctgacagttcgccaagtgagtcttgttgctttccacctgctgacaggactaaatgctatagacccccgctcaaatctatggaagtcgtcaccggggtgaaatgcttctttccggggggacatattaacgctttgacgctcccctggattggccgccggacccttcggtttggctttgatcttcatttggggtacctcaacattggggttttttttttggttgaaattaattccctgtacgggctggattctcccccttaaaaaaaccccgtcccccaaaagtgccccttttaacccggaaacccccccggaaacccctcaccacacggttcctataaaaaccctctttaaaaccccccccccccccccttttgagacaaccaccccatatattttcntttttccttcttttcgtgtccgcccc

SEQ ID NO: 14845 - DNA, 337 bp, Emericella nidulans
tcatcctctgggaatactggaagcttgttcgggcggcccttgccagctgtacccaaccgtgcatgcgcaaaggaaattctttttgggaggccttattcatctgggggggaggacctatttggatcttaaccccgatgtatgtctacatacatcagctgaccctggttgacgtgagctaacccctcgcacagggagtagccatgctaccagcatgatctcggtgcccgaaaagggaccaggggtacattctacgactgcgtataattactatgaagagctcaaatctcctaaaagattcaacacttcaatagtcttgtaacatatgctctgcaccgga

SEQ ID NO: 14846 - DNA, 536 bp, Emericella nidulans
gacaattatgggaaaaccgccgggcgcgcaaacggcatatcgaacctttttatcccgaaggtttttttcaaatcctaacatcccagccacgaggggggtatatcaaagcgcacgggtagggccaccctccagcgcggaaacctgccccaacacagtcaagaacatgagctatctccaaggccccacaagcctgggcacttactcaacgcatgagtcaaaaacatccgagacgtgaaaccacttccaggaccataagacacaggaaatgtacacatcatccctatagactgatacatggctgacgggaagcggaccaaaaggcatgtggcccaaggacgggctgcacaaggacacgtggagcttagtcatggcgcccaccaaccaaaattgttgagttgggcacgtggagccccgacaagccccacgagagggcaaggcccggttcgcttagaaaaggaacagccctcgatccttgcgccgggagggtgtggctacccctgtgccccgcaggggaaatccccagagttaggacacgg

SEQ ID NO: 14847 - DNA, 642 bp, Emericella nidulans
tacaacccaggtacaagttgggcggcgcgacaccgcaggcgttacctcctaacctagggcagggtaaatatagcggcgaacctctgggggcagatcacccgcatttgttggggaagcagacgccggccgcgcagggggcggcaaggaggactaggccgcgcgggacaaaaagactgcggcccacgcagcaaggggctggaagccgccacagaacagacactgacacgggagaggcccgacaactgcagaccgatgtacgaaggtcctcttttgaggactcccaccggaatcgcagcatcagcaacaaacccacagggcatgaggggaacaaggaaccgtcacactggccaaataggatcagggcacctcactggggcacaggaaaacgaataggcacctagccaataaaccggcaccaggaacgcctcgagccggccaagggggggacctgccggggaattggtaaccaaaccccgccccaagaaaccaaagaaaaccgccctttataccccggcaaaggggtgggtccccggcaactgaaaaactcccaccggtggaaccccctaaaaaacccccgaaggggggtagcttaccaagaccccgcccataaaggaaacccgaaaaaacctgcggaaaagccgg

SEQ ID NO: 14848 - DNA, 3017 bp, Emericella nidulans
  unsure (1)..(3017): unsure at all n locations
caaaggtgttgatgacgaggaagccctgaagaccagagcaagagtcggccatgcggtggactttgtcaagaacctggtcaatcatctccttaccgacggtgtagtgaccacgagcgtagttgtttgaggcatcctccttgccggtgatcaagttctcgggatggaagaggctgcggtaggttccagtgcggacctcatcgacgacgttgggctcaagatcagcatagatggtgcgtggaacatattttccttggcctggatacaacatgcgtgtcagaagagtgagatcgcaaaaaacatcgcgtgcttgttacgaatgcgtaccagtctcggagaagaaagtgctgaatccgtggtcagggtcttccttcttgcgttcttcggtcaagtatccatcgggctgaacagtcggtcagtcaacataacacatagccagataatgacgacgggcatatcaagagcagctcaaagcatcgaatttccatctcgtccccggttacacgtacctggatgccgtgctcaaggcagtaaagctaaacgaccagaaaagtcagcacgtttgtttttttccacacatccgacgccaacgaattttcttcttcctccccctttcctccaagatatcatagacgtgatttacctcccagcaggaattggcgatctgacaaccggcctggccgactggagagcagggaaagcgttagcagaacaaaacaagcgaggggcacgggtcacaaaacgcaccgttcaaactaatgacttctctcatcttgtctaggtgggtggtgagggttagaggtgatgggtgagatggaaagggtagaaattggagaacgagaagaagaacagaaaactaggcccagcggacgatctggagttctggacgggcttcaggggttgggtaaataatagtaggcgggaaccacaaaaagcgaggaagagatatggggggaacaacagaggggggaaccgagagtgaaaaccgtttggaactggtgggagcaccgcaaactcactattggcaacggcggaatttagcagcaaaagcaattgcttaggatccggtcgatcggacaattcaatttgctggggacaattttttttgttgttgtcgtcgtttatgcgctgtcacttatcctcttttgctgtcctgttgaagttgttgatccatcctttctgggtcgcgttgctagtggccctatttgattggctgccaaggacccgcgtctctcctagcggtgagagatgagtaagcgataaatagtcacgtgctgcatgacgcagcagctgttcggtcggggttgggagctcagacgccggattatctatggatatgtaccaagatcaatctggaaattatctttattgacttcagtcgctcgtccatattgacaataagtcttagcttcgcagccatgacgctgatggataactgcctttgagagccatcatatcgtgcattcaccgagcacattctctgactagaagcactgcgatatccatcacagatctcaatgctgaattgaacgaatcggcccattcgcaagcgcatccagtgaaccatgcggatacattcaagatgcttcttatatacatatacgtaatattcctcctatctctgcttgccagagccaatgtcgaaaaaaccattttcatcgcaccctcggcacgctctacggacctaaacctcgatgagctagggctcaaacgcctcacgcccgcaagtggcatattccggacgagactcaatgcctcattcccgacgaatgctgagactcatggcacagattcctggtattctcttgaaaacctctgtccaggacagcggtacgaggtgcgcatttgctggctggctactgtacgtcttcaccgttcataagtcgagcatcttgttctggcttgggctgacttttagactcttggatgaacagcaaccaaccgcatttactctatcaacatataccataccagaagtcctagaagaccgcgctctttccgacgccctaaactcctacttgtctgcagtgatcacgcacaatcgccaagatggtgtttcggctgttgcagatacagcactagagccggactcggtgctactccttcggatttcagccgcggcagattatttctcgcttgaccaggaattgatggaaaacgttccacccgtactagcagatatcatcctcgatccatttttaggtaatgtgtttccgaagagccttgttccgactgcggcttggataggcattgtttcctgtatggcggttgttctagcaaggtggatcgctacagaatttgcaagtgtggtgagttccactggtgtccatgaacaggcaaatggaaagaaggttcaatgagacaagagaaaacggtgtttgagaacccggaagaagcaatgctacaaccacttggcggtagttttattggatggcataaactttgcgcatcgttcgggaccctgcgacgccatacatgaccaacaaacaatcctgcctgtttgtatcgaagccaatggcttctaaattactcaaggaacataaatgcagtcaacaaacagcattctacattaacatcaaatacgtgttctgtcctcagaaagataaaaagaaaagcattagatacgtaagcatggcagcgtattattgattcgtaacgacatgggcattgaaaggtgtatgtatccggctgaaacaggaagacatctcgccaacaaatgggggaataatcgaaaagatcatgacggtaaacaaatgaaaaggagagaggccagaccaaaactactctaaaaaccaacgcaaaacaaaaagtgaggtatgcccgatggtatattagattgcgtaaagtttctaatnctccgtttaatcttcgaaaagtgcaggatggcccgaatgcctttctgactangccgtgggagggtaggccatgaaaacggttcatctcagcaccacttagcgcggactcgctctgcggacagatggaatgcttccagggcgtcgangtgtgctgagcatttcatt

SEQ ID NO: 14849 - DNA, 364 bp, Emericella nidulans
ttgggaatcgggggttcaaccaccacggtaaatgcggaccagccctaagtgggatctaagaagggcgcattacaagcttctatgccaactacacatatacaccgagcgattaattcagccggtggcatatattaacaaagccttcctcacatgattggagtcctgatgcagctgtgtatgccattcttgagcactcagtcgctccgaccgataatggcgtaccaaatgttcgatttgcattgtctgggagcgtctaacgccaatcccgcatctgtcacatgttcaatgcgtgcatggagcttcccacagccgtgtgattatggtatgctgcggaatgaacatgtccctatgggggtggattaca

SEQ ID NO: 14850 - DNA, 547 bp, Emericella nidulans
gaaaaatattgggaaaaaaccccgggcacggcacaagggagaacggaccccaaggacccgaaagttttttacccacccgaacatcaaaggcacagcgggggcgcagcaaggcgaaccacaatgggcacccgccggcgcgcagaccggggcggagacaggcaaggacaccgcccagccgcaaggcaccacgcgccggggcccggacagagcgcgggggcgacaaacccccggagacgggaaacccgccgagggcagcgaggcaacaggaaacgcacgcgcacaatctaagagggcgatacaaagcaggccgagatggggcaaaaaggcttgccggccaaagagcggccggaaaacgcaacagagaacaaggcaaggcggccccccaggcaccgccgaggagttgggaaccagggaccccgaaagcggcccaagctggaaggccggaggccgagaggcagagaacaggggcgcgagccacacaccgggaaacgggcctagcccaaagcgaccgaagggggaaacccagagaggagaccccgcacaagca

SEQ ID NO: 14851 - DNA, 1846 bp, Emericella nidulans
tagcataccatccctctgaaacctccacagcgattgcattatccttcccttccttcaacagcgggccgacatcgaacacctcgtagctcaaccgactgtgatagctcgtccacccaggagccatgcagtgatcacccacccgctccccattaatgaatgcctggaacacccccaaactggtgatgtataaccgagcccgcgccgctgcagccgggagtgtgaacgtctttctaaaccgaattggccgcaacgggccctccttctgcttgaataagctggtgattgcacgcgcagtccagtcttcacgattcagtagcccacactcgaccgtgctccaggcagaccactcggtcggtgcattatcaggacctccatacgagcggacgcggactctagcaacctctcgagactgcagcggttgacttggccatggcacaagaactgattctcttgattcgacccggtgtttctcagtactgccgctgcgagccacttcgatttcgtatgccgtctgttgccattgtgaagcggtgctttcggtggcagtaaacctccacgatatgcgaggcgatgggtagccaacgccgaagcctgtaggatgttgttcaaaagacggctggattattcctggttgagacatgatgctatggttggcctctggtgcgcgatttctttggtttacgagtgttgctccccgcatggggtgctcacttagagcttcccgtgctggaacaaatgccgccgaatattcgggctggaatagagcgaggtcagtcggcagaacttcggcggactgactcgagactctcgcaggttgcgtggtggaagttgaatgtgactcgtactccacctgtctacgcaagctggggagaatgccggagtttcggaccgcattccctggacagccccatgatagcgccttcaagacgttcgatttcgacttgatggtaaggcatcgcttttcacggagggagaatagaaggctaagctaggaaatataccctgtattgctggactagaaattgactgaaaaggaaggtccaagagctcgcccgccagatcccaatgctcgttatcttcatcgcgtcttcttacttagctagtggaatcattactgaagttctataacattgctatgctgccactactctctaagtcaatcgcaaattgaatctgtgcaagcctacgcaaactcagccataaggtcccccacagcatcagctcccttgcctcccccttctagtcgggggtttgttgtctgaatcaatatccgtcgatagctcgtaagcgcaggtgaaccgttatctgtcacctggagaatcagatgcaggacctgtccccgaaggataggttgcctgctcatcaactccacgcagcatttctctggtggaggaacggtaatttcgaccttccggcgtccatcaataggtttgattcctagatctgcgacttctgcatccacccaccactgtgttgcactagggtccttatagtgaaaccattcgaaggtcaaaacgtcaccattatccggatcataactctcagatgcgtcgagtgtgaaggtcgagcccgcctcggcctcgacctcaaagggggtcaggctggtgtcgccattgacagagacaaccggagcatgattggctgcgtcaaagtccggcgaaagagtccattgtatacgcgcacgaaagtcgttctggaactggtctctccagcgccatatagtcccatgattggtgctatatgtccggccgtccgctccgactacctggtccacagcatcaccatagtggaggctggcaaggctattggcactgatatcagaccgctggtaccgaccaccccatga

SEQ ID NO: 14852 - DNA, 532 bp, Emericella nidulans
agcaagggcgagaacgaaccccaaggcccccacactttttaacaaccacaaacaacaaaggaacaggggggcagtaacaaggcgaaccccaatggacacccccaaccacacaaaccggcccggaaacaggcaacaacgccgccaggcagcaaggcacgacgcccacgggcacaaagacagcgcgggggtaccaaaccccactagacggcaaagccacgcgagggcaacaagcaaaaggaaaccgacacccagagcgaaaagggcgcaaccaaccaaacggggatgggccaaaaaggcaaggacagacaaagacccccaacacaacgcaaccggagaacaaggccaatgcaagccccaagccacagcgcaagaggtgagcaccagggaccccggagccccccccaagcaggggagggactgggaccgcagaaagaagaaaaaccagcttcacgaccctaaccaacaaggcacccggggcccaagcccccagcccaacccaaggcgggagaccccagaggcgagccccccgccc

SEQ ID NO: 14853 - DNA, 1919 bp, Emericella nidulans
agacaggcagtcctggcatagctgtttgggtggactagattgagtgcgagcatcggctggtggcgtaatttgttctttgattccaacctcttcataaagggggttttgtattgttggggggatgccttcacccacaagctcagtataacggatactgtgcggtgccaaactgagtagggcgccctgtgcttgcacccgaagttgagcgaccgagacagccgactcaggagaactttttgagctgctagaagcggagactgatctttgctctacagcgccaacctctctagtacccgtttccagaagatctggtgatgattttgacatcggcggagatatggcgtttatcggcattggggggttataggctaagagatgttagtaactgaagtcagctgcttgccagcaggggtggaattacgggatccgctagctctactagaggcgcgaggttcatgcgaagcctcgccttcttcaaggtctgaaagcaactcgcaaccggtagagatgatggcgggacgctcatcttgagcgtgaagcccgttcaatcttgtggactgagactgcccaatcggcagcctgttgtccccttcactaccggctctgcgagttggcttactgcctgaaatatcgccgcgtagacgacgcgcttttttttgcgagtgaggctgctgctcagccgatgcagcaccttctatatccgttaattcgccttcttctcggtccaaatcctgatttgattttgtagtcggcgtggggtgctgacccggtgtctttcttgccgaattgtccatgttgttcgttgacgcctggttgggacgcatttgtgaatgtactgacgataatggcatcaaaggataccccacgttcggcatgtttgcgaatggaggggcgctcggtgcaggagggaaagtgctggggaaagcgaacggaggcggcgggaaagtaccagttgcgcttgcgcctcctaatcccgagaggttcgcattcgcatagaaattatgaatattgcgatattgctgtggatcaaacgacggatccggattgaattgaatatcatgaggaatagatcctgatgaaggggctggttgagtggcccattgctgtgtatagttggctccccagtagggaggcgctggaggcatcggttgacccgacatggtaaaaattagcgcgcttttgagtatatgtgaagcgaccagctggcgatgagtatatctgtggtagatcgattaagttccgaacgtctttagacatagcacactactgggattcatgtactggtgacacggcgcgtcaagtaaaggctcgacatccaaggctcctgcgatcgctgtttaaatatcaataaacatatacgcactaagcaggtctcatcaatataaaggtcagagcacgatgtcaacaatagggaatagaagagcagagataaaagtgaacagagcagatgcaccgctgacctggaacttgagagcatcaaaaatgctcggatcgagtttcgtgccgcacaccacgtgatgcgtgcacagatgatcagattaggcttagcgtaatcgataaatacttatgcctgaacatcgaggcatcaaacagctccaaggcggcggaaccagatgtaaacaaacacaaaccgggccaacggtggggagggggccactgtttgggtgcatttcagccaacaactgagccagatttgctatgacccatgatcgtcttgaagtcttgatgccctgtgcacctgcgtcagtcctctaccttacgtcgaactccatctcttgtcaacattctgattccctgcatctcgtgcctttcgtgatttgtatgctgcgctgagcggatcttacagctcgttctgttgagcctcttattctttatatttatctattgtcctcgcttcacgctttttgatgcatataatg

SEQ ID NO: 14854 - DNA, 2562 bp, Emericella nidulans
  unsure (1)..(2562): unsure at all n locations
tcatctgtagatgagaacaaagattacaacttaatgaaatcacgaatccagaagcctactgccatagaggaggcgaataaagacggtgatggggaacaggacgaagactcagacgacgagattgacatgatcactgagcgtacagtgacaccaaaacccaggccgcagcgtcctctcatcaatcccggcgaggctatcgtgctcgactggaataccgatgctcatgaggctctgttttctggcgacgttcgggatcccaacggtcctcggggcgctcccacgtggacaagtattgaacgcatgccagatccagagctggctaaccgacgtgctttgcggacgaggcggaaaaagaagggagtcactctcaatgagtgtctagacgagttcaacaaggaggagattctctcagagaacgacgcctggtattgtccgcgctgcaaagagcatcgacgtgccagaaagaagttcgagttgtggaagacacccgnatattcttgtcatgcaccttaacagatttagcgccagccgtgggttccgcgataagctggatgtcatggtcgattttccagtcgggggtctggatctaaccggccgcgtagaggcgcccgaggagggtaagagcttagtgtatgatctcttcgctgtggacaatcactacggcgggcttggaggtggccactacaccgcatacgcgaagaacttcatgactggccaatggaacgaatacaatggtaagttgtttgttatatggtgtgagtattgctaacatctacagattcatcggtttcacggccaattgacccccagaatgcggtcacctcatcagcatatctgctcttctaccgccggcgctcggatcgtccactcggtggcaagattctggaagagatcaccgaatcgtccacccggccagccagtgaatccgactcgcaggaatcgcgcgggccgtctccgtcgggggaaggtcggcgtctcggcggctcctcccgcaatgggtcgtcgagcgccttagccggagtcggagcagctcaccagttgggagatggtggtttgcgaaccggagcgaagagcagtgaggatgccaatcccccggagtactcgaacagcccgtcgtatggtgagcgcagctcggcggtacaggtatggacactatgacctatgaagacgacgattacggtagtgggctgggcaacaacgacacgtttcgcctctccaatccctcgccctcctggtcgttcagtcgagtcacggatgctcatcatggcctttcacagatgacagagctcccgggatccctctctgatgatgacaacgacgacgacgacgattcgaacaaggctgtaggtggtggcgacatgagcgataccgacttgcgcctggcttctttagcggatagtccgttccagggtccagtctaccccgggacaccgctagatgagacagccccaacgctgacgacggaattccctcaacacgatgcggacgacgacgacctccctgtggtggaactacacgtgggtgaagaggaacgacttgactgattagatttctttcattctttctttctacgaattttggatgtgaaaatgagatgacattctagacgcctgtcatgaggacgacaggtatggtgcataggcacgcgcatacgctcgggctctgccctccctgctttgtttttgcttgttttcgatggacgggatctataatatattcctccttccctgtttctgcatgtatgtccccaaaagcttttttctctttttgtgacaacttctagagcagaaggtgtcaccactcgccaaatcggatgtgatgtgagacggatggcgatatggagccttgctgtgctacgaagaggagcatggcatgccatgatgtcggagtattgtgtataggatgagtcctcagctagagggtatacggcaaaagatcgtatgaactggcttttcttgtcaggctcgctactatgattacatggtttggggcagagtgtagtacatagtagccagccaatatgagtttagaagtaatggactagaccggtggggagtcagctaccagtttattatcactcggtttcttacacatcagtttttccttttcttttcttttcttttttttttttttttttttttttttttttgctagattatattctgcatgctgatatgttgaagtgctgccccttctcgtacctagaggcttcatcgaccaggacaccctgcatatctacaggtcacggctgggaagtctggttatcaaaataattaatattattttccctacaaacgaagatactctttgaaaagaaacgcccttatgggccagtgcaggtagtagttgtaagttgattgcactctgattagtcaaattctgactccaacctcgattaagtataatttgtctcacccctccctctacatcaacgcctttatatcccaaaaagaacgtgtaaagaaataaaaggagcaaaaaaaaatgcccacttatatccacgaacccccctataccctcctcctcacctacctctcctcacacctcccgcgctccggcccg

SEQ ID NO: 14855 - DNA, 991 bp, Emericella nidulans
catagctaaccaacacttctagaatttccagagctcacatgcttacttatctaactgtcctataagcattatttgtgttctccggcgatggacgatgctggcacatcaatggcgccgcttctccggccggaatgccagccggaatgaaacctggtctcgttctctaacattaacagtcaatctcgtacccagtagaaaagctctggacaacaaagctacaattcaacatagtgcttgacgtctatcctttgtcaccttttcgacgctgattcggttgggttttttgcatcctctggtcattatcgaagtgtgattgttgcgagcagtgggcacttgaactaacgctcggccagctattgatacctgcatattcgttatcatcgaatttaaacggtgggagcagaaaccacaacaagctgaggcagaggatgccgcctgaaggcctgttgggaagacgacttcatgcggagagattcgcccgtgataagatttgcgggtcatccttggttgtaagggctatcggggagaaatgccagttgcccattcttgtctccaaaaggggaattgttcatgggatgcttggaaggacattagccagtcgcctgaccgtattacttctatgtcatatataaaaagtgaaagtcatcattcattatccaagtattatacaagaattacaattaaaagatcctacccccattccactcccggacaagtgcccagcattctggccaccctatcaatcctgtgcgtcatccagccgctctccgcacccatcttctcctcgccgatccttgcatcacgtccaaacgcgcagacgccatccgctctcctcacaaaccgtagacaaaacctgtcgctctcacagagcttcttgcacgcctctgcggaatccactttccccttctcctcggctgccccattatccacccccttcgtatcccatcagcatcttctgagaccatctccggacgcgccagtagtaaaagat

SEQ ID NO: 14856 - DNA, 530 bp, Emericella nidulans
gacgagcagacggccaaaaccaaaggcgctcagccggcactttttgacgagcccgaacaagaaaagggcaacgggggcccacccacgaacaccaagaaaaccacgcgggagaagagagccgcgcgagaggagaggcatggccccaggggggccacacagcccggcagaacgcagcaggacgcgagcaacaaggcgaaagacaccgaggacgggcacggggcgggggggtacacggaaaaaagcacgcgggcccaacgggtagcggccggaacccaagcaggcagggagggggcaagagccagggcccagccaataccgagggaacgccgaacagaggggaagccaaactaaacaaaaccaacacggcccaagacacgcagacggggagccccctaggccgggaacaagcagagcgggcctgggccgaagaaggaagaaaaccccccggcagcccaaaccccaagacaagggcggcaaaaggcaaaccccccccacggcaaaaagcaaaaggcatcgcccccaacaagccc

SEQ ID NO: 14857 - DNA, 601 bp, Emericella nidulans
gggagcaagcgctggctgcacggaccggtccggaattccagggtctacccacgctgtcaagcactcgatcggtaccacataaatggtgtaacattagttccgctcccaatacactgcttatcattgcttgttttaggaaatttcccgacctatattgcgtttatgatatatcggaggactcacaggtgagctactgtagctttacaaggtacgtccgccgataccttttcttaatgcatcacgagatcatatgcctccggtccgcgactgattaagttgcaggctaaccagcgaatgcagactgagccatttatcttctaaagtgtaaccagaacatcatttcaatgactgacattttacgaatgtagtaatgaggaaaaactttgacatctcccagctttaaagccatgtatcagctctatcgttggacgttactgacataaaaataaagattgaaccgaatgcaacaaacaccgtgtgtggaacggatagaataacaaactcaccttgtgtggaacttacaactgaacatgtgaactttgacatacccggcccttttttgggaactgcgtccgataaactgatttctatttcaaggcat

SEQ ID NO: 14858 - DNA, 381 bp, Emericella nidulans
ctggtaggctcatacgggggggggtttttataaacacgcggtggtttatacacatgcatacacgtgccactagtcattcttatgggggtcggacatatgaacagagccccagcccacgacggacggagagagcgccattaatggagtgattttcatctcgaaacatgtcgaccttccggactcttgaagcgggaaggccctgctcaggagattaacgggtgttcgaatgccggacagagaaagacccttacaatatattactatgacattggcctggattcgtagaataccggaaataggtttgctacgggcggaatgtgggcaaggagctctcagcacagtacggatatagtgaatggtctatggagccagttttttggg

SEQ ID NO: 14859 - DNA, 357 bp, Emericella nidulans
tttacttgagtcatgaactcggcctgtggtgatagtaaggaggggttttaaaacacaggcagcaaaaagtagagctaacaacacagtgttcaaacggggaattttggtcctgaccaaatttaatgaaagggtatgtatttgtacagagggcatttactgtcacttggttcaaaccgctataatcccattttactcgtggtatggcaccatgtatctacaggggtgatttggtgaggtatgaacatataatatgtttgcaccgaaggagaaagttaactcatatgactgcgataatagcttggaactctaggctggaacaaattaagtaagtaccttctcaagcatgtgtgaaccagt

SEQ ID NO: 14860 - DNA, 1822 bp, Emericella nidulans
  unsure (1)..(1822): unsure at all n locations
acacttctcctgattctacgcacggtcttcgtcaaagccctaggctactctgaagacgcgctctcatgtcccatcatcggaatcatcaacacctactccggattcaacccatgccacggcaatgtgccgcaacttatcgaagccgtgaagcgcgggatccagttaaatggcggtcttgcggttgagttccctccaatcagtgtacacgagtcgttttcgcatccgacgagcatgtttctgagaaatctgatgagcatggatacggaggagatgataagggctcagccattggatgcctgtgttatgatcggcggtgagtttactttcccgatggcggatgggactaaaggatgtccttaggatgtgacaagactgttcctgcacaactgatgggcggcatatctgcaaacaagcctattcttcccctaattactgggccgatgatgcctgggagtcatcgcgggcagaggataggtgcttgtacagactgccggaacaactgggctgctttccgtgctggcgaactagacattgaagaaatctcaaccatcaatgaagagcttgccccgacggtgagttgggatctggacgtcgagtcggttgacccagactaaagagtctagattggaacatgcggcgttatgggaacggcaagcacaatggcgtgcatcaccgctgctcttggtatgatgccactacgcggagcatctgcaccagcggtgtcgtctgcaagagctcgagttgctgaagagacaggtgcgaatgcagtaagggcagcaaacagcaagtggaaaccacaggatatcctatcgaaggagtcttttctgaacgccatcaccgttctacaagcaatcggcggatcaacaaatgcagtagtgcaccttatggctattgcgaatcgacatccaaaggtacagggtgtgataaccttacagacgtttgaagaggttggatgcaagacaccgctactggtagacctcaagcccagtggcgataactacatgactgatttccataacgccgggggcatgttagcgctcttacatactcttcgacccctcctccatctctcagccatgacaattaccggccaaacgataggcgagctcctggatgcatcgccattcagaggtttctccctatcccagaaaatcatcagaccactctcagaccctctctacccttcatcatcgctgatagtgctgcaaggaaatatagcgcccaatggcgcggtcatgaaagcctccgcctccaaagaccgcagacttcttacgcacaccgggcctgcagttgtctttgagaattccgccgacctcgccagacgcattgatgacccggatctcgatgtcacggcagactcaatccttgttctcaagaatataggaccgatcgggaaccccgggatgccagaggcaggactcctacctatcccacgtaaactagctgccgcagcgtaaaggacatgcttcgaatctcagacggccgtatgtccggcacagccgagggacgatcatccttcatgtatcgccggagtcggctgtgcccgagtcaccgtttggtattgtacagacaggcgaccttattacttgtgacattgagagcaggggactgcacctggagatatcaggggaagaactaaagtcgcgaattggggctcggaaagcagcggctgctgtaaagccgaggcagagggggtatcgggggttgtatgagcggtcggtcaatcaggcgcaggatggtgccgactttgattttctcacggcaaacgggggatctagggattagcttaattctcttttctaganagacttaataagttgag

SEQ ID NO: 14861 - DNA, 545 bp, Emericella nidulans
  unsure (1)..(545): unsure at all n locations
gggccggcatacaagagnngattcaaatcgatggacccacttctaacccagccaacggagcacccagccagagggggctagttacacccaggccaacataccacccgaagggatagacccccaacccctcagagggacgaggggaacagccccctccccgacaaccaacaatcgagaccgagccatgaaagcccaacgactcaccacccattacaacttaccatcctcaaacagcgacaaaacgcctccgcaacaccgaccgtcaaggacccaaacacggcccaaacggccaagaagccatggacctagtctagcaggccccccccagcggcggacggtgtacaacgcgccaactccacccatccacactcacccaactcatgcaaaagactcatgctggaaaacggcccggcgtaccccgcaaaacgcaatagaagacgcgccaggccaaaaacccgagcacaaaagaagacccccgacaactccagctctcaaaacaaaactcgtccggaaaaccggaccaggaaaccccgcacaaatgccgt

SEQ ID NO: 14862 - DNA, 390 bp, Emericella nidulans
caacctggaggacctgcctctcagcggggtttatttgaccttgggggcgtgggaaaaccacaatataccagccccacgcttgcatcaccgggttgtctgcggcgctgtttgctctgagtgcaccaaggatctcaacacggtcggggggagcactgacaaacttccattatagaggccatattcggagctatgttaccatttgaatggcgcataggaccagagcctatgacctgggtgggagttgtctcattatgaagcaaaagcttaatattattctgaccgtatcgggctttaataaacactagcattcttttgtttcttccggccatagcaagtgccactgtaacaggaaacttagccatatggtaactgcctatgatagtatcttca

SEQ ID NO: 14863 - DNA, 473 bp, Emericella nidulans
ccccaggagaggcacaagaaggaacaaaccccaaggaaccgacgccttatacgccaaaccaacaaccagacaaccacggggggggcgcaaagcgaacaggaaacatcacccacaagagcgaaacccagagcggacccaaggacaaacgccgccgggcacgaaggccccacggccgaaggcccacagaaagcggggcgggaacaaacaaccggagcggcaaggaacaaccaggagcagacagcgaaagaaacaacaacagaacggcacgagggcgcaacgcggaaggacaaaccggaagcacaaaggcaagggacgacaagagacgggacgcaacaagaaaacaggaaaacacgggcatgccaccccccagaaccacccgaggaaccagggcacgggggagccaaaacagggcgaaaaaaagagcgccccccagcaggaagggcaaaagacccccaggggggccgaacggaagc

SEQ ID NO: 14864 - DNA, 7174 bp, Emericella nidulans
gcggcaccagacggtcgaatcgtaaattcgtatccatccacgttgaccctcctcttcggcccgaaatttatcaggacccggatgaagaggtgcaagacaagattttgttcgtgctgaataatgtatcggagcaaaatattgacgaaaaactgcgggatctgacagacgtcctcaaagacccccatcatcaatggttcgcctcctatttggtggaggaacgcgctaagctgcagccgaatttccagcagttgtatcttgaccttttggaccgcattgatgacaaaatactttgggttgaagttctccgagagacatacgctagcacgtcaaagcttcttaattcggaagcaactctgggatcctccaccgaaaggggccatcttaaaaatcttggttcatggcttggatctttgactatcgctaaggataagccgatcaaacacaagcatatctggttcaaggggcttctattagaagcttacgatagccaacgactgacgattgtgattccttttacctgcaaagtgcttgttcaggctacaaagtccaccgttttcaaaccaccaaatccttggctaatggacatcatcgccctgctaatggagctctaccacttcgcagagttgaagctgaatctcaaattcgagattgaggttctgtgcaaggacctagaaatcgaccacaaggctatcgagccttctgttatcattcgtgaccgttcaacgaccattgaagagtcgttgtcaacagccaatatcccagaaggcctcgaagcttttgaggatatggctcttaccagcattagccagagcatccgcaatgagagactctcccctgctgctatcctgtcgacacttcctagtttggataagatcttggtcctaccgccatcggcaagcagtatggtggattcgaatgttcttaggcagattgttcactccgccgtggaacgcgcgattgctgagatcattactcctgtcgttgagcggtctgtcaccattgcctcaatctccactgttcagttggtttccaaagattttgccatggagcttgatgaggagaaattccgacacgcggctgccaatatggttagacaacttgcgggtagcttggccctagtaacctgcaaggagcccctgaaagtcagcatgaccaactatattcgaatgatccagcaagaatattcagatcaacctatgccggagggacttattcttatgtgcgtcaatgacaacctcgacgctgcttgtggcatcgttgagaaggcagctgaagaaaagtcacttcctgaaattgagaaagtcattgaatctcagctggaagctcgtcggcgccaccgggcagcccgcccaagcgaaccctttattgatccgtctatgacccgctggggtctctttatccctgaaccttaccggcagactccaggtggtctaaacaaggagcaactagcaatatatgaggaatttgcccgtcaggctcgtggtccaggaaccacccacgctcagaatgtctctactgattctggtcggcaattgccggacgttctccaagaaccatatcccccaatcccgaatctttccacccctgcagagcagcctgctgtgcctcacagaacgccgcagccgcagcaagatacccgactgcaacagtccgccctggttggaacttcctctcaactcaacggcttccttgaaacgcagaatccgcgtgacagagtggagagtctcgtctccgatcttcagcaagcggcacgcaacgctaccgaagagcacgtgaaaagatctcggacgcgacagtgctgttcttcaagaatagcaaccaagcattgcgatccattgtagcatcgccaaatggcgaggaggtggcccgactgacagcactcaaggcatgcacaagcctttactcacagactaaaagcactttagagattgaagtacttgtgcacctgctggccaagttgtgtgacatgtctgccttggttgctcgctatacctggactgtcttggccgaagtcgatgatgagcatatgttcaacgtccctgtcaccgtggctcttatagatgccggacttttggatattcgtcgtgttgacatgatcttgtcgaggcttatcctccagaagaacgctgctgcattggacgtcttagccgaactaatggaccaaattctatttaacgaggagccgtccgctctaaggtctgatttctctggcagccttgaagcgatgagcaaatggcttgccgaagattcaggtcttgcccgggccaaagaaatcatcaagaagctacgggactctggaattcccgaggtcgtgaacccgctactctcggacaaggctcgatcgaaacgagatcagatggagtatatcttcactgaatggattggtatctataaggcgccgggcgctgttgatcgtacatactatgctttcttgaaagatatgcaccagagacaggtgatggccaaccaagaggattctgcgctcttcttccgtcttagcatcgatatctcggttgcacgatttgaacacgagtcccagaacccgagcggtagcttggacgaggcgttcctctatatcgacgctcttgctaagttggtcgtcttactagtcaagttccagggcgagggcaccggtcccgtgaagaccagcaaatcggcgtacttcaattcaatcctgtccgttctgcttcttgtcctgaatcatcatcaggtaatgagaggtgaagcattcaaccagcgggttttcttcaggcttttctcaagcatactctgtgaatactccatgagcggtctgcagcacagcgaccagcaccaagagatgatgttcaccttggccaacaaactgctgtctcttcaacccaagtactacccatcgtttgtttacggatggttctcattggtttctcatcggttcttcatgtccagcatgctcaacatgccggaccgagcaggctggggaccatactgtgaaatcatgcaagttcagctgtcctacattggcgagcagttgaagtcaacgaccatgactcttgttacaatggatttatacaggggcatgcttcgcattctgttgatcctccatcatgacttccctgagttcgttgctgaaaatcactttcagttctgcaacgttatccctgcccattgcgcgcagcttcgcaatttggtcttgagcgcttacccttcctcgttccagaaacttcctgatccattccgcgaaggtctgaaagtcgaacgcttggaggaaatgcgagaggcaccaagaatagcaggtgatactgccggcccattgctacgtgccggtatcaagaacgtcattgataatgcactccagagcaacaatgtgtccgactcagttatccagcaaatccgtgacgctgtctatgatacggaaagcaaggaatcaggtctctttcacgctccaatcaatatcaacttactgcttgtcaacgcactggcactttatgttggccagggggcagtctctgtaaatgaatcaaagggaaatactcgagcagcatttgagagttctgcccactcagcactgctagagaagctcgtttagatcctgcggcctgaagcccgctattaccttctgagcgcaatggcaaaccaactccgctaccctaacagccatacctacttcttcagttttgcgatcctgcgccttttcggtacagattacacggagcaggatgagtcggatattcgccagcagataatccgcgtgctcctggaacgacttattgttcaccgtcctcatccatggggactaatcattacccttcaggagttgctacaaaatagtagctatgcattcttccatcttccttttattcaggctgcgcctgaggtaagtcactaggtccctacactatcaggtatagctctaataggcatcatctagattggccgtttattcgatgctctcctgcaacacattcaacagcaaagccccagggcaataacctaagcggtgcaacgatgtccgcttgctagcttctctgtcacaatcggacagtggatcacacgacaatcgacatagtaacgtttacggcgttttagaatgccgctcatgacacgaagtgccaaaacctagagcacggttgtggggatatggaatgagcccccttcttgctctgcattgtttcacgtttgttctccaattaccatcatttctcggctgggttactgggagggatatgcatttttaggacgtggtagcatgttctaagtttatattttgtttcctttacatcctttaccttctcttctcttggtgtcttaccattgctacagccttgtggtggtctgtaacgataagctataaaagatggtcttaatgagttctgatttgcattataatggattgggtgatcactttggatcccaggatctcgcttcccgcccccttgttgctcgagattccagattttaaatgtagtaaacaaattgatggttttgtatccatggatttggtgtattcgcttggttggaccttttgggtatgggtatctatctcttatcgggacagtgacgtagaccctttttggccaagctcaagcctctctccccaatacaatcgccatcacctctcgcccagtcttctgtctcagcggccgcaacggcgacaatatggactcggataactcctcggatgaaggtgtccaaactggcccttcttttgccgctaaagcgacggtgaccattgccattaatcattacagtggagcttaaactgacattaaacaccaatcttttaaaggacacgctgctggagcctttacgcgtcctagtttccagaaatgccctgacggcctatctgagtacttttatgttctttgcgactgctatatgcatgatatttgtgtccgccctcgcatacggcgtgttctactacaacttcataccgcgagtcggacttgagcgcattgtccatttacagttcgggttggttcctactggtaaaagcctaccaagtgaattgagctttgtgcaactgatttgtatcattgttcatctagagatggccatccgtggggcatcgcggctctcgaatcgggtctgatctcgtcccaagcgtacgatgtccatgtggaactcgagctcccccgaactccatcaaatctggctaccgggaacttcatgctagatctgacgctgctgtctcaatcttcgacgtccgctcggactgtgggggaaatcaccgcgccgccaatttctcactcccgtcgccccgcaatcctgacgtatgcctcgcctctggttgatatctcctcaaaagtctcatttatgcctctatatgttctaggctggaagcgcgaggctgagcggttggctgtaccgatgatggagcgcgttgagttctctcgggggacacataatgtccctgatactctgcgactcgagattcagagtgaggaaaagatgcagttctattcagcgaaggtgaaatttacggcgagttttactgggttacggtacgttcactccatctcctgttcatccagtagtgtctgatgaagttgcaggtggattatgtatcactggaggatcccgtcattctttgtcttcagtttcatgttctggtccgtctctatgctctccttttctctctgttggattcttcttgcttgtttgtccaataaggatgtgaagacggaggaagaagaagaagaagaagaaggtggtgtcaaggaagaggaggacagtggaactgaacccacgatcaaggaggagcaatctgagaagcttggtcttctggatattgaatcaactgccgaaacttccgacagggaaagcgagaccgactcagacgatggagtgaaccatctgtatgacgtggggcgaaaacgcagaataacgacagccgagtcagggccgttggaggctgctggatctggaacagggacagaaagcgccggtccttcaggtgtccaacgaaggcaaagcaggttatttaaggaggaggatagctagtacaattaaagaacatacgagccgattcccagaattaattaatcattatcttgttgtctccaatcaatcatgccattccgagcgtgaatggtgtttctacccgacggctatcgataacaagcgggggaatccctcagtctcttcacagtacttttcacctcttcctgcatcttcagcggttccccttctgctgcacggtgtacgcaatgcatattcttgtgggtcagaattattaatcttctttgtctcaggttaacagttttgttacgtaggtggtgaacgacgacggccctccgtcgaacgaatcctctccgtatgtccattcgttcgtccacacactacagtctgctgggcacaccgtctcagtagtccttcctcatcagcagcgatcatggattggtaaagcccatcttattggcgctgccgtcaaaccaacctatttccggcccggaacgctgcacaaagatgatggcacaacgcacgagtacccgcgcggcgacaacgacccagacggcgacgagtggattcttataaactcaacccccgccagttgcgtgcagattggtctctatcactatttccaggaccgtgggcccgttgacctcgtggtatccggacccaattatggccgcaataccacggcacttttcgctatgtcgagcgggacaatcggcgctgcaatgcagggcgccgcatgtggaaaacgctcgattgccctctcgtatgccttcagctcgcgcaatcatgaccctgtcatcatcgcggaggcgtctcggcattcagtacgggttattgagtacctcgcgaaaaactgggatgagggtgttgatttgtacagcgtgaatgtgccgctggaacctggtgtgagcgaaagcaaagtaatgtatactgagatgctcgataatcggtggtcatccgggagttgctttgacgctgttgatgccgaggtaccggtagaaaacccagagcagcgagaacagaccctgcgggatcaggaggagaagctggaagaagatcccactgcgaaccctaatgctaagtctggaaggaaatcgcggattgcccataagcattttatttgggcaccaaagtttactgacgtctatcggagcctggaggaaagtgcgcctgggaatgaaggctgaaactgtcaaggagggaatgacgaggtatgtcaacaccaggccttggctcg

SEQ ID NO: 14865 - DNA, 338 bp, Emericella nidulans
gcgaggcgaatgagaccgatcctcatacgtgggaccatcttttttggaagcgcggaacggcaaactccaggtggcgcttgcttaagaccagactgcggaaacaaccacagcccaaaagggcaggcaaggccaactgccggattaggcacggtagcttactatgcttcatgtattcaaaccaaccaataaagctagaccggaagaaccaaaccttgactctaaccataggattggacggctgatgcaacaaattacgacaaacgcgacaccacatagacattccaggctgacccaagcactgtaggcccacccgctgggtagacaacacatcccaaagg

SEQ ID NO: 14866 - DNA, 514 bp, Emericella nidulans
gacgatgtagactctcctcctactgttattagacggcccaccctttctcgaagcattccatggccacgtccgcagggggaattttattcctgggtggtcgccatgcaccaatcgagcctccacccaacatgcgggacgggctctgaagacacccactcacaagggtccaaccgtgctaactgggattctaccattcatttgactgctttgcaagggcctctgatctgtgaactgtgttttcacccatatgatctatggggagtcaccgagaccttatgaatatgagcctgatctagctggccttaaccgaccgcattataggtctcatctaccatactcaactgcctccatgatccacctattctgcaacatgcccttgacctgacctgaagagagcacctctagcaactaggatctaatatacgcagtgccaacccgtatggggacgtaactacggcctgaagctcctgccgcgattcaaatgcaagtcaagcacttccaggacctgtgccgt

SEQ ID NO: 14867 - DNA, 857 bp, Emericella nidulans
tctcattgaagagggagaggagctcagtgctgccgactttgtagggagggtgtgaggcgcggttggaggggccgcggcgcggagggcgcgtgcttgacggcgggcttcggtgaggggggctgcgagggcgccgccagctagcaagattgaggagatggccgcgatggagagcttcatcttgctcggttgcctgattgctggttgaagtgaagagtgagaagttgtgatctgtgatgctttgcaagagcgggaatcgaacctgtatttatagacgagaagtgtcttcaaatctgtacataactcttgactcttctcctcacgcctttgcaaaatgatatctcatcacggcccatgtatgcatccatgatccgattgactgacgcctgtctgcgcgatgctaccctcatctacctcatgaccggcagtaaccagtgaggtgcgagggaaaagcaagtccacacggaagatatcaaaagtaattaatccggcgacagttagtacaggcaccatgcatctatcccagatggccctggagcatgaagataacgaaatggcggtcatggattggctgtagaagaacatgccctaactgaccgacactataccggagagaccagcatcttccgacttgggcaggtttgcagagtatatagaacggagcataggatcactatactcgggtggctattctggttccatcagcgtaatcttcaaaagtgcgagagagggggtacaggcgttttaccaggatggcccgattgcgataacgagcacgacaagcatcagcaagcttcggacaagcctcttagcgaataacaagcaggctgggcaagctcggcagcagactaaaggaggcg

SEQ ID NO: 14868 - DNA, 533 bp, Emericella nidulans
  unsure (1)..(533): unsure at all n locations
gctcctcgncctcattctcatttccatcctcgtcctaataaacatcgctcgtgccgacttcgtcgggcggattattttgtcgaaggggtatatattggactgcgctgagctatatcgcgagccgggcgacgagtcaagtatggtgcgcaactgcgtccctccgtattcagagcgcccaactacggtatctcggtctgagtccgaatcgtaatcttcaggctggtcctcgtcgtcgatgaaggagtccatatcctcgtcctcttcatcgtccatttcatcatcgtcatcctcatgggtagaaccgtgagagtcgaaatctgaatgtccgtggaaatgttcgtagattgcaccagccattcctcctgggacattggcaaatccagggaaactttgtaaccgaaagccacgtgggaagtcgctgtatttcggggggaggtctttgttgtcaagggcatcatcaaaccacttcggcgcctatcggaggcctggtgctttccccaaaaccggcaacattttatttcttgcggatgggg

SEQ ID NO: 14869 - DNA, 589 bp, Emericella nidulans
ggtggtatgggttccccggatagaattccacccctgatgaggggcgcctccagcggccaccagggcgcgtttttaagaaattggggtggtaacgaaaaacctagcgacctagacccacgtcatccctggttcgctgaatccagaactgagaccagggttctgcgatcgagcggcctgaaaactaacgtacaggagaagcgaaccgccataaacgtagctctcttctaccgggcattggaaacgcacattcgtcaaataggggctccacccacgtgccatctaatatgatcataatctacaatcgttcgaacactcaactgactccgcaaaacttgctctagttctaccgatgcctgggctattgacccaaagcgaaaaccaattgcccaattctttcaaacacaaacttctcacaatagggaccccctctgacgttccgaccagttaatataaaaatccactgcccccgcaaggaaatatacggggccccaaggggaacatgctcttcttgctggtggaccggtggaaaacccctcaattcattaagggcccaccggaaaatgctcaacaaacttcattaattacccca

SEQ ID NO: 14870 - DNA, 499 bp, Emericella nidulans
cagggattgtagacaagaacgacgccaacggcagccggccgacacggacaccgagaccgagcagcgcggataattgtagcagaacgagcaggacggtgccaaagggcagagccccgcaacaaagatagaagccaaagaggaggaatgggaccacaaggaacagcgggagcccaggctaatagacaaagggccgaggggcgccaaacacacgagccggctaacggatgaacccgacaacagccaggaacggtcgacccaaaggcacccaatggagaagcacaccgcagtgcccggataagacaacacaaagaccggaaaacccgcgacgcctgccgcaaacgaggaccgacaagggctcaggtcggaccgacagaagagaacgcccaaaggcaaaaaccgggagggagcgcatacatgcaaccactacagggcagaacccgctaggaaccggcaagagacggaagcgaacgagcaacatggacgacagaaatgcacatga

SEQ ID NO: 14871 - DNA, 2506 bp, Emericella nidulans
atagtgtagatagatgttggagaatatagaaagcttaggactgggcaagcctgggtggcacaacgaatttatatgataacgtgcagctcggcttacagcaccccacgcataggacagctgaatgccgcagtttccacacagcggtggctgcttttgaggctacctgagatatggccctctaatcaccgtttgagaccaattgggaagtcaggatacaaagcctcgagtttgatctgtgacgaatcttgcacggtgtcatgggtaccgagacaaacaagtcattagttggcgtcgaagcctaagaactgcggtctgaccccccaacaccgcacgttcttcctcagccagccaaatcagaaacgaccgaagatatagccgattggtggttaattcatgaagtctattcggcagtttatcaacatttgcacatggcagttggtccatatgattcctctaaccccccgactttagagcttcaagtatctacctggcagcgccattctgcatgtcatcacccccgttggccagaatcttccatacgctatggccgcgctttcgtggctaaactgtcgaggtctaagagattcggtagcaagttcacaaagaaaagtcgcgaagtcttgccgtctgcgaagatcgtatcatatcggtgctggtacagagataaaccacctaactgctttcttgtctctgtttgcgatacgctctttgcttttgcagaaggggcctctttgatatctttgaagtgttatttttcatatattaaagtgtcgagcgcgccgtcgcccaccccagtcttttcttctcgcggccttccaggacggagcaagtttagtattagatccctcgttcacacctcatgtgaactgatgattatcgtggttttttttcacagttatttcccaacgtcccagttttgagcctaaaagtcaacgcgggaaatctgcatgattccagcttgttctttgtctctgttcgggtacttatgacatctttaagagctgagctgcatatacaagcgatgtcccatgctaccgtatcatgaagtgctgatcagtggtactaagacgctgaaccacctctttcaagtttctaatcatttagcagaggtcgcaagctgcaggaacccggaacaatacatgggaatgtcctagaaaagggatatgtatcagggttgcagctttgcggttcaaggcgatctatccatggcttcaccttgaagatgtattaaatactcatctataaccgcgcagaggcagcgtttagcttctgtatcacctctgccgctgcccgctcaccactctctatagctccttccatatatcccctccacctaaccgccgcctcggtcccagcgaaatgcaaattccctgctggctctcgaatggtctctccgacagcatccatcaccccaggggtcagcgcaatacagggacatccccatccagagtacgggtcattcacccattcgtaaatcaccaggtctaccaaatgaccagcggcttcggttttggcgtcaaacagtttcccgatttgtttaatgagtgctgctttgcgaccatccgtaggcagtgcagcccaggcacggcccaaatcagaggccatgaagcacgtgaggatatatttcttgtctgggagactgctggtgtggcgtatcacagacgccgggctggcgaaggactggataagaccgcagtagcccttctctacccagaatggagtgcggaaaatcatcatggctttgtgtagtagccgtaattggaggactcggcccacagctgcttcagcgcggggagcttgggggagaagtccatcatcttgaggacaggactgggaacggtgataatagctttgcacgcttgcagtgtctttttgtctgccgcacgacctcaaccccgggattgcgcccttgagtgacgctgaccacgggcgagacaaacgacatcctgaggaagagtctcagcaattactttggaaatcatctgcattccctgccggattcgaaggtgttgtcctccaccctttctgtcagatcgcatctggagtaaaccaccgccagctttgcagtatgcaatgaaccagagagcagagatgtcgcgtagatcctgccccagcatggcacggatccagacagcggacgtcgcgagagtctccttgccagcactgcgggaccaaagataggcctcaaaagtcatcgggatcccactctgtgtttcgaggacgaactggatcgagagtggcagtctgcttcgaccatatcgcggatccgggcgatatcttggagagtggcagcgtcgaactaaaccacgttagttcatacctctcgctgctcgatgaaagaacaaatacctttggcagttccccgtattcgaatgttgaacagtctccgtcgacgtcttgtagcacgcacagtccggttgtattctgctccaaaatctcgacgccgaatctcttagccagcgcatagaccctgctctgattcacatcatttatccacgctgctcca

SEQ ID NO: 14872 - DNA, 1351 bp, Emericella nidulans
tcttcgtatgtcacacctatccctggacctagggaggtagaagtaccattgccaagatgaactttggttatctgtacgcgctggccgcccgaaaaggctggatctttgatgtgattactcgttataaagagctcgccacttccaggaatgaatacacctgcttcatgggcgaagggatatgcttcgttctcgacaggaagctcgaggatcggagattcgccgatggcacgaaccggagctgtggacgacaattgggcttggagatggcatgacgttgcgctgagtatctgcctaattatgtctcgcttagggctgtttatacttcgttccaaagctaagtatgttccgtatatttgtgctgcgagtcgcggcctttcgtgggggcaagccccgcagtgagggatccagatgtccccgagacgaggccacggcaggtgcaggctttaaaatgtcggcgcagagctcacgttttaaggtattattcctgaataaactgcacaaaggcattagccatggacgactggaaagaagcgaacacgcatctgcgcatccttcgcgatgccgaagccggcgggtacggcgtgatggctacaatctcatacaacatcgagcaagtcaaaggaatgataagagccgcggagatcgcgcgctctcccctgatcctccaattcttcccatgggtgattacaacctatgatggtatgttggtgcgtgcggctgccgaagaggccaaacgtgccagtgtcccaatatctatccatctcgaccacgcgcaatctgaggaactcatcgagcgcgctgctgagttaccgttcgacagcattatggtagatatgtcgcatcatgagaaggaagacaacctccgcaaaacgaggcattgggtgcgacattgcaatgagcgacatattgtcactgaagcggagccgggtcggattgagggtggtgaggacggtgtgatggatacagctggactggaggctcgttttaccaccgcagaggaagtcgatgagtttgctgcgacaggtgttgacaccctggctccgtcttttggtaacgtacacggtgaatatggtccacaggggccaaggttggattttgagaggtaacacactccgcacaatcaatgtcctacctaggctaacgcagcataaggtttgcgaaggttcgagaacgcgcgaatggcagagtgcggttggcggtgcacggaacgaatgggttttcacctgagctgatgaagcaatgcgttgctgctggatgctgcaagatcaatgtcaacaggtgtgtcctagacgactactacgagcatcttcgcgcgaacgctgggaaaatgcgcatactcagttaatagaag

SEQ ID NO: 14873 - DNA, 578 bp, Emericella nidulans
aaggaggttgtgagggagaggagcgacgaggagggggcttggattgggaccggggggcgaggggattgttgggacccctacactcatgctggctggatgcgagaagagcgcctatagcttgacgcgccgcttcaaccatcgaggcgcattgcgctgatagtgactacccaagatcgccgacttagcgtgcgccgccatggggtaaagccccgaggttggtgctttcatcgattatgatactgcccggcccgtaacgactgtgttctcggaccttgccctactttggcgacagacaccttttttctccatgacaaatcaacgctcgatcacaaccatgatgcccagatgccgagtcaacggcttccatcatgcgccaatctctgcattctcctacatgactactatccgcactgacgtgtgctcatcaagcccttttccggagacagggtgtgccctggccctgacgatctgaaatcaggcgaaggctacgttgacttcggctacagagaaccccagctcacccggcagaaacgcccaacacgcacccaggatgcccggatcgacagacggtcccacta

SEQ ID NO: 14874 - DNA, 1768 bp, Emericella nidulans
agatttttttaagtcggtgagcaaggtcatgaggatcaatggcccagttcagctcaacttgtttgacagtcttcttggcggctttggcggctttggcaaaggcgcgcgcgcggtcttgagcttcgcggcgatttatgactttgcagacgggtagccgatcgcgcgtgccggcctgaacctgaagtaggtattgctgtggtctttggagactgctcaggaaagtgctgagttttgttgggccactgagtttgttatcctcgccgacaacgtggacataatctgattgaatgttttcgtctttgatctccccagtgccttgcgggccactgctggaacttgcgtacggaaaccgtgtttgtgataaattctgaatgggaaagtgatgattgaattggagtcgcgttgatgctcgtgatgcttgaggcaggaggaatgtctggcgaagagcctgtgtcgttgagacgaggccgcggatgtgcttcatcgtggcgagaaaggtagactggagcgacaaatagggaaggcaaatcaattacagtattatcagagcgttggatgtctgagaaacaaagtcaaataccatgaaaagagaacagtattcaacgatattcaaccgttcagtagcccagattacagcttgctaaagcttgctagcttgcagagccgacgcatgcggttggaagaatctctggaacagccgagccacagtccagattcgacgccacagcggagccgacccttttccacccgtttggccctgtagtctaccctggatcttcgtggacaactttcttatcttccatcccttctgcctcgttcgagttctcgttggctttcgttgaaggccccagcccctatgattctagcgtccttcaattcctaaaatctctctcttttgcctctcggacgcgacccaaggacgtcgtccgtgggacgtgcctgaaaccctttccattcttttcctgctcgcatgtcgactggagttgacggtcgacgacaaggcccaagagtcagcagacgttctatctctcgggttacggattcctccgaatctcccatagatttaccaaccgcttttgtggacaaacggccacccaacatgactcagagtcagcgatcccgttacatcaagacgggtgccattgtcagtgctctgttgctgattcttttctggctctctccgtcgaggggtacgggctatagcggtagacctggtgagtcgctactgattattgcctttacttgttactgattccagcccaggttcccagctttctgccggcggttcttctcctacgacgaaatgctcgaagccttatgactcctcgaagcctcttgtccagtatgcaatgatgattgatgctggaagtcagggttcccgaatccacgtctacagatttaacaactgcggacccacacccgagcttgagcatgaagagttcaagcaaaccgagccgaaagagggtggttctggcctcagctcttacaaggaggatgcagagggcgcagcaaagagcttggatcctcttatggcggtggctatgtcgactgtccccgacgagtacaagtcatgctcaccgattgcggtcaaggctactgctgggttacgcatgcttggttctgagctgagcgagaagattttggaagccgtaaggactcgtctagagacggtctaccctttccccgtcgtctctcgggaaaaaggtggcgttgagatcatggacggcaaagacgagggtgtctatgcttggatcaccaccaactacct

SEQ ID NO: 14875 - DNA, 2862 bp, Emericella nidulans
taaagttatattttttgcgaaaggaggggacaaatttttttttagagggggaacacttgaaacgggtttttaacccttgaaaaaaagtttggggtccaaaaagggcaaaccaaaacgcgtggaacgggaagagccctgatttggttcatcccagggcggccccgaaccaaggccttaggtctcgcggaaaccgacttgggatcgggttctgccgaataccaccacctccgggcagttctgttttctccggaggctccgcttcactactcagcagatatgatgcatcccgatatctgcgaccacccctcaatggctccagacggctccagccgatggctccacaatcaaccggcgatataagcgtatatctgcccgcgtatcactccatggtcggtcggcactctaaagctcctagcagtactaacccatcctccgaatccaagggcaatagacatcataaggcggacagcgtgaagtatcagttttgatagcttatatggaagaagatgggaatgatttatgccagaccgagagaacgatttcgggtgtaatgacgaggtcgctaccgacggtgagagattcgtcatctgaatgaggccacgcgcagaaagggagagaggctgagaatgaattgcagcataagtgagtgtaagagggtccgtaagagcggtgatcggagtgggaacaaaagcataagcaactaaactcaagattgaggcaactcgtctggggagtatcaagaagggcatccgaatgagcaacgctgtaagtcgagataagcaaatcgtaccaaacaatgccgtcaatgagtggactgtggccgcctggactatctgcttggaagttggggctggatttgcaagccggtggaaataccattggcttactgttgctgcagtaactgctcgctgaatccctgcgatgacaccaagagaccacagataaacaagaacgaagaaaacccccagccaccagctgctgacgttgataatgaatgaattcggcttggccacatggcccccaaggaaaacccgagtaaacattagcatccatacccatgtccaagagaggatgagaacgagatttccgaggccaagaagtaaaagctctgcatttgcggccaggatccgacacgcaaattcgaggataccaattgcctttcctatagcatggcggctccgtataacgttatagacccaagcggtacccataatgaacgggacgaacgatccaaatcgcataactttgtcttgaacagttgcggtatcccggaagcttgaaacgaaagcgtataaggaaaatgaataaaggatgacggggacaatgaatattattgcgtaaaccaagaggcgaacgtatgaccgtagaagggcaagccatattaaggaaatgaaaaccgagaccaaggtataaatgccgagacggtagaacgagccatgaaccgtcaaatatatcgtatcgccccaagtggtcttgtcaccgggaggcggagaggtgtggaggtacacaaggaacgctgtagcgaagaggcaggccaaggatatcatgaataggtgggcccagaaaacatcgtggctcgaagaatcgaacctcccaagatgagcggacgattgacgggtgatagcagcatttgattgctgcagctcctctaatagcggttgctcactttcctcatgaggcgtaggtaatgaattaatcccaaggttactcatttgaggttgttctcgaaattgctgcaccgatggtggtttattgtcctcaatttccgatgggtcatcatcgtccaaatgatagcaagacttcagagtgtcttcaaggcgaacatcgaccaacttacccttcgtcccattgccgctatcacgaagaacttcttcgccatcagctgcctcagccactgtgtcccgaatcttccacttgtcaaatttgccagcctgccatgagccctccgcttctctctcgggccattcttctgatttgtttggagccttttgatggctggcatccagagagtggttgctatcctctccagtctctgaatctttcaggtggctgctcccaaaatgccgccttgacttttgaagggcatagaaatctgctatttcccgctcatgttcggcctcttcatcctcttcatgaaagtcctcagtggcgctgtgaaaaagtggcgcttgttgtgctaaataccgcgatccgaaagcaaagttggagaattgggaagccccgggctgatatgggtcgaccgattttctattcaaaaaagaacgagaggaaatatagcgggagtttccgggttgctttgttatgcgatcccaatccttcctatctctgtcatcagagcgagagaccatgcgagactgcgactgggcgagaaagcgtgaggcatctacgtgcttggcgtgagctacgtcgcactgacattcgaaagagctaaactgagtgacttacattcagagaacatcctatattccactaggaagaaataaggctgtgctttcaggtctcaggctctcggattaatagcttatcgctgcttaagatggaacggtgagcaactatgaatacttggataagatgtctaagaatgcagtgctacaacggagacgcacttgaaaagactttttgaagaatttctagccaagtagatggtaagctataggtgtgagggagcataggccaggtataaaggattgggcacgtagctggagtgtggttcactgttgaaggcagcggcgtcataagacaagatcatgatgatagctgactcatcactgaaggtcgaatcgagctcaaaacattgcgcatcatctatgggtgtatctagacctgaaaatccccttcaaggcgctaacaagcaaccgcttc

SEQ ID NO: 14876 - DNA, 403 bp, Emericella nidulans
atcgaagaatgccggctgaatcggggtcctttttgttcatagtggggttatgcaaaaataacatacagagtattctatccaaatgattcttgtgtttcctgcagattgcttcagctcagccaaataggacgagtgcgtcagacaatgcagctcggccgggagcaactagctgtccttgaatgtcttgttgagatacggcaggaagccgtacgctttcccctaaagccatctccgttctctcttgatcaggaccttcttttggcttgtccaaaacgcgaaacgtcttcgagagactaaatgactccggattgattccttctcaattaccagttccatgaggtagccagcctcgacgctccaattactgcgcctcatgtccacatgcgtacccctgaaaacatcg

SEQ ID NO: 14877 - DNA, 2559 bp, Emericella nidulans
ccctttagcaagtgaaaatgtttctgtcaatagtccggagctttccgcaggtctatcagacgagggtggctaacattcgtgtttggtcccaggtatccggaatgttctttcaagtagaatctcctcccaaacgcaggccgcatgcaagctgcccagcttcttgactagaacactgtaccggtcggctaagtttacctgagcaaagacaaaggtttgttggcttggcctcgattgataaaggggtaaagaaaatgcttcgcgaaggagatcaattagtatgagcgcagatgccatatgcttcgcgaagaaagttccattatccctcgaagacttaagaggttcgtcaacagagctgcttgctttaccatgtcctcccctctccggctgaaccaaggagaagaaaaacccttgttcgtcggcagatttccaaaaatcagttaacaagtcgacaacgcgctcagtgcggcagataagagacggtacgaccaaatggggcttggtttccacaagcatatggacgagcacggtgagttcttgattcgcctcggtgttatgaaaatcgaagggaaggctttgcagcgtagcaagatccaggatgaactcgacccccccagattcaataaaataggtgcagttggcctggttctcgaaaaatgcccccaagaaccgcgacatggcgaaaaggtagtcagttgccgtcagcccgtccgcatcctcgtccttaggttcaatctcggcgtctaggggtggaagaaggtcgctcaagttcccgatgctaagctttcctccgctgggtagagttgcagcggtattaatggtaggaacaccgtaagcatgaacgtcatcagatgaaccaggcccaaaaccatcaagaccaattgctctgaacagctgccagggttcccccgagataacgggctttccctgcgagtcctctttccacaacttagcgcccattccatgtgaccaagccttggttctacacaaaaatccgacacgcgccaccataaccatgattgccgtcataattgacgatttcaggcgcggatgatgacggactagctcatcgaaagtacttcccaaagaacgaaccaaattcgtgtcatccttaatgagacactttacatgggcaggactttcgaatatttcaaaaaagctttccaaggcatgcgatgattggaagagttccaaccctgacccattcagacaaattgctccaaacgccgaaggaatacatgagagagcttcggtagcgggcatgatgccgggggctaagcgagcacctttaagcctggcgatgatgtagtcgcgggatttctgcttctcatcatctgaaggacccgtggttatacttgacgacgccgtgggctcgttctctgcttcggcagcagagggttccgcagacccgctctcggctggtgaagcttcaggagatgtgacgcttgaaagagtaatagcctccagaaaactcttgcttaatccagcctccgcaatgacctgatagctagttggttcattatggatgaagctgctaaggatattgacggcgttactccagacgtgggagccgaatacaggtgcgtgctcaatggcgaggcgcagggaagtcagcagctgcggagaatcaatcaagtttcggagaactcgatcaaatccaccgccactgtgttgcattatgtgattgacgaaccgaaacaaccaacgtagagtctgctgttggaaatatgggatctgataatcgattgacgatgtcttgtaatagtccgggatcccggctccccgagatacattctgaaatgatgatttagtttcataatcaatcagatctgaaagcgcgtcgaaacccttggcgttagtaagtattccaaaggcatcgcggacagcgagcacgaaactgtcgagaaattccataacacgggaataaacacgacgagctttatcagtgcggaggttgaggacatccacaaacatcggaatcagtccagcggctacaagggtctccggggttctagtgcttgacccaggaagagtacgcaataaagcgagcaacgcatcccgccattcgtcttggccactgtcgtcattcccatcaccctcaacgcttagttcgttgacagcctttcgagtcaaaaacataagaacaccgtgattcacgttgacactcagcgcagcacagacgtcaatcgcccgcgccttgtgctttgctagcgcatcaagagcctggatagagaatgtctgaacagtccgggacactggtagatcgtcactagcaccgaggtgaactaactctcccagttgataggcgagttgaaggcgttttgggtgctccatatcaaattgaagaatcttttgttggaagagcggctctgggtaaatatacgccaaattcgtgattgcaagaattcttatggcgagtatctgttctcttgttgactgagatgtggccaggccttttgccgtgcgaatcttgttcaatagttcatactttgaatcatctggcacttcgcttgagtgcaacgagaagatctcttcagccgacgatgtgagaactaccgagct

SEQ ID NO: 14878 - DNA, 562 bp, Emericella nidulans
atcgggaagtagcctgggctcaagatcgcgctgtacatatccaagccatcatccacaatcgcagctgttgcaccgtgcccagtgattccttccagccagacgccagtaacattcaggtcatggccaacttgtacggtattgaacaagtgccactgtttcgtaaagatgggatcctcgataccgagcgtcgaaaccaacttactccgggcttgcgcggcttccacgtcctccttctcctctccgtcgctgctgggatctctggcgagcttctcaggcggaggcgttcgtttcaccagccgttgcttcggagtcaatttctgggaccacagaatgccggcaaggactttgtctatattgtcgagagcgccgtgatctcctttacgccgtctaatctctctttagatttttagttactatcttattgcttttaactacttttctcttttttcacttctctttgacttcacctctatctcttcactatattctatatcttattcttacttaattttgctgctcaccctttgcctttatatttatatcttcttgacccttttcttgt

SEQ ID NO: 14879 - DNA, 385 bp, Emericella nidulans
ggggctgtcacagatcgtaaggaagcagcccttggaccactcgttcattttggtcacaagaacctaacataatgatttaatggaagctgtacactctacagccagactggagccgatacctacgtctacaatggcattacctaatgcagcatagcatgggtgagaccggaggccattgtccaacaggacagcttgatgtaccagagtggtgtggccaaacggactaggcacagagagggacttcggctggaagcgctaccaggagagcgatgtacgtgggtggtatcttgggtacacgggatgcaaactgaaggcggggaacgacgcacagggctacgatgctgggcaaaaagttgtatcatagatcaacagacacctgtgttgt

SEQ ID NO: 14880 - DNA, 2911 bp, Emericella nidulans
aaggaggctgccgggtatcaggcgaaactggatagtattagcgcggatgagggcgctcaagctgctcttgagtctaatgccgaggacattcactcccggctggaccaggctaaagagcgtgaacgatccgcctcccgggacaaacagattgaagatataaactcacaaattcgcgaactcgaagacgaaaattctcgcctaaatgctgagttgatcgaagcaaccaagaaagctggagacctggctcgcttggatcacctaaagaaggaactgaaagatcgagagcgaagcttggaaacaatgaagagtgctcacggtgagcgcctttccaagtttgttaaccccaactggaagatcgacaccttagagcaagactttcagcgcactctagaagataaatccaacgcggtaatcatggctgaacgtgcaaaggacagccttagccgcgagcttgagcaggtggaatacaagttgaaagatgttgaaaaatccctgacgcaaaggcaaaaagagctcaaggaatgtgttgaggagatacgcgaagccattgacgatgaagcccggagaatatcccgacgttgtcagccaacggcagaatcagctggacatggcgaagagtactgctgagcaaggggccggtatcgaagagtacatgagccgatgcctagcggccgcgaaagaggacaaaatctgtcgagtgtgcgctcggtctttcaagaccgataacgatttgaggacttttttcaataggctcgaaggtctaatcaagagagcaaagctgcaagcacaagctgaagacgtcgagcaattggaacaggatctcaatgtcgcccgtgccgctagcactgcctatgatacttggaagcgtctcaaagagactgagattccagagttgcagcaggaagacgaaaaatacactctagagcgtgatgagcttctgggccagctggaggaccgcgacaaagccgtcagtgagatggtcgagaagaaacgcgatattgaagctctgtccaaaacggtcagcactattgtcaggtacgatagtgacatcaaatcgactcgcgcacagatacaagatctttcctccaagcagcagcaaaatacagcggctcctcgtacgctcgaggatatccaagatgagatagctagcatcggcgagaaaaccagagctctcaaaaagactctgtcaaagcttacaaatgagagggagcatgcgcgtgcagaaattaacagcctggaactgcagctcagggacgtgaaaagcaatctcgacaatgtcaagtttcagctcgaaaggaaagctgatctcctttctcgcatagaagagtataagactcttaataatcagcaacgggaagcaattgccaaagcggacagagatatcgaggatctgaatccagagctcctgaagtatcaagccatatatgacgatatcagtcaacgggccgaggcgcgcgagagagagctgcaacaaataatctcccaactgtctgacagcatacaccaggtagagctcgcaagcgaagagattgacgcatacaatgagcgaggtggcccacatcaacttgatcggagtaaacgcgagctcaagtccatcgaaaatgagattagtcaactcgaaactgaacaggcagccctcaccaggacgatcaacaagatctccacacagctcaaggacagtgagaacacaaagcgtcagtatgcggataatctcacatatcgccaatcagtgcgagccttcgataaggtcacaagcgagatcagggaattggagagtaagaacgcagaggtcgacaggagccgattcaaggaagagtctgaacgccggtcccgcgagcataacgcactatctgcaaagcaatctagcaagatgggagaaatgaaatccaaagacgatcagctgatgcagctaataaaagactgggacacggactacaaggacgcagcctacaaatataaggaagcacacatcaaagtcgaaaccaccaaagccgccgttgaagatctagctcgttatggcactgccctcgacaaagcgatcatgaaatatcacggcttgaaaatggaagaaatcaacgccatcatcggcgagctctggcaaaagacttatcgcggtacagacgttgacaccatcctcatccgctccgacaacgaaaacgcccgcggcaaccgctcctacaactaccgcgtctgcatggtcaaacaaggcgcggagatggacatgcgaggccgctgcagcgctggccaaaaggtcctcgccagtatcattatccgactcgcgttggccgaatgcttcggtgtcaactgcgggttgattgcgctagacgagccaacgacgaacctcgatcgagacaatattcggtctttggcagagtcgctgcatgatattattcgggcgaggcagcagcaggcaaatttccaacttattgtcattacccacgacgaggagtttttgaggtatatgcagtgtggggactttagtgattactactacagggtttcgcgcaacgagaggcaaaaatcaattatcgagaggcaatctattgctgaggtgtgttcttgattctctattgcattcatgttgacttataactgacactacctaatctaggttatgtgattaaccagccactgttcttattttcgagcgcgaggctgcaaggcgctcacgcggcattctattctcggctcattcggttctcacttcatgtagggctagtcatgacactcatggtgtagcataggttccggcgttaagggcgggtagtcatcaaaacagattcccattatatagtccagtctggcacgtaattgtccttagataccatggtttgaatcatattaaccctaattataaattggcaatataaacagtacgcacttgatattgtctgctctggcggtttccctc

SEQ ID NO: 14881 - DNA, 651 bp, Emericella nidulans
caagagagataacagcaacccaggggggacccaaagaagccaaacaaggccacccactgcacccagttcttcccaggaagcggaaaccaacagcaggcgacccaaacaaaagcgacgcgcgccaaccaacaaaggggatccgaacaagcagccagccaaacacccacaacaggcccaaaaccaaagccaggggacgaatataagcacccacgccctgccacaaagaacaccacaagcagggggcaccacccaagcagcccaaggagaagggcagccaccggcccgcccggacagcatacaagcaacaaccaaaacaccaagcaagcccagcccaaacgaccccaaaccccaaaacacacccccgaccaagcagacgccaacagcccctgcgcaccacaaaaggccgaaccagaagggccaggccagccacacccacagccacaagacaaaacccccaagccgggacacaccaaccccaagccaaaaaaccaaaaccgcacacaccaaagcaacacaacacaccagcccaagagaaaccacccgaagaaagcccccacaccccaacccggacaagaaccaagcgacaaaaaaccgaagacaacccaagccacaccgagagaaaacacgctcgccccaaaccccacaagacca

SEQ ID NO: 14882 - DNA, 1631 bp, Emericella nidulans
cctcactctcactgacagccaggtctccatcttcccgtacttgtgcgggttcgagacacagatcactgggagcacaagcccgttctgcgacgtctttacgaagaaggagattctacagtacgagtatcgtcaggatctgcgctactactacggcacgggtaggagtcggagccagccccttgagtgttgagatgactgacgctggccgtaggtgcgggtgccggcaagaatatgaccgtccagttcccagttctacagggcattgtaaatcttcttaaggaaggccctaacgccaccacagagacgagcagtggctcagagaagcttccacctctcattgtggctttcacccacgacaaccagatcaacgagctagcgtctatccttggcgtcttcgacaaccaagaaccgctctccgcgcagcgaatcgatagagatagagtgagtttgacatcactatccacagccagctagtctaacctccctagattttcgttagtagccgcacatcgcccatgagggcgacaatcgctttcgagcgtctgaactgcaaggcccgcaagggcaattcagtcaacgtgcgtattctgctcaatgatgctgtttaccgtaagtggattcaagagtccaggccgcttctttgctcaactccatttgacaaattgtcctagctgtgccttcctgtcggtccggaccaggtcaaagctgccctgttgacgaatacgccaagtatgtcgccaaaaaaaagcgcaagtatggctcatatgcgtctgtttgtgggctttcggaggacgagttgacgaccattggtgaggacgaatctgtcactttcttcaagaatctgacgttgccttttttgaatattgttaagccatgatttgggcaagatcatgtggtcggtatctttgcttgtctacagtgaattgagcatatatgagctattaatagtggatgggtgcaagatcagctcggtgaatatctggtatatagcgaaccctgtctcttctacaggttattttacctttctcaatctctacatggtttttatctaaatatcccgcatctactttaaacctcctatattggaacctgactatccgtctgccacttttcccctccaaccttcgtttacggagtacaccttctacacaacaacacaacacccaccatcaaaatggcaatcctcagcaccctccgacgcaaaacccgtctttcctccctaacactcctcgtgaagcttcttcgggctatcattgtttcagtcgtccgtttcaccataaagacaaagccggacccagatctcatcgagtacattccatcaatcaccatctctccctcgaaaaagtctgaaaccacaattacagctccatcaccaacccacaacataaaggtacacatctacaacccacctccagcccaatcacaaccgcaaccaacaactgacaaatccaacccaagccccgtcttaataacggcctgcgggtccggcttcataatcccaggcctaggcctcgacacatcatactgccgactcatctcaagcaaaaccttccacacagtgatagacgttgggtaccgcctcgcacctgagcaccccttcccctgcgcaatagaggacctcgtctccgtgg

SEQ ID NO: 14883 - DNA, 511 bp, Emericella nidulans
caacggtttttttttttcttattcccctttctttatttgccgttttgtctggttctggttttttcttcttactttgagctctcttttattttcttctgtccttctttctttttcctcttttatccattctgtttgtcttttctgtactttttgtgtgctccttttctcttccttttgtctctttcctttttttttttgccattgtttttgatgtcttgttttttctttgttctctcattttttttttttctttcttctctcttctttcttttattttctttcttgtttatatttcatttcgttttgttttctccttttcttttttttttttgctctttttttttttttctgttcctttgtttttgtttattttgttttttatttatgttctattttttcttttttcatcccttttttcgttttttcttttttttgtctttcttttttgtccttgcctttttctttttttgtttctttttttcttgttccttttttctatttttcatttttt

SEQ ID NO: 14884 - DNA, 1893 bp, Emericella nidulans
caggccgacctcctgaagaacctcctgtcgcagagaggcagcattttgtacttctttatagagcgctgttttaatctcgagtgatgacgggaggtggggtaaatggatggtttctagagaggacatgatgttataagcgtcaatgaagataacacgaaataactgagaatatcttctggttgacgtatatggcgctcgcgaaggtttgcggtataaattatccttcactatcaccggcgcactttttactccgtagatttgaagcttcagaacgaccccacgatagactatcggagttagtgatggttatggccgagcttagtcagaagccatgtgacagatggttgcgcttctcgaacgttcgggtcgccgtagtaagcaaagtgatatcactggctgtattctgtatcctataaatacccgagcttccagcagactgacaaagttctatcttctgatattgcatcggatcgtattgtcgtatccacgaacatggcgttcttcctacgacgcccctttgccgttccgacggctctccgtcaggtgcctaaatccgcgaacaccgctcgcttcatccacaactctccgttcaagcccgctcaaccgaagcctagtttcgcttcttcctctatcttcgccaaatccaggcagactttccaaaatgcattccgtcgcccttacatgcagcaaaccgccaacgcttcgcagggcgacttgacccagaagctgatctatggcgcagctatcgtcggtggaactatcatggcaacgaacttcatcttcaaccgcgaaactcgggaagacggcggaatgccgccgtttgaacgggcgtatctaaatgaaacctttatgcacactggacttggtgtcgggattattggtattgctgctagagctctgcacactagcggatggacttatcgcctcatggccaccaacccatggcttgttgctggtgttggactggtggctagcatgggaaccatgttcggaacttactacacttcgcctaacaagtaagttgacaagattgccaaagacttggtaaatcaatcgtctaattgtgtttacagctacattcagaagtacgctctctgggctggtttcaacgtcacccaggctgctctcctcgcacccctgatgttcatgcacccagctatcctcgcccgcgcaggtctctacactgttggcatgatgggttcgatcgctttcgttggcgccaccgctaagcaggagaagtatctgtatctgggtgctcctctccttgccggtgtaactatcgttgctctctccggatttgctcccctcgtccttcccgccaccgccacccgtgccctgatgtggtctgagaatatctggctgtatggtggtctcgctgtctttggaggcttcactctctacgacgtgcaaaaggttctgcaccacgcccgtatgtctgagcgcggactccttcagaaggatgtcgtcaatgagtctataagcctcgagctggacttcatcaacatcttcatccgtatggtgcagatcctggccatgagaaacaacaaccgaaggtaaattcgatctggaatttactaggatttctcccgcaattattataaacgccctacttgggtcggatatttgtactagttatttgctcgggaatatggcgcatttgttctttccatgttcatattttctctgattgaattctgctattagcgcatattgtccgtgcgcctttgagttgttggatagcatctccgctcaaaatagtaggggaaaaaagaatgaaaaaaatgagaaaatatattgtgatatatctcactcttgcggtcaactttatcgtagcctggaaaaagcagattgacgctcatcatgacaactaacacattgcaaacgaaataagcc

SEQ ID NO: 14885 - DNA, 1004 bp, Emericella nidulans
  unsure (1)..(1004): unsure at all n locations
caaagctgagaataatctgggacatatcatatatctcagaaaatctgtctaaggatcagtacaaggcaggtgccacccttcccggagccctatgagcaggccttaccagcataggaacggcataaacatcccttgcccacccacaaacaaccttcctcgtatcctttggaccaacaactttcactaacaccaaatgcatttgccgtgcggaccatatattatcaattttactattcctcctcctccagtttcatcataaagcaccttatttttgtcccttgcttctttgtcttctttctagctaatgcactcttttccttcctctaattttctcttttttatctttacatatagtatccttttatattttatcatgttctcttcttttcatttatacttctattctacttattttgtatcttattctcttctttcttctctctataatatattttcattatctcttcaaaactccaactgtcatattttatggcacttttccttctatcttttcacttctatccgtcttatctatctattatcttcttcatttctccttctaattcttccttccaatatttctattctataatttcttttattctctattgttattataacctcattctacatcctttatactttctatcatttcttattcatattcataaacttcttcttatcttcattttcatcttctcttttcatttttatcttctccacattctattctcatatacttttttactatacctttattaccataactctctacatcttcccactattatactccttattcactcacattctcttttctatcttctatattcatatttacactattctcccacttttctcttcatcatcttcatcatcattattctctctttcacttcatctacaatttctttngcattatgatatcccatatttattatctcttttctctattcctatcatctacatgcactctttatcatctttccatttcaatctacctt

SEQ ID NO: 14886 - DNA, 1787 bp, Emericella nidulans
cgagatgcgcatcctaggggactcatatgtaagagcgaattccgcgcccatcggggaacggagaatccgttgcatatcgtacgtcttttatggcctggattgtggttacaagttgtgaggaagagggtctcgtctagacaagactaacgctgggtactgcagatcgggttccttacggagtggcagctttatgcgcagaagcttgagggagattcgtggattggtgagaagctggatcagggcaagttggataaaatgagcggtgcgtcaacctagttttttctcacactccagccctgggactattgaaataagaaactaattggttgtattgtgcgttctagaccagcaactcggacagttgtatgagttgatgcagacgatccagaacaaagatgggaaaggtgaaggagaaggggagagcgagaagtagtgctgccaggtgcttctatactactgttctttggagagcgcctgggctagattattggcgttgagattgatgttttacgctacatgatgtcttgtagatttctgtacatatatattctatattactgtatcaccacatctctatggaagtataacccggagaaaagccgagagaaccacttgcaagaaatttggcgaatcatattttagctgataagaagtctccaacagtaacggtggagaagcctggagagatagataaaacaggatctcaattccacgccctgcgcttgacatctgcacctatatactcccttgtccaaccgtcgtctctctccaagcatcaacacttcacgactaggacacaccaaaatgccctctatccttgaagatcccaacacaaagatccaaccatcagattccctcctcctctccttaaaatccccagccttcaatacccccctcaagacgacaaccaagacaggcgcgaatgtaaccctctacccgatcacaaacggcccatcatctcttccacagagtctcttgcgctttttacacgccgagttcagcgcggagattgagaggggctgtacgtatccaatggaacagccgatgaagtttgaggcgttcggcgagtattggtttgggatgtttggggttgtggctgtcctggatcaggaaggggatggtgagggcggtttatctgtggacagtgagagggattggggaaaggaatgcttgggaacgttttatgttaagcctaattatcctggtatgccccaatatcttccggtggttttggtaaggataggtcagctaatgaggaaggccggtgctcgcacgtttgcaatgcaggcttcttgactaccatcgtagcgaggaaccagggagtgggcatggtgatgggcaaggcgtacttgcactttgctccgttgttggtatgtcatgtaaaaagaagccaagtcaatcaagtagctgattgatataatacgcctacaaacactccgtcttcaccttgctttcgaaacaacgttgcctcggcaacactgggagaggcttgggtcagcgttttggtcgtgtgccgaggcagcgaggttgccaacatcgaacccctgtgatgcatgattttgcgagacctgcaggaagctgattaaaaccctaataacagaattcagtaactcatcacgatgatgatcatgcctaaacttgaggttttgaaaggattttgaccattgcccgagaccatttacagaaataaattacttggcacaaaataacggaaccttagtaccccccagctttggttttcgtccgaatactgctcccgaagaaaatacccgttttttaaaaaccca

SEQ ID NO: 14887 - DNA, 880 bp, Emericella nidulans
gacgggacatccacgttcgacgcccgcggaagcttccggaacaggctcgagcaccacttattttacagcctggccgcgtcgatccggaggcggttttccgcttatcaacgcttgagcactcccgagagccccgccgcacacagtagatttgctaaggcttgttccaaccatcctcgacccacgataacaagacctggaccaagccttgcatgcatccgaccgagagactcatacataccatccagacgatagtaacatcaacagatacactgacgccagcgtgcagtacttcaagccagagttctggcataataacagcctgcctaatcatcatataccacacaaggtgagagcccttcaatagggacggactgtgagcaaggaagccggccatactgaaggcttctggctgccatcacaggcgcacgtgacactacggatggtagctgtgagacagggacgctaggccctgattagacgccttgccgccaatacgaaccagccaaacctggcatccaaccctctgttggacaatcgaacctgaaaacactgagaaggaccgcgagcaagtttcgttataaaaccggcgacctcttagttccgccttatgtgggaaaccacctttgaacactcgtatccttgggggagtcccccgggctccagaggggccaaaactaaacgctttaaatcgagatgggtattcaagcttcgcaacaaacgattcccgacttctgttgttcaattttacactcaatggcaaccttaaacgctgtggttggggctttcaaacgaatcctaaattggcttattgctaattttgaaagcctgctttttgatttatggtagttttatttgttcattccttttacaaatgtttttc

SEQ ID NO: 14888 - DNA, 2779 bp, Emericella nidulans
tggacaacgtcaatatccgtgatctcttaagctgcgccggtgtaaacaggacatggaatacccttgccctgaagaggatgtacgagggctcggtgtacgacttgcaacgccggacccccgacatcacctctttgaactgcctctatgtcgcttctcgagagcgttttgcacgctgcatgggccatgtaaaacatctcctcatagcgccggagcatccagtcgagaagaaagatgttgggatgccgaagaaattcgtttccctagaaaagtttcgcccattgcgcgaccccgaatccgccaagcgcctttttcaagcatacaaaccaggcgtcaagagcctcatgattccgtttgggatgcatggatgggaacagtcttatattgacgttcttcttacagaaactgtggagttcctggccatcgacgactcattctgtcccttcctggagcccgcttaccggcccgtgagtcgaacctcaatcttttaatgcaggacatccatctgactgggaagagagataggttggtaatatcaaagctctcacaatctacaagtcaggctccaacagagacgtgaccagtctctgctcgttgattgacagatgtgacctacacttcttccacattgaggattcgcgtgaacctgaacccatgagcgacgatcacaccacacagcttattgaatgccttgcacggcagcggaaccttaaggccctagccctgatgattcctgaggtattatcaccgcttgctcgggtggttgagaacgggaacccatggccagggttgaaagccttgtactatgggcagtatgatgacagattttccatcccgcccgttgttcgattgccaagatttaacgagctcgaaattctcagcattccaaggattgatcctctcttgacaattatcggccgtgatcccgggatcaagaaccgattgagggtgttgcaccttgaattggctgatatcagcgatacggagcctgttcttgacatcttgcccggttgcaacagcttacagaagctcagcctcggagaactggacgacagcggccctgctgaggcctatgcaaactttttccagcgtcttccacccctgccttccttgcaatgccttgttattccttgggtcttcaaaatgaaaatcaatctcatccaacatgttgcatcgctgtatccacaactaactgtcctcgacctgagtcaagctgatctgacagtctctcttaactccttacagagtatgtcctcaatcacgcaattgcaggtattgcaattgtcggaaataccgttcaacaaccctcgtcggtggatgcgagggactaggttgcaacaactcgccaccgaatggaagagggtatttcccagcctccgaactgtgccttacggaggagacaactgcacctttcctatgacgtcccaggctgttagagagcatctgctctccgaaccggatgagttcgcgtatcccccagattctgacttcttgatgggacgattgtgcactgtccttggctacagagcccgtattgacagtcaccttgactatgacttccagaccaagatggaaaacgagatcattggctggcccgtggtgccattcgtcgcgtttcagcatacagattcctactcgacctattctgtctagactggaccggaacgggctatcatgccgtcgcggacggcaaaagcgttgacgattatcgtggcgacaagaaatagagcctgcatatgacacgaacatagatcatataattcaacatttctttctagatgtatgaccaagttgctgcccgagctataaataatagcagtaccgccctgatgggcgggctccgatgcataactcagaacccaagctagattccatccaggcacgagaagagcaatataattcgtccggtcccaagcaccatgtcctgtcgacaatcccatcgtgctcatctaacacagtataagggatcatatacacggaggcgcatattcagtcgtaccgcgaggatagaatcttactgttggctcgatctttgccttgcggaaaaggctacagataccggcatggatctgggcagattaaagttggagaacgcttcctcggacatcgcttgggtatatttgccattcgaagtatgaatccagggagtatcgggctgaggcaggtcatgtagtataagggtttcaccagggagaactgccgcgtcaatgagaacacgcactgattctttgcttgataaaattgtactctacgaaacatgtaagtactgaagtatatgcggggaaacaatattgaagaacaaattgtcagcaatcgctttgaaccctagatatacctgcctatcaactcgccttcattaccaaagcttctaataagaccagcgccattgggaacaattttatgcctgatctgcaatatgcgttcattgaagcattaaaaagtcacctaaataattcttaccctttaacgctcgcactcattgtcttctcttcgcccttttcaccctggtgcgctacctctgcgtccaccgtgctcgttttcgtcacagtcagcaccgccgggatcgcaacgaccaatgcacccatacatagcccccagtccatggcaaactgtgtcatggccggcttatccagggcgttaatcctccaagccatcgcgcccccggtactctgaaacgtcttgtacgcaccgaccagcactgccgcaacagcaggtcattcgacctcgcccccatcaaccaatagcatacgactgccagaccgcatcgaatgcgccgtacttt

SEQ ID NO: 14889 - DNA, 298 bp, Emericella nidulans
cgcccgactatggcaggatacttgtggaaaaggctcgagcgccacccacttttttttcctggcaagtacccgcgaaggttcttttgcacatatccggatatgagttctgccgaatgccccgttgcccacggtagatgggattagacatattacaacgatctacgacatacgatagccatgactggagtaggacctgtatgcttgcccctgagcaccctatacaatatagccgacaggggagacatcaactgttatgccgtggcctgcaatcataggatcatgccagcgtgattgttat

SEQ ID NO: 14890 - DNA, 605 bp, Emericella nidulans
cccacttccaccgaagattgggagtcagacttgagtgccaatcatttttttttttgccgccgtcgaaccggaaatgcttacacacttagcaacaaatcagccgagccgaatgccccgctgcccagggacgaaatgctgacactggatgcaagcccacaggagggatcatatcctgacctttacaaagacgtatatgcatgcctgagagaaacctatacaaccaatgcctgtcaggggtaaacacacaacatctgcagtgtatacaatgcaggttatgaagcacagtctgtttagatgacaaaagacttcgaattcatcaactatttcacgaggtgagagcacgatcaatgagaccatacgtgaacaatcagaagcgcgagattgatagattattgcaacaactacatgcatgctgggacacaacaggggaagatgggccggcaaccgtgttaaggagaataggatcatgatgccacatacgaacaccccggaatgggagaatataactatggtgtaaaagccgcgctagaatctggaggaacccaacccaagccagatgatctgttgaaccgggtcaaaaaaataattatggcatcagttggatg

SEQ ID NO: 14891 - DNA, 1417 bp, Emericella nidulans
gtgtcagtaagccctcaagtctgacaataacctgtccatgacaatatgacatggtggccacacattattatcatcatagacatagcacattactctcaccacctccggggtcggagtagtggcggggggataagtagcaaacttcaaaggtgggacaaggtggggcagcctcgttcattgattttttgggtgctgcacaccggctttcaaactccagaccagaggacactggcaattatgaccattaattggtaaactccgcgacgctatttacagctgcaagaagtctggactttctccaacagaagggctgttctgaaagcaattacttttatagctactgctcgaagtcgtccgtctgccgcttctataaatcgatatccattgcgtcatcatttggattggtttactgttgagctttattctcatcacagcataggttcaaaagccttggtgtccatgatttgccacatgcttggagggaaaagcaatatttcgaagaaactttgaaattttaaaaatttaaacaggtggtagacggacacagagcaagccatagaccaatgaaccgcgctgcagagctgtatagacgaaagagtattttgagagatgggttttataggtatgttccaatctcctgaatcacagctgcatatcctttagatttctggacacttcatccgcgccactcgcggatttcgtggtgggcttagatcgggccttagttgaagtgctatctttcggaagttccttcgtgtaaggtagaaactccggcgcaccaggaatatatttcctgagaggctctgggacaatgaacccctgcatgttgtcagtttcagacacattgaccacggggaaagaattgctcatacatcttctgtttggtaattctcaagcacgcaacagagagtcctctccgtagcgcatagtgtagcatttagcgcatggacatatgatttctttgcgtcagtggttttcttaggaccatatcgaattcctagggcgcgtgcttgatagtcggtacagttggagcaagaaactagctccttgtattcctgctggaaagggaaccaggcttcaaggtcgtacttcttcgctgcggcattgttcaaagcccccgagactatggaaacaacctggtagggaaggcccagcgatttgtaaaactcctccgaagttgagatcatttcgtcgaaagctttccaggaatcctcaggtttggtgaggacaaattgctcgatctattcccaagtgagttctcagagcaccacaatcaataaaaatctatgtctaaccttctcgaattgatggacacggaaaatcccccacgcatcttttccgtgagctccagcttccttgcggtacaggtgctgtatccagcatatctggacttttgtgagctcggaaacaaggagag

SEQ ID NO: 14892 - DNA, 396 bp, Emericella nidulans
aacccccgcgggggcaacaatcatacccaactattgcggtttgtagaccggtttttttaacccagtggccatatactatgcaggggaggtttttgctattaagaagaccgaccgtttggcattcactaccacaaccatcaacagtcagggagtgggatctgagcgactattccgacgcttgctctacaagtcaatcatactgaggggacgcgtcgattacacactgtgactgtcccgtcctaatggtggaacaaatgccgccttttcgggggagcggcatatcccgtcggttggaatcagcgccgcaactctagtagattgttcgaacattaggaggttttctgcacgaccccgtgaaagaatcttttgacctggattcagcacaatggaattact

SEQ ID NO: 14893 - DNA, 353 bp, Emericella nidulans
caacattttcccgaaacccccgggggggcgacaatcacaccaactattgcgttctctagaccggtttttttaacccggtcgccctataatatcccgggggggtttttgctattatgaagtcttaccctttggggtgctctaccacaaccaacgaccggcagggagtggtaactccgcgactctgtcgactcggtcttcatacgacaatcctagtgaggggacgcgccgactacacactaagatagtacagtccaccatgtgtaaaaactgcccccttttcgccgggatcgcatacccctgcctgttgaaaacagcccggcaactctagtaacttgaccgaacactaggagcct

SEQ ID NO: 14894 - DNA, 2444 bp, Emericella nidulans
  unsure (1)..(2444): unsure at all n locations
cgaaccgacttaacgctagtaccggtgcgtatccatgcatgacgccgtgccgctgttctctactgacctgtaagtataggcattcgcatcaaggccaagtccggcgagaccggtgagatcaagggcgtcacctactctggtatcagcctcgagtccatatccgagtaggctccccttccagcccagttctgaatccagctctaacctcgtccagttatggtatcctcattgaacaaaactatgacggcggtgatctcgacggcgaggtgacctcgggcatccccattaccgacctcaccattgagaacatctccggctccgcgccgttgactcagatggatacaacattgtcatcgtctgcggtgacgacgcctgctccaactggacctggtccgacgtcgaggttaccggtggtgaggattacggcagctgtgagaacgtccccagtgttgcatcttgcagcacctaagtgcagcaaacggttagcctttcttgggtaaaggagtagagtttacttcgcagggtatactatttcctatcaagcattttctatccgctgttctgggtaacggtgtcgatcactatcgactgtttttaacccgtcagcgccctactttgcctgattacaatataagtcttctattatctaatttgggctcttactatctataacctggtgttcattttcagatgtaatttcctccctttgtcaggtttctctgttttcgtaagtataccagacaatatcctgtagagaatatagattacgcccaagtacatgtaaacataagagtttgcatttcaatccgttcgcttcatttaaacatgccaagggcatgttagaagggtaaatattgagttaccactcattagagatcgtataacgtagtatgacgagaagggaggcaacagccacggttatcaatgccagggctgacgtccttgacagcataaggtcagaagacagcattaactgcctcctacataagacattgttgatgttttacatgactcatgacactgatatcgctttatcctcttcatctctcagaaagaaacgtggttactcaccaaagggcaaacctgctacgtcatcgttgctggcggccgaaaataacccgtcggggctctggtgcctctgcttgacggtgggatacaacaggactgaaaagctgaaccgcatactcagtaagcttatcatcccaagcgcatccaacagctctctgttcattgttgaggtgactcggcaagtacgtaaaagtgttcgaaaatggcattgccggctgtctttctactgaatgatataatatcactatagcaaccccaggcagatctaattggtagtgtagtgaacatcaaaattttgaacgacattgatggcggacggttgctgcgcatggtccctcagacgttgctggtctgaattccgcgactcttcgtctatgctccgcagtagtcgtggtatacctctccttcaacctacctccgcccgaaacgtgtgtatctaatggattgcggctcactttaccaagtgaatagcctcgttcatccagccgctcgaacgcctggggatccgacactccatagctcttttggtttgtggagccgaacaacctagggaacatccgggacaggatcggcttgagaactggcatgttggcacagacgatggcaagctggggctccagcactgtccagagcacgcccattggcagcgtataagtgatgtcgttgaagtcgatagccatcaatgccatcaggcgcacaatactgatgacggacacgctgatcatgtcagttcaaatcaagaaattccaatacaacatcggcagacttacagcagccccatgcaaaagacagctgtcagagccagcttcttggccagattgagctttagcttccagatgtgcgggaggggaagcaccatcaccattaaattggtcaccaggttcagcgttccggccacgacgaaggttgcattccgttcgccgcattctccgtcggtcgaggtgtcccaattgtacgccagcggtcgacagagaaggagcgtttcaaggacgacgctaatagcccacagccagacgatgatcataaccacaatgacgctgattatgaaggactttttcgtgctgaagatattgtagtagaacatggtgattgagctcttgactagtgacatgacantcccgtacaggacttctaggggaagggatgggtctgaacttgtcagcgcttgcactcgcatagcacttaggatagagcctaccttgagcgtgaccaccaccgaagacaggtcgaccgtgggcacctttctacacagnncaccgacatagatactgtgtctcgcaggtgacggtattcgacgggacatacgaagtcacatatgtactggacgccatgagatacagagataaccctgcttcgtagcaagagcactccgtttt

SEQ ID NO: 14895 - DNA, 3562 bp, Emericella nidulans
ttgatacattacgggagaacaagagttgaagagcaaaatgcaaagaagaatatgcggcaaaaaataaaagacctttagctggtagctagcattgagatatgatcattgctcaccgcgaaagcctcagttagtacgtccgggtgcagtgtagccgttgtccggcagatacaggtgtcgttgcgctccattcttcgtcaagactaccatcctgatcacgccgcccgagctgccatcccacttgattgcctcccgcagtgcccctctgacaaactcaacaccctcttcttcagtcatgttctctttccagttcgcgtcacagtaaccgtagatgtaagtcgacccggacccgccgatggagtatgcctgcttgtgcagcgatccacccagcggtatcgaatacacttggccgccgtgccggggatcgtagcccgcgatgattattccggcacttgatgcgcaagttaatcaaacaatgcattctgagatggcacaagaatggcataccttagcatgtccttgttctcatagcatagctcctggaacagcgcggctgcaacctgtgtgctgggcggctcgttattgacgatggagtacatattcaggtggtaggagacaatgtccgccacggcctgtgtatctgcggcggagccagatcggcagcaccaaatggtatcatttacttgcgtcaatttatcggtgactcgattggcgatgtaagctccagtcgttgttcgactgtccgcacctaggatgacgccgtctttgaagttgattgccatgctatcagaaagccggagttttagtcgatatggctttgaaaaggctgatgaaaccactcacattgatgttcctaggctaggaaaagcagtgttagtttaggtcacgatgagcgagtttgaagtaccggaacttacttgacctcttcactcttcaggtgattcatgtcaatgtgaatcccatctaaaacagatatcagtaacgccgtaaaatatatttgagacgccagtgaggagcttctaaccttccccgagcatccccgtcataccatgactggcgaccatagtgtttgctaggagtgttttgtgcaagaatttgactagttccggcgtagacgagagcagagcaagcgtattttctaagagcggacggataaatgaaagttgaagtgtatggtgcgagtagaatatatgtgatgagaaacagcttcagcagagctcaggcaggcgagccttacgtgggcaagcaagctggagctgattccgccaggcggtcagggcaactgggactctcattggtcaagcctcccgccgtcttctccccgcaacatcgcccctagcctcctgagtgtacatcagtctatgcaatcaagcaggcttacagccttctatctaacatctgtacatccgccgaggctgagttgcgcactgggccggcttatattgcccagtttcttgttatatctcggcttggagcagtctaatctctgcaattactgtcattcttgcctgcgctttcggcatccgtgcgactcaacatgtcggaatctccgccgcccccaccgtcatggagtatagccagcatgacaaacagcgccgttcagttcatgcgccttccgatgctggcatcttcaggcctagctgtcgtcgctagcggtctcttatatttcaaacaaaagtttgtcccacctgcactgcaatattggtgcaactggctgaatcctcctgggaaactgacaacatgtgcagcgagttaatttatccccgaaatatccccgcagatgcacgtacgaatgtgcccaagcctcgccaatttggtatcgaggactacgaagagcttcagctacgtactccggacggcgaaagcttgcatgcttactttattcgtgctccccgcaaacgagtagaccagaatcttactgtgttaatgtttcacggcaatgcgggtaatgtgggccatcggattccaattgcgaaaataatgcaagactacctgggctgccatgttttgatgttggagtatcgtggttacggtttatccaccggcgtgccggacgaacatggactaaagattgacgctcagacagcgctcgatcacttgcgactaagaggagagacggcaaattcacggattgttgtatatggacagagccttgggggagccgtggccataaaccttgtcgcaaacaacgaagacaagggcagtatctccggtttgatcctcgagaatacctttctgagcatccgcaagttgatcccaaggcatgttcccagttccatctcagcttctaatatctgcacaatgataacaatatccagcgttttccctcccgctcgataccttgctcgtttctgccatcagacatggacgagcgaggaagttctgccgaagataacaaagactcctatactttttctgagtggactgcaagacgagattgtgccgtaagccaacatgaacccttttcagattggtgataaagcccgtaatcaatgaattgacttgcaacaggccatcgaacatgacgcaattgttcgccatctgtaactccaagcgcaaagtgtggcgaactcttcccaacggtgcacacaatgacagtgtcgcagagccagattactttgagcatattcactcctttgtcactgaagaggtcctcaagcataactgatgatttttacttttctacctcatgacaccaacgcgctgaatactcaatatgccaccctcaacgatacctgaatcccactcgttaatttacctgcaaagcgataatatgatgcagtccgcttctgggtatcagcggcttagcaactcataccactaacccaatgatgttcttttcttgtactttacccccgcctaatcactgacaggaccctgcggacggaagtactgccggcgttgtgtactttcattgtcacttttatcataactcgaatatcttccgcgtttagtcgacccaactacgataataattgctgatatgcgatgcgcgactgggaagtttggaggtttcggttctgcgttccagattggcgtcacggtttggatttggccgagtatattctggagttctttcttgttattttaaatcaataccatgtatcaggctttgtcgtttgtacagaggaaggctaattgttgtaagtacaaatttcagtcaagaaatgttaaatgttgtacaatgctaaagtacaagtaaaggatatctacgtaatctacaatttctccgcttcagccatcaactcttcaatcctaaagttctgaacatcgccctgggtaaacatgcggagaagttccccctttcgtccactcgcctggccgccgaagtcgtagaaccgctgcacgcagctaactaaccacgtagcctcggcagtcgagactcccgagtcaggcatcacctggccatgcataagaaccagccccttatcatccgcaaggtcaagatgatgcgttatagttgtatgcggctgcgctaagcaccatgcagcttatacgcagccagcggagtgaagatcacagtagaagtgtgcgtattaactgccgacggcggaggctggtgggt

SEQ ID NO: 14896 - DNA, 1762 bp, Emericella nidulans
acgcttggtttttgccggaggtcgatactcaactcacgaatagcactcttaatagcactcactgtctggtactcctgcaatttctctccaaagaactcctcacgcgtgagctctgtggaaaactcgccagcgtcctccgaattcccaccaaatgcgtctgggctcaaaaagtgatcaaacaagctcaatgggggtgcgggtggtgtgggcgaagagaattgaatgtctgtaacacgtcaggatggcttccagagactcagggaaaatgaccgtcgtggaatctaacacctaccgaaacctctctccggttcactccatttcagatgctcccgtccatttcttcccagcaagctcgcaatatcatccccaggtccagagcctgctagactagcaagcgctgtattcctccgcttggccagcctcctcctggcttccaatgggcccgggacccgactctcataccgtcgctgtccgctcacgaatcgccggaatgtcgaggccaggagctcgtcgctgacccatagatagtccgtaaaggtggtcggagacggaatagcgccttgcctgtaggcacatctcccgagagacatggggcaatggtgccatgcgagcaattgagtgctctgaggttctgcgtgtggttgttgagcttggaccgagccgacctgtcagaagttcacgattgcaaatgactaagccatctagttcttttgcaacctcaggcagaaacccttagtcccgaggttagcatgaacatggttctatctttcccacatacttacggggaaagtttcatgacacgcttcaggaaatcgtttagacagcggtttcgagatctacacagagcttggggactacgaaactccagctatcgtaaacttggattcatcttacctcgtcaggatgcggcttcctaccaactattacatgaaaattaaaataagcatgaaccgaagtatcctgaacactgcgccgaacattgaccagaaagacctcaatctccgcctttgaccatcccagcaaccgcagtggcttataggaccacccagacaggccctctaatatgttcgactccatccactgtccaatattacgcagatgcggatccgtcggccatctattgacaggagccttgaaaatccgttcttggacatccacgaagcccatttccttcattccacgggctagccggtgcgctacgcgccactgtcgggggggatctgttacctggccggactgtatttgtaggtcgcaccagtcttggaatgggtatgtgctgaacgaggactcatctaggggcggcattgtgccgtcatcacatcggaccattgtgtcgaattcgtggatctcggcccagccgcctggtctaaggtggctgtacattttccgtattaggtctttgtatgaggggagagctcctgagaggtggcctgcgtggatgtagtcgagggaatttcgatcccaaagccactcgtcttcagtgaagtcgtcaacgatgaagtgaacattttctgggacttcggttggctggcagggcgagaggtcggttcctgtgatttgggcgttggggaatatttgtgctgcggaaaggaagtcatgagaacgctatgtcatggtccgggcctgggacataaaacaaacttaccaagctcgattggccagatcccagagcctgtcccaatatcgacgatagtgcgtgggttgatgatgggagcaaagaataggcgctctcccgttaacatcttgcacaggtgatgttgca

SEQ ID NO: 14897 - DNA, 6193 bp, Emericella nidulans
cccatgacacgggcacctatctcccacgcactcgtacaatcccagcgcacagtctcctgagatacttcagtctcttcttgtggccctggataaatgccaacgacatctctccacacagtatcccccactcccagctgcccactcacccaccgccgtgcaatctctcccgtaacggcatccccatcccttctcgcatccaggaccagcagagttccggccagaatccaggcgagcgtgaacatgactcgacgtgcatcagcaacagccagagctggcgaatcctgcaaagatgtaaaccgcgccttaaaagccgtccacgcactcctcagtccaagtccatctgggaccgcgccatccccaagcagccgcatcactcgctcaacccatccagcgaggacgtcaaagttctcccccttgagcaggaatcgcacacactcgctcgccaggacattggtcgtcccttcccagatagagttgacgaacgtattccgcaggatccgcgaaacattaaactccggttcgtctggctcatccatgtaccccacgccgcccattgcctcctggcattcctggactcccacaacagccatctttgatatcacggcctttgagagtgcggttagggtcctgaagacagtgtttgcttctgcgcctgcccttgggaggtgcgcgagctcgcgctgaccatcccgcgtcttgttctcgacgagatccatgacagcaatcgtgaaaaaggccagttccatacccgcacgatgccgtccttcaagctccgccatgagtcgtaagtgcataggtataagccacaatggttccccgaccgtcgttctggtcttcgcaaaagcctttgcgatactgagcgcccggcgccagttccccagcgagccgaggaatgtatgtgcgcgcgtgatattcagcagcggggcgatggtctgcacccccctgtcgaggtcgccgacgagatgagcgcgcatgtcgacgagctccagctccgcagtgggcagctcttttgtacccatcttgttcttcaagcggtggatgcgcacaccgttgcttacctcgtggcgtttcccgtccttgtcggtgattgtgcggcgcagcggagcgaggaagacactcagcttgccggagggggtcgtctttgcaagcagtagggcaatgttcgcgtctgtagccgaggagaagaatttgaagccgttgacgaggtactcgccttcgtcgatctgaggctgacccgtcgcgttgcgtaattcggatgccgggagcggcgagtatgtcgcccacgtctcggtattctgtacgtcgcttccaccagcgcgttcagtcatccactgtccagacgtccaggcgtcagtgccgcgcgaggtgagacggcgcaatgcgacctggaatggatggtcttgcggcagcgatctgcgggcgatctcgtttgacaggatcagtgctgcgccgtcggtcatgcttgcgggacaggaggtcaggcctgaggagggaccggtcatgtagtttctgggtagagtcagtgtttgctagttcactatctgcaagatcttggtggttggaaaagggtgggatagaacgtacacggcatactgcgccatcctcctctccttcccgtacttgtcttcatagcccagtgctattatcctacgatacacaccagccatcagtaaatcgcattcccgtctcaaactgaaacgagttcaaagataggagagacaaacccgttctcagcgccccaagcacccaacctcttccacccctcgctcgtgaccaaccgatccacgccatatctctctccccagacgttataccacttcacatatggcaggttccgttctgcgtcggcactccattcgtgtatctttgcggagaccgcctcgtcgccgagccgcgttaggtgtggcgagagtgcgtcgacgtggtgagggatgtaccctgacgcgacttgttagtagaccgtacactggcaagcgcaagcaagataagacgaagaagcagtacattcaagtattctccgcaaacttgggtcagtggtgaaggtattgcctagcggtgctggtcgcgtgatgtgcccgctattggccgttgcgggctttgaagtgggcgacatttcttcttacgatatgcaattagtgcaggatatctagtctgaaggaacaacttcgataagatatgatagcctggatgtagaaggcgagaaccaagcgcggggatggcatgatgatgaatcgcagagcccagccgagggagccgaggttatttgagtgataggagaacgagtgggatgtagatcaagagttgtaaacaattaaatagcaatgatgccatgccacccccagctcagaataccgccgcgcgaaaactgtctcacaaaatccaaataccgcactctcaggtatgtgcttattggtctctggacgaggctgcagatgcacatgcagatgcacatgcaggtacagattctacatatagtttcacgtgaaattagtggtagatcaacaagtgaatgtcaccagtcattatataaatataaatacatgtatatatgttcatttgtttctaattgtatgttatatccaactgtgtccaaagataaaggctggatctgccagcgtatcgagtcaactggaaccctgcaggtacatgtatcttatccgtctatccccataccgactaccacattgagttgtcattgcctacatatttagtgccatactcatattctatatcctcacctctggggttacaggggcgggaaactggtactcaaactcttgaactcatgcctgtaagcaacatctgggcgtagtagttcgtgtatcagtcaaaggatgaaatcaagaatatcctccagataataaagcccatattttctaatcaccaagcaaggcctttgtcgcccagacagcccttgctattaagtttctcacaaaaactcactttctcgcttcccttctcccttccgtcgttgccggccgtttttggaacggcgggccaatctcgccccccaatctctcttcttctttggcgtgctccataagcattcttaagactctcctggaaccttatcggccctttctcattctccgggtgcagctcgccattcataaagacacccgtccgaagactccgctgggcaccttcacagagttcccggtcttcatcaaggacttgtcgttagaatgctaagatcgcgttgaactcttgaactgttgctgcgtggtgccggtaaaacctcgttttcgttcttggatgtttggccgtcacggggatcatgcgctggatgtagaagaatctattcctgcaaacaccacaaggattagactttcagctcagcttcgttgcattcaggaacgagcaatacgtaacggtcacactcgtcccggggaagaagaatgtaattgcgcgttgaaattgcttatcgatgacccccttattcacgatatgatgctccatataccgcgcgtttttattcggctcaacccgatactttggtagatccgtcacgccactgatgagtggatgggatatcgcgcagtggtagctcgttatagttctcgatctgcaacttccagttggagtcgacgtccatttcccaggaatggtcgaacttgtagtctgaggcgaattcaatttgcgcacgcgatcttcttggtcgacagcgccaaactcgtctctccatttgatatcgggttccctagcttcgaggttcgcccagacaaagccgaccttgtcgacgtgcacgtggattggaagcagttggcggacttgtcaaagttggggagtgtctcgaagcgaggcgctttggcgaggttgcctctcaatccgtagaccagccgtagtagcggcaggtaagaattggggctgtccctcccgggccctgacgacagggtaagcgcggtggcggcagatattgtggaagccgttgactctgccgtcgcggactcggacaaggaagaaggagaagtcggcgataatgaagaaaaggtagtcgccggctttgttgaatcgattacagtgagtaagaagcatccagcgtttggagagaatggctctccgctcgagctggtacattgcttcggagcggtaccatgatgctggcaggcttcgtggcgcctgttcctttcctgtgctgggaaagtagctaaacaatcgccacatcttaggtatattggttgttcatactaatcacttgccaggtcgactaacggtggttgagctaggccattattcaattatgagatactgtcttagatgggggttggagtaaaggtttaaaaatgagggcgtcgtctttatctaatctggtatgcgataagcagtagcagtcagtatatggggagtagggcggcatgtgtgttcaagatatcgcgaaccaaatctactccaaatcagctaaccggccgaaacgcacagcgccattgcactctctctgactcgtagaggtccagtatcatgtattattaacaatgtcttggatggcaaggtgggtgctgcccgtaaatccttcttgatatgaggtcgagggcatggcggttacctatgcggccgccaggcgaatatcgtgcaacttccgcagctttcgtacgaccttatccggattagacaggtcaacccaggtccaggttccacgtctgacgagctttaaaagaacccagactccaataaataccagaatctacataacaaaggagttagcatttgtggtttccctggaattgcgactcacaaaaaggaacgaggatagaaaaggaaacaaatagaagccaccccagagcgaagctccgttggcaactatcaaaacgaaaagacagcctacgaaagcgaggtaagcgaggtagggctgcaggggtccgcggtacggataatcgtcatagtctgacttggaaaaccgccgtacttgtggaatacgttgcctttcaataacggaacgatggcggctgatgcaatggtaatagcggatatatgcaagagcctcacatgtccagacgacaacaacaggaacactccccatttgcgccaatatctcaacgaacatgccaataggggttgctgtggtggtaccgccgcgtactggaggaatggtacccagacaaaagcagctgcactggtaatcatggcacggataggaacctttcgggtgttggtacggcctaagaaggcgagaatctggatgtaccagggttgccccctgcctccatctaacctgctggtgagcccaaacagtgcgcgtgacgcgacatacagatttgtactggcgcaagtaatgcaagtgaagacaagaaacgcgttgaagacgttgtggagatggggaatcatggactcggcggcaatcaccacaaatgcagaggcagtgtcagtctggataccgggagcggagggaagacattcggcggtcgtgctgatccaactgaggcgaggaagattgcagtgattccacggtatgtcaagcgagacgaggagccgcaaatcgagtaggcgactgttgccagcagcgagaagtacattgatgagaacttgacagtgctcccaatcaggatgccgttacgttgcatcgcttccacacctgtgctatcgagcctttgtcggtgcgtgccgagggcggactccaatgctgatgctgccacaatctcaactccgacatatgcaaacgtagctattgataggcacattctactacgttagtgtttgtatggacacgagacgacaaagccttacaggaatgcaattccccagctatcagcagcatcatggtcaaaagcaataggcgacgaccaatctattaaccttagtattgcgcaaagttgtacgtgacggggagcatagcatacttttcatgcctagatatcctttttcgccggctgttacatttcagtcagctgctctagctgttcaggaataagctacctacctccagcattgatcacgatcagggcgatgacaataactgccaggcacgcgagcttgatgatgccagacagcacctctatcaatgcgtaaaactgccatacgatcagtttctgcaggatactgcaggacatgagtggaggcttccaatacctcaatctccgttgcatttatcaatgctaatatagatggaaccaggaagtagatgactaccccacgaagacctttgttccgtcggcgccagtccagaagtcgacttccgcagccagagtagattatagag

SEQ ID NO: 14898 - DNA, 2387 bp, Emericella nidulans
tctacgggataggataatcggttggtctgacgttgggactgcgattgtagtgggaaggccaagcaagcttttatatacttactgtctgatcggatttagttccgctggagataagcgggcggctttagtgctctaattccgctccgtcagctctaagagatgactgttctttaacaaacttctatatggcggccggtgccctaggaggaaatagaaccatgtagtggaccagtgacgccacgaccatacaatacgcatacgcacacgcacacgccacactcgaacacatattcctcattacatctaactaaaagacctttcaagtatcaatcatctgatgatagagaccacagtcaatgggcaggcagccattttcgtacgctatgtgcatgcagccactacatatgactgtcttcttcgcttgtgcatcccataatacgttttgtttaataaatcctaactacaatatctatgttcagtaagcattccttcgaaactgcataagaatggcagagagaaggtttggggacgctaggttaacgaggagtccatgctgtgcctgtgagaacacgcatgcggccgctgtggtagacatcttactaggctaggcagttgatgggatgtatattaatgtcgtgcaacatctactactgtgtatttgtatgatgttctccttgatgacttatgaagctcaatcctagacagagaggcatgtgggagcgtagactacattggctaatgtaagtgatatactataaaaccatattatatcaaagcccagccgcatccttggctccaatgccactaccgaatagttcgaacaagctttctgactggggcagttctctgctctttgacaatgatatcttcaggaatcttgggtatattcgaccaaacagtcatctcagctcaggagaaacgagcattaagggagtaattatcggaagcattggcttggtagaaccatagcctaacgacttacctcccatgagggcacggtcttgctgcctctttcgggtcattgaagattataaacatagtatcagcatggccgttctgttccaagtatctaggggtttctttctgaataaattaacaaaaactgctaaagtctcagtcgcctaccgtgagtgatggttcaagttcagatagaggtcgttagggtatggcagcaaggatcaggataatcatgaaatcataagtgctcagcatagaccttaaatactatgtgaaggcataatctatctaaaaccagttaccacaagaatcctgaacccagaggacgtctctctcttcgtccgtcttccggaaaccccggttgtagatcatgcggtaggcatgtaatgtggctaaataaaacttcacagcaggtgaagctgcgtcagactcgtactgaagatgccggcaatctgttggtgaagctgtccgtcagagttcctgtcacactaataacctatttgatgaataaaatcaatctcgcctagacggtacttccattacccgtaaagaggctgcagttcgctgccaggagactaaatagtgatcaatgagtcaaaagcttggaagttgtccgatgtacctagtatttaaagaatacagaatcacacgaaggataacagagttccttaatgctactgttactatggatgcctcgcttgctaatctacactcccagccaaccactaaagaccacaatgggagtaaaaggaacaactgagatagatggtttatatctatattagctgtggtccatatcagtaggctacctacacagaagtcgcgggtcgggattgtataaaatccatggtagggtggatgataaaacgggagacggcaacgtaacaaatgctatgacagcaaaagctcaccggcttagtatgcaccctacatagagtatacatgtgggcagaaaaccgaatcgattaataagccgtggaaatcaaagataagatggcggaactttgaccagctggtcctggggctggccgtcgatagcttgcaggatgacttcaggttatggccacactatattggtcaattctgggtggcgattgcgtctcttcactaatattcactaatatgcgccaaggagccgtgtagattcagccgtgacatccacgatacccagctgaatgagctccatcatgctggagtgcgggtttagaatgggctgacgctgatactgtactaggtacaatgtttcatgaggaccagcggtctacttccacagagctactattcctcttgccttagacttctatgcgatgagatatatggatagcagcgccaaaaaacagcgtcagtcgttcaggaattggcgtgggatcttcagataatgcagatcacaaaaacacaagccatgggatgggtatctacgacaaaaaact

SEQ ID NO: 14899 - DNA, 870 bp, Emericella nidulans
tgataaagatttggtgattacactaggaaagagaatacagactataaccgtaagtacccactgacaggatttggcccttcatagaacaatatccctgatgggccatagcaaaaattaggatctttgactttgcaacaagatgaggagcaagatatcgagctgtttgactggacgaacctcgctgtcacccgggcggatattcttgagcagcgctttaattcattactcgatcgtttccgcacagccgagagtacaatcaagttgctaaacaagcaactggaggagtttataagctcaaaaaaccaacatgagcagcagctattttcgggtattgtgcagttgttgaatgagaagaagctgaaaatccgcaaccaacaacgtctgctggcctctgcaaaggtcgatccagagcgacgtaagttatcaatttgtactgtccgattaggaagctgatttaaattcggtttagtctccaaggtgcaggcagttgcgttcacagataactcgaggccaaaaccaaagggagcaaagggtggaagacaaaaacgttccgcagcaacattagccgacgaatttagtgatgaccgtttcaagagattaagtgtgaggactgcaaaaatgtcagtcagggtgcggacaagagactgctgacaaagaccatcgactcccaaccacttgagacagagtgtcaacccctctgctgcgaaataatgtgtaggttcttaaaccaacccactaccggaatatggagcagggcgtttacaattaaaaaatgccccccgaaagggttcctttaaaaaaaaaagaccggctgattttctttggggggagtattattcgggggcaagaacattttaccctttttaattt

SEQ ID NO: 14900 - DNA, 2079 bp, Emericella nidulans
gactgacgcagaccctgtgaatggcacgagcgactactatactagccttgagaagatggaaaataatagcactgacgtgtcggggacaacagttgatagtgagactggggatgaggttccggagactacgttcgccacgcctgcaccaaatgagagcgcgagtgcgaccgtatcaggatctggcgttttatctaggacagtctgaccagctcgacgtggtcttctgccagccgacccaccagcagtgtaaacggcacttctggtgaccgtaagaggggcaagaagcgcctgagttctgagagaggcataggccgcaagtctaagcgggcagctgcgaagggagctcatgacactgttgcccagtatgcgtaagctctccattctggagaattagggcacatggttttgacagtgtatagcgtatagccagtatgtggtatagctttctgtgcgcacattgccgcccaggcgccgttagggcacttttcctctgaggcatgatttttgagatagccataattgaagtttagctctacaggagaactattgattttgcacaaactaatctcaacggcgcaataatgcagccttgtgcagagtaggtacaaaatgttagcaggacagcctaagcgtatcgcagatggcaccaactcgtgctgcgttaaatatacaagtcacatatacaagccaaatttaggacgtaaaccccaaccactccatatcacgctcctcctgggtcgggactgagcgaccaatcccctccgcccaaatttccttcaacttcctcccaaaaaaatacgtcaccctagtgtcctcaggctcttcaaccataacctgtttaggcgcgttcccatagctcaacacgacagcccaagccgcgagtgtggtgttgaaggctgtcgagcctataatagtatcttcagatcccagatatagctgtacttttagatacgttcctgtatatccttggtacatgttccgaatgttgccagaagagcctgcagagtaaattatagctcctttgaaaatgtccgggtagccgcctgccgttgtattctgcggggcatttagatcatctcgtcttctttactaaaactgtccattgaattgtagaagccgcgtgagagagaagtagcttactgccatattttcgccggacgaaactcctgaaacaaagactctactctgattggcctcctaagttgtgaaagcgtatctaaccatgttggcgatagactggctggcgcccccaccaccatgcaggaaagatttgctagatgttgcatcccatgctccctgtggagactaggggtagataacaacgaagccgtaaatttcagctagtcttgcgtagggcgtggacaagtattgttgcagggaggtgccagacgcgccgtggagagaaacaaggacgccaggggatgcggcgagtctctctgggacgtaaaagtacatccttatgctggcggggttgtgatcaaagttggtaacctgtgctaatgtagcacgcgtcgcaagaggcgctgcttgggagagtgcatgaagaaaaacagcgaacagcaggctaagtagtgttaccattccggctgagttgtctagaatgagaaaagaatgttcatagcgtgaacccacaggtcccttagagggtcacctgcttttatatcctgttcttcagaaatgtatgggcctgaactaatgcgtacctaaagactctctatctgtccatggtaacccggggccccgcaaaacgcgggaacggggttccaccacggctgccactcaagaatatccgaccgtcgaaaggaagctcctggcaggtttccagaatgtccagacgaagtgtcagcctgttatcgagttattaacaccagatatggccaatcatagcagaataaatatctacggtgaccggatgctataactcctcaacgcaactttgaaatctgcatatatacactcataaagatatagttgccatatggataacagctatacctggtaattctgctaaaataacgtcttcgcttattaaaatcggagccttggtcttgcctgaggttcttagatacaacatccacg

SEQ ID NO: 14901 - DNA, 6107 bp, Emericella nidulans
tacgcgcatatggggggttgattactgacctatacatctatcttagtcgcttcgccaacgtggctgttggtgtcattatggttctcggtggtatcgcgcaattcttcccaattagcctgggacatgtcatcaccggtgtatacgtgattctctttggtctcagtaagatcttccctcagcggacgaaaaacagtgtgtgcattgacgctgatgtctgtagtcgtcgccggattggaattcttccccacaatcccggattatgtctaccgctatgcgtccttcctcttctcgttccttggtcgcggtgtttgtaagtcttcattcccaggagctgcgtcgctcgcagtctatgcactgacacagcgataaagtctacatcttcgttggatgtctcatcctgcatggccacgttctgcaatacattgctggttccatcgtcggcttcctcggcattgggtatgctgtcttggaattcgtcccctccattgagccgccgtcgaacatgcgcgaggccgaccagagctggggtgccgagcaggtcgtctagagttcttaaagcgtgttcgtggaagcgggaattgcgttgcgacagggccggcgctacgtgctctgcgcagccattacgatcgatgaacggacgattgtttctgcgaaattatataccacgagatgcatgtattacgaattcgggattcttatgatgaacgatattcctttagtgtgacgaatgcctctgcgacggtgaatggaagatacaggtgaggtgaacggtgtgcaggtatacgtcgtttatctgtgtgcgcgtttggactgcaggcggtcttgcttgcccaaaaggccattgcaatctatttgagcatgtttcatcaatttcgaatctactgattctttgtctggttggtctgctcgctagcactgtaccatacaacttgtagagctattattctattctgatcgggtataacttctgtggcagcgaacttagtcatcctatagcaagaatgcacgtatatagttgtactccactcccggttttgtttatctgatcgtcaataatagcggatcgcactatacatcaataacatcccctgcctgcgccattatctcgagtgtcaaacgtctagcgcgaaccgaaatcgttcccggctgttgggccagatgcttagttccgagaaccaagaaaagctggagcctaactctacgtattatctgatccgccgttcccgtcttccaaagattgcaagcgctggctaggttattaaagcgactttatcccgttatcaggccggatgaccacaaagtagcccaggggcgcgggatccatagctgagtcaatggaactgaatcttgggtcctagtccatgactctaccaagcaagcaaagtctgcggaaacatcgcagatttgcaacccgttcctctagacaacctggtcctcatcctcctaggcacaccgatccacagctcatgttttccccgtcctcgagtgtgtcagggtctttgggaagagtggtctggacgcggtagtagcaataccggtagcggtcaacctgtaccaactacacagtcgtaccttggacatggccgtacaggacagggataagccgggatccgagcgtgggctctggtaggacgataggctgatggcagcgttgtattagtgcaatcattatagatcgatatcatgattctggcatggtccttgttgtgccatgtcgcttcccgtcgttaggagtcatgccatgggccatggtcgggagttggtacttgtctgaccagggcccgaatgtgtcgtgacaggggtcctgattgaattatcttgccaaagaataagaaataaaaaatttctgcaccaacttggctttcagagaccccagagacggcatctatgtgtctttggatctttctggtgtcatgacttgctgccctgtcctcgtaacctggacggtcttagtaaggtaagactgctgggacgaatcacaaacgccatagatcaaacttgtcagctcggggagataacgggcgaaactccggcggctcgactgaggcgatgggccatggccggaacgtctcgtcgcccaccgagtctcgctgcagccaatcacagcaagcgtgatgacactacgcaaatgagcactggcttacctgcattctcctgatttcgatcctaaactcagacgggcagcggtggagcagcgatctggggggaaacgaaaggcaatcaaaggcaacaggcaaaagtccagagtgagcagagccactttcttacatttcaggcaggggaaacgaccgcgggtctcgcccccatactaaaacttatcatttccaacctgtcggactcgcaaagcctcctgaaaaagcaaaaacgttgtcgaaggggtctggaaaagggatccaagccgaagggaaaccccagcgttctagctgtagatcacttgggagatctaacgacttgtgataagtcccagacgccagctgccacactgtcggaacccggaagggccagagagaaacagatagaaacgacgcccagggttggattcgacccggaggacaaagggagtattatcgtcgtctcaagcttcattatttgccaaggtacgctgcccctaaagcctctgtcacggtcatcatcatcagttggtcgtggcatttccaactgtgtggtcgacagggtcagatcatatcttctccttgctatcattcttgccatcatatctgatctctgtcggcgccgatctttcttatcctacttctgcgccctcttgcttacaagtacttttgtttgcgtttctgcttcaaaaattccccttttcctcattctcacctattggttctaccagaccgtcgccttctccgacagcctcctgatcgaatcgccactgcccagcgacctgtgtttccaccgtgaccgtgcaaaagcagcccgtcatcaagtgcttcagttctgcgatagtccaaacctccattcctcgtggatttgccagatttctcggtgtatcctcgaggatcttattcccgttatcggctccgcctctttagagtctcactagttgcagctgccagcaccggtcgatctggcatcctagcctgacttctctagccctttcttttctttttcctcctgcaattcatcttgaccgacttttgacttcgtcatacaagaatttacgctttccccgagagtggtacaacatacatcgcacgacccaggtgtccctttatttcgaccgttaagttccagcgagcttcctcgtttttccctcgattgttcccggagagcctttcgagtcgctaggctctacatacaggagcacaggcaaacgttagagatgttagcgtccatcccgcacatggagacgctgcgatccctccctcggaatcccgacgtcgttgcgcgacacccatcggcggaagacctagacgctgcccagcagcttatttcgtccgcccaagccggtcgagaacacccacaggatcgacattacacggataatggatctcggaagtctgaggcgggggctccgcacagtcatcatgagggagagtaccccatagttcagacctccgagactccaatgaacgggcatcatgttgaaaagacatctccgaaatcccaaaaggatacctcgttcctagggcattcttgcaggttagtttgacagttcacgatctggatttatggtgcactaacaatcatctttcagtaattgtggaaccaagagtacccccttatggcggcggtctcctactggagctatgatttgtaatgcatgtggtctctacttgaaagcccgcaatgttgcaaggccgactaaaagaaaccgaacgcaagcaagtcccgaggcgtatcacccgcaaaaccaatccgttggttctcaacctgatcccgctgttactggaagcgaaggttgtactggttcttgcccgggtggtggaaactgcaatggcacaggtggtgcagaaggatgcgacggttgtcctgcctataacaaccgcgtttacaagtcgactgcacgaggaaacgtcgcggcgcatgcgctgaacagggcaggaaattcggatgctgttccgtctccagaggctgaagcacctgcaaggaatagtggacaaccagagggtaatatgctggtggcttgccaaaattgcggaactacagtgacgccgctctggcggcgtgacgagaacggccatccaatctgtaatgcatgcggtaggcttcatccgtcctctcccctttcactctgacaagcaattaattattggatatcaggtctctattataagcttcacggttcctatcgacctaccacgatgaagaagactattatcaaacggcgaaaacgggttgtgccggctctgcgagaaaattccccgactgctgctacccattcttcacacgggtcatctgcatcgccagaagcatcgtcaccagcaactctggcctattcacatgacgagcgccatcgatattacagttcagagcctgttgaccaataccaccggatttcaccggcggcacagaggccatttggattcgcaccaccgccggttgattttacaaatttcaattccggggctgtaacgctacctcaccacccgcctccgcctaggctcctcgagccaggccatccacctctttcccaattcgctcgacgatcaatctcaccgagctcgtcagggaactccaagaaacgaacacttgcagaggccggtgctaatacagacactggccccgttccaactacattagaggccgggtcgaatcaacttccacccattgtctcgtctgctaatccgccaccacccgctcgactaagttcaatatcctctatcctcaaccatgctcacgcccgcgacgaaagcgggttagacccctctcttactgctttgggccgccaacagcaatctcaaccgcatcacccacaatcttcaccgcttgcacctacccaggcagcctcccagtcactacccgggtgtatccaacatggataaccacgttgaagatcgccgcgcgaagctccagcgggaagcggaagagatgcgagaacaactccgagctaaagaaagggagttagcggagctggcgggtcaatgacaagagaagtctagcgcgttcgacctttatttcgagattcgactaataaaactacttattgaagcgataaccttttcagttttttggagggtctacttcggcgcaactctttccccgcgagataccacgtgtacgttcagctactgtctatctgtctgatgtattcatcggatttttttcacttgtcggcactaaggcagaattctccttttcgtcttatttacatatcctttttcatctttcctttttatttttagcgatggcgggattagcgttttcaggaagaaaatggtacggtattgggggggttttatttggtcaaattgagcctataacttatggaggtcaacctggacaggcggaccaaagatggagttcaactgtactagagttaagaaggcatagatttaaatcatattgttcaataatccgttatataatccataagatcgcctatatcacaccttcgtctaaatattctatgactccggcgtcagattgactattcagatgctcgatacaatactccatgagatcaggaacttaaggaggaagggattttgtctgcatgctgtatgtcacatcaaaacccccgttccgtccgaccggtcgtgcttttactgtaatgggttacagctaggcagcacgggcctgtggcttacagtctatagagtagaggcggctcgtagtcgccggtttaacagttaaaccgttgtattgatcgtcctcaacccgcttcggaaaattgatagttggggattccgtatgtactctgtacttgatagtaaggatatgatgatcgtggggggtggataatgacattatttctcaccaaagcagatattcagtaagtgctattgcgtgctatgatgcgatgtctggtgcagaaacttcttggggagacagggcagctacaggtcattcttatccttattcatctaatagtccacctcctttagggcgtgctgaaattctcgtgaagatacagcccgaatgtatgttcaatagtg

SEQ ID NO: 14902 - DNA, 664 bp, Emericella nidulans
  unsure (1)..(664): unsure at all n locations
actgcgactaccccaacccacaccaacatacaacaccaccgagacaacataaagacaaccacaccccccacaacacaaacaggggaaagctagaacccagccancgcgctcnaccaagagccagggggagaggacgaccgagcccccccccgcaggggagacatgttctcgaagacagacgaagccccacagcaggggaaagccagcgacaagcgggccggccccaccagnacaacccacaacccanagcaagacacccacacaaccgcgcagccagcaagaaccccaggccccccaacgccacccagccaagccccagacaaggaagcnncacccacgaccacagaacccacacccgcggacccagaagcaccagaccccccccgcacaagccaccccagaacccccgccggaaagccagcggcaacacganaagccgggacaccccacaaagacacnacaccagcccaaagagaccagaaaccgcagagacaccccccaggcaaaacgaaacaaacccaagaaaccacacgccccgcgccaaccggacacccaacggcaagccaaacaccgggcaagacaaccacaangcccgaaagccaacaaccagaaccacaannagaagggcccgcaaaccccagcccccggcgacccggagcgcaaa

SEQ ID NO: 14903 - DNA, 1444 bp, Emericella nidulans
gtcttgtcgtactataatgcgcgatcccacggagcaactcagatggcgggaaaaaaagactttggagttgacggagtggaagtgacaagatggcgacagaagaagagctccgtcgatgccaagactagaactacctaaccgggactagccaggatttgcccatactataggtaagaaatatactctatttctatgcacattggtttattgtctttctcaaaattatatacataactcggggctgataacacgctgtgtaggggcacagatagaaggttaaatgattatgcaatatcccatttcaggagaaaatgggcgtacaggattgtccaaggcttcatggtgagccaaagcagagcgacatagacacatagtgcggacgctctattgggtgcgtggaagacgggatttcgacggcaatatggggcgggcgttttttgcaggaaatgttcttcccgtgagccaagtataggcaagctggcggggcgaactgtccaacagcagggccacccagcaatcacattctgacgaggttaatgccgccgcaattggaagtaaggatgaaaggggcgcagagttgtgcattaagcagacggactgccggtttcttgattagatgccggtctttccaaatgcctcggcaagcttgtcgacgtcattatcctgtgcctgagcaaccttctcgttctccgcaatttcggcatctttgacaaccttttcggccttttgttcctcttcctcctcttcctcctcttcctcttcttcctcttcatcttcactctctagttcgtcaagttcgtcaatgccccacatatcctcggggtcatcatccttgccgtgtgcttctttgcgagactccaataattcgctaagctcggtcacatttacgtcctcctcctggaatttgtttccgttcagctcaatgcgacgcagggccggaagagctgtcttggcagcatgcaagaactgcttgacaccctctgctgaaatatcgttgtactgcaggcgaagaatttcaaccttttggtttttggccttcgcaagggcttgagcaagctttatacctccgcgagcagaaagcaagcagtcaccgacaccgagttcgcgaagggatggccatccactgaccacaccagcaagagcggttgatccggtgatagtgaaggtattatcctgcaggtcgagaacctcgagagcactagcgtgagaaagaccctccttcagcaggtgagagataccttcttgacgaattccgttctgtgtcatcttcaccgaccgaataccagccgcatgagctttgtatgcgtgcgcccaagccgccatactgccattttccaaccggttgcgcccgcagacaatgctctccagcagaggaacttccttcccaccactacgcgcctcctccttgcgctgcgcaagttcagtaagagaattggctatgtgc

SEQ ID NO: 14904 - DNA, 590 bp, Emericella nidulans
ggcaaccaccacccccggaactaccaacgaaaaccttcttctaaccaccgaacacaaacacaaccggagcgattaaacaaaataagaacccaaaaaaacacaccaccacatcaaacacaagacccaaaacaggctccagaccgaaggaacgaccaaggcgcatcaccactcagccatcaacagaacaacaggccccatgagcaacaactgacgcaacaaaacaacaaacgcccctgccacaaaaagacagaacacaccagacaaaggcgaacgcggaccgcacaagcaccagagcaaacaccccaagacccacccaaacaccccacaaccctcaaaaaaaaagaaacaaaccccccaagcacccgaagaacgccgacaaaacgaagccaaacaaaaacacaaaaaaaaaacgagaaaacgccacacacaagtagcagacacaaacagggccctaaccacagcacaaaacgcaaagacctccaaaaaaaaaacacatcacaaacccaaaacccccaaaagcccaaacccaaaaaaaaggccaaaaaccaggagcgaacaaaccaaaccacaagcccgaccaacaacgcaca

SEQ ID NO: 14905 - DNA, 643 bp, Emericella nidulans
  unsure (1)..(643): unsure at all n locations
agcgcttttcggatagaaccactctggttctgataggatcttgagctaaatccccgaagaactatgtttgcattaagaaggcaggtgcgcaatggggggattgatatcagaaatgggtgagccaaaaataatgaatacaagcacttcagccctaagtgtcttcaataaccgtctatagacggagattatttctatgcattatactggcctatatcaactcttgtttcctaagcgcatcctcgggcttcctaccaatgccaggtgaaagttagaatacagccgcagcgcattgagcctggaattggtgatttcctccttaaacttgctgatcaaggtaaccagcttgtctccttctcctatgcgcacctcgaaccagccgccggcacaggatgctgatacgcatcccaataagtccccagagtctgcaatcatgccgccgagcgcaaaaccccgacctagtgagacgcccggcgcgtagtaaacggccagtcgcgtcgagcctaggtgcacagtaatatctggcggatacattcacgtgcacatcgggtaatcactgcgatacgcacgctcgggaactcgtcctagntctgttacccaagactaccgangcgctgcagtcaagacctgatttttgccggggaag

SEQ ID NO: 14906 - DNA, 1834 bp, Emericella nidulans
aaaaaggtagggtggtcaatttacccttccgggtaatttttccaaggaaattttagagggccttaaaattagtcaaaaaaaaacgccttaaaaagctttgtggtaaaggttcaacgttggctttaaaggaacaaaccaaaccatagtttgggtactgaataagttttcggttaaactttgatcgaccttcaaggatgccattgtccattccatatacataacgttggtgttgggatattaattggtttatcaatgtactatactgggctccgcccaccactgacaaggggataataattaaaatataggcaagatggatatttgctcctggttagaaaggtgacttcgccagtaaagcaagctaagcttattttcccagctctcatccttgcgtactgagtttcttaggcatctctacacagattcattttccaataatcaagctagaagtctaagggtcttagatagaaagaagaattccaataaatatctatataagtcgtgtatagcccaagtagcggggtacggtgatctgcgtgctcacagggtcctacgccctcttttctccccaccttgtgtcgacagagatatctaaaactttcttccaaaccacttatattcaaggtattcatatatataacttttatctatcatgctctcttcccgcggcgagaaaaaagcaaagtcctttgatattccctggcgcttcgccgtggccccaacctacgacaaggaagcgaaccccgatggcatcatttgttttgggatggctgagcatgtacaagtctacctattccaattttgtctctttctttttaaccatcaatcagggccctgtccgtgccgatattgcagaatacattaacaacaatgtcaagtttaccacaaactcggtctgctacccctccatgtcaacgtcaaaccccctccccgctgccgtctcatctcatctaaacaagtacttcaagcccctcatacccataacgcctgaaatggttgttaaggtgaacggctgctcagctgcagggaacatgctgtcctttgcgcttgcggagcccggggatgcagtcctagtcagcagaccggtgtatgggcggttcgagcttgattatggcgtccagggaggagtggaaatagtatatgcggatacggatgttaatgaggctttttggacggcttgtgtgcagaggtatgaggaggcattggaaaaggcatgggagaggggagtcagggttcgggcgcttgttgttgttaacccgcataatcccgttggtatgaacacgctcaattctacctcttttgttggtaggtacttgagatctctcaaatgctcacgacgttcaggccggtgctatccaccagaaacgcttgtcgagatcatgaaattctgcaacagacacaagcttcatctgattagtgatgagatctatgcattgtgcgtatttgactctgggagcccagacgcagtcccattcacatctatattatcccttgcaacaccggagataatcaatccgaatctggtacatgtactatacggattcagtaaggtaagagcaaacaggatccctaaaacagctacgaagccctaatcagcatgtgagagcaggacttcgcctccggtggccttcatctcggcttcataatatctcgaaactttgagctccgtcgagcctgctcggcgatgctgtaagtacgccttatattctgtcaatcgttaaaccagcacacagaccatacgaagctaatatgaaaaacctgtcttgccaagcagacgatttcacagtccttcctcggcagctgagacaatagggacggcatttctgcaaaatag

SEQ ID NO: 14907 - DNA, 2241 bp, Emericella nidulans
cccgtacattacctggaggaactatgcaatcaccaacgcgtgcggcatcttcggccctattctggctggttttatgtgccgcctgcggtggtgctggggcagacgagggaccatgattatcggagctctggtgaccatggtcttcttcttctcttatacagccgtgcgcacagctgaccaaaacgtggcatttacctgtattatcaacttctgcctcaatatctactatggcaccctgtatgcctatacaccagaggtagccttaacttccctactctccggtagtagactgactgttccaggtcctaccctccgcccaccgaggaacaggaaatggaattgcgattggactcaatcgaatcatgggtatcgtcagtgctgtcgttggacgagaagcggatgtaggtcgagtagaaaataaattcttggtccaagtggctgactgctaatcatcatgcagacgagcacctcagtcccgctgtatatctgcgcggctctgtatattgtcatggcgattgtcgccggcctgtttccctttgagccgctgggccgacgcagcagctagtccccaaggtactttttgagatgacgcgcttgagatacatgtacaacagacatttggaaataactggacctgttaaactacgctttcaccaactgcagtaacccgctgccgctctccgtgcggggcgcatgagataagaattccaaatatatatatttagttaagagaaaaacttacgctatagacggactgaccgcacatggtttggcttgaccaagatcttgacatgcgcagccttgttatggatcaactccatcagcgccttgtcaataacgtcgtctaaatccacgatcgatgtaatcagcctctcggcctgaatcttccctgcttccagagcagcaatgagctcctggaaatcaacgtccgtgtagcagattccaccagtcaggcgcctctcgcccagagtcagctcgttgagattcaccatcaggggcttttcatggatggcgacgttgaagacagtgccccctggtctggtcgcagcaatggccgtgtccagagtggattgcagccccgtacagtcgaatgtcacgtcggccccgtctgccttcatggccttttgcgtagccacgaccactggatccagtccatccttagagctccccaactcagttgggtcgagcaccagatcagcgcccagctccctcgccatccgctttcgtgacgccgccacctcactgataacgaccgtcttgaccccccagacccttagaatcatcagaatcgctaggccgataggcccggcaccgagtatgagaaccgtctggtccctttgaaacccagaaatccgaatacagtgccacgccaccgcgagcggctccaggagcgcgcccaccttcaacgagattgaatcagggagcggaatgcaggcataatgcttgacaacgatttcgctcgcgagcccgccccctgcggcactgaacccgtacgatgtataccgcttgcagatattgggcaaccccagttggcatgcggtgcatttctctaccccatggtgtcgatcattcatggctgggtttacggctactctcatgccgagcttgagatttggatcggacgctggcactgacgagccgagctcgacgatcgttccactaatttcgtggcccagcgtcactgggagttcggcgccagtatacgggttcttcttgcccgggggaggcgagaagacggggccgccaaggtactcgtggatgtcagagccgcagatgccgcagtaggcaatctggatacggacctcatctgcatggcaaggtctgattatcgtagtcagacagctgatatagggaaatggaaagtaaggaggagtaccgcggctgaacctgctgcagtcttacgtttttcgctccgtaatattggagagctgtgatggtgggagccataatgaactagatgttcatgagtagtaattaggtatatagggatagtgatagagtgactcagggttagatacgtatttccatacctgtttatagatgatctgagtctagaccctcggatgcactccgagaagtgctggttggctgcaaatgcgggggatggtcaaatgacctggatccaggcgggtggagtgatagggtcttctcatcgagcctttgattctcgctcgaaacgcgtctaggctgaggtatgcagcattgccccattctaaacattctcggagtctggacgctttg

SEQ ID NO: 14908 - DNA, 677 bp, Emericella nidulans
gatgaaattagcgctaacacccctgtgtagggcgctcctacatgcttagaaataacaccaaggcgtttttattctctaaggttaccaatatctcacaagcgacaattcatgactcgcgtggtgacaactacatactggcacctattttttcaaacgacttccacccattacatgtacaacacacaggtgatcaccgcatctgcaaactacttttttactactgaaagactacttgtaatactgtcatatattcaggacagaaactctgaccaatttactaccttacgtttcacggaaactctgcactacatacgcctatccagtaccactaaaccacaccccaatcctgagtttcaaactgccaacttgaaatcctccaaggactcgaccatgttatcatttaaagagaacggaactgtaatagtcataaagatcttaactaactggatgaagtataaccccagattcgagtatatggatactatcatgtaccatagtaataacgataccgactgttccattgtagactatacagttgacactaaccgggcaaaagtttttctcaccgaaatcttcgaaatcaactcgagctattaaacactaggaatttcccgaaaagaacacactcaagtccaattaaaatcctttccccattaccgttttaactacaaattcag

SEQ ID NO: 14909 - DNA, 1691 bp, Emericella nidulans
actctatccatgccgtcttttctctcgctataccatggactatagagctctttggcggcgtgatggcgccgaggagttcctcaagcttattcaggacccattcaagtctgcagtacgttttctccatctctccaaattcgccctgctaaataaatggatgaatgaatagtttcaaaccaacgccgtttgggcttcgctagccacgtccgcagttgtcgccattgtcctcgcgctcctcttctccctcttccgacctcgccataccctcgtctatgcgcccaaagtcaaacatgccgaccgcaagcacgctcctccgccggttgggaaaggtctttttgcctggatcaagcctgtcatccggacgaaagaggcggagctggttgactgtgtcggcctcgacgctacaatcttcatccgattcaccaaaatgtgccgcaacatctttatctttctcagtataattggctgcggagttatgattcctgtcaacttaactcaaagtcaaaatactgatggtgcaactgcgtttgtcgtgatgaccccgctgtacgtcaaggtgaatgcgatttggagccaggttgtatgtgcgtgggctttcaacatcataattactttctttctgtggaggaactacaaagccgtcctggccctgcgaaggcggtatttcgagagttccgactaccagcgaagcctccatgcgcggactctgatggtgcgttagctgcatcttgtgatgaaagtgcctaacggttttttagattaccgatatccctccagatctacgcaccgacgaagggtttctacgtttaaccgacgagctgaaccccactgcagcacttccccggtcatccgttggacggaacgtgaaggggcttccgaaattgatcaaagaacacgaagaacttgtgcgcaagctcgagtctgttttagccaagtatctcaagaaccccgatcgattaccgccgtcccgaccaacaatgcgtccaccccgtggccacagagacgaggatgggagtggcaaggtcgatgctatcgattatcttaccgaccgcattcagagactcgaggaggagattcgtcatgttcgggcatctattgataaacggaacgcgatgccatatgggtttgtgagctgggacaagattgagcacgcccatgcggtagcgtacgtggcacgcaacaagcatcctcgtggtacaactattcgacttgccacgcggccgcacgacctcatttgggagaacctgtcattatccaagtcggctcgaaaatggaaggcctttgtaatgttcctttgggtgaccgctttgactgttgtgtggattgcacctaacgctctgatcgccgcctttctctccaacttgtcgaatctgggttccgtctggccggcttttcagacggaacttgaccgaaaccgcaaggtgtgggccgctgtccaaggtatcctttcaccggctgtgacgtctgtgttttatcttctcctacccatcatcttccgtcgcttgtcagctcggactggtgatgcgaccaagactctccgggagcagcacgttcttaggcacctctactctttcttcgtcttcaataatctgattgttttttctctcttctcggcggtgtggacgttcatcgcagcagtcatcgacctgaaagatgggaatgaggattcatggcaggcagttcaagatggt

SEQ ID NO: 14910 - DNA, 1866 bp, Emericella nidulans
aggtactttatggtgtggatatcctgcggaaaatatgcaatcatcgggacttgcagaatcataagttactatacgccaagccaaactatggaaacccaacgaagtcgggaaagatgcaagtagttaggtcgctgctcgagctatggaaagagacgggccacaaaacacttctatttgctcaacatcgaatcatgctagatatcttggagaaattcgtcaaatctctctctggcttcaactatcgccgtatggacggcactacgcccattcagcaccggcaaacgatggttgacgagttcaacaaagaccctgatttgcatgtcttcctacttaccactaaggttggaggattaggtgtcaacctcaccggggcagaccgcgtcatcatttacgaccctgactggaatccttcgactgacgtacaggcccgagaacgtgcatggcgacttggacagaagcgtgatgtgaccatttaccgattgatgactgctgggactatcgaggaaaaaatttatcatcgtcagatatttaagcaatttctgacaaataagattctgaaagaccctaagcagcggcagactttccagctcagtgacttatatgacctctttgcactgggagaagagggtcaaggcccaacggagacaagcaagttattcaaagaagccgaagtcacttacgaggaaaacagggacaaagatgcaccaaaggaacgtgacgctagttaccagcgagacgtagaggccgaaaagcaagacatcagcaaggtaaccggagtcgctgcaatcgaacagttccaaggtgaaccggaacagcaagcgaagcaggagtcaggagaatccggcacaaactccgagtcgcgcctgatggagggtatattcgccagatcaggcgttcattcagcgctcgaacacgaccaaatcgtcaacggcaaacgcgtcgtcagagcagaccccaagataatcgaagcggaagcgaagcgagtagccgctgaagccgctgagcaactccgccgtgcaggcgaagcagccaaatctgttccaatcgggaccccaacatggacgggacagttcggtgttgccgggaaaccggaggagtcaccaatgcccatgcgaggtccgttcggcggacgaagcagcacagccagacgcgccctagccggtccctcgtcggcaagtatcatagctaatctctcttctcgtacgccctcgtctcgaagtgccaccaatagccctgccccaggaaatgagcccagcgggaaggatttcatcacgatgatccgggattttatcacaacccatggagggtcagtctacacacagaatctgattgaccattttaaccggtactgtaccacaccacaaaagtcagcagaattcaaggagatgctgaagcagattgctgttctcgataaagggggaagaaatggtaggggcaggtggcaattgaaaccggaatatgtcaagagaagataatttattgggtttaacgagaacctcgtaagtaaatgaatatagaagtcactggacggccgtagcagggcttggattcggttgctaggcggacgaatgaagtattctgagtgccgttcttgacatgataaacaaacgtcacccgtttctaaatatgttctcagcatttgacctgtattctacgcccgcagattttgtaagtccacaatcaacagaaatagaatcaggcaatatcacgctgcataatagacgatcatgatgtcagcaagtgttttgacctgcatctgtttcatctggcggagttttcccagcgccttacatataactattggagggacccggacaattatttttgtggaggagggaagaaaagagcccaataaaaaagaaattt

SEQ ID NO: 14911 - DNA, 2292 bp, Emericella nidulans
ttttcatacccagatgataacacagtcataatagaccatcggttcaaatatgtgccgatattctagtcaaggaatctacctggaatctcactactaacaatttggcccaaggcgccgaagttgaaagcgaaatagtctgcgaaacactgcgtctactccgtaggtctagaagcggacctccaagttggccgaagtacggacgataccatggatacgcacatcgtttctcccgcggacgcggtagcgtccgcaatataagtgcggactctcaaggagcagttagatccgctcaccgaaggccggattgccagatttactggataggcatgctgatttgcagtttgagacgtacagtacggaatacatgcttacaccgtacagcaagcgccggatgtgacctttgaatgtccgctgcggtaccacaagggacgatgccggttagccaagcggtaaagtcactatgccatccggccttgttgattataggggaataaaattggtcctctgacctcggagaagcgtttatgtccggcggccccgttacattcaattgagtagcctcaaagtgtcaaatatgatctgtcagcggaggatcgcgcacaaagattccaacactgcggcaactgcgccaggatgataacggtcttctgaccggcaaaacgcctttgtctgctggtggcgattcagatctcaatagtccgtgcgttaagattgggctgtattagagtccttttagcagcacatcaagatgcacctgcacctgatgggcccgctaagaatccgggccaatacgattaacgtaattttctagaatcacttctaactcaaagaggttgctttgacacatcaatcaacccttcatttgccatgaagaggcgaaaaccatttaaaaatatatactgttatgtttacctttttactaattcagtagcgatcagagatgacgagcggcgctcgacatcattgtatcttcattgcatctccactattggcggtagccttattctctaaggatgtgaccagcaaattccatgttcgagatagttgatcgttcataatccgtatagtacgtcatggcccacggtaccttgtgcgtcgcgacgaattgaaccccaccccctcggtgtggagtatgtcgtctttgtaccagagtccaggcaggctagaatctaaatccctttgcaggattatgtcagagaattgaacaccaaagtccagacggcgaatacgctgacgggtacgtattctgcaatctcggccagggacaagatacaatgtcgcttgagattcgcttgaactaggctagcgtctttgtcctgccaatttaagaactcgttctttttaaaagtgataaaatgggcggtcaaaaatagaagaggcggtgggaattgaggcctgctttctggagttctctgcgtgcccctcgttttccccgtccaagtctcttgcccagcaccgttgtcttgaaccctccaatagacctctcggacccaggtcagtgcgacgtgcaacggacatcattgcggcgtagaactggcaatctgtttctagactcgctctcttcgcctcaccgtcagaccacatttacgcttgtttgttgacctcgatcggtattcggactcaggatgtcagatccaatgtacgccaggtcaaagttcctgtcaaaagggcccctggtacggtttattgagcacgacatttgacaaatattccgttgacagagacccgttctaggacccgaacgaagcaaagtggacgagactagttaagaccacttattgcgaccccaatggcgtcgagagaacttgggagtcggcggaaagacaggtaagattggatgaaacggttattcccgtccgtcgtctgacgtctatgcaagcggtctattccggattgctattgctgatactaagagccaaggctttgctagacaatcaaacatgatgtctcaaatgttcgctccgaatgtctactgatctttatttcgatgaaacagactcgacctgcaaactgtgaggtagatggtgtcggaattgtaaccattttggacaaatccagcggcccggagctcctccttcagaagcaatacaggccgccaatcgataaagtcgtcattgaagtgccggctggcctcatcgatcccaatgaaactgtcgaggagtgcgctgtgcgtgagctcaaggaggagacagggtatgtaggcgtagcgacgcgacaagtacggtcatgtacaacggtaagtaatatatcttcgccacattcgccgacggtcgccgtgctgatgctggcctg

SEQ ID NO: 14912 - DNA, 708 bp, Emericella nidulans
cggcgcaaacatcttccctcttgactctcactcacctgtgcggtcgggatgcttccagcagcatttcctcctgctctgcgttaaccatcgtttgtctgctactcgtactatgatttcttggttctacatggacgtatggaatggaaatcacatactaaccttggttcccataacaaacgtgtcagcaaagcgtccgaggcgagttgggccatagctgctgagtttttgtagccgcgttcattgaaatgaaagaaggaatggaataagaaaagacgcagagaaggagactctcacaggacatgggaggccttgggaggacttgagggttggctgggctgatccagaacgtgggatgctgcatcccctatctttcagtcatgggattgcgataaatattcgatcgagaactgtccgtcagccagccctagtgatgccccaagggggtcccagtagttccctggatgtctttcctaagtaaggtattcgctaggacttaagccaaccgatagatctgactgactctggatgatcgcatgggaactcacttgattgctacgctgctgggatccaatatttttttacgacggagatccgaaagtttacccttaaatttctcgatctggggctaaagcaatccatttttgggaacttgactgttggcttatttcatcttttttcccctccgtttttatgttattgcacgttttt

SEQ ID NO: 14913 - DNA, 2684 bp, Emericella nidulans
ctgtcggcgccgggtcatcctaaagcatatccaacaggcgttttgaaaaccctcagagaacaaatatgaaaaagaagatgcaaggcaaaacagcactagggaatccaaaggggaaaagagtcctcatcaatcatgacccatcatcaatcaatgccctcgatatctcatccttattcgtgaacatatgcacatcctagaacgaatcacattatctcatcctttaggcaactactccggatacagaggatccaggactccatcggaagcgcttcaacccgcctcggactgcttcttgaccgcaggctgccgatgctctgctacctggtacaccagcatcaccaaaaacggatcctaagccagtgcttgtctccagtttgccgacttcacggccaagcacatatcccgcggagaaactgattgcggagaaaaggacaacaacgccagcactgataacccatgtcatcactgccgaggatgactccgtggtcgccgagcgccgacttctcttggtggcagcatgactagacccacggtcccttgaagcgctcgttcgccgcttttcccgagtggaagaagattctcgtggtgagtatgaggggacaggttgttgctgctctttgagtcgctgtgaacggggtgaagtgcgcacttctatgtttggtggggcgtcttcgttgacttcgtcacccatggccacggattctgacaccagacggaacgatgctggctgcaccctaggagctccagattgtgcaggttgtgattcgcactttgaaagccctcgagctgcggctgcacaggaaagcaaggtcgatagactcgcacgtagcgcggcatcatgatctgcgtggtaagaaggggaaattacattgtagggaccatgttgttgattcgacgaccgttgggatgaacgtgtgtcggcttgagagtttcttcgtatggcggttcgacgactggaggtagatacatcgctgtacggccgttcggtagacctagtccaggaaggcccttcggaaaccggaggatgcgagaaaacgtttggttgaggaacaaatggagatgagcttatacgcatgccaagcgctgtagagctttcatcctcatcactggaggggactaaatctccagcatgtggcagaggaggagaaatgtcttcattcgaactcgtgagaacgcgatctgattcactttcactctcttcatattcatcctggctactgctgggttcatgggacgaatattcgacttgcgctgttgcgacggctgccagacgctgcagacgccgtcggcggctgcggcgatggtaggtgtcaggctctgtttgctggacacggaggccggtagtaattatgtcatcggtggttgcagctgaagacagagatgaggatgaaggctgggaggatacttcgatccacgaatctatatagtattggagtgagtacatgctgataacgcaggagtaatgtttgaatatctgacgataagacaagtagggcgatgatagacgaacaaacaggctgtagattcctgggtgattcacggggaaaggactcgccttccgaccgtaagggcaagcctgagcgtgactgaagcgcatctcgcgtcacccgaccggtagttgtcctgggctcaccccgcacctgacgacccagaaggtcataatgatttggctgcatcgctgtagatttcgtcagtgatagaaagaatggatggcgattttgtagcggtgatagcgcaaaaggatagacgaggacaaaagcaaaagaataagacctcagcaggtagtcagaccacagggagggagagggggccgattatacctggtggttcaacctgtccaggagcagcggtcaagccaaacaatggtggtggggttcgtggagaaagcgacccgaatttctagatgatcgccggatatacctcaagcacacgagtcgtctggcaaagaagaacaatggaaaactgagttttacagcaacttgaagatggaaggcaagctcgaggatgcctgattgctgatgccgtgagtctaagagaatggatgggtcgaggaatcatcggatcgatgacagctgacttatcctcaaccacctgcccgcatcagcgatcgacaaacgaccagtgagggacagtccaactgcgatacaagcacgcgactaacgagatatagagacaagacaatggcgaaatagaagaaggtccacagcgtgcggaaatcgaaaaggacctacgggagggggaaatggggacagatcagataagttcagtggggaattgcggacctaaaggaccaaactcaatagagaacgccaagactaccctgattcctggctttaccactaataagaaaaacaatcagagatcagaaggcgaagctagtatttgaggtacgaagaatcattagagacattgcggcacccttgatgaaattcattgaggtctatctcatgacaccgttaacctagttaaagcagaacttttgccggattacctaataaaatacagcattaccgtgagaccgttgaaatcaaaacccagcgaagaatacagacgcaacacatatctaaaaggtcatcttagtacccttgaactcaggaatgccaccctggcgcggttaggggcaccccggcaccaccgccgcgtccaccgaagccaccacggccaccacggcctccaccacgagg

SEQ ID NO: 14914 - DNA, 575 bp, Emericella nidulans
gagaatggcggcggatgggatagcgagcgcagggagtccggtgggggaacgacgacaaccaatattaaatcatcgatagtacgcacactgatgtgtagaaggtatacgctgacttgcacctatgaccccagaacactgttgccgggggttgtggttggcacagcataaggtgtcatgcatgtgttaagctgagggtatgcctgacgctcatgaagctgattctctggttgttgatgtgtatcgtgccactgctaggctgatatacataccccagatagctctgctttagtagatcacatgcgtgctatgtaaccgcgcttgagccatgatcactatgcacgtgcttctgctgggccgtcctacgggtcggatatagactatgacttgatatggtgatcagcctatgccttgtacagctccagtgtccagccttatcttgacagatgattggacataggcctcatccagttaatcatagcgagcctggttgtgaggctcaagcttatagtgctttattccgtagtaaaccaactaggcgggatggcttctgactatcccataaaacaattcacagg

SEQ ID NO: 14915 - DNA, 1355 bp, Emericella nidulans
cgctcgggaatggttggataactaattggaagccccggaaccagtatcagaaaggcggaaagagaagctcgaaagttgctaaagctttttgttcctctagttaggactcgatgaatcacaacccgagccagactgtcgagtgagtgaatagcttggaatttccttgacgaatcctgcctccgcgttttgtattgcgtaacgtgcaaacagctcaccgtatttttgtctttttccaaagttccgggcgctcctgcttcttccggtaatgtaactgaacttggcaatcatgtattattactgacgcgtcgcgtttttgcgagatcgctcagtacctgcgttatctaagggcccatgtactatattttagatctggtgctgatgctagttgatatcagtaagttccaagttacctgccacatatcctacacattaatgtaataacgagaagtatggggacggatccatgcttagcacagctgataagaaaccccgcattgcggcagtcgcaacaaaaaaagtcctgataaggaaaaatcaatatgacaattgaggattctaatgaggcgatgactgcttttatccacgaggcatattctgctacagggcagcacaactgctctcaagcatcgctgtgtcaccaatggcagaatcggatgttgcattcactgccccacgtcccatataccgcagtctaccgggctatcaatcgctaacgtatcggcccgattgataatgagaaccatccacaatggattggggtagctctcgattgctacgtagtggtccttggcgattgtaccatatattctctccaactcgtattgcatgattgtttcctttttttttctctgattatatcttccctcttctttgaactgacgccgtcaaatcccaacctctaacaatcacaaacgtgattaaagccacaatgaccaaaaataacatcgtggtgctcgggtaatatgacttcacagaccacctgctattctggatttgcgagctaagacaatatttacagggccggggtgtctgggctcacgaccgcctaccttctgtcccaggatcccagcaactccgtcaccgtcgtggccaagcatatgccgggagactatgatattgaatactgttcaccctgggctggtgccaactaccttccgtatgcgcagtcctaccatccctctcgtccactctggaaacgaccggtgttgatcgttgacctcgattcagaaccggacagcctggcaccaaccatgctaaatgggagcgagcgacctggcagccattaaaggaactgaccgagaagcatccagaggctggaatccacttccaaggtatgctatctggaaatgaaagtc

SEQ ID NO: 14916 - DNA, 1037 bp, Emericella nidulans
tgaagatcttaggccatcttggagaactgtggcatagcagctagagcccggtatactcggtcatcttcgaggaacgttatcgccgggaaggagccttgacagaagatacctgaacgtagtcttagtcgagagatatacagcatttagaaagaaacccagagatcaaaaacaggagaaataagaaccgtgactataatgctagactatatacaaccatttacattcaaacacgtatccagggtttggaggttcgattgtcgctgctccaggctcatgattaaggcacagacactccgtctagccttgatgcaacgtacccatcaacgtcgaccttcctagccagacagagaagaatagataccacaagcagctgaaccacccagctggggactagagaggagagcgtggcccggatactgagggactgaatatcagtagctttgaagacagtgggaacaaccatgtaatgtgccagctggaaaagtgcgccattccgggcttcacttactcgtatcgcaacccaaggtgatccaaggtccaatgaccgagcacgattgtgatggagaatccctggtatgcagaaggacaaggagtggaagaatgagaccaaaaacacatacatgttttacgtcaatggtattatatccgtacctgttttctgtccatgtattgactgattaaggtataaattaacgcaaggcgccttgatgcaggctaaaagcccagaaacattgaatgagtaataagtatgcaagaaaggaaggtcactgagtagaactgtgttggaaggtactttgtagggaaagaagctgtatgttaagtagcacagtaatcgaaaagtaataaataaatcagccgtccaccccgtttatgttcatctggtctgggttgtatcgtcgccgccgcattggggcctttttccgttgcgcaatagccgagttcgcgttttgtgcattatcttctcccatatctgcgtcgccgtcgtcatcgtagttctgtagtgctttaaatcgagacatttcgtccagctcggtggt

SEQ ID NO: 14917 - DNA, 1839 bp, Emericella nidulans
tgcttcgcgttcgagttcctgcatccgcattctcgtatgaagcatatcgccagcggaagacgtaatggactcttccaaattctgaatcttcttgcatgcagactcatagcgggctagaagagtgtcaaactgacctcgcagagccttttcccgatcagacgagccttgatgacgtatctgctcctcatcaaggctttcgaccagtgcttgtacccgctttacaagtgcgctgagggtggacattccgccgttcaagcccgcattggccgtttctccagggaccatgtgctctagctcaaggcgtgcagtgcgaaatgcgttgcgcagctcatctacactctcgtggaggtttgtaccatgaaagcctaggctagagagctcactttggatgtcactcaaagtctgcgtggcatcggaagttcgggcgagcatctgcatcaagctaggaacgatatcatcgaagaagtccgccggaggagagtgttcacgaagatggcgttcaaggggagtgccgctgagcaagttcagccgggagcgacatgcctcgaacaaatccttcttttctttccgtgccgcctccaaatcctgagagatggcggtaaactcgacatccatgccgcgtgaagtttgggcggaactgtcaacttttgaaggcgtttggtggagcggaaattcatctggaaccatgtttatttccgttgcacgaatatcaggagagtctgacatgaataaactgttgccctccaagccgctatcgttgaccaaaatcgtatctaccgtatccgcatcactttcagatggcgtagggtggcggtaatcgtccatggccgaaaatgatagctgcgccctcagtcgatcgttacccgcctccagatgttcgatccgatcttcgggtgccatccactctccatcgtcgcttgttggttgagttgcgggtgttgccgaaactcttcccttctttgcgacctcaagttcccgcttaagcgaatccctttcgcgcagcaatgactcgagagatttctcatattgggcggctgctcgcttctcacgttcgaggttgttgatctcgttactcagtcctatgcgtctaatcctgcgttgagtacgcgtatccaagagttgccgtagaggcgtgaagtgtaacaccttttctggcgatgtggaagctcgcggtatcggactatcagtcagccggcgaggcgcggcagaggagtcgaatgacgacgcgaccggcgagttggagtgcgctgcaacccccatctctttcctcaaatgacgttcggcacaaggctggagtcaggccagttgaacactcagggacattctgcgttgtggcccccgtcgagaaccgcactctcttgtgcggacggggagtttcgcaacgaacagcagatccgtctttaggatgagacctattacgcagaacaggatgactgttgatatctaagccagacctctcacgtctttttctctggttgcgggtctccatgagggatctggttgttgaatgggatgaatgcaagtagatgagcgcacaagtaggccgacccgggtagatatggaccggtcaggccaggcaacgagggctgtccagtcaacagacacacctgacaggtaacaacacgtccacagacccggaagcgtgattacgatccggtcccaaggggcaagaatccttgcgcgtggtggcagtatgtctgcttaatcgggaaagtgtaaacaaggctgcagtcatgtgaccacattactgtccaggcaaccactctgctgcatggaccaccacctatatcaagggttattattgcacgaatttgatgaaaatcaataaaagcgatgatg

SEQ ID NO: 14918 - DNA, 2651 bp, Emericella nidulans
atcactaatattcctccattttggtcaaggggaccctcattttgccgttctgccagaaggaataaatcttgaaggatggtcttaccaggatattgaggagttgaatgaccatgtgcggcacatgctgcactcgcgtcgctccaagttcaagcggtccatgaaaggatttggcaaatatgtgtctaaacgtaataccaattcctatccactcaactcattcgatgtcgtgtgctgattttttgttcagctcttggttttctgatcacgctatatgcgactctcattacgctttttgggcttgcttgggtgctcttcctcatcggtatgcagccacgcctcagttcttaggcacaagcctcaactttcgatcagtatgctaatggactataggttggattaatgtcgggggccgacagtcgtatatcatcaatgttatcgataatgtactagtggcactctttgccatcatgggcgatgggctggccccgttccgtgcagtcgacacataccacatggtgttcatcgcacattatacattcctgacgtggagaattcgcaagaggcgccgcctcccggaattgaaggacaaaaatgatttgccatctcggggggaggcggaagccgatgctgatctcgaggccggagatctctccaaggaggatgaacacgaattcagtgtgctcagccctcagcagcaggcgaaattgcagcaccaccaggcaaaatttgccaagtctcatactttctacaaacctcacgagactataacacaccgtgctttcccgcaacgcattcttattgcaatcgtggttctcctagattgtcattcgcttctccagatagctctcggagcttgtacatggggtatcagttatcatgtacggccgttcgctctcaccaccgttatcctttgctgttcaattacctgcaacatcaccggaggtgtcctgatcatgattggggaccgcagaacccgcaaaaaggatgtggttgaacgaatgttccgccagcagctcaccaaggaggcgatgaaaaagatgcaaaagaagaggaagaaggaatatgagaaatacaatgccgaaaaccccgggctattgtcagattcgtcctcgaacgcccttcaggttcaccagagtacatgatcaccggctctaccttcaacgacatgtatacccatattcatgagcgccacgacttattttatcctcacgatttttgatatgcttccatatacacgtgttcacgcttggacttccatacgatatatcactgttttgtttattagcgatgtacttttgattgataccagcattttgcgtcgtctgtgaactgtatattattgctcctaactgttattctatgttagatcaagcccagcttgttatatgaggctctggttcttggtcctcccctaatatctctcgttgcgcctactgtgatttcccgaagaccgcaccccgagtggctacgctaattgctggaatagacatgtgcctagccaacagcacagtgttagctccaggctcaataaaatagctcgcttcattagttcgccccaagttcagtctgccaacggttgttgcagtgcttccaaaatccgtttagggctagacaattctctaaggaagggccgcttcaatattaaggtgacactgcctgcgagtgatctgaatagcagtgccatttggcacggcacgagctcacgacaaagggaagtatcatatggtgtaatagttttgaaagttaccagcaacatgtcatgtgtgagaaatgggtgtacgggagagttacctacctaaagtatgcgtgatgacgttggctgtactgcccgcacgtcggaacgataagagagtacgatgcagtggccacagaccccaagtaacccaaagataagtgattcgcgcctccaataattcagagaatcatcccacccgtgaccgggccgagattccatgttgccaatattgccaatattgtgatccctggatttgatctgcggcacgatacgatggatagtcgggctagcctccagagttaggtaaccggcgactccgcatctgcgaccgacctttaatcgtgattccctcgacctccgactccatctctcctctacttgtcgcttcgcatccaacacccatcatctgcccggcagtgcgagggatctgttctacttcgcgaacccgtgttcccagacgacattctcagaccgacagttcaactccgggttccaacagtctcaggggcgcacgatgcggtactctacctcttcagcatgatcactcttttaaactcgttcaacgtataattacaccgcggggttacgagaccctcgtactcttacgttgctggcacttgaaagctgcgtcgtgtctcacttgttgaccgcggattgttcagtcgcgttttcattcattcgcatctctttcctctcatattagttgcatcttggaaatggaatcgcaagaataccctttagcagctggcctgctcgctgccctctcttctactgttgattctcctccagctccgactctgacgcccttcccgagcctcatcccgtcgccgcatcctcttccgacactatcctctgaacttggtcacaatcacggcaaagaagggagtggagagtatgagtggtcatcgttaatcgg

SEQ ID NO: 14919 - DNA, 839 bp, Emericella nidulans
ctcgctagggcctttcttttctttgtcgatcaacatgcccagtaatgctgggaatagctccgcttcaatatcggttaggcgttgcagcgccacagacgtcgtgcagagagctttgagacacagcaatgtctcatgaagtaggttgtcttcgtgttcttccctattatggatcagccttattcttcaagagttagcgaagtcgacgtacctccactcaaccttcatgatccgatagacaagttgtactatctcatccatgcccccttcagcgatgaagctatcaacccagctgacagtttcattacgaagaaggatgcgaagcttgtggattttgccaacctcgataatctcgggtttctggatctccttcaagtagtgcacaaaatccgacggatcggtagctgtgtcacggtgtgccgtaaccgcaagcgacgttgtggatgcattaggtgtgagaatcttagacagcccaggggcgctaagatcaatagacttcggtcgtcgatgggagcttccgctctctggccgcttcttggttggtgatgatgagttgcccctgctgaaggtgaaaccgcgactcctcgaccgcgatcgagaccctttactgtcatgactgtcgtgttcttctttcttgtcttttccgcggccgcggcggcctgtactctcggctgcgtatgtgctggcagcgctgtgaggcgttgtgctttcgagcttgtctttctggatgaagtcaactttaatgtttgtgtctaaagacctcatcttgtccctcatgttgtgaggaatgttcctcgcatcctgtccacgttagctcgcgccatccaatctgggtgggtatg

SEQ ID NO: 14920 - DNA, 2228 bp, Emericella nidulans
agaactatataactctgtgctggtcgaaactccgctggctggctttttcaagggcagcctaagccaccaggacttggacgaactcaacattgagattgtgcggaacacactgtacaagaactacctggaagacttctacaaatttgtcaccacacatccagacttcaagggaacgccaacacaagaagtaatggcggaaattcttgaattcgaggcggatcgacgtgctattaacatcacactgaactctttcggcacggagctctctaagcctgagcggaggaagctctaccccgaattcggcaaattatatcccgaagggtcactgatgctttctcgggccgacgatattgaagctgtctcgctggccgtcagtatatccgcggactacaaggcattcttcgatgccgtcggtctcacccaaggcggaggtggtcttggcggcatgggtggctctgatggaaagagcctggaggatttattctatcaaaaggaaatggagatgagcaagctcgttttcacccgacagtttactcctgctatagtatacgcctggatgcggctaaaggaacaggtgagggatccagctattctagaagcttgcttaactaacaagttcaggaaattcgcaatgtcacctggatctctgagtgtattgcccaaaaccagaaggagagaatcggaaatttcatatccgtcttctgagttcgtttagcctgtatcttcatatcttccacaacccgtcaccagcggactcacttctgccacgtcctcaatatttctgtttttacttaatattacccgactgtacgagcgtatcgatctattgcgtcatacgtatatgtgccgctccgcaactgaatctgttatcttataggcgtttggagtttttttatgtgatatagtacctacattatgctagccgtgccgtaacctagattctgaagaatcgaccttctctttagctcccattcatctgtatttagacattgcatatgggaaaatattgtttgaagcctagtccatgccatgtgcgaatgcagatgtttagacctgtgcgccagtatgatatagcctattgacggagcttgaacctatttcgttttgtcatatcaaaggacgggtcacgtcggggtcaatgtaccaggtattggctgcccggtttagttgagatgttaacgtaggttcgcaatacaactggtggggtgaggtgtaattccgaggtacaaccgagctacatcattaccttgttatcaaaatttctagtactacttgagtgagccagcaggatctggtaaggatgatgccgtctgttggctacaattcggataaatgcgtagcttgatggctggtctagagataggttaggtgttttctactttttatttagtcgtcgatcgcgaaatgttatatacatgtcgtcaacgacgaaagagggctgaccgagagcaagagggacagaacgctgagccgatggtgctcaggcctgattcttatggtagatggaaggcttgagaaaacgaaagaaaaaaaaaaataaaagagaagaaaatggatgggcagacatgtgcgctactgacgagctggcgctggctcgatttttcagccggaaaaggcacaacggagcccaaggtgtgcatcatgacaggaggtcattatcttgattgtcatgagaggctgaactgtaacggtcaaaatggcttcaagccaagctggttggcggtaagacatgaacgtgtatgagtcatagattggcaaatgtcttgaatatatcgcgtcatgaaatagaaaaaatatccatgagtatatggcttcagttcaatgctacttttggaaggtatttcatctcatatctttcacgccaaagggctaccaagagaaggaattgtgaatattgaccatttactcgtactggaaaagcgcactgatactctcgccgtggtggacgcgacggatagcctggaagactgtcagtcagagttcctcgaaggaagtagttgagcattatacctctgcgaaaacgtggccgacctccaagacttccagcttggggcatcggcgcaagtgctctgtctgagatacgctgttggttacgacgaccttgtctagagcgctggcattgatacggtcgatcgcatcaccgctcaagattccgtgagtcaccagagcgtagacttgcgacgaccttcctttttcaaaagtttggcagctcgggtgatagtatttga

SEQ ID NO: 14921 - DNA, 592 bp, Emericella nidulans
  unsure (1)..(592): unsure at all n locations
aaagggttgtttgtgggacaccgagatgtacttcaagggagtacaccgggtatggtaaaaaggatgctataatgtcaattagctgctgacattattctagttagagccgggtcagtacatggtcagtcagaactataaattcccagtggtgaagacgtactgggatatggactatccagacaaggtgagttgctctaattgcacatccacgggcgctcagctaacgtatatagagaacacctttcccacagaccgaagaacagatagtcctcgagcttagaaaacgcatgctagaatcagtgaggctgcggctccgagccgatgtagggggtcggattctatcttagtggcgggctagactcttctgctattgcagggatggcgaaataccttatacagcagggtgagcctctaggaaacgactctagtggagacatctcaaagatgagctgctatacaattcgatttggggaggtgncggagtggnatgagttctggtataaaggatacctttgactccggagtgagcgaccgtcgtctaacgaaagtaagatgttgcacaacgaactgcagactggctgggagccgagct

SEQ ID NO: 14922 - DNA, 519 bp, Emericella nidulans
agaatcgggggagggggggccactcggggctaccacatggggagaagtcctcctaaacgcacggagacaaactgacctggggccctatgaaagaagatgtggtaaacccacaagggcctattgagaagatctgtccagaatgacaggatttacatacagcaatcctaggcttggtcggactaaacaacaaccaaggcaagaaaaggctggtggcaaatggtacgggatggagacgacgtgagtggagccggtaagatgcactattgacggtctgtggacggttagaccttaaagcttcaagatactgttaccaacaccaacgtggtgcaagaaaccaaaaagcataaaacaaaaggaccataggcaaccatgcgaagaacgggatcttgaccttacagagggagcgataccacctataactactttgatgactgcctagaaaaggtctgtctagaggagggaggccctatccacggtgacacttgctgggtacgagtctgaaggagaactaacgccaca

SEQ ID NO: 14923 - DNA, 413 bp, Emericella nidulans
agggcggagggccccagatggatgtggagggttgtttgaccttatcttttctgcctttctacaccaacctgttgaagatagggaccggggtacactcactggatccactgtcaacacgcccttttaactgagtctcataccgatctcagagcctctcatggccctattagaaggcagcgccgtaggtctcatatatacacttgaatgtatctttttgcctgataaagaccatgcaactgagcttactagaacgtgcatgatccaaggacaacctgcagctatgtggatgcctcagatcggtcagtgaaaagacttcagttaaaagccggctagcaggcccgtggaagcacttcatcgactagaatgttgtgctgcaccaaacagcaagtttctttagttctccgtgacggagc

SEQ ID NO: 14924 - DNA, 2488 bp, Emericella nidulans
cctagaggtcaatcgtatagatcgtgaactctgttcttgtggaaggtcgatgaagttttctagagcaaagtgagaattcaatcgggcttttcaagcgagtttttctatttgcgagagctctactcgatccttcctatgatcgttctgcgagaacgatactctgtatcaggtacacaatagataccagagttgtcgcgtgaatacacagattcagggttgaccactttttaaaagggtttgatttaatgacgctggcgttgggagaaataacacatttaagatttaagaatagagactacgtctggacaattgaacctggatcgaatctttgataaagcgaccgagtgggtgaatgttggttcgtcacactttcccaaatgctgtagaacgtgcagggggtcgatcgagatgcattcgagcccctggagatatgaggaagaagatcgagattgagtctgaaaggcacgaagaagagtcggctgcagtaactgtagactgtttctcggaaggaatggacattcgcaaaagcgactgccagggaattggagggccgagttatccttgtatgctcaacttcaatgcattaaggaagcttcatactcaatcaagctgatgctgcagctcggcgcttatccgtaaccaggaggtcgggccaaaccatcggttgctttgagcgagctagtgactagcaaggctagaatcgtcaagagtctgtctatgatctagataatagagaccctagacttcgtagacgatatctatggcatggtattggagcctacaggtagtaataggcattccaagcttgcggttgggacatccagccaagcccttagatatgatgaataacttcgagatggcgatgataacgggtgtcagctgagggaccgagggaccctgattatttgtttgttttgaccctgcataaccgcaattgtcgtcaccaagttcttgacgcaccccttgcgttccagttcagcgagctcgtggctcgaccctgactgcaatcatcatggatcatcctgagacaggagttccttgacagagacatgctaatctcgatcctcgtctgaagatttggggttctctaaaggggaatgttttgtcaatcgtaactacagtgtatactccgtccgccgcatcctatgacttcattgccttcgtagttcaaatccacgacacgtggaggtttcggtgacaacaataccgagtagacgatgatcatggggaaacggaatgtcaaattcaagagccacggtgaggaaatggtgagacagggcgaccgaataatgattgacagtagggtcaatagtgtttcttgtcattgtcttgtccaaagtcagtagcctcgtttctggtcgcaaatcgcagtttcactcgacatcaagcgagtcgcagactcgcaattatgatcgtataattctcagggtgtttagtgatattactattatgtgcactctcgtcgtttcctgcgcgtggccagaccagaaaatcgcgcatagaaaagagcactgcactaagaacactatagggcggcccgctcgcggcaaaaagggctctggatgcggtatgaatggccgtatcgtatcgaacctccaattccggcctttctcccccaggactccccgtggagatgctcgtttatcccgtatttttaccgaccatgacaattcaattgacaagtatgacatacttcagcccagggaaggcaacgggaggaggcggaaaattctcttgacccgggtcgtcgggattgcccgcaggatcactgattttttttttatttgcctcatcgtagggcggcgtaccaaagctggacgaatcgtcacgttcgtcttaagctggactcttggatctggagagtgtctgggagccggagaaggagggggggcaaactcggcacgcgtctgccggtcattgacgccaagtgacgatggagaggaaggagggattaccccatccaggatcatgacaagaagagagaccggcgagaggtgccgtatcattgtgccagccagaggcatccaccgtcaacaaagggaaagaggagagtttttccagctctgaagctaaaccgttttcggcctcagtggcccacatgggtcggactacgagtccacggataagaaacagagaaacaacagggcggcgtaatgatgcgtgccgttaaacggtggtgtgagtgtgcgtggaagagagcagggagtcagggacaggaccagagatcagtggctcactagttccagtcgcgctagtcctgttccgtctagcgcccctcaataaaactggaaaaataaaactaaaaaacaaaaattcgaaaaaagaaaagaaaaaaaaaagtgggcttacgcacagggaaagttggccgcccgttggagcttcagcacgtgtttgcgtggtggtcccgtgaaataaaaactcccccccacagtattaaagcgtccattctcccatcccttctggagttctctccccaccctctttctgt

SEQ ID NO: 14925 - DNA, 547 bp, Emericella nidulans
gggccatacatcagggccacaggggtacgacgaaagacttcttagtggtctgccgggctcgttattatcgcgggattgcaaatgtaaggggacagaaccaacgtgatacaggcggaactaaggcagacattagggtcttgcaagatccaacgcgagacgagaatatggagcctggagagcattcacacggtgagtgcgcaccctaacatgtaagcagctagtatctgatagatatagagggtccagctccactcgtagcagcttgaggggcacatattctgaatcatgcaggccttgctgggacagagaaagtatgctcacggattcccgatcagcatatcaatgaagcacgagagcataccacgtcaggcgaacaaacccaccaaaaggcatgtgctctgagagctaagcacttctgacatttacaggcaagactccccaagctctacgccagactagggattgtgcagacctgactagtacgagagggcgtatgtatttgcacacgagaatgcaagaacacgctgcgcgacacatagtaacatta

SEQ ID NO: 14926 - DNA, 586 bp, Emericella nidulans
  unsure (1)..(586): unsure at all n locations
ttcgagggggctggattgagaaggatgctatcatcaggtttccgttaggaattctatacaaacgagacaacgcanggggaaattggacccaaaacccggctggtatcctcctccacagtagtctggtcagcagacgtcttatcccgcccgagcttgacctcattttgcttgaatagtctcctcgcgttgattgcctgctcttttccttgatctccatgcccatccttatcggccatctttttacgccgcttctcctcgttcttcttctgaataccctccagcatcttccccttctcgtacccttgcaggaacaccttctcctctttcctcgctcttgcatcttcaatccgacgcttcgcttcccgttccgatctttctctctcttgagtctccatgagatcggcccacttaaaccctttgagatatttcatgttccatacatctagtggcacttggtagcccgcggaaactcaaagagcaaattttttacctaccatcatgataccatccacctttctttccacccacgatcgttgcattcagcgtctgtgcgcatatctttgccgccttatttgatgcaaattca

SEQ ID NO: 14927 - DNA, 1425 bp, Emericella nidulans
gtggcactcctcctcatccagtttcatgttgctccgcagcagttgcaggatcagcctcttcacaatgtccccgttccgtccgctgtttccgtccctctaaggccgacggctcacgttgcagcaaacgcaaacgctaacccttcccctcccgcgttgaacgtgaaatccaacgatgcgagcgccctagcaaccctggctctggcgggctctggccgcgccgttcgagcccctcccatccaggccagtagcagcagtgcctctgctggtctggctccgcagctgcatgcgcggtccttgcaggactgggaggttgaggactttgttctgctggcgaccgtcgatggtaccattcacgctcgagaccgcaagaccggagctccccgctgggccctcgaggtcccgagtagcccgatggtcgagagttattaccatcgagcgaatcgctcgagcttcgacgaggccaagccagaggatgacttcatctggatcgtcgaaccgagccaggatggcagtctctatatattcagtccggacccgaatgccgggttgcagcagcttgggctgactgtgaaggagcttgttgatgagacgccgtattctgggaccgagccggcagttacatataccgcccgaaaggagaccactctttatactatcgatgcgaggactggttctatactgcgggtatttagctctagaggtccgatgccctccgcaccggagtgccgcaaggtcgacgacttcgatgccgatgtggatgaggaatgcgagtctccgtctgggactctagtgttgggtcgtgttgagtacgctgtggccatccagaacactgaaaccggtgatccaatttgtactctgaagtactccgaatggaccaccaataaccgtgacgttgatctacagagtcagtactttcgtacgatggatcaaagtcatatctatagtatgcatgacggggtcgttttgggatttgatcattcccacatcgagcgacctcgctacacgcagcggttttcctcgcctgtggtgcgggtgttcgatgttgctcgcccggtcaacattgacaacccggaagccccgaaaccgcttatccttctctctcagcctctacagcctccagatccggattatggctctctcgatgaccgcaatgatcttgtcttcatcgactacactgaaggcggtggttggtatgccatgtccgaggagacctatccactcgttactggccgcgccaagatggcccaatactacgagaaagactacttccgccatggacagccgcttatgagcctgacaccagagcaacagcgggacgcacttgctggtgttcacgctctaaactcccctcgtatccctcgccgtcagattcccagcatatctggatcatcgtccgcagagttctcaaacggcaccctagggaga

SEQ ID NO: 14928 - DNA, 490 bp, Emericella nidulans
aaaagcaccggttagaagaatatatactataatcccccttctagcagttgctccctggctgccttgctgggggtgcatggagccttgcttatacaccaccccatgatccaggaggggctagcttgttcaaacactaacaagtaaactacaaccctgaagaacgcactgggcaggcaacaaatcatgaacaaacgccagtatcggaacatggaggatgtagacaacccattgcacacagcctaaaatagggcgaagcatgtccataacgtgtgaactggttatcgcagacaacagccatatcatgaataacttgtcgcgcccatcgtgcatatattgatcccaggaggcgaggctgtctcatacacatactgaataagcactccactgtgctaagccacgttgaccaagatgatgtgcagaagacactactaggccgaggtcctgcaccgacgacagtagcatagcagttctcgacatgtacgctgggggt

SEQ ID NO: 14929 - DNA, 2199 bp, Emericella nidulans
gatctctcaagtagtcgtaacggggtctaacatctccttggtgatccctgagaatcgtgttaggtagtcgataactggcagtcttggctttacgagctcgtcgagcaccacctccccatcccagcggaccaagctgatgcgggtgagttctgaactaccgccttcggttatacacatctcgcagtctaaagcgagaacatcacgtcctgccgtcatgctaccttgctgaatctcggcttcaggaacgttgccttcttcgaggctttctacatgggtatccacccatccatcctccgcagattgaccagcacgtttgcgggcatttttcagggccaatttttcgtcctcagaggcgcaaagagcgggatgtagaggataatcattctcgcgaagctcatcagctccactgatgaacgccgtgataggcgttcgcttggaagtatagttcttgtccacccgaggcggcttcgggccttttgtcttcttctccttttctttgggcacggatgtcaagagaacagcttgcagaggcgagtgaaccttgttatatttggagtcccctggagcccggaccggccaggcatggggaaacacgtcggctaatggctgaagaggctcgggaacattgtcgcgcgatagcggacgaaggctgaagaagtgagaccggtcctgcggcggaagtccttctttccatctagcaaattcagcggtccttgtattttccgtaccgtcttctgcgtctgctcccttaacctctttcacctctgacccgtccagcggaacttttccatttaacattcccagctccagaccgggaaccatcaaaaagacagcctttcggatgcgagttgtattcttcacggcgatccattgcggcgcgaccccatccgcgaagcagaaaaggagcaaattctgaaggtcggcgatccgaatggatgattgtaacgtccggccctcaacataggtgagcgtcgggtatttgatcttctcgccgttcaagcgttttttcttcgagggtcgcgcaccgtccgggccattatcagcgtcgtccggcgagcctccgctggctggctgcgccgtggaaccagtgctggcatccgtcgcgggctcggtcgacttcgatagcatcgagagagtctggcctaaaccgaaaccttgtgagcctgggtcggccatgacgggggctgcgtcgtctgagtacccatagtctgtatgtttgcgcttcggcatctctgaaagcgaagtcggccagctgtggctgtttgtggctgtgaccgggttcctttgtccttttctaatgcaggatcggtcaactttcttttgatgcgctcacgtgagattagcacagttatggtattgaatacggtaattggtcgtatgcgttatcagatcctggctatgtaaccagctaaaccccccacgacactggcgacagatccctcgatggctcgatggctcgatggctcgatggtttgcctgatcgacttgactaatcacaaatccttccagtctaaaatctgtactcctcgtttgtctgggcagaccgccagttccgcggatatgggcacgggtatctgtaatccaaacgatggctctcacgtcaggagctggctgagtgtatatatcatgtaatcaaaataccgctgcaggcgaaggttctgatccgaagcgccgaaattggccgctttggcttatcagatcgaatcgtcatttcaatttctcccctcgtcttctctgatttatctgctcgacaagaccccgtgtcacctctctggctttcttcccttgcattttcttcctcttttttttagaccttctcctcgactctctcttcctgctcgcccagccgccagactcgcctcgtcgagcacttccctccggcctcgtcccgttttcccccgccactcctccaacaccccacatccgcatcttcgacagcaaaaaccaccggcactaaacagcacaatgtcgaccctcttcgaagtcacctcagaggagagcttcgggcctcatcttgcctccattccgtccgatactctcatcgtcctctatttccacgcgccatgggccgccccctgcgcgcaaatgagagctgtgctctccgccctcgcctcccaatacccagccactacccctccaaccgtttccttcatcagtgtcaacgctgaagaactccctgacatctccgaagaatacgac

SEQ ID NO: 14930 - DNA, 466 bp, Emericella nidulans
agacactgggcagtgagaacacgcgcgtgaagagactggaacgacacaataaacaaacaaggaggcagtacttctgaggagcttggtaaatgatcgggacataggcatgcgataagacttcaacaattggtgatgcgaacaactctgcaacgaaagagaacggcaactgaccggcaccaaacctgaaacgaaaggtacagctggcctacggcagtcttatgaagaagcctgagtgggacagcttaatatgccaaactaatctagagcgtggactggaaatcatcaacaaagcacgacatgcaggcctatgcatagtcgaccaaccctcgactacagtgccggagcaggtaaagcgcccgcagcgtgcccaccgagcgttcacgtaatgaacgggccaatattgcctgcgtatatgcctagaaaaacactctaagccgaagtgtcaggtattatcggagaccaccgt

SEQ ID NO: 14931 - DNA, 524 bp, Emericella nidulans
ccccccggagccccccaaaaaatggagcgtccgactccgatcacggatttgcgaggaaccctctgcgaaatggatgtcatatcccccaagaaacttgtatgggatggctgcgcacccgcctttcatcctgcggaggagcatggctaattaacacagaatacatgatcctgtgaccaatatttgatgctgtgagcagccctgcatccaatgatgtgttcctgggagggagaacaccacataatctgcactgccccgggtgactccagggattttgtatgggacggacgcacaccacatgtctggattgctttagacgacagacgcccgtgcgggctcctgcagccgtgtgatcccccatacagaccaatctgcatgctacgtccaatgactcatatatttaggggatatgacgatgctctaagctgacggcggcaatggctgaccaaaactaggaagatgccggagcgtcatatgccgagccagcacctataactgtgtgatgcggatcatattactagtgacga

SEQ ID NO: 14932 - DNA, 2095 bp, Emericella nidulans
gacggcatcgaatgccgccaataactttatctgttcctgttgtaggtgactgggcaatagctgccgctggcgcaaaggcggccgggtgatcatggtagatggccacacgcgagacggacgcgatcacaggatccgtaacggtggcggtgtagaaagagttttgatagcgaatgggcaagagcaggctcgtaattcgagaaagtgacgggatatgtgctgtgttcactggttctatagtgacgtgctcgtgaggagtaggatagcctggttgaatggggtgaggataggcgaggggcttgaaggacgtgtctttggcggtcggtggtagcttcacagtcatattagcgattgatggtgctgacactggaggagctgccatgggaggagggtattttggaggttttccatgagcatttcgtgatggcggggatgagtgttggggaagtgggggagacgcggaagaagaccgcttggcctggtgagctttggcaaagaactgatatgccatctataaagtctactagctagaggagataatgtaagtatgtctcaagaatgactagcagttgaagcgaaagatgatggtggagagagtaagacatgagacgccggacccggcggacgtgggcaggcacccaacgcggagaaacgcgacatcgacaaggcggagatggcgataagataagattcagcggcagaattaataagatgaacaacctgaggccagcaaggccagcggctcttcaccaccttaactcatgcggtccacgactgttctccagcagcaccatccgcgcttcttctgacttggatcagttttcttgggcctgatctgtggaggatcagaaatatacatatatatatatacatatatatgtctgattcgtgtactgcggttcatagatgtgatgaggtaagcccaatctggggtgccgttccgttttaaggttaccatgcgaacattaacactcccttgagcagcttccagtgctgctgaaaataatataactttcgctcatccagactccagagacagatggcttttacctgaacggttgtctctgtgttatttgcgagttcggcgccgcttcattgattactgacgctcctttgcccttttttgatctcggcctcgatcttccgcgcccttattcataccgcaaccaattccctcggaggtatcggctcaggcttctttcctttcgctttatatttggaattacgcatggtacatggagtcacaatttcttgattgagaattctcgcagctgtgctcttcatccatagtcggtttattgggctgaggggctcaaacatctcttggggattcgtaatcaaaggttagtttgaccatacactactacaaactactgtgcatcgaagttcttgcgctggtctccgctcgctgagcagcctgacgagccccagtaggtggattcgcagccacctggcattctgttctcgatagtgactgcttttcgccggttaaggatacacttgaaaattctaacgctctgattctagggaattgtagttatgggcgaatcgaatgggaccgagggccaaagcgcctatccaccggggacgattgcgaaactggtacgttcttcacactagttctctaaattcagtgctaatggatcagacttgtgacattttgaatgataccttttacaacatcattcatgatattgtcgccaaagctcatcgcgaggagaaagtggctcggatgcgctccgcagtagtcgttgcaaggcagaaggcagaggaagaagcggctagacggcgcgaagaggccggggctaagccgctggcccggtcagaactggtgatcaagagtcggaagagtttaaggacatccgaattgaaaccgatgcagctatcttcgaagacggcaaggtttactcaagggcaatccgcttaatactacgaaggagataatttgcccgattgccgtttacctcgtctgttatatccggtgactggagttggagctcgccctctccagatcctacagggaatactgccaaaggaagcccatgattagcaaacccgggcacgatgtcacgggaacccatttgcgactgcaagttga

SEQ ID NO: 14933 - DNA, 520 bp, Emericella nidulans
ggaaaaacccgagccaggtcctgcacaccggactcggcctgaccctgccctaataatgaagccaagcagtcctctacttctcaagactgacagcccgcactggcggcagagctccctgccggcaggctagttagcaaactaagcagaatctttcgtgacgtgctcgagcatgactctataaaccagatgcgcctacagcatacacaatggatgaagaagctcaacatctgttgtctataacgagcaaaggatagcaagtcgatgaggactgtgacctgctggaccactcccatgcgattttaaagcgagccactgtagaagctaaacacatgatgcctgtcgacaaaaagtccgactctttggaaacggagaatcggaacgcaaaccggaaacaagctctttccctagactgaagttgccgacagttgcagtaagcggcacgagaccgcacgaaatgcaaggccgtcaacgcgcttcaggctactaaccctaacccaatgttgaaactataaggactcgt

SEQ ID NO: 14934 - DNA, 5158 bp, Emericella nidulans
taccatatttcccgacagagtttaaatcagctaatgtcgaataaaacgaaagacctctagcgttgctaatctgtctctagtcgtgccgagtaagatgaaccccgttggcgcgagggggaacatattcgctgggctgtttgacaaggttcctgcgaagagggcgggttgggaagaccttgcggggacgttgctatatttagtgtccaaagctagagtaaggtctcctactacatgcttttcatggtgataggttggaggactgattgaagctaggcgtatgtgaacggtatctcgctgtgtgtggatggtggacgggtgctggttgcgaatgggcaagagtaggaggtgcatgcagtaggcaagtttaggaataacagtagaccctcaagcaagttcaagattacaaggcaagagatttcagatgcaaaggtagttggtgcgttatacatgaacagccattgctggcacgtatcatctaaactcgacctggataatcagccatgtaactatataggtgtcaccctaatgcgttccttagtaaataaagaggtgaatggcggatagaatggagtagtgagacagttcccagccattgttttttaaatggagtcaacgtatcttgagtgcttgccaaacctggttgatctaagatacctttatgttctccatgcaccagagtagagtaaaagagaagcagccccaggagaacgagatgttttatctgcaagatatgctgtggccacttctcctactattcggtacgcagaatgcagccaaacaggcgttgatagtgatcttccgcataccagataggcatgagtgctatacatgccgcgaatgctcaccttggaggtgcaacaagtgttcgtaccggccacaggagggcattccatcctgaattagggtcaagggaccccagtgactggccggcttttgttaatatctcaaaccttgtttgcttcgtttattccgcatcgagtcgggatcgttctactagatatgaaatgaaattttttccgtcaggataaggaacgtgtctatgtcaagtcccttgctcttgcatccatactcatccagctaataagtacatttaccaaccacatactttgcaactccttgactgcaacatagcagaaagagagcttgctaacaaacgctttccggctgccgcatccagctgggccgagttccacactcatctgacgctgatgaggtagattgctgaaacataaaatgggtatcatagtgcaactttaactatgaagtagcgaccttgatctacatcctctcgttgcgaggcatatctctccctcgattcacattgcagattgtcttgtatagatgtatagatgtctcgatgggagggcatactctctccagagtttacgaactacatcaggctagaaatcgaagcgcatgggaaagataactgcacgacatgtagtagacagccgaataaccactgttcatgcagataacgtgcatattatgccttgcacttgggaatgcggtcatatacgcctggtgtcccttggggttagtagcaaccgcgccctaagagcattgatcattactcctgcagtgcgagaacgtcccagcttgccacactttaaggagcagacactgccgtctgattgtcctccatcgccattgcccccgacgagtatggaatggcccaaatacttgccgcgctcatcttgatgaccgtgtttgctccttacccacgcttccgcacgctccatcaaactcgcgggatcgcctgagagaaattattccaatattgcaggcgtggtctagtaacccaccatcatggttcgcccatagactaccccagaaaaatgtcatagcttcttatgggatatatccaagtcctcgttttagcgcatttacaagaaaccagcacagcccaagaaatagtcggtcggtcaagctttggctagttatattgatttctgatgaataagatagagaagcccatcacataattataagagaaaatccgcacaacataagagcccgggtaccgtcttccgtgtcgcccgtccgtgcaggcaccttcaagcggcggatttgccctcacggccagaacaaaaatgagatgacgcactcttgaaagcgttcatgccagactaccgcatcccctacctcggccattttcgttgttttcttcaattggttggaccttaaccccgcgtccccaagctgtcaggtgcatcccggccttgtcacccccgcacgccagcatctcagcgtcatacaaaatatcagagaggaaggcgccctgtcgcgtctctccttccttctgctttttggctgtttctactgtagctccagcctgttgccaccatgttgtttctcgatctccctgatgaactcctcctcttcgttggggaggtcattcctttgcagcgcgacctaagctccctgacaaaaacaaaccgccgtctctactgcctcttatcagacctcctcttgaaaatcaacatgaaggattccaacagttcggctctggtatacgccgcccagcatggcaacctggccgtcgtacagcggatggtcgaattgggcgcggatatcaacgccacgaaccccgacgcgtacactgttttagattgtgccgcatccgaaggtcacgcagatattgttaggtatttgctcagaaagggcgccagtcatcggttcacggtcgaacggccctgtacgtctctttgcgctgcagcggcggccgggcacgcggacgtcgttcgagtcttcctcgatcatcacgagtctgaaccgagtgaaaaacaagacgaccaatcaaaatcgcttgtaacccccattgtagctgtctccaacgtgtctcagagaacggtacagaacatgttcacaacgaacgtgagcaaggaggaacaagaaacactcgagtacaccatcccgctcttcctggccattctgcactcccacgacgaggctgcgctttcactcatagaggatcaaagagtcaatatcaactactgcgatctctgggggcggacaccgctgatgtgggccttgacgtgtggaaggagaaaactggtcagggcgctcttgcagcatggcgcgaacgccaatgtacatgatgaacattccggcctgacagtgcttattgctgaaatacgacgacccaaagcgcgccatgtgagactgctattagctcacgacaaggtcgacccgaacctcccagaccgtcattcttgcaccccgctttgggctgcgctggactcgtgggatgtcaccatgctcaagcagttgctggcaaggcatgaccttgacgtgaacaagactcgtaatgggatcacgcctctcctgcatgcgatttcgaacaagcaagaggacgtagcgattcttctccttaagcaccctaaccttgacagctcctctatcaacagcatggacgccaacgagcgaactccgctttcctatgcctcagaatacggtcaggtctggctaactgatatgctgctggaaaagggcgcagattcgcaactgaccgatgttgacggacgcgttcctcggtcgtatgctgccgcgagagtagaaacccaagcagccacgtctccaactcaaacagaacaagtccaggccgactcaggcgaagttcccgcgcaagcgcccatcttcttgtctatcgatcacggacgcctggacactcttgaaaccctggtcagcctgggcgcggatccgagccagcagaatgaggacggccatacaccactgcattgtctggtaaagcggtcaggaagacagccagttctggcccccgaggacgagcaggcgattcgctatctgttagagcatggagcagatccatggataaaagacaaatgcgggatgacggtgctggatatggcgcgggcgtacggctggggtgaactgatgggaggcatcctgaggtcatcgtttcgtagaattcgcggggaagacagccatggcagttgggaggacgcaaatatacccccaatgtcagaggggtgtgcagcagccggaatgtgctggacacaacgacgtacttggaggattggggttggatatgagtctgattgggtagagtccagagaaccttggcgtgtttaggtgaaggggctggtaccctcgcattcttactgaggcgttgttcccgtcagacatgggtctctcttgccctaccgagttgcatcctcggatatagcttctcttagggcgtggtctgatgacacttagacaattggcttcactgtggtcagcggctaataggctcgccggtagctattctactctatttccattattgtggcttaatcgacaactgataactaatccatcacacactcattccattctggcatgtagggagatggattaaatacaggtaatccacctgccgctgcacttttcactagggcactccaggcttggcgaggccagcttttgatgtagcctaggcatgtatctgctcccatgctggcagttcttccagttgtatccttgacagaaccaaaacaactggctggaattctttacttccaggaaagtcttccaaaataccctcctgttagttatcctgcacgataggccgtaccatcaagattatgtttcgtatttcgggggagcgggcgtgttgtgaaacggcctatatgctgcgctatttatccggaaacagatgaataggagttctatgcagttctcctttagtcctataatgccggcccttgcatgagttgttggaatttcagatttttcttcaaaaaagagaagtactgcgtcttatacaacttgtgaggtttgagaggcaaagaatgcgtccacgattctttcaacatcgcggcgccggaagcccggtgaccggccgaggcagattgcgatgcgaactagggctgcacgtttgtcagcaatggaggaagagtaggaaagaaaatttgaacatacactgcataaaccgcgccacatccgttgcagcctgctccctcaaccccagccctaacgggacggtaccagcgcccgggctagacgccgggaaaacgacccctctctctgttaaataaccctgcaaatcgccgagatcaaaccagatatcctcaacctcgtcgcccatgtccgcggtaaaggcggacacgtcctcctgcacagccgccgaactgcgaggagaggggacgggtag

SEQ ID NO: 14935 - DNA, 1692 bp, Emericella nidulans
atgctgctgcaacagaactacagtcaattattttcagcatttcttttagccacgaatatatatatttgacgcaggcttttttttccattggcctgttcaccctaccataccatttagctaggaaatcgtcattaacaccaactgtccgtactctggaagcgaagtgactccttccacctgaaaaaagatccagagacggagaccagagatggctctcataccttgaaggcatgagctggcctaggctagggctttgttacctgacaacccgcgtgagatactaggtagagagataggatgaaattcgcgttaggcacagcaactgagagtaagaatagacccgctgcatcatgcgatcgcaggtaccgtgtagtaccagtagccatacctaagggataatctcattgacgggtttggggaattatgccccagaacaatgtttatcaaggacgacctggaagcaattggataaggtactatagcatttactgtgcagaagacagcaacagccatacgcaatgaacaggtgacaaacaggggttctcagtgctactgtgcctatttagatgcggcaaggttgtcgtgaggcctaggaagccgtgatcctacggtaccgcccctggattaatggacttgaagttattgccgcagcagaatttgaaagtcacgcatacaatatagctctcaaataacggctttccgcatgaaaagagtttagtaaagtcaagttcaattctgatcagtaaattcttaggagtaactagatactgctgctttacgtaagccaacactgccgagtcagcaaactagtcctctatcggataatccgcattaacatatccccgacggtttttggatctcgtccggagattttggtgaacgccgcaggtcccagcgaattaccgctcattcaactcacattgactacgctcattgaccattaccatcgccaatatggtcgttcgcatccgtctcgcgcgttttggcaacaagcaccagcctttctacaatatcgtcgtcgcccaagcacggtgcgtaccgtttactatcaattccggttattgtctgcggaacctacattggatctgctctgggctagaattgcccagcggaaatatgtgaatatcagaattcagctaatcattattcggctatagatcagctcgcaactcgaagccgatcgaagtcatcggaacgctgaaccctatcccgcaacgacctacgaacttgtcagatgaggaggcacgcaacgcaaggccatacaaggaaatctcgcttgatcggtccagggcaaagtactggcttggtgttggcgcacaaccgagtgatactgtttggcggttactgagcttggtacgttgaatttgttgccttgacttcccttctcggaagtttatgtagataagcggatgctaatacgtttgcaggctggcctggtcaaaccgaagtacgagccttcgaagacacagtaatatactcgagtcccatagtattgaagctttcttttttagcttggaggtgggcttgctcaggtcagcgggtcaaccctgtcagtgtctggtcagacattagagaggtttcagatctgtaggagctccgacccgaacacttgtgctcccggcatttctttggcgttatgagattggatcattggtatggggtccaaaactgtacattgttgtctgtatatta

SEQ ID NO: 14936 - DNA, 473 bp, Emericella nidulans
atttttacagacaagcacctcgctggcagtcgcgctggatacttttgtataccggcgaaagaataatttctgggatccaagcacggaacaacgatgtcaaaggacggcagctagacgctatacaccaccgcgaccggagccggaatataaaccgaggggcggctactaacacaaaaggctggaccgattgaattgctagttctcacatgagcgggcagaccgctgtgactagacaggcgaatcgggtagcgggtgttgatgacatacacaccacgttatatgaagaatgtcatgagactgggacaactcactgggactgcaaaaaagtctatgtggtgagaattcgtggtatatgctacggacgaggacctgtttataaggtccactgtacaatctctacggaaggtataggagtttgaagagccccaaaacaattatattactgaagaacttgctaaaaccgttacacgtaa

SEQ ID NO: 14937 - DNA, 425 bp, Emericella nidulans
  unsure (1)..(425): unsure at all n locations
aacgacatggcgcaacacccaggcagcctgcgcagaaaccaggaggacagccccccggaccggtaatagcgccgnaggcagcccgggcgcacgaggcgcgcggaacgccaaaggaccgcaagccgcgaggcccccggaacgcacacacgagccgacgaaagaagaacgccaggcaaagaacaggacccaagcaaggcggaaaacccgcggaacaaggagcacgcctccagcaccaaccgcgcaggcacgaacgggcacaccagacagagacggaggcccccggaaaaggcagcgccaccgggcgaaacgcgacgaccaagacgacgaacctcaacgcaccaagacggaagacggcaaaaagcccgccgagggcgggacagccggcaaaaaacgggggcgggcaagaagaacacacagacgcacga

SEQ ID NO: 14938 - DNA, 1319 bp, Emericella nidulans
atgggatgcttggcgctagagatcttcgccacctccgaatacgagacctgcctaatgcggaaagtccagatagtcaagcgctcataggtcataagagcatattttggaaggatgttgctccacaaaggggtcagtttgtatgattttgttgtgacgttccatcttgaggatggaggttgcgccgactcggctggagagccagtgggtcggcatatatctgcatacccactatatatacctccatttatttccctcatatgctactatcaagcaccgcacacttctctcaggtttcgctatcataatgcaatttttttctttagttgccttcgcaggactttttgtagcttcatcagcacagcttccaacagcccctgagctcatcccgatcccatcctactccggctgccctccagatggtccccttctccctcgcccaaccgatttagcgaactcaaagcacataagaagcgcagcaacaagcctctccaacattctagactccgccgtacaagggaaaatcaaagctggttgggttgttgagaatgtttccttttctctagcactagtctcaccctatagtgcatcaggcactgaggataatgtgagacctttttgggaatatcaccaccgtgcggagaagaacacaataggcacagccgaaattgatggaaatacacagtatctgattggctcggtatccaaggtgttttccgatttgatgctgcttaaatctggagttgatttagaaactccagttactcaatttcttccgcaattgcggtctaataagtcaaagatccagtgggagaatatcaccctaggaatgctagctgaccatctggctggtatacctccaaacggtaaaggtcatcttcctgtcatgatgtaatatatgtgctaagatcaggtagctttctacgaattttatttcctcaactccttccatgaaggtctcggattaccacatctcagcgattctgaatatcccgagtgcggagtcctgggcctgaatagtgactgcagcagagagcgtatgtctttctaaacaggtgtctgaccataccacaacggcctgagctaacgtttcctacagaaattatcaatagctttctaactaaagagccagtggcaccgataaactctcggccgatctattcacagctctcattcaccctcttcacgctctgtcttgaagcccatacaggaaaaaactactcgcaactactagacgaagccgtttataagcctctgaacctcgtaaactccggcgtatccccaggaactacggagcggcggctgtcccgccaggtatatca

SEQ ID NO: 14939 - DNA, 2716 bp, Emericella nidulans
gtaaagacaactgcgccaattgtcgtctctactagatatgttggctgatgaccaagcgtaataacgaaggcgcagctgtacccccttctcgataaatcccgcatacgaggtcttacgatgctagcacaagagcatcgaacaagccgtcagcgaactctatacgccacagccgctttgatggagcctatgcccaaacgaggtcctggaggtcctaattactttcagggtgctcccgataggttaagcagaattcgcgactggctagtaatcaggcttggacgttggcataagcaggcaagacaaggaaggtttatgacggtttggccggccaagccatttccacagcgtacctggccaggttagccagagcgacgacgaccccgacgactcgacacggccatggatgtgatatccttatccggtaggcatgttagtgcttcactcaaccagctctttgactaggatcggaaacggcggaacatatggaatgcagcaaaaggcacgggtagtcagatcgatcaacgactctacacaggagccatatcgcaaatgcagcgaatgtacttcagcctcggcatcgggacaacaccctagtccgcctcatttcgccctgcagatcgcgagcctaagccgaagttgaaccggccctcgtagcgaggtcgtgtacagaggcagattaggccaatagcgcatcttcctctgccagagcatgggcgccatcgaataacactttcattttatagctttcgaacataacctcgctgtatctcgagtaggggatagatgggctccgatcatgccacagcctcatcgaaagacggaatcccggtgaaactccacacgattaagcaaacgatatcatgatgttgtccctggacgcccagcgagcgggagtccgagtcccgaaggatcggagttttgaaacaactcttctcgagcaaagagagcagcagcgatattcgcgagaatggctggtgacgttggaaggttctagatgctcagccctccgccctgcccttttttctcttatgtcgtggattccaccccgacaacattcatgcattgtgtgcgaagcacattgcagggtgctccattgatatagctctgtaggatgattggtaaacagggtgccccataatgccagaactatagtggttaagctgacaatcaccccataaatggcgtcacaagtcggaacttgggttttggccgactgcttcagcaagatcgataaacgcatagatcgagccttggcggatatcaccaatagggtacctggctactatgccaagttgcttattttatggtgcttctgaggcaaatgtgaaattacccatcaggtaatcttttccgcgttgttgttccctcgtttcttcctcccttgtttcctctaatttgagacaaattcaacatcaatgctgtagttccgatgcttctcggttctccctcaaaggccatcaccactcccaagggaaaaagggcggattgtcgagttggctgcaaaatgcgtcacaatctgtgaagtcgaaacttgaccggggaaaattaccccagctcagctaccccagcccgcacgcacaaggaggatccgcctggctgagtctcaggagacaaaaccaaacaatgttgcgggcaatgacgacaggatgcagcaaatgtcgcgttgggatttgctggatagcattgatggcgcacacgcttggccgcgagtggcttagagcgcgaccgggctggagacggaaggaaaccccggatttcgagtctttctccgcaccccggctattgagttggggttattccgctcattggctgtcttcatgtagacgcacctacccgcttgggtaggacgtgggcgtaccaacaatggtcgactgtccgatttctaaccttggtagagctggggttgagtatatatagaaccattcggcagtgaggttggtccctttttcgtggcagcggtgtgtccggcttcacaagtgtcaacttaccattcaattcctattcaatttccctcaatatttctccagctttttatcttctctcttgaacgtttcgcctctcgatagctggtctgtcctttctttgcaatcatgtcgacggactatgagaaaaggctgagcctcgacgatatggccctcaagacaggcgatcacatcgagacaattggtaaggctgccgccgtcgatgccaccgtcgccgccaatgtcgatgacatcccgatcagcttgtacgtgtggatggttgctctgtctgcctcaattgcgggcatgctctttgggtacgacactggcatcatctcagcggtcttggtgtacataaaagacgcactgggtggtcggtatctcacaagttctgaaaaggaactgatcacatcgctctgctctggaggggcattctttggctccattttcgcaggaaataccgccgatagggtacgttggattccgcttgcaaacgccttccaaagctatgctgactggtgcacgagtggggccgtaaaactgcgctttacctaggttgcgtactcttcgtggtcggcgctgttttgcaggcagctgcctacaccatcgcacaaatggcggttggccgagtcattgttggcttcggggtagggtcagctgcaatgatagtgccgctatacgtcgccgagatcgccccgtcaaaagctcgtgggcgactggtgggtttgaacaatgtgtcgattagtgaggacagg

SEQ ID NO: 14940 - DNA, 1806 bp, Emericella nidulans
agcttccacgagtcctcggggacggccaaggaaaaataggcaattgttgcgaggcattgcgcattgtttgagggcagcgaaaagccagggccccagatatggagttcgagaaccattttgttccgggaatagaagatgaagacttggtttgtgccaggattcccctcactctgctggcgtagcctatgccgggcaggagacgccgaaatcacgtgggggaggagctgcagcttgccttaggcatgaaggcgtcattgtcccgtctcattttccattttcagacatccagaatccctgtgcgtttggccaacggtcactccgttctggatcaggaaatcggccgacagctcaaaccatatctgtgttcgataaatagaagatgttactgcatatttcatcatctgatgctattttccgcaggctccgggcatgtctcagatagcaaggtcgagcgtccatattccacaatgtcagaccggtcccgcatgtagattgattcgaccagttggcaatggcgttatcaacccctgtcggaaccttgctaaatagcgcaggctgagcggccagtgtacctacatccgcccctccacggctgatcaaggccgctgcttcgcaaaaaatggttggacttcaagcggctggtcgtcacagcaggcccgggaagagggaaatagagccgcatccttctcccaccacccaacggaggaccaacccgatcaggattctgacatccatcctgcaaccactaagctccggccgatacacacacgttccatgaatccgagctctcaattggagcctgcctgcctacttcggataaaggtcacagcttccagtttcaatctctcaagtacatacgcctacggtgtgtcacatccggaactcgcagttcatcgctaacgggccaaccagcaaccactaagccaggcatatggctcaagactccgaggcacaccaggtgaaacgtaaaccttgcggaatggctaggtcttttgctcatgcgcagtcagttgacctgcgatcgggctcctaggaaccttattcggataagattaggctacgacgtccgagcaacggacgccttgtcctcaacttcgtattacatactacccaagatgtcagggcatcgccacattttaaggcccggtttggcatgactcgagccctgagcacggagcacgtttgcctgacatttgagtttgctgaagacttggagaggagataaacgcggcacatcattggcgacccagggacgactattgtcgtcatggtatgatcagtatcaaggatgtgggaccgatgtacagcaccggcttactcggagtagaagtcacagcactcttggtacgtgttcagcaggtacctgccttcgttgctccaagtaagtatcacgatgagtggcatcatagacccgatgtcgtacatatgcacgcagctggcgacaaattacgtacagcggtgggctccaccgacctgcatgcacccaaagggttgagggttaagtggtgctaccgtggtgctgcagtagtactgagagagtagctgcgtactctgctgtaatgagctgctgaaaccaaaagtgcgctaggttgtcttctcagatttgagaacttggaccaatctattgacatttttcattcttatcatcttatctacttgtcagctgcctcacctcgcgcaaagccattccggaataattactgtgaactaaatgcgaatttgcttttgctcataaagctgtccagtgaaatgaggggacagccgagtcgcgacagctggaggcaccagggaaataaaaccggttat

SEQ ID NO: 14941 - DNA, 521 bp, Emericella nidulans
gccccccaccgatcggtctatccaaaacaggcccggagaggggcatttgtatcccggattatcaagccctacaccgggggggactggtacgtacgtattcacgctcctaccactcaggggtccggccagctcgcggccatcttggccccatacagtcccaccagaactgccgaagaaactaatgggggggcgatataacagatcaccccgacgaaagaaaagacggctgaccgctagtaacaacaccgttacttggctgctaacacaagcagatgatatcacatccgatttctggaacgagaagaatcactgcccaggaggcaaatgaatacgccatgcgggtgccaatgactgatgacgaagagccaacgtcagcctgcttaagcacagagcctgaaggcctagggggatgcaattacgacgcgcatggaaacaccctgcatgttcagaccggattctcacatagaggccttcaatcctatgcgacaataggacacgtgatagctctgtctgcactgaca

SEQ ID NO: 14942 - DNA, 705 bp, Emericella nidulans
gtgcaataatcgagcgtactttgtttcgctgacattggagaaactcagaatgtcgagctgttgctaagtctgctccaccggttgcattgactgggaacaggatcggaaaggttaaacacgagccaacaaagcagatcatggtgataattttgagaaatcgaagcaggagatatgcgtccatagaatggtgctgcaggacgtattcatcaggcagtttgtacatatccttaatccatcccaatggcccagttgacgaagggggtgttttttgcgagtctcgcaggacgccaaggtaggttcgaggcatatacatgcggcgctcggtccgtcgcagaatcacaaagatcaggaccatcgcgcccgcgacgaccaaggacgggaccagcacagtgacaagactggaggcggaattggaagccgcttgggggttttcagagtcctgtcaccacgagataagttagagatactggctgcgaccggtacatcggttgatacttacagccatagtgacggacgactgtcagggacagtgttccaagcaacacaactgagtcaatggacgattgtagcttaagaagaccgagccgcaaatgtatttggcccgtgatagtttattagcagacttgagagagcgatagggaaagattaaacgaaagattgagtctgatatgacagactgatgaaggaaaagagcgagagctggga

SEQ ID NO: 14943 - DNA, 786 bp, Emericella nidulans
atctgcgccctcgttgttcaggaacgcgaaaataggtatagatgatgcaaagaaagcaaatccctccctttattagaccagcaaagttgccccagtcccaagccgtcgggttcaccatgtacggcgtgagaacaccgcatatgatggcaacaatgttgtataggatacggccgagaacgacggtcttgatctgcatacggcgtgtcgagatttctgcgacgagagagtatgccacggttccaactgttaactggtagaacagtgcccatataagcatcattgacccggtggcgagcgaagactgtgtccggtgagactttggaacaaggccgtgaaattccattaccagtagcattacgcatagcccacataaaccgtaaagatagagcttttgacgggccgttcccccatgacatgaggaaccatgcttcaaagacttcaaccatgtttgttgccgtactggcccattggaaatgagtttgccttttcgtttttcaattctgcctgttggaaaaagtccctttatatattttgaaagaaattgctccttgggtttgataatccttatttgctaccttttttgtgcgccgaatcaactccttgactaatatatactaggcccctgttttttttgtccttgttgggttgtacctctggtatgtgtctctcattaattcttttttttatttttataactctcctctttatgcttttttatcacttacttccatgtcatttctatctacttttatttctatatttcttttttatctttcctcttttttt

SEQ ID NO: 14944 - DNA, 902 bp, Emericella nidulans
gaccgcactgtcagagtgtgcgcgagatgccttaccttgggctcacgcgtagacagaaaatgctcatttttaattttatgcatgggcatagtacgctgcgagtcctgtgcggaaggggacagtactacgtacggatagatagaatgtgaatgtcaaacacgcatatgcgaactttctgcgggagactacgcctctctggctggcactcgaggtgcatagggagaattgagcgtactagtgtgatgcggagcctatgtgtctaggcttagcgggagctactccatatgtggtccgttgagcgagctcagacccacctaatgccagctatgttcatatgatcatctctggtctagtcgcgggagcgccggctaggttaggcatggactttccgactgatgctggacgtaagtttccgagatcgaggtcaggacaactggccaggccttgccaaagtatcctagcacggagggggccacgcttgcttgattcacaacgcttcaagcattgtttaagtaggcactgtctacctggcgatgacggccccacagaatactatggatgaccgcctttgccatatacaggttcccagggatgttcttcttgcaagtggccctgagctcaccctcaaagggtttctcggagcacacacatcaacataacggggcttcaaagggcaatggggtctttataggtgtttgggttatccacatttttaacgacgtttaaggattgccgcctacttcggcagggtaggatggaatttacccaggccctttaactaggggagtgttgctcgaattaggccggcttttgggctggtccctgcggctcttggcttaaggcagagggaattatcttttttttttttttttatctagtttttctgtcggcgtcaaaatttc

SEQ ID NO: 14945 - DNA, 5887 bp, Emericella nidulans
aaaggatatcatcgttacagaactcaatctcggttctattccaccagagttggagatattggaggtgggggatttagcggaagaccggtttcgcggcatcttcaaaatgtcttattccggagacgccttcctgaccctcaagactcgagtccaagcgaatcctctcaacacctatcttctgacaagaccgtcgtttgcgtcgccgttgccgttagccgcagcgtgagtatttactggcgcatccgtttttcgtatctgctgacctagggcttcgaccaggacgcctctcaccattcctctacaaataaccctatccgatttcaaactttcaggcttcgtcgtcttggtattctcaaaacagaaagggatcacggtagtgtttcggaatgatcctttggagtcgctcaaggtctcttcgacattcgactcgatcccgttcgtccgagactttctccagaaggagatagaagcgcaacttcgaatactgttcatggacgagctccccgctataatccatcgcctatctctccgcttatgggtcccagaatatcgcgatggagagcaattggagactcaagataccgcttctagaacagaagggcccggtcaagatccgttggctagccctccgcaggatccagtggacgctttaggaaatgctctgaacgaatccgatattgcgtcgctctctcttgaatcttcagtcgaaacacattctttattctcacaaaagaacctcttgcgtcttgctgcccttactgattctcagcggacgttgtcgcttttcacaccttcaatccgagaagtcgtatatcgcgcatggacatctccgactgattccggcgaggctactgcgggcgtgatttctccagcgagcccagcgctttctaggacccattcccaggtcggcaatatatcctcgttcccggataccgccagtatggtatcatcgcaaacccgctctacgacttcgacacatagcttcagcagctacggtctgaacaccggatctagccgctccaaggtgcattctaggaagcgaaagaagcgtgttgtcgacctgcgacgtcctaagacaaccgacgatgccgcgagtgtcagcgatgagagtgccttcaccgaatccaccagtgcgccatctgtttattcagcgcccctacctatcgtgagggagcagccagatgacccggtaacaccacctctttcgccagaaactggactgcacctcccgcccgttccagaacggcaccgtctcagtacctctcgacccggtattcgccgaggcgccgatgcttttgtgcaatctggggagtcttcgtcttctgcacgtcgcagatccgatgtcgacgtggacgccactccgcgaggaacgatgcgctctcatgttgccatgacacgctgctctgagaaacctgaacccgaggcaccgcagcagttgccgtctacaatacttccgttcgctgatgagaaagcgagttcgaatctcgtcgatcaagcattagttgagagactagccggagaaattgcgcgccgcatgcgagacgagaaaatgccaggctctagcacgtgcactccgttctgggaccgactgaaccatgatgaggctccgcctccggcctatggccactgatgctgctgctgcagcatcctgtattatgtttgagcgcttatccgcactggcagggattgttgctgccgttcactctctccgcttcccttttttttttcttctccaacctccggcgggtctggagtatttaacgaacgatacgaacttatttgtttttaattattccatatggtcgagcttgggacctctggtttgttttggagcgtttggatttttgaggtctgggcttgcaccgttaaaaatatctggcgttatgcttcgtttgcggagttgttttctttgcagataccatctctctcactaatccaccattgttctgccttttcctctacgtgtctattttcttgatttcgtcgcctgtcggaggtttccggtagttctaggtggtatagtttgcgttatgaggggtaagcaaacttgagaacactgttccgcttggcctgcatggagaatatttcttggtgcatcattacaatatagattgggttcatcagctcctactgggctttagactgcgtatctttgcggcgtgatttgatatctcgattagtcttggccgtcgcgtctaatggtggacttggaggtctgggctccaccaaactaggcttttgcggcgaacgtcaattgattatgccaccctaacccaacaacttaaacctgcccccatcgccccgggttcctctcgctttgctcctttccccaggccacgtttgcagttccgcatctctcgattgcctccgtccgggcctacttctctccctccgccttttacttccttttgcaatggcgggagttttcaagaacgtttttggccggcgcccagccttccaattcggccgcgctagaggatgggggtaagacttgcgctcctgctgtcaaaccggaattttgatctcagtttcgcttactgacttggctaccttgctagatttcgccgacttcgttgaggcgcctgaaccgtcccctgctcctattttaaacacccaatcggcaccttctctaggccagaacggggtcgaaccggttgtgtatacgaaatggtaccgtgtttgggagcgcacatccccaaaagacttcatgcaggaggcaatggtcatgccgattatcctcttgatcatcatattccatttctggggtactcgtaagaacagacggcgagcgactgagtgggccgcggcccatgccagcgctctccgagacgagttcgcggttgttggttttgatggtattcagaaatccgaagagtctatttctgtggacgtgacggcccccaactcgatcctgaaggagaagtccccgcaggagttctctacctacgcgactggccgtcagaacgtcgcattccttgacgttgcgatcagactacctaagcgcgctaacccggtgacttactggatggaccaggtttttgctttcttctttgatagctggccatctcccgaagaaacctttgaggctaccgcttacacctttgatggcaaggagaaagatttgattccagtcctgggcaaggatacctcttctctcaaagtcaacaacacaagttatgatggatttatctttgcgattgttcacaagaaccacatgcgtaacttccgcaatgatagatacgatgcgtccatgaccttcacccgggaccatgcgaagctgccccagtgggtaactgttatgactgagaacgccgaaatcaccgagaccctccttaccccagagctcatccaggctgtggaacaagcaggaaaaaacttcaagtatttgattgtttccgaccagcctgttgataagcccaccaagtaagccctccctatccaagtatcacgttcaagccccgtctaacgctcattctcagaattgaggaaaccgctccccgcaagcgtgttcagcttgccggatatcttgcgccttccgcttccggttatgcctctactctgccattgttcaaccaattcctgcgcttccccgacagactcgttagccatgctcacttccgccccgaggtgatgcgaaagatccggaacgtgcgtgaggaggagatcaagaagctgcgacgcttggacgagcaggagaaggcggaagagcgcaggttggcagctgagaaaatcaagaaggaggagcgggaacggactcttcgtggcatgaatgccgaagagcagcggaaatacctcgagcgtgagcagcagaaagagcagagacgttccatgaagaggtacaccaagcgcgcatagatgtggcatggctaccaacagagcagcgggatgaataacctggggaaaagtgctctgatttagatactgtttataccttcatgtataatgtattgatatggtctttggaagatgaaggaaagctaggcgaaggagcaagttcaatcgtggccgtgaagccaacaagcattttactataaatctaatttacatctaccggcagctataatttagaatataatcgtcagcatgattgtaccatatatcctaaagtctgatcgagccgtagatagaacctggtgttgtgtcacgtgacggtaccagattttccatcccgaagtcgactttctttttcagttgcgcctttcaaattgttgatcgaacgagagcgtcacgaccgcaccttcttacaccttcttatcgcgtcgaccccactgtcaattcccttgattaccatcaacatgtccatcacttcccaggctgcagctcgatgctgcagacagctcgtccgcccatccgcttctcttcgtctttccgctacatatcagcaaacaataagccggagatggcagtccacagaggctcccgctgcccctgccaaccccaagatcacgcagattgtcgatcagatcagccaattgaacttgttagaaaccgccgaccttgttgccagtctgaaggtaagcctatccaacatccccagtcagcccctacatgttgtgatccgctgccccggttgcctacgcttgcgcatagaaacttcggttccgaaaataataattcaaaaactaataatccgccgaaattagtcccgccttaacatccctgacctcccagtcggcggcttcgccatggcccccggtgccggcgcacccggtgccgctgctgcgcccgccgaagaagaagaggccgctcctcccgctcaggaaaagaccctcttcaacttgaagcttgagtctgtcgacgccgcccagaaggccaaggtcatcaaggaggtcaagacgcttctcggcctctcgctcgttgacagcaagaagtttgtcgagtctgtgccgaaggtgcttaaggagagcgtccccaaggaggaggcggagaagcttatcgaaacacttaaggccgtcggtgccaaggctgttatggagtaaacactttgtgggttggctcgatacggtgtttgttatgagtgctctcaatggtgtgattagtatggccatgtcctgtttgtgtgtgctgctctcctgctctcggctggctagatgtgttttctcctttctgtcatatatctctgtctcttctgaaggtgttttgataaattggccggggagtgggagataggcagcgaatgtatattataatgtacttgtttggactcttttgttccatgaaaatttgggcttcctttgctactgctgggctcatccacgagagtttctcagcggtacattagtcacaccatataccaaactgtcctttgccagaggacggtcaactacgctgatgcatggaagtaatatgctggaggaagtaatatgctggccgcttcgagaggtcaatactacggatatttccgctgctctctcgacaggcaaagaaaccttaccgagcacatccacaggagtgacatactttatcccttaggctagactacctagagtatccccctgacgatgttctgttgctcgagagttggattggtaatgcgcgcatgatcattttttatcgaaacaattcccttgttggtcctctgtcaacgtatcaggttctgggatctcctaaggctggacaccacaatgcgaaacaaacaaatgttcgagtgaaactgacgagtgtagcccagtaaaagaagcatgtcgtgacccggcgtagctgggtccgttgaataggcgagggctgcagcaacaattgggcatagcataaatggtatgaccattatctaagcctatgcatgatctagctttattggtactagcgcatatcctaacttggcaaacccagcttcagcaacgcaatgtactaagatgaccttatggaggagtgtgaatgataataatag

SEQ ID NO: 14946 - DNA, 4097 bp, Emericella nidulans
aagatattatcagggggagtggatataatgaaatcatatttgagacaaaagtaattgggataaaccccaaaacagggaacaaagggaaagccaaaaaaagggacggagaaagagtttaaggacgaaacaccggaaaaggaattcttgggagtcaccgataaacaataaagcttgtatcggcttaaaccagtcaaggttttataggcaaaacctaacggatcaagccccggagtttataaaggaaggaaagttcccatatttaatttgaacaggcaaaaatgagcgaattgccgcaatatggagggtatatgcgccttctaaataatgatagaataggtctcccagatagtgcggcggtgcagtcaattagaccatgtcctccaaacaagccttaacaagcttacgctgaatgtgaccagtttcagcagtcttgacagcagtagtcatgagaccgtctcgaacagccatagcgtggaagaaaaattcagtcggagtcaagccacgaaggtatgaattttccacaaagcccatggatactggagagtagtcgtcatatgtgaagtgaggaagagtgcggtatttaaatccaaaagcaatacgcttgccttcgaccatttgctgaccgacgacagcagtcatctgcgagatgttaatgatagaacccttagatccagatcgcgacatttggacagcattgttcaaatccttcaaactcttctcggtggcagtaccagcttcatcacgcgccgtgttgagagcgacagagaccttactctcaaatgtttcacgcacgttcataccgggaaggggttcgagcttattctgagtcgcagtggcagtaatctcctcaacttccagtttccgcttgcgcacacactcctcaatggcttgaatagtctggtcgttggggatagtatcaccaataccgatactgaaaccgttgtgtagcagccagtagttaacaatggcctgcgcgccattaaagaatgccacagcagcatctgccccatattcattgaagatgatgtggatgacaccacctccactcgcaccaacgatctttttgttgagcatcccatacatcaactggccttcatgaatgaggacgttcccatcctggagaggagagtacttctcagaagaaggagctgcgcctttagaatcagtgcgcatgagattgagacccgacgggaataccatgctaatcatctgttttcctgtccacctgggtctgggcttgaaaatcgcaggtggtggaataacgccatcccagtcaggaacccacatcatgatgttcatcacttgctctttggtcaggaagacatcgcgacggcagatcttgtagataccgcaaagcgtatcctgcacaatacccataaggggtccatttcgttgaggagacacgatgttttgcggcaccagtgcgagttgttgaagttccgctcgagactcttcactctgcggaacgtgcaagttcatttcatcaccgtcaaaatcagcgttgtatggactggttacagaaagattgagtctgaaagttgaataaggcatgacacgaacacgatgtcccatcatagattctttgtaaagggagggctgtcggttaaacagaatcacgtccccatccatgagatgacgctcaactttccagccgtacaagagttgttgcccgcctgcacgctttgcatgccgaagatcgatgcgctcgccattatctcggacaatgtatcgtgccccaggatgctcgttcggaccgttcatgactagctgctgcagtttctcgatgttataaggagtaacaacttcagggtaggtcagtgttctggcaatactcttcggaacgccgacttcatcgagcgacagatttggatcaccagtaatcacagtacgagcagagaagtctacacgcttccccatcaagttctgccgcaaacggccctccttaccctttagacggctccgaatcgctttgacaggtctgtttgacttctgcatagcctttggctgaccagcgatatcgttgtccatgtaagtagcaatgtggtactgtagcaaagactcaaactcgcgcacaacgtgttcaggcgcgccttcttgttgcaacgctggacattttggtttgctcggacgatgtcagccagtctataggtcaaatcgtcctcaccacgctgaccagaagtgctacctccaacaactacacttgggcgaacgggaggaggtggaaccggcaagacggtgagaatcatccactcgggacgcgcatagtcgttactcaagcccatgatgcgaacatcctcgtgagagatgttgcggaagatattcagcgccatttgcggagtgattatcttcttctcgggttgttgcatgtccatctcatccatcatgctcttcgatggcttccacgttcccacaagcgttatcccttcctttcgaacagtgggctgcgcattgccgcatccgccgtgcaatctgacaggcttcgaactttctttcccgtactcgtcgtcttccggtggtgggtcagcctcgcaaatcagaatatccttcgagagtcgccagatatggtcaaaccggcgcttcgggtcccgaatccgcagggcatctaagaacttcggatcagactggttttatgtcagcacatgtcgccatatagatttgccatcccgtaagggatgactaaccgtgttggctttgatctttccacagttgtggcagaccgtctcaagcaacttcttgattttcgtcaagaatcctgagtcaaaggtcagatatatccatgaaacttcagttgcaccaaatcacataccgatatgaaagaccggagtcgcaagctcgatgtgtccgaaatgcccagggcattccttctgaccttcttcacaagtttcacagttccattgtcggtcaatagtccccaaacgcggatcattgagacccttagtacgtgggcgttgtctttgatcgtcctatgatgattttccgcgtcagatcttcccacaaaacttgttgcagattgaaaacaaagtacaaagtactaaccatggtctctggatactcgacatggaccacactcatccgcttgatttcttcaggactgaacaagccgaactgaatctcggctatggtcctaagcggagccttggaatagggaaagtagacgttagacatgatgaaagactgcgcgtaaacgaaagaaacacaaggcagagaaagtcagtcggaagcggaaatgtgacggctttagaggtcgaagaaacaagtgctggcggcctatcccgtatttcccaagtgagagctatcgatcggcgagatacgttgcgagcagagggccgtataaggcctctggcagccttgccacgcagagggcgcctgcgacccagtccacgacttcgcggtttcggaaaagggcgaaaagcagactcgaccacggtcaacagtggcgatactcgagttcgcagagcgggtatcgcgataaacgcgatggtcggggttgcgatgggggttgagtcgggacgaaagggaggcagtaggttgtcaagatgtcggcgatggatcgagtgaattctctaagccgcagtctggttagcgcgggccgtctaaacctccgccacctaactgcggtcgcatggttccagccaatcaaactaaagaacattgcagagatagcggagccttttgtcgagattatagatggcctctcaccgtccaccaccccagtttttgagcttcaagccgacaaagagtaaatatatcccccgtcagtgcagaaagtcagcggtcgttgattcgctggatgttccctctcacccttctctcctggtctctccttaggctgggaatctgttctacgttctcttttcgttctgtcttggctgttccttgagccaacttcaagcacctcgccatgaatctctcacttgtcgatcccttcgtcctggctcaggactacccagacacattatcggagaagctgagtatgttatgtaataggtgctattagtcgggaaggcttgctgattcataatatagggagtgggcacgcgacatgtctgcgcttcaatcgcaagggagattatctggcgtctggacgggtcagttgc

SEQ ID NO: 14947 - DNA, 2376 bp, Emericella nidulans
aaaggatatagctgtgcttctcttctcactctcacgagcgattggcgatgcgaccgacattcgagcttagtcgaggatgatgcaaattcaagcacgtgcggtatcccaagcaagctcttcacttgaggcgaagtccagcgtcatcaggatggtaactcctggacccagattctagatcagtactggctgggcaccgagtctccgagtcatcagcggggagggatgcgatgcgatgccgatctcagtcaggtcagggtcaccggatcggtgcgttggcaagcgcgcccagagtattgtgttagactgtaagtaccttgtagtgataccctgacaagcattagctgcaactcgttataccctctataattaggctcgtatcctcttcatttgctgaccgctgatcttgccatacattatgacacattggggcagatgatggatgtcacatctgattgaatttggtgtcttgagatcatgctcagctatactattccaaataccctgatttattggccgcgatgctgagttggcaaacggccctagcataactggctcctgaatacgttcaatgtcttactgagttcaggcttaacgggatcttgaaatcaggcttttaaagtccattagcattacactatgattgaatattaggtacaaattgaatttgtctacagaacctatgaacgtgcgggaaagcgtcgttcccagccaacaacggccggcttcataggccccatgaacatagacgagtagtctgtcgcaggaacccccgtctttccgtccacattgtagagctttatgttacgcacgatcgtcgcgacaatgacgcccaagttgacgtatgcaaacttctcaccgatacaccggtgtcgaccgccgccgaagggtaaatacgggctactcatacgcttggacacagcaccatagccataatcaattagctctccctcttcgtcctccttgtcaggccgttgattctcccaacgatgcggatcccacatgttcgcgttgggaaagtattcgtcactgagcgccgttgcaccgggagaagccaagagggtatgactggttgggataatgtagggagtgtcggggaccggaatcgggttcttcaccttgcggaggatggagtggatggacaaatggactcggagtgtctccttgatgacattctgatgcagcgggagaagatcaagatctttatattgcaaaggttcaaaggcgccggtgcgggggtcacgcttaagattggcaagctgctcttggtaaagctcctcaaggatttgaggctccgaggctagtcgcagcaggatccacgcgctaatcgacgaagacgagtgctggccagccatcaacagggtaatcatgatatgggcaatttccttgtctggcacggggtttccattcttgtatgtgctgtgcatcaggttccagatcatatcgtggtcttgtgcatcggggttcttgcgccgttggttgattatctccatgtaggtctctcgcatgcgagcatgagcgatatcacgtttgcggttttgtggaagcggtgcccatgggaggatgaagttgattggagtaaagcccatctccaaatcatggaagaggtcggcaaattccgcggtgagcttcttgcgaacctccttcccttgtagtgcgctaccagcagtgtagattgtaagttcagccatggcagcgggagcatcaaggacacccgagtctcccttaaaccgaggagatgtcttgatgtaatccaaaacctccttctcgatcaacgggacgtgcgattcgagcgcgctttgtgagaggccgaactttataaatttcttctgctccatgagcttcgaattagggcaatcgtagacgacatcagatccgaagactggcgttgtaagtgggctgtaaacctcctctgcattgaggtctttgagttttccattgaggatgaagtcgttgcctttaacacccatgtacaccgtcatcttttttccgagcatcacgaaggtgtagatgtcgccgtactattttagttagccgaggccttttatgactacttggaactcatcataccttttccctgcaggagaaaaagaacttatacggattcattccatagctgatggtactgcccacgaaagggacccagtgaaacaccattggaggctcatttttgttgcggaagaagatctggcggatgacattcaccaggactgcaacaatggctcccacgagtacgtaggcactgaacaatgttggggagagcataatggaggttgttcagaccatcgatgtcatcagaagaggggaaagaattaaagggaacaggatcagtaatctggccacggtgattgaccagcccctggatttgtgcagcaaaca

SEQ ID NO: 14948 - DNA, 679 bp, Emericella nidulans
acggacacaaagacctatacattgattctgagagaaataattgtgtgcatagggatgatcacgacgggggtgatagtcatgaaactaccggacatagcaagctgtcagataaatatctagcacaggtcgaggcacgccagactaaacgaaccagttgaggatgacgagaaaacctatactctgtactaatctatgaagagaaccagaccaggaacacacagggcagattccgacgctaggacgtatcgcatactatacataaatcggctctaggacggcaacaccagagtcaaggaaacataccaagatgattacgaccatgcaccaagagcgcaacaccgccagagtgcatgaccactaacatggacatacataccgagcagcccaagaataccactgactagaggcgacatggtcatacagaaagcgtataaccaagggaaaaaatgcaggggacaacgctaagaggaacggaccctcacagcaaacaacttaacaactgcaattccacaggatgagacaatccttccatacctaaaataaggaacctatattgatattcccatagatagaacgcttcacaatgtcatctaggaggcagatacaccgtggtcttctggagggaaacacggcattagcagctcgtgcaaacgaagttggaaagaatgaggccgaataa

SEQ ID NO: 14949 - DNA, 3802 bp, Emericella nidulans
ctttgcttccttcgagagttagggaagaacttattgccatcactggctttgcgtttctgagacgcaggtgaactgtcactgaccgcttttgaagcattcggatctgcattctcctgtccacctgcagcattcttcttctccatcgcggccacttcgtctgcggtcaggaatcgaccgccggggcctcgggggcgacgcatcgcgtggttgtgacgggactcatggagatacggtttgcgacctttagatgtgagtcgtaactgttcttctaatttctgtcgcgcaacgcgtcgcttgaggatacggtgaaactgttttgcattcacgtacaatggcgactcctctgcgccactaggcatcatgtctggggaagtttgcgtctgctgaacggggtgctgaggaggtggcatcggcggaggcactgaaggtctaccaacgtgattcatgacaggctgggcgttctgcacgtgcgggctaccgacatggctcatgcgacgctgctgcatttgagcggttggtgttagcggtacctgcgaacccatcggtggcatctggccgggaatttgaggcggagaccggggattccggtcagtcttcaccggcactcctgccatgcggggtgagccgcgcgggccttgtgccatttgaccagctatcgaatccccgtgtgtaggatagaactgccctgaagccgctgccgtcgccatcgcagcagcctgggtgggagatataccgtatggttgcggcggcatggccgtcgtgacgccatatgactgaggaaagttcatttgctggtgcatcgagcccggggcattctgcgcctgctggtaatgggactgggatggaacaacaggagaggcctgatgcgtgggatgtgcttgttgtatgtgtgtttgagggttggttggggatgtcatcgatcccagagcggacccggggttctgaggtgctgttggatatgcgccggtcatatgagaggccgggtgctgatgttgaccatgttgttgttgatattgtggagaatattccatactgtgagatttcggcggagcaacacgcctgtcacacttcctagttagtgttgctgttagtggttttcaaatgccaggaaccggccaactaggaccaataacagcgtcgaagatgaatgattggtgaaccgatgttccagtcaaataaagcgacaaagaaccacggcagtgtgataggatataaagactgcgcttgaggttatcgggcaagctgaggggcagttacagagcaggcgccgcttgtaacttatgatttgtagatcaaatgtgcaagaactgcaaacgcttattagctagtggattcaaggcgcagcacgaagcggtcactggatcaatcggtggggtttgatggggacggagggcgcttgatctgggcgcttacctttagtctctggtgcttttcagctttcgagatcaatgagatcagctttggggagatgcttgttccacagaacaatccacagagtaacttctaacaagatcctttggagggtccgtcttttttctacatccaccttcaaagtgtaacgtggttgggctcggatgcagctaaccaggatgccctcgactaggctcgtactcgatgcgttgtcagacaaagcgcaatcgcttggtagaaacgcactactgcttatcgccgccacagaattggggtggccctgtgggagctacagagtttgatctgggacgataggtcgtagttcacctcgtccaggctctaaatcagttaggctgccaggcgatgtcggtaacgaggcgacaaagcaggaagtcaaaatctgaggcggtgcaagagcgtgtcccttgaagcgctgaggggatcccgatatgagactgatgtcagaatccgtctctaatcagatactctggcacggcaagcgcaactgcaagagatcgtcagctaccatttctaaaataggggttatttttggctgtggattgtgcgctgtcaacatgaggggagtgggcaaggtggcggggacgagaaagaaagaccgagaatgtcgcggcttagtttctccaggctgagggatgcatgcgttggcaagcgggaatcatgatgcagccgatgacatacctcgtcacaatgcgcgacgcaccacctagtcttcaggctgcaagcggatgtccagagtagcaatcgcgccaattcgaaacaattgcacggttaatggaagagatctgtcagaagcgaagaactatgaaggttgacgcgtggtgattgggccttaaggcagcgggacgcgacagaaacataacaacagtgcaggaataccacagaaagtccaagtgcccacatgcgcgaaggcaagaggatcggtcaatgcagcaaaaaagtaaaaataaggctttgtctgcaacgcctcgaagaatatgcagtttcagtgcaagattgcaatgctggctaaaggaggggaaaaagatcacagtcgcggtcttgccgggccgcggtggtgagagccaagtaagcaccgacctccagcgccggtgagtaagcgacggcagcgactgtgtccgcggtgtcgccggctagtaaagcgatagaaaaagagggcagaagagctcagacgcggtaggggtcaattgccaattaccagatgcctcttcactgagctcgcgcgcgccgaatatgtgccaaccaaagcacggctctttgcgcgacaggtgggctgccgctgatgtcagtcggcctcgccaggctgggaccgcgaccgaggcggacaacggcacggggcgactaacagacagtcggcgggaatctcacaatgtggaggatggagggttcaaggatgaagccaaagtaatgtgatttgtggagggtaaacaaccgatggtctggaagccaacgagagaatgcagccgggcagctggggaatgcgtagacacaggagacacgatggaaagtgatgggatttgctggtgccgacctcgaggggagaccgcatgcaacgggattgggcacgggcaaattaaggtgtgcgatattggagcacaagagcaaaaatacaacagcagaaaagcacggtgcgagtaaggggcagctgtgagccggcgatgggttccaagctgtattttgaacgtacctggcgaggtgattcgaccacaaccgtggaaaatatccaaagtggccagaaagtgatcaatcacaaaggagcacagcagatcgggtgggaaggcaagcaatgatgcggttggacgacgaattgccagacctcttaaggggggacgagtaggaaaaaaagggaagaggagcaaggccaatgggcagagtgcgggcaggccggccaggaggacagagtcgatgactggagggaacgcaaggactggaggctgcgcaaggactggaggctggatgaccaacgagagagagcaggcgagaagcgagagcgaactgggcgggacggggccttgatatttgtacgattcattgactggaggcttagtacacaatacggtatcagagccgccccactcgctggcataataccgcactggaacagtgcttacagatcacgaactggaactgattctctgattccacgatcatcatttgtctcacgatcccatcaaagtatcaaaactatatagacagttcgacgtcgcatagcattcttttgatatctataaaggccatattcgggactgtatcactcgtcgacgctgtgctggaatgtaccggcgtgaaaataccggtaaagtcccagtaaattacgctacccaaccactgttatcattcagtcatcatccatgggtcaatttgggtcacctta

SEQ ID NO: 14950 - DNA, 2272 bp, Emericella nidulans
ccgcaaatcacgagctgaaaagggaagcatcggtgacattctatttgattagagtcatttcagcctattcaccttggaggaagactgcgaccttaataaatagcataccagccgtgcggggagagcttggctgtgtcactacttatctaggtacccaagtaccaacagataggtgcctagagaggtgtcggtgccttccaacaactacatctctggtggctccaggtatgacgcgatttatgagtcctccaataaattacacaaatactttgggtgtaacacagcacgttggccgggacatggccaataataccatcacagcttaggaactgccttcacctgccgcaataattccattacaccaagaccattgcagatccacgaaatagtcgccgccagtgttcatatatcagtttacgaatacccactgtgcggtaagcaaagcttccagcgagtttgctgcgctaaaccaacgcaatcgtccctgcagatatcatcagtgagttgtgcccctggaccctggcctatagcttcaattgcaattcatctgagcaaatcagggcttatttaggccaaaagctggatgcacgtcaatgccctcaggaaggctcgaaccgggaccaggtctatctatgaacagcgcgctaccattcctgacggacgcttaccaagctaacccgaatcaagacctccagaataaggcgtgcagttgcacagatctgcggtttacacaagtctggctctcgagtatttaccggcaagaggagtgtacaatcgactggtaggcgcgtaggagtgtcattgtcaaaagactccgcgctaaggaagacaaaagaatacaaactagcattgttccaagtgctgggtcaccgctatctctaaactggactgtcgaagagtccaagacaagctggaacagctgatcactgcgtcgcccaacgcagatctccgaatcattcacgatagccagccaggggcgttgggatgatcttgttttactatatctcgcctgacggaggggctggcatttgagttgtatatgaaggatgggactttaaatcgacggaattaaataccgagacttggccaaagtcgagaaaagaagagaagatattacgtgtccatgaatttcttcaccgtgaagtccagtgctaatccgtctagccctacatacacctagttcaggccataagctaggtcagaaccgacctccttgaataggataatatagtagggtcgatactcctaattatagtaccattgcttatagaccgaagtcaggacacatgagagaaaacctagcagtgtcgttaggaggtttgagcgtatggtgatattagaccatgacgcgcgtccctactcgttcgcttcaagatttatcctacctgtgcgaggagatacctaggttccccattcggagccgatttaggcgtgcaacgtccaatgtcgagaaaatataaccaggtggggatgctttattggcagccacggcgttccctggaccgaaattgttgactttcgtgcagcatccttgcaggtcaggtgaaggtcacacattactccaataatctgtacttaatacgtacaagaagatcagccatgaacaaacgctaggtagatgaagtgctgcatatgtattcagaggacctgatacctcatataatacacagactgatagagaaagaaagaatgtaaggatataatacaatatatgtaacaaatcttacctcacctaccaatttccagagtataaagagacctcgaattgaatttttgaatgattttactcgttttcgcccgcgaaaccgtgcccgtacctcttcattgaggtacaactctgcccaagttttctcgatgctcttccatatcacatctcatcaagtgtcggctcagtctctgctcccgggtatgtatcctcgggcgacgcctcgcctctgtctgccttgacctatttggaacgtcagtgatctcgtcaaagcattttactcacatgaatgcccgggggcacgctagttagatggtgccaggtaggtgtcagctggacatacatcagcctcgctgtccgtagcactttcctgtcgccactgtgacgtggcatgaacagatgttcgacgctgtgtcatgacaggcggcatctcagaatcgtccgggaaagacgaggacatgtagaactggtccacctgggcagtagaatggacttgtggctggccctgaggcgcgtgcaatttggtatactgcgagtggaatgaggcgcagggaaggatgcgcccga

SEQ ID NO: 14951 - DNA, 620 bp, Emericella nidulans
  unsure (1)..(620): unsure at all n locations
ctgggtggtattacctggcatcatattacctggctttttatttttttcccgggcctgcggtgcccttggggggtggggcctttaacctggctatcccacgcccgcccttgtttgcactgtgccgggccctgcttctgtcaannnaaaaacgggtgggtgccggcctgccttgggctcggctgccctgctgtgctctatctatctgtcctgcctgtttggtctctgaccgcctggtccttaccctgactgtgaccacccctgcctattgcctgcctgcctctgggttgccctgttctgggtcctcttgttatgcatgctcctgtctaccttagggcctttggccttgcctgctctgtcctgggggtcggtggcctcctagcggagttgcttgtaccatgcctccttttttcttctttcctcttttcccattccttcttgagcgttctgttcgtgtacgttgcgagagtcttgttagacgttccttatcattgcgggtcctgtccctatgttaattgtaccctttcggaggcctttttttatggccctgttttacttaaccgtgcgagtattgtcccttccttttcggatctcttgcctcggggcttcttcgatcaccggct

SEQ ID NO: 14952 - DNA, 493 bp, Emericella nidulans
gatgcgggttgacactataggctgacaggcacctatagctgtctgctttctattgaccagcgcattcaggcctagttacttgacaatgaggcagccatttcctgggaagcacactactgtggatttagattgggcttaaattgatcagggactgagggaccagctcatctgggccgtctcggccctgcagctggaccgtcagtccacctgaaccaaaaaaccaaatgtgtacaaataggcctatgccccaagtgtaaattcagttgtctatgcaatccagaggctgggcagaatggaattagggttgcaattcgtggcatggctggcccttgatctggtaagagcctacggctggaagctggatgcgcactgtagccgctagcggtattgagacaatggcattaaatattcgagcttcgacaagctaaacgctatcaatgattgctggaccactgaaacttatttaattgaccagtctggcaactcctggcct

SEQ ID NO: 14953 - DNA, 506 bp, Emericella nidulans
ggatgtcgaatcgagtacatttgtgatagagaacttttgcattctgctgtggcacaatggctccgagctcgaatcggacaagcaaaaagaatgtcaaatacccggccgaactacctgaacgccttaatgaagtaatacaagacctgagggatatagaagcaagagatgaaggcaacgaatcaaaactcgtgcaaagagaatacagctccccaatagtaaactggccacgccgttcttgaccgcgtgagggtctactgcatgcatgcaactgcatgcgacttgctgcaagtgatatatacagttgttataacgcctgacagaatggctcagacaaaacgggaatgtggcactggctgctttgtcataggccgcactggatggcgtacggatcgtaccgttgcacctagctctggtagtaatccgatgagcacctctggttgggggacaatgcgccaattatagcgaaagtaggactcgagttcgagtagagtcaattccgccatact

SEQ ID NO: 14954 - DNA, 607 bp, Emericella nidulans
  unsure (1)..(607): unsure at all n locations
ggtggggctggaaagataatagagccattttatcttttagacaaccgccccccaaacgaaggggaggggggccctttccttatccaaagcttctagaaacattgacgagctattaaccccgactcggttagcanncaatcagaaaggactttaaaccggaaccaaagagtgcatacgcatagtgcccccattaccgccgcaatcttctttttacctagctgttgcgcctgagacgggacccgatccagcgggttcccaatctccgtatttggtgctgcatctgcatcgttcctttgaggagaagaggcgaactttgttgacgaagaacgttgtgctgcgtctttcaaacttttgatggtttagctcttttcggaccctgagggcctccgttgtgatgcccattgtggcttgtatttagaggcgtgatcccttctttaggaggatttttattgtgccgcctttaaccaaccattatagttctatcttgactttggatgatgaaaatattgttaacgagccacctcgttgttggtctgggtaaaagttgattcgtttccccctagcggtcttttcttagtaccttattctctccccaaccagttttttc

SEQ ID NO: 14955 - DNA, 409 bp, Emericella nidulans
cacgaacgctgaccggacccggacctgaggggctgcctagggcatagcggtttgttgagcaacgagcacataccgataacgtgcaatctcatgacgatccgcccctttgcacatgcgatgtacaatactacctcgtgtataagtgccattcagaccaactacggacgcagaacggacggtccacgaccagccggaggacagtccctgactatagtgtggatgcgatcagtaactgcttataatggagcacgctgctcggcgatctaacgccccacgaatgaggcaggcaggcacatacgactgagagctgatggaactagggactagcacatgaacactgagctcgatgagccacgtcacatactaaagcgactatgaggacacgcaagttgtgggaatgggaccatgc

SEQ ID NO: 14956 - DNA, 469 bp, Emericella nidulans
  unsure (1)..(469): unsure at all n locations
caagtgggcgtgctgaatcgtgctgaactttcaagttttaagacacgccggacgtcagggactggaaacaacaggaaccctccatcatgcggcagtcacctgtgggctagcttaacattnncgccggtctacagcgcagacaacaccataactctgctgtgaggaactgcatgcacccgacccgactgtaagcccgaggaaagccaagctattgctaacttagagtgggatacgcaaagcaaagcagccctaataggcttcttaacaatgtaaccgttcttcaggtcttgcagaaccctggtatcaattctgccaacaccgtgcctcattgacaccagtgatgaaccttcaaccttttggcatggctaaccacacaactctttgttttccaggttcacccgggaaggacattcagttaactacgttgaggagcgcccggcccgtggcaagaatttaagcatgcctattt

SEQ ID NO: 14957 - DNA, 551 bp, Emericella nidulans
  unsure (1)..(551): unsure at all n locations
ggggagggtgttnatgataaccatatgccattattctttttatcagcaaaaaactaaacgggtaaggggagattatatatatatcatccccaaaaccaacagaaacactaagttctaattacaacaccctgngaanccaaaaaggataagcttttgatgattataacactagaagaaatcatgtattgcaagcaacaagacaaaaaaaaaacaactttactggaaatgaattggagagtagatgtcaaactcgtccatgcctgtgagaaactgagaatcaatcaacatcggataagaagaaaaagctgattcagcccccaacaagaccaagagaaacaccatattgttaccaacagaaaaagaaaaacaccaatagagctctacattcaacaagggttttgaaaaacttgagcctttgtgtggtctctcacacatgtgtgaattttgtgggccgtgaccaaaattagaagtagctgctatagaaagacaaagaaagagtgtctaaaaaaaaaaacttcacctcgcctttagttgggttgaagaaataaaaa

SEQ ID NO: 14958 - DNA, 2240 bp, Emericella nidulans
gatctgctggcttcattcgtaaccacttcatacgcgggccagcccgagaccgctctgaaactcgaaaaccgtagatgcgcgattcgtataccctaccttctccgaggccagggcagaagttgaccgtccgcacgccattgagctctacggggtatacaggacggggtgtatcagatgtaacttgattgctagcgcccgctgaagtagttgtcgtggtcgtggtcgtcgtggcagtcgaaggcaaagaggctgagcgcggtggtgatatgtttgacaagggcgcatcaaaacggggtccaatctccaaatcggggaacgtcatgaagaacaaacagccgaatgtggtgccgaagaaagcaccatcgaccgagtgaaatcggctgttgggaggcgtatacaggtcctggcagctaggacagaagagcttcacggtctcttggcctggcgtgtcggaacggcccacaggaagcactttgcacccattgcagtgcactcgcgggcagactccgaaatgttgcaactcgtacttctctagcatctgctggataccgggacgtgaagtgatgtaccgttggtggatcaaaccgtaaagcagctctgcagaggtctcgatcatactcaggtcgcttgcaacccttgtgtgtcttcgctctcttcggtaaccgggcggcttctcatcaccaagtatctcatcctcatcttcctcctcttcctcctcttcctcctcctcttcatcctcttcaggctccacgtccagtatcatttccaaggcttccttgtacatcggcacctgagactgcagcccggtcagattaaagtcgtcttcaataaaatcttccgagacctccgcgaaaaactcgtgacccataagctggcaaaacgaggagatccatgactccggagcgccatcggacgacgacatatcgaaggagtcggacggaacggtagaagacggtgttgattcagacagttgactcagatccagcctatctaggccgtcggcaacgccgagcctacttctctcgacacggtgctggaatgcaattagacaaatcgacaaatcaaagctaagtaatgcttcgtgggtaaccaggagaccaacagcctgtttccacgattctcgcaatccaggttctccctctaccttacttcgagcagggaggaatcgaaagcgggggagcgaagatggcggataaaagagcggagatgctgagcgcggacaagtcttggtatggttagaaggtgatattcctcctgataagccgaggggtcattaatgtgctgattgtgcggtggctggatgttgacgcgatttaccccactaacatttatatccgggattcaatcaagaatccacgcagagaccgagtccaaaagtcacaacttccacagttcctggtatctaacggatgcgctcgatgcacctgcgttggaaggtgaatttttcgcggcgggttgttgaggcgatcgatcgacggaggccaggatggacctccagattagcctcgtggggcggtgggcagcgtcgaccttgatacagcgtagagctagaaccgagagcgtcacgtaactatggaaaggtccatggaattgtatgagaacgaacacttagaatgacatcgtgctgtctcggtacaagcgctaaggagctgagacgacgagagagaccaaggaccgatgtcaagtagtcacgtgctttggcctcaggccaataactctgcctgaccgtactataaaattgcacaacctacaaagagcttgggagaaaagacgcgtagaatgggtatccgatgtaaacacaaaagatcatagtatccgtacatataagatcttagaatagatctcgtatcactcgtgcaaattcgccttcattccccagcacacctgacagccctttgccagtattctgaagctcaccctcatggcccaatgaagccattaatactatcggttgccgccgatccaatgaagttgtcaaaagccgtcgacagcttaaaataatgttgggagcttatggctcatctgcagcccatttaatgggctattttagaaattcgatttaaatatttaaagttctgtttcccccaaaatttggattggatggaaagtataccggccattgccacagtcgctgcccagagtgggtcattggcgttactggccattagggtccttcatacatcctccttattggattttttaattatgcttttcaacggttttcaaatttaaccagtagt

SEQ ID NO: 14959 - DNA, 3245 bp, Emericella nidulans
aaaataatttaaaatattataaaaagagatgaaaattattttaaaaaatattaaaataaaaattttagagggcaattattcccgcccaattttcttctctcccaaaatttcacctttatttttaacctcgccaaaaggcatggatccccgtgtgggccaagatttttcccgggtaaacacaaccatttccaaacgtcgacattccggaaaactttacgatccgccgtctgtcaccggattgcactcatagccagcgaagacgcatcggcccctttgggtcttttcacatcgcgagcttgtcgattaatgaaaatgaagcgaagacaggcaggccgcactgctccccctcagaatctagtggggtcgaacaagataccgcagccgttggcgcgcccgccgaccagccgcccaagactaatgcgaacgcgacttcgaatgcgaacggcgaagatcagccggccaacggccagaaagcgaacccaaaggatccgtcaagaccgaggaggaagaaggcgcggcgcgcctgttttgcttgtcagcgggcgcatctaacgtgcggtacgctcctgccctgctcaggtacccgtgtcctgggcgcgccaactaacagagtgtgtaggtgatgagagaccatgtcaacgctgcatcaagcgcgggctccaagatgcctgccatgatggggttcgcaagaaggccaagtacctgcatgacgcgccagacggcgctctgatgcctgggatcggcggcaataatttctacaacaacaattcaatgtcgaacggtgtcccatcgggtggcataaatatgaatggcgcgaataccgtcaattcagcggcgagtacgcagaattcgagcgcaaacttctatcctactccgcagtcgaactacagcttataccaggagaatccgatcaaccaccaaaactctttcccatcgcaatcgccggtgtccccgacctttagcttgaagaccaacccaacccctcgcaataccgcacctaacaacaacaataataatgccttaacgtcttcgatgccccaacccgcgaccactggtgtgtcgaatgcacccaaccagagccagaatccgttcgccggcccgttcttcgaccccagtgatccggctcttttcaactttgatctgtcgagtatgaattttgaaaaccgatatggtgcgctggagttcggtatgcttggacacatggctactggggctggcgactctccagactctggcacccacagaggatcgatgggccgcagcggttcgacgcagtttgcgtctacgcctattggaggaactacgacgttcggcgagagcccgcagaatcagcagccattcatgttcggggatccgctattgaacgagtggccgagtggacagacctcgggccaaccgcacgtgaatgtcggcgtatatccgcagtctagccagggcaacgtgataccgggacatctgtctaagcctgatgcgcctcacgctttcgcaattgaaagtggaccgaacaacttcactagcccgggcgcggcgacgagcccgcagatcaacagcggcggatatgaagatgcgaacgcgtttaacaatgttgtgacgaagtctaatggactatctgtgaacggacagcaacgtcctccgaccatttctacaccgagtttgaagcaccaaagcctgcagatgaacaaacgacgtcaccgcaatccatcggcagtctacgaaagcgtcaaggagccgtacgcgtataccagtcgcttccatagcctaacggcgtttattcaacggcgcttctcgccgcagaagacactgcagattgccaaagccctggcatctattcgaccttcatttattgcaacaaccaaaacactaaaccgggatgatcttatctttatggagaagtgctttcagcggacactctgggagtatgaggatttcatcaacgcttgcggcacaccgaccattgtttgccggcgcactggcgaggttgcagctgttgggaaagaatttagcatcttgacgggatggaagaaagaggtattactaggaaaggagccgaattataatgtcaacacaggtggttcatcggccgcaaattcccgaaacatcacgccacgtagctccgttgaaagcactggccgtcctcatccggtgtttctggcggaactgttggacgatgacagcgtggtagaattttacgaagactttgcgcgattagcattcggggattcgcgcggcagcgtgacaacgcgctgcaaattgctcaaatacaaaacaaaagaggacatggaagcggcacagtccgatgacaacgggcagcggtggaacaaccacctgcgtaaggggggaattgcgaacgaggccgggatgaaccagttaggattcaaagatggcaaagtcgagtgcgcctactgctggacagtcaagcgcgacgtgttcgacatccctatgttaatagtgatgaacgtgcgtcttcctcttccctgaacccgaacttcattatgagctaacattgatcagttcctgccttgtatttgaaaggagagtgttattattgcgccgcttaattcgctgtatatgatttatggtctagttacgggaggaggatacccgaaggtttaaaaaaggatttttttcttgtttatacttggatgcatgatggatatgattatcttggagctgggatagagcttcttgtgctggtgcattcgctttgagctatctaaggcgaagcccggttttttcaagctaggtgaattcacttcccttctagtcgtagtcgactgcggctgcgtaggtggtggctcgtgtctcgctcttctctatctcattgtcaacaagcgactgtgtagcaatttcagcaagctgtaattatccagacttggtcgcccttgtatgcccaacaacaagaatcctcccccggttgtccccggttgttcaccttaattgcttacggcgagaacccttcagacgtctcccaaccgaggccaagaggtgtttggcgacatataataatgattttccagttagagatccattagcatgcatttacaaatacatatttcttctttgggcagtggtttatagtccgttcctagctcctttgcgtcaaagtgtagcagactccaccatcccaaccggcaaatctcgaaacaggccggcttgatccgacccttcgatatactagaagaagtccccctgcggttaactgtggaatgcattagcacgtacagtggacactaagtataggtagc

SEQ ID NO: 14960 - DNA, 342 bp, Emericella nidulans
cagccggagaggcatggactcagacatcaagcggaggctcaactttacagctcagaaatgccacagtggtccatgttgagtcacccacaaacatgcacagtcagcatatggccccgtgcgattcgaccaggcatgggccccaaacggctcccaaacaaatatcgaggactctcgcattcggataatatcctacaacgaggccaccaagccttcggcaaatgagtcaagaaactgcacagcacttgagctatgacacgatatggccaggaagcgacaagacgcatctaacagttgggcggatgaggagcctgatgaccaatagttcgttgtttggaagcttga

SEQ ID NO: 14961 - DNA, 1398 bp, Emericella nidulans
gccacgttgattacagctctccagagtagagaagtcagtagaaagttcagtagaaagtctatgtgcttgaaatatagagattatatatatatatgttatgtatgagatccatctcaagggtatcttaacaataacaccgtccaatatcccccataggcctcccgcgaatatagcaaacaaatgcatagatttcaacccgaaagaaagtccaaagtccactgtatgtaggtaaatggccgccgatactccccgctaaatccaactgaagacaataaacacgaaagacggtatcacaaaagagggcgggtatgatcgcctctatcgttgagagtgggactcctccggcccttcaataaccgacccttcattaaccgacccttcaataccaggcccagtatctagtgcggactgtgtctctccaccagaagggccattcccaccagacatagtgggatgggccggactatcagcctgcgtaggctgcgaatgatggtcaggaatatcctcggacacgagcgccgctgcttcaggatcataccgaagctcgtaatccatagagctgaaagaagcctccatatcggcagcagtccacggtgcggcgctctggacctgcggctgaatcactttcatccgctgatcacgagtacgtgacgcagtccggcgacttgaggaccggtctacaagattggaatttgtaaaccattgcggtgaccatgtatcctggccacggcgccgggcaggtatcactgtcactggcaacggctgatcggcgccgctctgtcgccttgatgcgccatctgacattggatggaaagagaagagacctcgatgccgaggggtgtaatgagggttttcttcgtctccttggcggggggcttgatcatctggggagaggaacccttcttcctccgcctgcgccgaggcgacttctcttggtaaggccgcgtgcctgttcttgaaggggttcaagatgaaccgccatcggttgtccacatttacgatttgtggcgaattctgtctcctcggctcggtataggtgtcctgagtaggcaagctactttgttgattctgaacgaccgcaagttccttctccccatcgccatcagagccttcatcctcttcttccatgaagggcatggcaaccggtggcgtgggactggaaacaggataataatgcacattatagaccgtgcttgctgcactagttgtgtcagctcgactgacaggagtgacagcagctggcggcggagttggccttgcggatcttcgctttcgtgatttggcggcagtagcaccctcggcttcgcgctgagtctgggtaatgcggcctcctcgcggtctcaatggtcgatgagcaagtcccataactcctccccaggctgaagacattccggtgct

SEQ ID NO: 14962 - DNA, 480 bp, Emericella nidulans
gaccagtcgagctatgccaccaccatttttagtcactttttctgacaaatcctaccaaaatggccactaggagactatactaacatgtctcgttcctccatacaagcgcattacagtaaacgtgactcgaccggaccaggcgtacctggacctcatccccctagttgtcatccccgacatgacaatcaagctcctaaaaagtattgtccacagccaaacctacataccgtcatcttcccaacgtcttgtatataaccagcagctactctgggatgactccaaaacactctagcaggtcataatcggcgagggagatatgctacgcgttcatattacgctacgtggcggtgcgccatacttgcagggccaggctcgaccgacaggaattggcggcacaagtggcgcttcacattcacagcacatccaccaaggacgacggcaacacatcaattcccatcccgagatagatcccactacaca

SEQ ID NO: 14963 - DNA, 1865 bp, Emericella nidulans
ccacgggaaaagggaaggttgaaaaaaaccccttgtttggccctattgaagattgggcatgtgaaaagttcaaagccaaggaattaaggaagaatgggaaaaggggttaaattaaaaagttttggaaaaagttttgggaccgcctttctcaaaaaatggaatccatgtgccaatgggctgtttagttctttaatttgtaaatagtgccgaagctccttgtggtcggaaatgaaaagtagtcaagttggcttccgcagatcatgtggcaagtgggccgagctggaagggcaggtctcccgaagcatctatacagaacaccgagtccgagtttcaggcattaatttgataaagactactcgcaagaatttgaagttgcagagacaactcttagtcgaagaagcgccccagacgcctcaataaatcgattgctaggagtgtcatccaggacacgagtgactagtcaataggtcgtaaaacgaagatgttatgttttctctccaggagaccatggtttcccaatactcaaacagacacctgaacatggcatattgcccacgatttatatccgacaatgcaaatgcttccgtgtgagcaaccctaatgctagccatgcctcagaggaatgacacctgaccttgtacaatgagtccggctcgtatgccaatgctaaggaacaaatgaaaaaggaacccagacaattctcacatgtcgatgcagcgcaaaagtaatacaggtaagtgtaggaagaggggtatcgctcaacaaagagatataaagcaatgaaaatgacatcaggatgcgcctgcggcacgcgtactcggtgcacaatgtacttcccgctaaagaacaatgctgggcttccaaaaatagagaggccgactgttacagtcaagctgtgtcttgaaagctccggtgacattgactccccaaacgccgaataaacaaacaccggaataaggggggaaaaaaaatgaaaaagaagaaaatgggtaagacattgaaaagaaagaaacagtagatgaacatgtgctgggacgtcacattgaagaaaatggcggactccgcaatatggtgttgcgaaatatgtgagagaatggtgaggcacacacagcaaattatgacgccgttgaggtggtcgaaatggttggggtcaacgccggagatatctctttgccctctagacatattggcgtctcagttcccttgtctgattgatcttgcttctcccgttcggttgacgaggtgcgcttgaagaccgtttggccgatttgacgaagtatacccaaccgctcggctctgagttcgtcggcattcagtcggcgaacagaaatgggttcctctttcgaaatcttgcagaacagggttgaaaagatatattgatcaccgcttccatcatacagaggaagataccggtacccttgggagaggctggtgagcttagcggtgaacgtggccagttgaacactgccgttggttcccgtgcttcggccatcaagtgagctccagacagtccagcgaacaaacaccaaatccgggtattttgtctccagtgacagacgaaaactttcgttgaagtttgggctgtacccgttccgttgctcaatcttggtgcgccggcgatgcggaaagccgatgcctgacatgccgtttcgggcagaagcgttcatgccaccttcgccgaatgcaaagctttgaccacgatcgtccgcactaaacatctcaatttcgacatatggattgatgttcccgtccgaagacatattttgtggtcgggggagttgctgagcggaaatgacatcgacggagaaccggacaagtttctttccgtgattctcgtgtctttctctgatgagacacacggagag

SEQ ID NO: 14964 - DNA, 383 bp, Emericella nidulans
gctcggggcgcggtgcaaactgcaacggttgcagaggcagctctgactttcaatgcgaagccgcaagagggggcctgggtggcaaacggcagcgttcgcgcttatctccccgatgatctgagaaccacggttaatggcgctactgtcctatctgagctgctcaaggcaacacagtctgctaccgagcagggtgcctaccttgaaccgaccgccgtgggtgccgattcacctgtgaccctagatcaacaacactcttgcctaatcgaagactgaaacaggccagatgacaatttgtaccgttcctgtgtccataaaatagacaatctgatacgtaggtcgagcgcttggctacacctaccgagaccgatgactcgagcacccgt

SEQ ID NO: 14965 - DNA, 2251 bp, Emericella nidulans
atcctgaatcatccatcgggcttctattatctttctatgggcttctttcttgagaagacgtacttcgaatatacttcagggagctgggttatttttaaatgatatcatcgtcctatagtccttcttgatccaccatcccactcttatagaattatcgaccatgggcaaaccgcgggcaagctttcctacttatatccttacacatgtgcacaaacctgacatcgtatagatgattatcttgattcggcatgcccagtcagagggaaacaagaaccgcgaaattcatcaaacaatccccgatcatcgtgtaaagctcacacccgaaggacaccgacaggccagagacgcaggtacaaggttacgaggactcctacgacccgacgacactatccacttcttcacgtctccgtaccgccgtactcgtgagactacggagggcatcctcgagtctctcacggctgataccccctctccgtcgccctttccaaggcacacaattaaggtttatgaggagccgcggctgcgggaacaagatttcggcaatttccaaccatgctcagcggagatggagcggatgtggctcgaaagagcggactatgggcatttcttttatcgaatcccgaatggcgaatctgcggcggacgcttacgaccgggtgagtgggttcaacgagtcgatgtggcgactgttcggtgagaaggactttgcgagtgtttgcgtgcttgttacacatggactcatgactagggtctttctgatgaaatggtatcattggagtgtggagtattttgaggatctccgcaacatcaaccattgcgagtttgtgatcatgaaactcaatgaggacagcgggaagtatgtgctccagaatcaactccggacatggtccgagttgaggatggagaaagagcgggaaaggcagcaggagcaggctgcaaagggcctgccagcaagctctacaccatcagaaactccagtcccagtcagacgcaaatggggcggatgtcctaacggctgcaaccacggtgtttctagaatgagttatcaacgaacatctagaacacatgatggcgatccgcgaaaagaacatgacagccaccataaagcatcccaagacgccacccgcaatagccagacgagtcagagcacaaatcaattcaacaatgctaacacagcgaacgagggacaaacaatcgaggcccctgaaccagcaatcggcgacaaagctgctgaattgccatagaaaacgctccctccaaaagcacaatattcttctacccccgaaccaaccacacccacccaaccgcacaacacgacacatcaccatcattatcaagcgtccccgaaacactccagagacctactggaccaggatcactcacatccaaactacaacctcatccacctcgtcggccgtgacggcggcggaacgctcagcggcgccggtagcgtcgcggcatctgaagacgaacacgatacttaccgcagccaccaccatcgccatcacaatctacacgaaccctcccgttccggactcaaacgacacaaaccgcgtccgtcgcaagacctcgagaatgatggtgacgatgaagggagtgggcggcaggcgcccaaacttcgacgtacgaggtcgtctcatcatcgatatcatgcttccccaacacgaacagataagaccctgactcagacccgaactcaagatcaagcaccagcggctgaaaagaatgcaataacgcgaacgatacctaatacaggcggcgaaaccgaaaaggcgttgcctgggggacaaccatctgaaaaccccgacgcagctcagggccaaaaagcacccgagagcatgcgggaaactggaagagaagacgaagaggaaaatgagagcgaaaatgtgaagaccctcgaacaagcgcagaaagaggaccagagccttcgggggagcgtttattaggttatccactttgtttttagaatggagacatacccatataggtgactagatgatgtgatgcatgagatacccttcaatacgatactatctgttggttaagagtttgagagttctacagcgtagtcatcaatacttttgcctggaccagaacaatgtgacaaatccgtccactttacattaagatagaaacacaagttttgcctctctacgtaatccctagattatttgcacaaagaattttttatttctggtttgtggcggacagattccgatctttattggttcaaaggggtttggagttagcta

SEQ ID NO: 14966 - DNA, 4209 bp, Emericella nidulans
ttccgtatcacgaagaggacctccaccggcaaggagttccattgcgtctaccagccaaataacgaaccgacccggaagttccgcgagcaggttaagccgcacccatattccatcgctagctgcgtcgggcttcttccggcccatgtcatcgcaacgtctgcaagcacatcgtggacgtcctgcaacaaatcacacagtctcaacagaggattggggtgatcaaatgaaccagaacaggcggagtctgatttcaaacagcacgtttccgaactccctctcagccgccgatcaggaggttcccccgtcgcgtggcacagaattcaccgaccctattatccctgatcggattcattcgaacgctagccctaccgcgaatacgacgacagtgagaagtgaaagtgcgaatttgatacgcgacagagaacggcccccgcacctcaatctaaaagtggactacaaaggcacgaacgaaaacgagacgcctgaaagatcacccctttcgttcctttcgctgcagaacaggaacgcgcctgcagataatcgggatagccgagcgcatgcacggttatcgtctgctgactcgtctccgcaatcaattgaaaagaagcccgagttggcgaagagtcgcaacaagggcaggaattacgaatattttgttggaaatactatattctggggaggagggagattccagaattctagagacaaaccggtcaatatcgcaaccgggctcctcgtgcttgtgccaactggcctattctttggtttctcgtatgtatgcgtggtccaaacatatgacttgtcgctaacagccgtctaggggtccttggctatggcacaacatctctccagctattccggttctctttgcctatgtcttctacctatgcttctcctcatttatacatgcgtcagtggttgatcccggggtaagcgatgaccattatcatccgtcctgtaattaccctcactcatcgtcttcaggtcattccgcgcaatctgcatcagatgcctcctgtcgatccctctcaggatcctctcgccatagggccaccgacgaacgactgggtaatggtgaagcttgcaacctctgatgttgctgccatggacgttcccgtcaaatactgcaagacgtgctctatttggcgccctccgcggtgctaccattgtcgcgtctgcgataactgcattgagaccctggaccaccattgtgtctggttgaacaactgtgtcggccgccgaaactatcgatacttcttcgctttcgtcagcacttccactctacttgccctcttcttactcggtgctagcctagcgcacattctggtgtaccggtcacgtgaaggtatcagcttcagcgacgccattgataagtggagggtacctttcgctatggtcatttacggagctctagcagcgccttatccggcgtcattgtgggcgtaccatctcttcctggtgggccgcggcgaaaccacccgtgagtaccttaattcgcataagttcgccaaagccgatcgccatcgtccttttacgcaaggaaacgtgatccgaaactggatcgctgtttttggtcgaccccgaccgccaacctacatgcaatttaaagaatattaccaagaaggagaccagcgactgagccacggtgaaacggagattcctcccgcgcaatacagaacctcagaacgacatcgaaatgcagcatgtgcctcctcctaactcagcctgagctcgcttgctctttccttcttatgttcctttgatactctcattgacgatttccttgcacatcttgactaccctgcactttgtctcggaattacagatctctctctttccgcgtgtaactctctttcaattttctccttctcttgtgctgttgatatattgatgaactgggttgcatttgtactatgtagctagataccagcgggtttcgcatcttgggatttttattattttatttaagggtggcaggtcgcaatacttaacggaatctcactaggtaattctatggcagctattgctttcccaatttctcgaggaatatgttagggtggtaagattcctttcagcctaaacattgtgtaatatatcatgtcagcttgggcgccaccatatcttctccgctggtgctcttggatacttagaatagtaatcatggtaggactggctgtataactcacctaccatctcaatgtacttatcctaccaaaacccccaaccatgctggtggtaccgattcagtatagtaaccaggaacagaactacagccaatgaggcttgatctaaagtgtgtggggacgccatccctgccgattgcgggaccgtaaactagactagagttgattagggcaagcgccaatcttccgatccataacatgaacaactccgtagtcggtaggacgatagagattttaagcctgtatacatacttgttactagagctttggatcgaactgatatgcgagcgaatcataatggggcttaattactgaatgtagcgacgatgatatccacaggcaatgtcgtccggtcgtcctcgttgggatgccttatactactatgcttccaatggccgacatagcatttggtaaaggtgacttagacaagaaaccagcagggactagtaagcattactatgcggctctctgccgcggattggttgcggatgatggtatcgtcaagcgcctggtgatcgtggagccagataggcgagataactgatagaagataaccaaggccgattaagagacgaggactggttgaaaaagaacgagaaagagaacttgctaaagagagatccggtgcggtatcttagccattaagactcttatcataccgatgttgcgcggcaaactcgctgctttatacgaatccaattgaggctccatgaagtgatacccaaggctgagccgaaactcgaaagcctgcaagataggtagcgtttgtttgagagttgatataagttcgttgttataattcaatacccattcggtggttcctgcctgcaggtgaccctggttgaaggctcgctatcaaggagtcactgaatttcgaggtacaccacctggtgacgatttaccaattgcgccaaaatagttgacattgctgcacattaatgaaacccgtggtttcacaagagatattgatatttcctgacgcctgactggacaatgtatcatatggcgtgctcgtcttgttctttcgcaatcctgaatcgaggacaggaatgaggcatatcagcctgatttagctctattcgagttatgcttcgtaggcatttgtagtctcgcaaggccaagtaatccgtgactgcggagtactcgaactgtggcaggtaaggacggtgtgtatagagcaccggcagtgcaacaggctgaaggaaggggcaaggcgctatagatggctgcgttcccggcacatcagcggtgcagcaagacggttgtgaacaagccgggaacaaacagtaaagacttgaaggccttcgcgaaacgaacgagtcatggtgagggatttgttgacgggcagcttggggcattccgcggctgactacggggtctggagtagttcacttggaccgtcccttccacctgcttttctctcctctctttccatcctccccaacaccactttcctacccacccatcgacctaacccggttgactgcttggccagctgtcattccttgttcctagaccggcctccttctgaacctttctggtaagcagatcgtttctctcgagatccgtgtgccaggccagtttcggccagtccagtttcagaccgaacacggtatcgtaatctggacaccacttttttcctggggaccttaaattacgaattatccagcgtccttgactgtgatctcgtcggcccaatcctcagaactcgccgcaagactacttcccactggccgcgcgatggacggtccaccaggattgtccggcgcgtcacccgcaactcccgcaactatctcggacctcgtgaagcactcccatgaacctcctgaccacgtaatggccttcgattacaccgaacagcttctcaccccagagaacagtcgttccgaaacctcaagcaataatgataacgcgtcgaatgaggaaaaaccgaccgtacgccgacaatctacacgtgtgacacgcgctttgttgcggggagcagctgacctgaattcggcgccgagatagacataatggcacaaca

SEQ ID NO: 14967 - DNA, 2602 bp, Emericella nidulans
aaagaaagcaaaactggttttcccaacttcaggaactggtgatcaaggaaggttatggcatgtgtatgaagactctccgctcgtcatccgtgacacggcctcgcatatacgcgagagcaaaccatgaatcatgccgcagactgtatgatggggctattgggtacccgaacaataggcaagccatctagggtactggctccccgcgctggactacgcggagataatgtcttgcgggaccactttccgaaaatgtgtagggcatcacaggcttctagttgaactgccgcaagtatatgggtgggaatgcctgaaagtgagtgcacatggtccagcgaacagctaggccttctccaaatccctcatcatagccgagcaaaacactgtctggcaaagttgccattgtcactggctcatcctccggcatcggcacagctatagtgcgagagctatcatctcgcgaggccaatacagtcattagctattcattccctagactgaactctgaagccgacttgctcagcttgtcctcccatctccaccgtcgctgtactcagcgatatgtcctaaatcgagacaccataggagcttgttgatgccgcgggcagagcggaaccacgtccacatccgtgtcaattgagtgggactggctgtgaacaagccgctcgaggatcggacgcttgaggactagggtctgattgtcaaggtcaatggctggtcgcttgggatttaggctgtacgtggaatgttaaagcggagctcgggtcagatcgacgaaggacggcctgttgtaagcgaatgagtgtattccgcttacaatctgatacttaggataattaatgcctaaaataatgatgcgtcttagtatactccggtacttccacagctggaccagcgacagctaggtactattagcgttctcccgaggttcaacccaaacgcagaggctcattcttgggcaattgctcgtgtttgtcctcagcgatgatttgtctgttaaaatgactctaatttacagcaatggagcttggtgttctgcctggaaaacggcccgaaaatttgcacagcaaccgtggaacagcaacccattcttatcccgcccacacccagcggaaaaatcagtcaccgaacttttgctggaatttgaggattgcctgtcgggcccattgtgccaaacttgcggccagcacaaaatatattcacagtgattctgatggaagatctgcttccgcgcgaagagggcctcaccacggacgcccgtcaactggacgatctgctagaagagagtatcaatctgcgaatctgcatggatattagcgcggtggattggcttgtatgtctactcggagtataaggtcagtggggatgtgggtagatgtggatgaattgggagggattgtatagctgagcgtgaggcttattttttttttttattattttttgaaattatattctccttttttcttggtacaccataagactaggcggtattaagaaggaggtcaaatatgagagttggaaattagaactctcaactctcaactgcgacaatagaggaccttgcagatcactcatcctgggccgggcgagccctaacagcccaataacgcgggaagtcgtcgaactaagctggcatcagtctcaactgatctgcgttgaacgcaaatacgaggggctgccttcctgggctgctcttcagggcacgacaagcgggtgttcgaaactgcttgtcacatctctggtgttgggatcttcgtggtgcccacaatgatcgtgcatcacgtttcctaaataggacccgatattgacctaactcgtttagcgaggatagtctaggctggggtttttgtaacgcagattgacggactgttcactttcgatcttctgccgatatgtaagcactcacggtacgcagacgcagaatggcccccacggggtagggtgatacctgggcgagctgagccctggtcgagccgaggagctggatttggaactgacaaggaacagttgcagggatgcagatatggtcgagtcgacgagctcattccaaattgagacgttagtgggtctgtctgtcgatccttctgagctggatcgcgtccaggcacgattgtaattgcgcttctcctcgcaaaatgcattgcgctgtttggagagacgaggctggcgacgccgactctcttatcgatggattcgactagtctgcactcgagcccctgaatcgtaagaatccggggatgcctgtcatggcgtcagagtcagggcagcgccgtcgagggccggcgcatcacccacggctagtctcccctagcggctggacgattgcggggagagcacgatcctgggccattcaagcgaaatcacgggcaggtctgggccgcagtgtgccgtccgtcctgccccaacttgttgcctggcccgtcgtcacatctgtcccgttcgcaggctcgatgttagcacgaaccccccaactcaatctcataaacatcgcgttcgcgcctcagtcagcagggaggccttacggctctctgactgtccctacctgcgtccgtaacggctatgataatgtcgacccagtactaatgtataatttggtcaactttac

SEQ ID NO: 14968 - DNA, 1168 bp, Emericella nidulans
ccaggacatgtagggggattgtacttttccaacgttcgcggtgcgcgtcgaaagagaccccgccagacactaacctgagtgccccacccgacggctgtgaggccacggtcggagatggagacggcggcaccgggctggtggcaggagtaggagtgaacctcgcgatacattcgaatatcccatacttgcattttgagatcttgacctgttgagaccatgtagcggccttgtcggtcaattgccattgagcggacagggccccggtggacgagggcctttacgagcggggtttgtgtgttcggtgaccaaagagtcacggtaccattttggtggccaacgtgcatgattgcattccaggggttttgggcgagggatgttggggctccaactttcgtgggaatctcggcgacgagttggccggttgatgtgtctgtgtatttgagatggccgctcatttgctatacttcgttagaatatgagataccgaaatgcggtatgtataactcacagctgaagcaaggaggaaatggtagggaaggaattcgagaaagcagggctcaacaatcctgtccagattgtgcagctcaacaccttggctgtcatagatatagactgacttcttctgagcaactgcaaagtactggttgttgtgaagccaccgcgcatccctcacagtctcccgtagatgcaactcacaccccaacttcccatttcgccaatccatcgtcgcgatatgtcccttccgccccgctaacagcagttcgcggccattccgtgtatagtctgctcggtaaggcccgaaatcctccagctttaactcaaacttcttcttcgccgtttcaatcccgacactcgctgcgatctcgtcctgacgcacccggtatgtcctttccatctctccctccggctcgaggaatccagcctcatgctccagaaggatctcggcgtctttggcgcggagtgcggcattcttgtacttttcttcgacggcttgtaagttgcttcgcagtttcttatctcgtacgctgtgggtatgaacggccttgccacggccgtatttcttctgagcttcgattaagcgtttgttttccttgcgctgcttggttggcacaatggcctttgtcggcgcagagtccgccatggcgtcgacggccttatttatttcgta

SEQ ID NO: 14969 - DNA, 421 bp, Emericella nidulans
  unsure (1)..(421): unsure at all n locations
tgatggagtaacataacaanaatctacttttaaacaactagtagccatgggttcacagccaccatccaatatctatttctcttttctctaatactgccatccccacaaacaacaactctacccactctacgctctaacgatcaacaaaaaacccaaaaaaacaacatgagagcaagatagaatcacacttcatttaaccataccatatcctcaatatatgatgctcatcaaaaaaaagattaccacttcactgctccataaatcatcaaccaacaagcatacgtcgatcaattacttaatagccctacgaaagatatactagaaaatcttcaactgtcctcttcctaattgtcatcaaaccaacagggagaaaagcatcaaaaaaattcaaaatacaaccccaacacggacatagcccctc

SEQ ID NO: 14970 - DNA, 642 bp, Emericella nidulans
acacgggctcacaacctattgactctaagttaccaccacacgcattcatggagctaaacatacaaaataacggtgggagtgtgcgatcaccgggtgctgaacacaccttgacaacttctacacggtgaaactacacattaggcacagccgtaatgaacacaatatccaccttgttcctattaccgcctacgacagggcgcactggccacgcgacatggacccgccgatagacacaaggtggaccattgaagaacgcaacggtgttgcaaagcgctgtgggcgagccgcgctgatactctctagagaagatgaagaccgagacgttgatcactatgtcatgacctgaggttaacgcctaacacgaaacagaagttcgtataagcagaccacgactatgtggcagaacagaccgacaagaggcaaaggctgaaccaccagtcaagctccacggctattggagatcataaagagcattatccggcatgccggagaaacagcattactctatcaactttcacccgtgcctgaatgcacaaaaataacgggttttggagcagcatgggcgactgccaagagatctgcttggccacgaatccaaactccggccaattgaacgttgcaacagatacggaatccatacct

SEQ ID NO: 14971 - DNA, 1782 bp, Emericella nidulans
gcccatgcttgccatgcttgggtccttagcagccaggcgggcccactaagatgctccactgcagaattttcatcttatctgatccctcgagcctatgtttcatccctgccgttccacattcgctcacgaaagtcaattagatcaagtacagttgggatcctgttcatgctgatcaagggcgatgatctgcctcttcgtccttagactgtgatccccgcctaaccccattatccatccgtccatctccattcttcttcaaacgcaggcaaagtcgggttaaagacgcagggagcagggtgggctgtctattgcactgttatcctcgggtagacgcaccttgtccacgtccagtgtggataatctaagcgaggtcagctgtcgacttcctaactgccccgatactctgccagtgtggggattgctggcgccaacgggcctatggtatgatgcagccggctctcctcacccaacggactcatagccggggcctcccaacgattacgatcccacgcgccgtggaaaagcgcatctgattagattatctgcagtaaacccatgtgtccgaggtggggattctcggcggacttgacgctgtagacagttagccacgatcaatatctagacaaataaaaatccgtgatggcttcaggaccccatgtcagcccactctgcccggatctcattacgcagtccttgctttagcctgccccagccgacttcggagcgtcctgcgctggtggatctccggtcgaatcgtcgtgctgtagctggtgaactgggaaccggcgcccgttgctcggccgctataagggcccctccacccggccgtgcctcttgctcacgtctgaaatctgaatctgaatcttatcagatcccggatcgtcgccagagaaaatgccagtcagggccaggcttcggcgttccagcgccgcgccacagacgactcaaccgctgaggttcccgtcgccgcgaccactgcagacaagcccgaagtctctcctgaagccggtaggggtgctgaagatgctgtcgcaaatccccaggatgagattccgaccgaggacgcgcagcgtggtgtgcacgaggtcgaggctgtcaccctgacctggagcaaggcgtcgctgattgccgttttcatcaagtatactcaccacccctttttctctcttcctttaggaaaacgggaagagtaaaagtcattatattaatgctttgtgtgtagtatctggtgcctctacttcgtcaacgccttccagtcctccatcatcagtaacctgcttccctacgtgacttccgactttgaatcgcactcgcttctgacgaccatctacgtcgtcggcgactgcttttcggcagcagtcttcatcccgctgtccaagatcctagatatctggggtcgcgccgaggggttcctgttcatgaccatcctcgcgacgctgggcatggtcatcatggccgcttgccataacctggcgactttctgcgccgcttatgtatgtctccttaattgttagtccacgcgccattctcatgagatatgaaaggtcttctatacaatcggattcagcggcatgacctactgtattgatgtcatcaccgccgactcctccaagctcaagaaccgagccctcgcctacgcgtttacgtcgtccccctacatcatcactgctttcgccagcccgaaggcctccgaggacttctatgcgctgtacggatggcgctggggtttcggtgtcttcagtatcgtgttccctcatcatccgcggcgccgctgtacgtcct

SEQ ID NO: 14972 - DNA, 2325 bp, Emericella nidulans
aatcagacactgataatgagagaggaaccagggctataggaagtgacgctggatttggatctggcgttttgtagcatccttattcagtatgagtcagcctcagcagggccagcgcaggcctagccttcagcttgaatatggagcgagacacatctcgcagagccgcaatgagggtccaagcggagaccccaagcgttagcagtgcaaccccgatggtgctcagacaatttcgtgactcattcgggaagagattatatgactcactgatcttctgtccagtgtttatatgtatataagcgggctcgttcctctcagtgacaattctttcccgcgaatctccagaggcaccatggagaattacgatctacttattgttgccgatgcgacggaatcaatgcacgattaccttaaggcattgaatacctccctgccccaaataatatctatctctgctctaaccggctgtttttcgcggctcggcgtgatcgcctatcgtgactatgattccaagggactggttagtttctcaggttggctcgagttgtctttagcaaaagagtccacaaaacaaccagatgttgtcaccttcacaaagtcgcttaaagcaaaacaaggcggggactatccagaagccgcaaaaacagccctggccaaggcctacacagtaatgcgaccggaagcgaagacaatcatccttctctacacggatgctccgccgcatggaaccattcccataacagattggtccatgaactgcgaggcggaaataaaggccctttcaaatcctggctcatatgacggctttggtccttcattcctggattgggtgtcagcggcgaaaacactggcgagtggggagaaacaggcacaggtgtttgcgctgctagagtgtgacatcttcccacattgtggcacttactacaacttcctctgtgcgatgacgggcggagcatgcatccggttggaagattctaagcccgagtcaatatccaagttgactattgagctgctgctagcttggatgggggtggagaagcccagtttggacaatgtcgatatccagctgtccggatgctggtccacttatgtctcgacggaagggatgagcaatctcagtagtgaaatggaccccgaaacagagaggttcttccctatgccttacacccgtgacacgccagtgctagagaacattgccgaagtcgcgcttagcactagtgtgctaaaaaccctgcccaggaagccgactcctgccgaaagcccaatcatgcgttggggtactgacccccgatatagggactttgcgtcaaaacatttgatgcagatcataacgaaggatatatgtgccatcgctatcaacccggtttttggggctctgtggcgggctatctgcaaggacagaacatacgctggacggaacgacctggtcaatgcgttcagtaaagctgttggcgatatttgtgaccaagaagagaagaccgcgatgcaaaggtggctggatgagtcgtataattcctcggtagagatacaagggatcatagacaacgtatcggaagcagaccggttcccttgcatatttctcgatccgacaatgagattcgcaagtgacgctgcaaacggcgagagtatcgaaggcctgagcagaggcgagctcctcgaaatttccaggtcctgcgatccccggattctgcgccgactgggccgcgtactcacccgactgacgtatgtggaggacattgtagacatgcctgaacatatcacacagtcgagaacggaccaagtacgattaatcccacttgcgttggtaacagagaagtataaccatcagttctggaaagtcatgctccatactctagtctccggcacagagttgactgccagggctgccgcgctcctcgccgcgcttagcatccggatgggcgttacctttctcgctgcagctgcagagtccgagatgctgaggtacaaggatagctggaacaacgttgaagtgtcggaaacctgggcaatcagttgcttaagactgttgctggatgctgaccggacgtaccgaaagactcgtacggaaccagaaaagccagcagggctgctgtgggagtctgacgtggcttttttcgaacggctgttagacttcaaggccctcgagcataacctcgacaccccattgactgctcgaatcccatggacacctgaaaaggcagtttaccctattggacccctgatgacttgtcaactgtgccaatatcctcgctccgttaccataatgggccctggcgccaagtgtggtgtttgttagggcaagattatacggagccagaccaggctcgt

SEQ ID NO: 14973 - DNA, 493 bp, Emericella nidulans
ccggaaaaggccgacctcgaacacgaaatccattgcttacattatttttggcctttttaggggggtgacaactaacgagaccccgtggattatgttcctttatatccccactcactccacaccttcagggacttaacaacacacgctcgtactcgtgtgcacatatttcttacccactacactattattaggaaacaaacttgcacgccatacaatctcaggcttctgtgatcacagcaacgcttgatctaccaacggtaataatatcactacaaaagccatcacgactcctatagcccagccactaggcacgtctacactatcagatactgatccgagccataagcctaaccatccttgctatcgattgcgaagagctgccgaaagttaccgtatacaaatcccggcgagctgtcctctttctgtcaacggtccacattctcacgaggatccgatacgtatttaatattggacaaaatatctatggtcattc

SEQ ID NO: 14974 - DNA, 798 bp, Emericella nidulans
ctgaatgttttcgaaggctgcctgtgggattgcgggtcctgtaactggctcgtcggcttcgttgaactggtgtttcggatctgttggagcgtaggaagctttgtctgtagtgtttcttgcgccctcaggtccgcgaaaccctgtgtcagacggaggcgtttgggcgaagtcatggcggccctcgtagtctctataaatgcggcgtcgaaaaaagacagtctgttgtggatctgataataaaggagtaggtgatgattgttgtcactgcctcgctccttctcaatatgtgccagtgcggttgccgatgccggtactgtcacctctgaggtggagttgctgacatgatactgtgccaatggcctgcttactactctcaatgaaatgcttaactgacgagaaacagcagatgtctagcttgatggccgatgtagcttgcttcgggtagtgacaggtgtttgcattgaccatcctcttcctatactcgagggtacgcttcgtcgccctttttcctggtgtaccgagtgcgattactgtgcattctttggcggaccatttccgttaggagtgtcaaggggaaaatgtatacctgccgttagggtagccgtgccttggtcgataaactgaatgaatgggacaacaatcagcgtcgtttggaggcctttgtcaccctggcttgaatattaatggccttactagagtgggctatttctggcagccagctccgcttatttgggcccacgcccgtgtagttgtcacaacggctttcggtaccaggggtcccagccttggccgttaatt

SEQ ID NO: 14975 - DNA, 410 bp, Emericella nidulans
tttttcaaaaccacggggcgctgagggtatgtttatacgggcgttcgaagcaataatttcttttcagacaacccactcccaggggcggagagaaagaatgctgatgcgtgaactgcaaacacttctacgtgtctgtgacacgcttggcacgctaatgagaactgcaccgcataacgtgacccatgtgcatacctatactgacactgaaggaaatggcacggaacaaaggactgaagcaccacctaggggaaaccatggatgttgtggagcttgtcctacaacactattgcctggtggcctacagcttaacccgcatgagcggcattacgtgaaacaacagaactgaaagacgaaaaactggcatggactgtcaacttgtgggaacaggaggagtttttccggcatgggga

SEQ ID NO: 14976 - DNA, 448 bp, Emericella nidulans
tatttgaacatcccggtggaattgcaacctgcggatttcgggggctcggccaacgacttgtggcatctacgccttttatctagacggggacctcctatcccatttagagttggccttactattcagccgtttgtctcggaaaactatcctgggctctcaggggcctgtgcctaatgctcgccaatgaatcttactgatccacaacagtgatacacacaccaacttagccctgcttggcacacatgcattgcctgctatgctgagggacccagcgaacctattagcttgtaccgtaatatctatatgcatgacaattacacttcaaacgcacgcgattgttaacctgaaactgtatggctgtatctcgcctaatcgctgcttaatggaacagtacatggctgttgcgaccttaacatgaccgaagaccacgcgcctaaagggtattggc

SEQ ID NO: 14977 - DNA, 2245 bp, Emericella nidulans
ctcatgcctcagcccaataagtcccagagcccaccacacctgcgatctctttcttcgcaggggtcgattacgggcttgcctccgactatacgcctatgcgttaccagtcattcttcttctccaatgtttctgcccggcgaatcggctcctctcaacgtgctcgaccggtcgcgacttctatagcggatatatttgtccgctcattggtggtagctggctactgtcacaaacattctcctcgaagcagggcaattagcacaacatctgccaaagcttcgcggggattgacgggggattgggaggacaggggcctggggagaagccgcacggaaccctggccaaacatccaccgggttttatgacccaaattgagaatttaggagtacgtcgatcaaaaacacaacgcatattcagttctactgtcgcacagcgggtggagatctatgattcgcaagaccatcggatacatcaaacatccacacgccattcttcccgcagcacacccgttaactacgcgaggccgagcaatacagcctgcaccgaaaatgcttctcgaccactgcagcgcgaaggaacaaattccggccgatcacacggtagcattgtccctcatgaggattgggagcgcgtcaagagtcgcggcccagcacacgaggtggcccacaagcaagaaacctcatggcttacagacagggaaaagagctacaagagctccgcgaaggaattatatgagcagacgtccgagatataccaggaattgttaggagatcaggcctggagggaggctgccgacgctgctgccgcgtttgaacattttccagcacagttcgatgatacgaaaagttctgatgatctcaattccgtccgaaaactagaagaacatcttggggataagacaaaggcgaatcattacatatttacgctttacagagaacttccttctcctggggtgaggcatctctcaaagcggtcccgcggtctgcttctacgcaggttcgccgatcctccaggccgtcgttgggttgatgctagacgttatttagcattggtggaagatatgttggctgccggccttccactatctcggtcactttggtcctccgctatccacctggcaggtcgatcgacgggcaaggtgactaaattcgacttggtgcgggcggttggcatatggaatcaaatggagcatttggcaggaatcagatcagacagcgtcgtcttcacaattttattcgatatagctgccaaagcaggccaattcaccgtcgccgagcgcttaataaaagaaatggagagaaggcagataaagtttggtcgcgccgggaaggtcaccaatatcttctataatggtttattgggggatgttgatggtgtttgtcgggcttttgacgagtttgtggaaagcggagagatagtcgatactgcggtgatgaactgtcttatgacatcctttctcaaagctggcgaaacagaatctgcgatgcagatctaccagcaactattacagaatcagcccactacgaatctcgcgcgacagaacctcacatcggagctcattgcttatcggaaaagctctaagaaactgggtcgcgtgctgcaggcctcggcgtctctgaaaggccgtctcccacaacaccaccaggcccttcaagaagccctcgtggtaggccctgatacgaggaccttccatatactgcttagtcaccatgcctacaaatctggggatctgggagcgtttgagtccgttctcgaggatatggagaaggtctttcctgtaccaccacgtggcatgatctacttgctgctttttgagggattcgctcgccatgggcgacataagagaggctggactgcagaaaagctgcggatggcctggagagcctatcttcgggcactctatgaatccaagactagaatccagcatcgatcatttgctttacccccatcttttgtatgggagaacccgctgagagacgatggcgcaacagccccacctgttttggtggacagttctatcgaattatacacacccttgccgatcgctccatcaagcacgcgaggtccagcgtcgaaacctccagcacaagacgaacaccaatcaagcgtacaggaggacctcatagatatccttgaccaagatccactagatcttgacgtccacatcgacataccaacggacctgacccaggaacgcccacgcgaaggagacaccctaggattgctggaacaccgacttgaaaatggc

SEQ ID NO: 14978 - DNA, 485 bp, Emericella nidulans
cgggggggttaccctctatgacacaaaccaaaggctccttcctagttcttattcacaccaaccgatattatatgtggggcctcttaactccccggggggccatacactaagacatacggcccacccccaccttcgaataactgagaggcatttgaatccggcctaggaccgcctcctgtatgtagggtgggtgactcacaccatggcccatttgccacaatccacgcaccatacccctgatgccccatatcacctaacgcgctttataccttcgtttggggaccctaagccgaattcctagtccacagtgttcaacccgatggactcaaggtaaaacatcacactctccggaaacctgacaaatccagcgcattgtccatactttctcagagaggacccactgttcacactgtttacacactggccctttgactggtacgctggcccattgtttatacgatttcgggatcccgagatacactttt

SEQ ID NO: 14979 - DNA, 479 bp, Emericella nidulans
gtgccatactaactgaccccttccgcggtatactgaactttgttttaccgaacacttacatctaatagggcgtctcacaacctccgggggataatcacccaccacagtactacatcatcgctcagaaaacaatcacgctcaggtttctctactgtctccatgacagatcctcgaccttctatctggactgaactgacatcgcatacccgaccagtgaaaggcagcctacttaagatatagcctaccacctcccatcctagctacatgagtccataccaatctgcgattgccttaaccgcgacatttctcccattataattcgataacaaaccctgggatccctaatcggaacccatttacagtttttccgtgccatcattggaccatacgcgctttccctaactagggatttgcttgaaaaagaaaggcaccccatcattcttatcttacagacactttggatgccttttactcccact

SEQ ID NO: 14980 - DNA, 2888 bp, Emericella nidulans
gtctaccccgaaaccaggtgtgaatcgtcgcgattagtaagagggtctccccaattctttcttttaactggcggcgtagtcatgatagtacacagtcagtcgcttgcacaagccccgcagcgctgggttctggcgacagctgcgatgcaggagcttcgagacactctcgtgctgcacttctggcggattgcagcttactataaggtccccgtagagatgcgacaagacgagtggatatagacgccgacatatcaggcaccatgaggccaacgtcctgtatcgctctttgcgtctttcctgcccaataggactgtgcattccgccgtcgacatggggatacgcataccgcaaaatgctctcgagtaactcgttcggcagtcggagaatacaccagcggtcgcgaagagcaatcattttgacaacactttcgagcaggcttttttcaacaaagctctaagttgcgtgtacgctggctcgatgtcgaccgtcctctctatttcaagccagaccactttcaaccgcttagcctgattggcggagcgtgcaggagaaattttttagctgttctgcctaatgctactgatgcctaaccatgcggctcagtagccaacgcgtggtacgcatcaatggcagactgtcaaatgtgcgagggacagaaatgtatcattgatgagacgcatagcaaaaacatagggtacaatgcccgtccccatcttcaccgcagcaatagttttcacatatcagctgatagtcaagggaatcactttttactcatgcattcagctccgtacgcactttccctcttttatcaaccctttctacacggttgtcttacccctgcagcgcatgggcgcgtcgaggggccaccgacaatcatctaactcctcaatcatctaactgcacaagcacagaaaatgacctgcaaaattcgtggaaatttattcaatatatggaacttagatactcatctgaattccaagctccgtccaatggctattatcctcatcgccccctcagccgcctcggtcaggagccgttcagtgtcccccatcgcttcgtccagggtcgagggccgctgtaagatcgatatgagcgcactaatcccaatctcatagttcacctgggcgtttcggccgaccgtacctgcaaggacgatgaccggaatgttgcgctctctagcacgcagtgcgacctctgccgggatcttgccccttggggtctggtcatcgatcgccccctctgccgtgatgaccaggtcgcagtcactaaaaatgtctctaaggtggaaatactccatcaaggcctcataccgtgggcgtaactccgctccaacgaggagcaagcctgcccctagacccccggatgcaccgctcccaggtgcattggagatgtcgatcccaagcgtgcgatgaatgacgacggcatagatttgcagtgctgcttctagaagctgtgtttgttcggcagatgcgcccttttgcgggccgtagactcgcgctactccctgtggcccgcagaggacgttcttccagttacagacggcctcaatattaacatatttcaaccggggatgcatctttgaaaaatcaactccggcgagggaaacgagtgactggccgccacctgcctgcggaagctctcgcccatcgtagtcgagtagtcgagccccgagggcttggagcattccggcacccaccgcactggtgcccagagtcaccgcacccgacgatgatccgttgggccccgtcatcaagcgccgcggcaatcagctggccaacgccataagtagtcgtcgcgcaggggttgcggcggtcaggagggaccaagctcagaccggccacggctgccatctcaatcacagcagtcttgaccggggtgttgccgaggatcccatagaatgattgaacgggctctctaacggggccggttacgcgaagattgcgtattgcccccgacgtagcagccaccagggcatgagcaaacccttctccaccgtcggcgaggggaactttgtggacagttgcctgaggcatggcttgcaggatgccggcctcaatacagtccgccgctgtgccagggttaatgcttcccttgaagccagatgggcagaccagaaccttcatgatgaaagggttcctgatgggaaacgaatggattgtctttgagattataaacgagggaaagtgttaagcgagtgtcttgcagttgatattggagctgatgtacgtgtgatgtctggagcgaagactgatggagatgaccgggtgacttgatactctttttataagccatgctgctcctctatgtgctcctgcccatgaccattccacgcctctgttttcttcccactctactggtcttctctgccgatccccactccaatggcatatccttcgtatctatctcggtctggtcttggtgtcatggctcttgagcatgcttcgcctcatcgtccaagagaaaacatcacctaccagcgccgccgtgacatctgccgccttccctgttggtaatagagcgctataaagttctataattgatatttggctgcctagcccgcgctacttggcctgcaagacgcagatctgcagtgagctcaagggtcctggggtgagtgacgtcgggtgagggcagcccaagatgtgaccactcaccatctaacagctatatttggtatcgatcgacccttcacgagccagatttccgctcgtgtcttgactggtgcagcgaaccatgtctcttctttagagggctcgatactttgctgccttgtaacttggcaatccactacgcaaaagtctaaagctacgaaacaaaccaaacgccacggccaagtagctgtagaaagagactggataacataccggccgcaatgaatatgtccaggg

SEQ ID NO: 14981 - DNA, 1355 bp, Emericella nidulans
aaggaaaggacgccgggggttgcgtttcgtgccttccattcttttcaggaacttttattctaacaagttgcgtacgtgctcagtcgccatggggtgagactcagaggcagtgactcaagtttgcttctcttatatatgccttagaacgaaagctaccgatatactagcctagacttggtcgagaagtcagcatcctcatatacgagacatggccaaaaatgtcagatttggttctctcgtggagttgataatcctgtctgcaccctttgatgatggctccatcactcctcgccaaagacgtgcaccagtacacaagagagccatcggcagagctctagtccaggagagaaaggtcacccaagttactgaggcagcgcaagcattggagaatctctgtttatattctatataggtcgtgaccatgagaacagatgtaaaggaggccctaggacctgaactggatatcacgtcgggccaagatgaaatgcgaggtatgaagccaaatgttgtgtagtacccgccaggggaagtatcgagggcctgtgtagagcatacttagaggttagacagtaattagagagtatatcaaaagccatcgaataaggcaggccggagttggtttcccagccacgtgacatgaaaagggtcttaccgccctagcggcgaattaggtactgccggcagttttatctttagactggagatcgaatagcctccgtgcttcgtccttctctatttctacaatagatcgttgttcggccgtatgatggatgataagtcatgcctctaactgcctacagagcccggatatccggcagggcgacaggtccgggctttgtcaagctcggccattcgacctccgtcgcccgttcgtgcccagcagccctgagcagacttgccgcaagaccagtgatagctcggcggtacaattctaatgagactcaggtttgttcaatttgacggaagcaaaattttgcttgctaattcgttgcatctaccagagttcagttggcgactcgttgcgaaaaccgcagtccattgacgatattcgacttcagaccgagtttgagaagaataaagacattagggactacctgcgaaaatggcaggagatcacaccaaacactctggacccagttcgcaatatcgaactgtcggagtcgtcgcaaccatggacggggaatatgttcacgtttggctcggacctggatgacgcggttgacgataagctgcggctgacagacgaggatatgtccggctttgcccatattgctgatgagggagaagggtgtatacgactacctacagcctgaagatcttgtggtgtttcggatgtatgcacccttctgcagcgc

SEQ ID NO: 14982 - DNA, 2608 bp, Emericella nidulans
gtatcctcgctcgcaaacatatccacgttcgcagcctggattttgccatggtgaacctacctatcattgcaatttccatggcggttggctgcacaatactcgtgggtgaggtttatataatgcgcgataactccccgtacgattcatgagcgaaagtctctacacagtcgtgcccttctgggtgcatcactgggacgacaacaaggactttcatttatgaggcgcccaataacctattacctcactcctggggcggagccccttgcagttcccgtggccgcgcgcacacggttcattcgtgccgcatggattagcgcttgaatacaaaaatatacgtagcgcactttgaggtctagacatggctattgacgtcacctcgcgcccgataacgcgatgcaggatattctctgcccagcttatggagcaagcatcttcgacgtcgatgtttatgctagaagcggtgccgattgttactctacacccgaattcagacagcgaagagcatgcatctccgctcttcatcatggaccgccgctctgttttcgcctgggatagctcacagacggaatgatgattggatatgattttcatgaaacttacgattagttatctggtgtctttttcacgttttatacagctgcgtcatacaagaccttgcccaatgggaccttaataccctacagtctcataggcctagacaaacaactatagtgctgcagaattcctcgatttcttaaccctatccataccgctgacctgggcttgacacaatatctataacaagaccacctccagatattgttggaaaccaatctgaaccttagaccaagccggatatatccatgcccgagacatcgaataagttagggaagaatgaattgagcatgtccatcgaagggtccatggccgaattcactccagagaaccgatcttggggctccagagccgtcgctgtcacggtaggtcctatattatctttattcgctatcatcgcttcacctgcaaccttccatggatgttccgttccagtcccatcagtagaagaagtctgaacctctctaacatgtcttgccctttccatgagccgctgaatcgcccgccacagcggcccccttttctccgtctccatgccattgcaccgctcatacacagccgtaacgcattcccaggcgaggtcgcattccgggcttggaggcctgcgacatagctctgccagcagaaacgcgatcgagtagcactgaagatgcgtcttggagtgccatgcccactggcgcatatcttcgcttgttagcatgtcgtttgagagtcgtaggatctgaacggttatgttgaacagatgctcacgggcggtcttgtcggtacgacagcgtggcgagaggatcgtcatccgcagccgcaaggtaattattcgggccactgacagggcgaggcgggggaaggggtttagggtgtcgcagtgtttcaggtagcgatcttgcagcagatgctgcaggtcattcacaagggagtcttggtttgcggagtctagatgggtgtccgctgcggccgacccaaatttcttgcgaggagccatgtagcccagcttccaaacagcacgaatggcgtggcagcgcataaggcagaatgtcatctctgtaacgccttcgcgttcgactggtggctgagtcatttctgctgtaagatcagtatcgttgatattcagtggcatccgagtatcgaaggcggcttcctgtacaatcggctcagtaccgtggtaatctgttgagcggttatcaagcaagcatatatgccaccagaggcgtctccgcagttcagtttctagaggtctcaggccgaactcctggccatcgcgatggaggcccatggcctgcgcgatatggtatacaagcgaagtaagagaccacaccgtgcgggaatcgtcctcatttcggagcgccgtcaggaacaaaacggttgcttgcagcaggatcaggttttgggtatttagaagatcggcgcgcgctgtagcttgctcgacagcaaatcggtaggtttctagggctgaagccctcggcaggcctagaaggtcgagacattgcgaagattcgaggctgataattgcagcgtaatatattgcgaatagtagtgcttcaatgttcctgtcgacggtctccattgatgcgactgcatcccagaatactcggtgtagcgtgggcatgtggaaaatacgaacaagaggggtgacattcgtactgaagatattgaatagggccaccgcttggtgtatttgggggtggtagggctgcagtgaatgcgccagcgcccggtagcctagaagtgcactgttagggccagcgccttctatcacagagctagaaggctctttctcgtcttcagaggaggtttggtggagtaagtcgcgcagttcttcaatctcatcgcccagttggctccacggaagactgctcacgtagcagctgtgcatctcatcaattacgagccggccagacttttgatcgattttggagtcgcgcccatcggaaaggggctgggatgctgcacgagaagtcgcgtcttgcgactgttgttccatacgcttaactttagagcacatgagcgaagccaacaa

SEQ ID NO: 14983 - DNA, 3871 bp, Emericella nidulans
  unsure (1)..(3871): unsure at all n locations
ggcgccgttgcgcccttgctcccggaatcacagccagcggctcgggcttcgggggcattatcttccttcatcatgctgacgcggatcacacagcagctggactttggctgggcgattcgtgtctgtgcattcactagcctatttctactaattatctccaatctcactatcttttcgagactgaagcatcagagacgcaagccattatgtcacccaaaggattttttccgaccacttaaggaaatcccgtttgttttgacgagtgccggcacgttcttcttgtactggggtctttttcttccatttgcgttcatacccacccaggcgcagcggtacggcatgtcgccttacctagcttcgtacttgcttgccgttctcaacgcaggaaggttagtctctcctccatcctcttttcccgccaaatcatatacccctatagcaaactaacaacatcacagcattccgggtcgcatccttcccccctatatcgccgactacttgggacggtttaacctcatgattctcacaacaatgatatgcataatcctcgtgctcgccctctggcttccgtcgcgcacagacggaacagcaatagcatttgccgtattatacggcttcaccggcgggtcagcagtatcgctcgcaccggcactagtggcccaaatttctgatatccggcagatcggcgtgcgcagcgggacgtatttcgccattgcggcgtttgcggcactcacggggacaccgattgcgggggcgcttctaccggatccccttggtgggagctacttgggtgttgagttgttttgtgcggggagtatgtgtgcagcggttatattttatgcggttgcgagggggttggtgcagggggtgggtggggagttagagttagggtttaggattggaatatgagttgcaaggtacatataggtactaccttttatagtatctataacaatagagagcacaatgtgcggtgatccttgagtggaaaccgtcctaaattgggccaaaaccatgcatattgaaactaactagctaaccctgtagtatgcagtaagtaagcgccgcaacgccctcgcttcgacaagatagatgcaaaatgcatcaaacaccctgtgccatgcagtgcaaaggagagaaatcaaacatgtaagtaaacacaaaagcatcacaaacacaacatattggggaatgccgagtaagtaaggtaaacattaacgtcaaatcagaatgcaatagggatgatacgaccctagtaatccatatgcaaatacaacacattgctcaagtgcagagctgcatctgctctcgttttcatacaaaaacacctgtccgcatgctctggaccgtctttactccgacacctttcaacttgctcagttccgcaagactgtttatacggactggcttctcctcatcgcagccttctgcaagattctgatccatctcacagagacagtcaacgattgcctcggctttcttcacgccgacacctttgagaagctttatctggctgacatctcgcgagttgatgatggaaagaaggtgaattgttcgaggagaggggacggtgaggtcgtcgtcgtcaacggtcgccagacctagttcggggttggtctgcttggccgtctttgcgcgcttcttgcgcttgatatgggaggatactgttaagtcaaattcttcttctgaatccgaggtgtaagagtcgtggtcttcgtaatctgcgtcagcatcttctgcggcgggtcgtttggtgccttgttttccggacgacggtagggagagtatactgcccatttccttcttgatcgctggcgctggggtgctagtcgtttcaatgctctggtgagatttattttggatccgctgtttcagattgctgatctttttggcgagcttctcgttttgcgggaaaaatgggagagccagctggtacattctcaacgctgagatatcttcgccacgaccttgatgctgttttgccatgagaagataggatagtccctcggctctgctatcttcggagccctcgattcgctgctctagaagttccaggcgccgttggacctgttcattcagttcgcggacctgtgtttgcctcgacttctcgctgaccgcgcgcacagccaatatctcttccacctttttctctactagttcctctatcttagcggagatatcctcctgctggtattttgggggagctttgggcggttgtgcaattcgactggccttcgtggagcgtgatccgggtagctctgagcttattgaaggtcgactgggtatttcgggcttcttgaactgagatgatgtccttgagtgtggcttatctgcataaacgctgaatgcttttgctggtttgtcgacgggtttcgcagcatctttattggcagctaggttgacattaacagatgctgtcaatgggcgaagaggttgccgttgggatgtgactgagggccgggcggcaggtcttgggggccccttgaaaattggctcattttccacttcacgtagttcaatcttcttggtgcggttggcgaagttaagtgagctgattgtgtcaaggtggtaggacctgacaggagccaagtttaagatcattacggtcagcccattgttctgacccaatgatagtatcctggtcatcttggattcccggtacggtatacgttgatgctttttagtaattgcctctacacattgggccaggacaaagaggcttttgttgatgctggctgattccaccatgcgttccttgtcattatctgttcgacggttgtcctcagaacctgcaagatcaatggccgacgcagtgctgatacgtgttttgtcacctgtagtgaccgcaaccttaacgcacagaatagcatgagaccgtgatgagtgagcgtttagctgtgtcttgtcagctttgtgtgatcttgccgtcatgaccatcaagaaacaaaccttggtagcggatgtggatcggttgatattcgcctggtcatacagggtctcaaattccttcagggtatggcacggcctctctgtcaagcccacgactacggtctttccgctgttgtccctgagtggcaaccccgccaatgttctcttttccggcggctcaaacaagtcgaagaccttatcgttgtagatttcgtaataactcaaggagacgctcactgacgtttgtccatcgctatccttctccagcttgcggctccgccggtatatgctactcaagagacgtggaattacacctctgtcagcaaggcttttaccgcctcgcattgtgtgcgttttccccgttcccgtaactccatacgcaaatattgtgacatcgaagccgttgaacaggtgcttgacggtcggggaaactgtcgctcctgttagtatgccatgagtctgcaagcggtttgcgcactacgaaccctccgcctcaaaaagctcctgctgagtcacttttgcatcgtagactgcgttgaactggaacgagtactcctcgttctcgtttttcgggttcgggattcgtacgattgtgtctcggtctcttagcgcagctagttttgacgtcgcttgagagctctccctctccgccttattaggcagagtatgcttggatcccgtatgaaggataatgtcaacatctctttccgactttaacaacggcctgacccgtgcaacaacccgtacgctcattgtttaaagagttcccgacgcaaagttcccgacgcaagaaaacgatgagacccgccgtgccgcaggccctgttggtcttctgatcctggtccttcacggtttaccgtagcattatctaataagccgtgggcgaggtatattggcgagttaancccgtactaacaaatggcagaaagcctgtagtaagacc

SEQ ID NO: 14984 - DNA, 516 bp, Emericella nidulans
ggccgctatgacggtatgctaagaatgcagagagatttttagaatttcgaatgaggtcagtatgcatagggctccttgggcatacgatacgtgactacccaactgtgaatctaaatgattgatggctgcagccaccaactgaaggtccaatcactgataaccgatggaggggctaaagactcgatggtcgacaaggccatgagatacatcgggccgttggagacatgaaaccagcctgccgggtgtatgtaccatacagaagtgaggacatagacgaaggacaacgaacacgactgcttcaaggtcgaatagacgccagactgggactgcccttcgaaaataaccgaggtgactgcgaacgctccgttggtgcacagaacatgtcaccggcatctgtgctgagcgatcatggtggcgcatgacacaataaacgcgacgacggtcatgcctcatacacagccgaacataccatgtgcgtctatcacatagttcggactcgatgcccactatgacgcc

SEQ ID NO: 14985 - DNA, 442 bp, Emericella nidulans
tcggaactgccgggggggctgggaggaacccctgtttgacggagaggaaaccaattctgacatgaccaacaaacaatacccaagggtgaatgatagcattggggctagaataagcacaccctgcactccagcctcaaggggtattcccgggcacaacttcttcggcattggccctgctgcgcacaccttgcgcagaccaacgcgcggctgggcttgaccatactaatgcgagccacgggcatgcttaatacaacattaacagcgcaatgtttaaaaccctgtcctgcggacccccaaaatacattaccggactaggccggacaaccgcgcctggctccgaacccttcccaagttatagactcctgagctaaccccgaacaacacactattaacgccaaacccacatactgcaacttacaaatgccactgttgcacgttacac

SEQ ID NO: 14986 - DNA, 507 bp, Emericella nidulans
aattgataatgttccacctccttacccattgttttcagacacccaagggacttgggcgacttcagatatacacacttccttcccacacccaatacacgaacccaaactctagacagacccgaaacactatatgcttatctctacacattagcactaccatgctaaataccatgcctcttcataccatacttgaacactcaccaccaaccattcctataatcccaaacaccaatttatactttagcttactcacatcacaaagcctatcctttttctcattacatacccatgcctctttagccgataatcaatccactatgatactcacggtttgtctacacttcgcttcaactatcaatcctgtaactatatctctgcgaactaatgatgacaatgcttaatacgactcatataacaaggataaacccgcttaggcaggcttttatgatgacgattactagtgatctgaaccacactgatatgatgcgtaccttaaaaggcaaaaac

SEQ ID NO: 14987 - DNA, 1193 bp, Emericella nidulans
ggccgctactgtgtttgagaacccgacgctggacggcatgtctgaggcagtgagcagactgctgcacaatacacttgtagcatcgacaagcgtgacaagcaagatccccctatggatccaggatatgcgtctcggcaaaggcctccaacgcaatgcgggaacacctccaagctggcaagacgagtccgaggggcgcgttttcctcacaggggcaactggcttcgtaggggcaatgctcctggctcagctgctagcacatccacgagtaaaagcagttgcctgcctaatacgcgctaaagatgagagccatgctcgtgaccgcatccgagacaccctcagcaagtataacctggccctatatccacacgaggaggccaagatcgaggccgttgctggtgacttatcccagcccaacctcggctttgaggaagagcaatatcagcattacgcgcaatggtctagtgttgtcttccacctagcagcacacgtcaactacatagagccatactccacccaccgtgcggcaaatgtgactgggactctgaatgccatcctcttctcccaagcccatcggaccaaatcattacactatacatcaagtatcagcgcgtacggtccaacgggcttcgtgacgggaacccgctacttggcggaggacgagcggccgcaagaccatatgcttgcccttgaattcgacactgggtatgcgcaaagcaagtttacagccgaaacgatcgtctggaacgcgatagatgccggactgccgatcgccatataccggctagggacggttctagggtacactagtggcaaggggccgatgcacgcgaacccggccgatttccttactcgtctagtaaagacttgcatccagcagggagtctatccatgcctgtccgatcacaaagatagcatcgtccccgttaatttcgttgtttcgagtctaatgcatatatcatccagaactgcgagcctgcatcgtgcctacaatgttgtgcatcctcatcaatgcaccttggatttctcagccgtattccagtccatcagcaaccatttaggcactgattgcctacgcgaagtcccttatagggagtggatagaagtaacatccattgcctcagataatcctctgacttcgcttctgccaatgctgagcgagccagttagggacggtctctcgcggtgggagatgc

SEQ ID NO: 14988 - DNA, 413 bp, Emericella nidulans
agaaccagtcaggctttcaatgatctattgctcggtcttacctggctgaaaactcataatgcactcgcactctttaactgccggggggctagcatccaggatcccggcttgacatctcatgatctatgaccgctccgtgaggatagtctattcctggctcgattaacagactccaacatcacccggatcatgacctactgatacactgatcctgaccaaaacctacatatccagatggaacagccaatcataccccctccccatcttggtgctgtacctgcttgatcatcaaccctggaccgaaaccagtgactaaattgctaactgaaccaaccaggtggccccaatcaatcaaaataacacgtaccactatttaaactacggagcccattccctgatccattccagagatt

SEQ ID NO: 14989 - DNA, 1991 bp, Emericella nidulans
atccttcgcagcggtatgccatcaatcgagttccttcgcggcatcgtggtcctagacaactctgccactcgtcccatccgtcgggaagtagagcggccaaaggtagaccggttcctccttgagacatacacccggcattggtttgcccgaggatggctgaaaaggccgcctattcggcagcggcagctcagccctatccccaagggtcctcttagcggcaaagtagcagtcgttactggcgcttcgtctggtatcggagctgcggtcgcgacggctctggccagagaaggcgcccatgtcgctctcggtgcccgccgtttagatgcattggaatccctgaaagagaagctctctgctagcggcgtcaaggttgtcacttgcaagaccgatgttactgacaggaagcaggtcgagggtctcgtgaaggcagcaaccgaggagctaggtccagtggacatcctcgtggcttgcgctggcgtaatgtactttacaatgatggccaatacccaaatggacgagtgggagcggacagtcgatgtgaactgcaagggtattctcaactctcttgcatctactgtacccggaatgctggcgcgcggtaagggtcacgttgtggcgatttcttcagacgccggtcgcaaggtctttccaggactgggagtatattcggccagtaagttcttcgttgaggcaacccttcaggcactgcgtttggagacggccggtcaaggcttgcgggtaacagccgtacaacctggaaacacagccaccgacctcctgggcatgtcaaccgatgcagaggccatcaagaagtacggctgagccatccggggcacagatcttggaccccgaggatgttgccaactccattatctacgctctccgccagcctgaacatgttgccatgaacgagatcctgattgagccgcgagacgagccaatctagacgaggtagacttgcatttgtcgcattgggtccatgtcgcgtgggtggcgttgctattgtcacttaaatgacagctgttgcttgggattgattgtcgctttgggtttgcgtcctttttacgcaatgtagacagatataggtagagcagctagtcgtcataatgatttgcacgcttggatttcttgtcctaggatatatctcgctgagtacaaggtacatccggtcacgtcgagtcggggtattattattctcggatgccgtggatccaggaatgcgggcgcgagggcccttaaataggcggatgagaatccggcccctgctcgggcccatggggtcagcctatcatttgcgctcacccctcacatggtgccatagatcagcattataggatcatttcagtccgagggtttagtcgacttaccaacgaatggtttaacatccgtgatctcggttaccaagcaaaataaagcaggcgtagctgaacatgccgcacctccaagttcatggcatccttaagtaatattaaacaacatatctgacaaggcattgatcaactgatcaatgagcacatcttcaacgcgttatggtcacacctaaattatggcctttttgccccgcgaattttctattttccgtctcacaactggcttggacgggtaagcggttcacatgcgtgtctttcaaggaataaatggtccgaagccgactcggtcgcatgcaattctcgagggtaatgtcgacttcatatataatcaggggaggaagacgtcgttttcaggataaactgactggtaaggtcggtcagcaggcctgccaggtagtgggataacgaggtcataatggagagtttgatataggcgcagaggtatccggagccagacaacgcgactgataaaagcggaggcctggcctattcgccgtcctatgggactggaaagtctatcgaccttaaacaatggcgccattgttttatcgacgcatggaacagtctctatcggcgagtctggtcccgtcagcacactcatgccatttcagggtacaggac

SEQ ID NO: 14990 - DNA, 373 bp, Emericella nidulans
  unsure (1)..(373): unsure at all n locations
cgatggcctaccaagtcacggcgctctaatgacacactgcagttttctaacataacaccgactgttttaagcttctcgcatcctgcacgggagacataagctggccacctactagatcccgtcgctgtcaaccccacggattcaaatgtacctgccaacgggttttgccctaacaatgctgcacatgcaccttcccttggacaagcaatctactacagaccgttcatgacatcttacattgataggctcgcttcgcattcactgntaggctctgctcaaggtaacacatgcatacgcgcccatttcttctacgcacaagcacgcacttaatatcttgccaagacactgcgattaacccccgtgtattaggcca

SEQ ID NO: 14991 - DNA, 3701 bp, Emericella nidulans
ttggatcgcgtaaagtggacggcatggacggcatcttccggcgatcgggactaggagtgcgggaagtagacctagtagaggtttgcgacgtcgtcctggcggtcgtggggcggttcggagacgatggctgatcagatgcaacggcggcggctacggtagaaccaggcaaaggccgtgtgggaatggcaggaggtttcgacaggtcggtatatcccacagctggaacagtcccatcccctatccaacctggattagggttggtgttatatcgcggccgcagcgtcggcggggacctcaacttcctcaaactcgacgggtccctgcccttgtctttatctttatccttatcctgttcttttctgctctcgcgaagcgcgtctaggaggtcaacccgctcacgacattgaagttctagttgacgaatggattcttgcagagcccgttcggtttcagtactcggggtgtaactcgcggggagccggtaggcgttgtggtagtaaatagtttccaaggcggatcgccaagatctcaaggcttcatcttcattattctgagagagccactacgtcagtaaatgaccgtcaggaagcggggctgagatcacagacctgaccctcgaagtagacagccgtcgagcacatcaaataacagtcgtcataggtcttttgcagcgacgacactggcttagggcgcatcattcgcagaatgggttatggaaattaagtcacggagaaagaaataatgcagggccagccagcgacaccgccatgcgtgagaagacggggaagaaggagcgaattgagagagcgaggaaacgcaaatggctgcaggtaaaatggagacgattgagaagagtgtgtgaaattcggaacttggatctgaatcatggatggacttggagggtccatcccagagttcagttggtcggacgacgaagacggcgaatcggcacttttttccctcgtgacgtcgttactggagctgattaagcaaccatggatagagcgagacagtgtcagctatttatacgtttaacagtgggccaggaagtagttcatattcctcctgtataatgattatctggatatatcgtccagccatgtccgctcccgggtgaccggtcaccgccatctcgtatgtctatcagtacatgattcacaatccaaaacaaacagatgcgcaaataaataggaatagatgaaatggaaagagaaatgaattttcccgagcatttcctccctgtgtcccaacgccaaaaaagtcaagtaccgggtacatcgcgccagagctggcaccgatccaagatcaaaggaaagaggcgacaaagaggtcaagcccacatcgcagtcaacaagcgcaccacaacggatgtaatcaaacggatgtaatcaagccactagtcgttcgcaatgcctcgcccgggaatagaacatcgagtatacacatggtgagaaaggaagatcagcgtcgaaactatgctggcatgtcactcctcgcactaatcatgggggttcctgttgttcgcattcatacttttctccaagtgcattcaagtcggtcggatttgttttgtttcgtatttacggatgttgggagtgttggttagtcgaggggttcaccgcagaattagtcggagcatatgcatagcgtattcgtgcgatcgggcctgaacactttggcccggcctagttgtccactggcgcttgaaataagccttggccatttcgtacgaagtccagcaaatggcagtgctgggcatcgtggagatgatccgggggcgagcaccgcgcaagaatcctctccaaccgaattggcgcttgatgacggtcgcggcgccgaatagtcccttgaccgcgcgaatctcctcattctgcgcgaggccacgggtctgcagtagagtcttcaccacgtcaagcggcgtagtgataccagccgcaacagcaccagcaagaccaccagcaatgcaatgcgtgaagggatcgtaatccccagacgggttcataaccttggagatggattcgtaggcgacaaactgagtagctgtaaagggaaccgtcatgcagagggtcgtgggataggagacgtagaaagcatggaaaccttcagtcttgtagacagacttggcgcactggaagatggttttgtgtatggagccgtgtacctgcattcgttgtttgattactgcttatgtgagaaaaagctctctttttaatagtcgcacgcgttgtcaaaactcaccatcgaaagggttcatcagggcatcgctagcaattgtcgccgccgcaccactcattgcttgaaatagtcagcattttctccgtaaagttgtaagttacagtcttaccggccgccaatggatggtgtccatcatccacattaccaccagccatctccttaacaacctcatatgtaccgaaatagacagcatgcgcggggcctaaaaagtagagcccaaaagttagcccgtaggatgcgccaatcgtatcgaccttggcctcgtctgcttaccagcaccgacaatcacgctcgatacgcccttccacagtgtccgccacccttcaattcggtaaattgtggaaaccgcatgcgtcaaccctgtatagagacctccggtggtgggatgcaagacttgcatgcgagtctgttgtcggagaagtcaatgattagccatccgcacgccgcacaagtaacaagaatgcgtaataaggccaattggtctaccttcagcaagtccaccgggtacatgaccgcatgctcctatgccaaatgtcagcaatcccatcacaacgccaggtataatttcaattgccaggcaacatactgcaattccagcgaaagcgccagctagcatattccgaccgaggccatagtttgagggaagggcttcgtagctatcaacatgtcgcagttagcgtctgccctgccagtccagatttccgcggagagcagggaaaaaacgagtgtcagctgaacaggtagaatccaaacgcgagatccatgaatcttccaagcagaccgctcggaatattcgggacgcccttcggagataaagagaaacccagagatgaaaaagcaagctccgcataacttactcatattcttgccccggtacttgttcgggagccgccatcgagctagcagagctctagcagccgtggccgcaagaggagcgaagaggaaaggagggggaagagggagtgagaggagattcgagggcgagggagaacgaagacgagggccggcgtggtggtgagcgagcttgggttttgaatatgccgaagaaaaacggaactccgccagggaccgaacccgtctagcaagaaaaaagtgtggaggcgggagcgacgtgaagtcagtccggtcgtagcacagcaacaaacaggacagcaacggagagaggacgagagaggagaaatgtgaggaggagaagatccgaggcgatgatatttttctgaagattggcagagttgtcttgactggttatacccgagtttggcagtcggtcttagtcgtgatcggagcgcaaacgaagctgctcaaataataattagttcttctagaagggcactagtcccgtgaaacctgattgtcgaattaggccgccgtgctttgatttactttcttatccaggtgatacaaaagctcaacaacgagttgttcgctatcagatcatgcgtcgaagattatcagatgggaaaccc

SEQ ID NO: 14992 - DNA, 1874 bp, Emericella nidulans
gatatagatactagaaacaaggcactgtggtcctcaaagtacaatgaaggcaagccgatttccacgccatcataagaacgaaatatcgaacgcaagccctgcctgtctccacaaaacgccgttttccgcttgcccaatatgcaccgtctaaataccgttgtagaaacagccaaattacagtaatgtgtgtaggtctcgcctacctcgcctacctagtgctcctgatccgcatccccgtctggagtcgcactcgcactgctcctcttctttcccgacccggattttcggcctcgaggccgtttcggcggattttgactcgatgtggagcccttgcgcttcggcgggcgttggccagcaacccaggtcgctccagagtcttcagcctcgacggctgcgtcaaaatcaccctccgcatcttcgtcggatccaatcttgaactcctcgtcaatggagagtagtgttgcaaattcacgacatttatcgatcatgttttgctgactgtccagagatgacatatttcgggaaatggcctcccagaatctatcaccattgacaccttgtaccttcgtagcggacttgttagtctccttagcggccgccttcgcatcgttccggacatgggccgtgactccgtacagacgtcgaagatgtgttcgtgcctcccacaacatcgacaaagacgcggctgctacagtaagatgtcgtaaagtcgccggattgacatttggcagtggtaagctactgacagtctcggctgacacagccatggacacctcgtctccctgcatagcttcctgttttggcgggaatatctcggtctcaatagcgtgtgctacaatggttcctgtcgcggagacgatgcgctccaagcagccaacagtcgccactagttcagcaagctggttgtagtcgaagaatgccaggttttgagaaataaagcgggcaagcagaagatgctctggcgggttaccgctggagttaagcttcttcagttcgaagttcactttggagcagaggttcgaaaggaactttttttgataccggctattacttatcttgacgatatcgaatagcggcgctagcttggcaacatatggacgggccgtggcgccagagggatccccaacgacatcgcgttggtagtagaacgcctcctggacggcacgcatatattccctttcgaacatagactcatactgctggtgaagcatcttgtgcgtatcgtacgctaccttggctatggctggcacggtggatgtctccaaggagactaggactccagcgcactctttcggatgcactaaaccttgcctgttgatgctagcaatcaattcgatagcggtcaagccgtatgagtcttgccgagactgtgcgactcgaagcatgtttttgagaaagtgctgggcaatcaacgcagcggctccgtcgttatcgctcgctttcagtgacccgcctaacctagtcgtgttttgctgttccgcggcctcggagacggggactatagacttctctgctttgccttcgtgcattgcgaagaaatccgcaaaggccttcaggacgatattttggaggctggggttgtcttcctcaaacactgctgcaaggacacgtctcggttcttctcggccaaaatgcgcaggccatgattggcaaatagaacccaaactctcaagagccatgacgcgcacctcaagcggctgctttgccagggtgaaggggataattgagtcaatcataagaccggctacagacccgcctttccagcctgggaccgcgttccgaaagtgaggttcgtatttctcaaggtcacaatgccggccaacacagcccgcgattctgatatagctcttcgcccttgcaagaataacagagtt

SEQ ID NO: 14993 - DNA, 534 bp, Emericella nidulans
tcgccatgtctttttgcaaatgccccctgcgttgctttggccaaataagatgttgcctctcgaccgggctttctctgtgggcagaacgcacatatcggcggtgacaccgcctgcgatgacgggcggatcaacctgaaccgtctgggatggcagccagactaccccaaccgtgtcatgcactcccgggaggccaggtggttggccttggaataggaccgccgataactcgacgtcccgatagtattgggaggattaatctccactgatttggccggaaaggggcttgcagtagcgatcattaatagggctatgcccttgcgatctgtatccgagacactaggtctgcgaacggaattagccttgcaatttgatataggttttaccgatgctacttggtaacatggccgttgttcatggggcaggcgatccaacataggagccttagctctaaaaggggggccagtgtccaagcgaaagaggatcactcatgactggcgcacatgcacaacttgtgtcccgaaactgtcatgtgtg

SEQ ID NO: 14994 - DNA, 813 bp, Emericella nidulans
ccagtgtgctctgtgctctaaagaacacaacagagcttctcgatatccatggggccatggctcttcgacaagccaggaggatgaggggccgtctccgaatcatactatgataacccccaacacggatgtcgctgacgatctccgatcattatcgcgatcaccacacccgcatcggcgcaacggctccgtacattattatacccaaacacgaacgtccagcgatagcggcactgaggcagatgatgagagtaccagtttactgaagggactgcctccgccgccactccgatcacgaaagggagctcgaccggtgggtgacaatgatttttggcttcctggattgcagcgatggcggtcaacctcgcgaagctcgcgacgaagctcggttggagataatgaggcggatattttagagctgaagagtaagatcagggcgaagagacgtgttgagattattcggagggcgttcgaggctgttttgctgctttttgttggtggtgtggttttggcgcaggagaatgctcggttgcttgcgtgggtttggaaaaagggtgtgtcggtcatttatcgagttttattgctttcctcactgactgtgtctgatattagaactcgttacctattcccttacagttatcggagtctacgctatatacccgctcaacaggcacggacgattacggctctccagatttttgtcattcgacattccgcccagcttcgacccagctccgcttctatacccggttctcattcccgtttatatttccctttattatgtcaaatcatgatccgtcactggtgctaacaaca

SEQ ID NO: 14995 - DNA, 446 bp, Emericella nidulans
ggaactgccagacatgcggttgtctttcaccatagttccactcggttcgtaccatttctgacaagccagacgccgatgtttgttgcatatgggagtccgtctgtacgctgaacaagatgcgatgctgagaacatgcacataaagtcttcctgtatactgtgcatcgcacgagcaactcacagttcccgccgagacattcgcagagcatttttaagagcaacactccatgaatatgatatgagtgctctgtcacgcacccgtctcacttatgccgcttataccactttctagatgaacatccagataccgactctctgttctgtctgaactattcgcggtatatgcaatcattatgtagacccattccgttcgactacacacctgtataccatatcatgcaattacgaagaactgccaaagggctgtggaaggacagtaccctagta

SEQ ID NO: 14996 - DNA, 1428 bp, Emericella nidulans
tagttcaaagacatacccacaatcgcatatctctccccaggttcaaggtcatcccctcgctcatgaatgatcctctccaattcccttctgtcccggtcgatatcgtcgctctccgcgagaaacggcacatattcgaccgagaacccctccgtctctagtcggcgcagggaagcagtgtcaaaggtaggtgagttggaaacgacatagaccctgcgcggggtgggaggcttcgggcgatgcgtggagctgcgccgccggatatgactgaacaatctggacattgtgggagaaagactatctcaattgagctggatgtaaaggtcaattgatgggtagatcattcgttcacgctttcagccctacggggcagaggtggctctgcttttcttaaaggcactctgcgccgagtcgacgtcataggctcaggtgcatcgagataggcaacatctttcttatccccggaagttgccggcaaaccggttattctaacccacgccatactaggccactccaaaactatatcgatctatatatctagagcgctggtgcaaatcatcacgaaagctaataaaatatgctcacgttcagaacgacctcagccaatccctctgcgcgctaaccgtttcgtcctcatttccatccagatacactcggtaagccgggcggagcagactcgccctcgcgacctcgcaatcaatacgaatatcctcgaccagtgcctccatcgaaacgtagtcgtattcaggccggatataccctagcatcagcaggttgagctttgtgccgtagaagtcgggaagtttgtgaaatttgactttttctttttcttcgctgggagccgttggagagggcagggttagggagggcatgatgtggatttcctgtttgatggaagagaaagagaaaggtatcaagatctggtctgatggacaaataagtacaggaggagggggtacacaaaactcacaatcgagcgcgtcttattcttgtagtatggattataacctatactgagcacagccgggaggatcggagccgcgtctcctgatgtagaatcagatgatgaaggcgcgggcgctgtggctgggtccagcgcaacaacgccatagtaaacgcccacccccaattctttggggagcacctcctctagtccgtcgacggggatgtttgctgttgggataccaagctggtttggcaattcggttagcttgtttcttcggtagaggtgagtccacaggacggaaccatacctccttactcccgcgtccgaagcccttgatcacaggtccagaaaggcgaatggggaagggagcttcggggccggagtccgggcctgtcactggggggcgggggtttgagggacgcatctctgatccttggagttggactttggaggaggggttgtggattggttttgtgtggatgata

SEQ ID NO: 14997 - DNA, 1612 bp, Emericella nidulans
tataaagccttccaaagaaaaaggacagctcatcatcgtcgctgtatggatcagctgcacccctgccggcacggatactgaacactgctccgttatactcgctgtcatgtcgatagatcccgtcatcttcaccacttccctgctgcgtgaatcctcctgcatacaccccgctcccgtactccttgtcgcatgttcccggggttgtcgtatttaaatccgcaggtgtagcaatgaggccattttttgcagcgtcataaattgcattataccaaatggccgccaatttggagtacccgtaatcattcgggtgtttgttatcgttgtagtcatcggggtatttgatccagttgtttcctgcagttggagccggggggtccgtatctgccaggacaatggagatgtttagactgtctctcattacagggactagggctcgaaattgtgcatttacagaggccctgttggcctcgacacttgtggaacctgaaggaatcagagttgataggacaattagtgtgttgtccatatcaggggcgctgattagtgtttcgatcaggttgctcatgcgttcacctgctttgtctggttcaacattaaaatcgcagtcattggtgccagcgtttataagcactatattcggtttataggcaagggagttttttgcggcctcttcgactttagttattacgtcgccactgtgagcttccacgtcctgttttatccccattgtataagttagctgttctggcaatctataacaagccaaataatggggcgcatacgttatccttcatactaccgttgtctttactgccgaccatattgacttcccacccttcgaagcggagtttgtcacgtaacggcttgcgatatccatttccgcttgaagacaagagcccccaggtgattgaggcaccgagaggaagaattcgcagaggtactttaacagcatcgtcccgttttgttgttgaatggagccattcatcttcagtgtctatattgctatagttggccgtgtatcgtgtatttgggactgctgctcctattacagtgattgatagaagagacagtattagggcaaacacagggaagaagacgagacgcgtcattatgagggcctgtgttgatgatagtttctactcttcgtccgattttgtgcgagttcctttaatacttctccctctactagtttgtcaagcgcaaaatgcctattctactgttcgttccactgacaaagttagaaaacaaccaattacgtactgaataagtaatcagaaagaacttgaatactaccatagcattggccttctgacttttcaggtgaaaatagggtccctaaaccaggggacaggtgtacatatctcgttattgagtcatcgagcagacctaacccagtataatgcaggtcgcccaactctatgactactatgaaaagctttttaattggcacaataggcaatcggaagcgtgaaggctcagctgaggcggcatacaagaagcaatcgggcgcctgaggattagcgaagacataattaaacatttagacccccaaaggctcattcaatctatttaacaagcaatcggacgcctagctaagacacatacaataaag

SEQ ID NO: 14998 - DNA, 2313 bp, Emericella nidulans
atgtctgtaagacctggaatcatccattccagctttgcagcagcacatggcttggtcttagaagccggcattttccactaacaccgtttgcgcacaatggctgcagccagccctaaattcaaagtaacgttgtctctctcctcatactgccgtccgtattcccgaatcgaacgccctggagggaccaagccaatagactgacggccatcattggtcccttgtgccagagcgtggctgctgcgggagtccagacgcatcgatggaacggcactaacgctggcttgagacgacctcatcttcttccaaggcccctaatcctatcttcttcctcttcttcttcttctttccttttcttctcttcctctgcagcttgtccttttcgttagtgcttctgtcattcgctcttttattcacacctaatagatcgttctttccatgtgatttgggctctttgtccgtccagtctctcctgggagcatacaatatcatgtcttgcccctaactcgaattcatctactcttttttctctcgcctcgctggctatataaatattagaatcctctataatcttaattgtctcatgctgcccgtcactcatttcatgtcattgaccctctgcgccgaagccgaccgtaacgaatccacgctctgatcagaatgcaccaacatcaacaatcatggtccatcctcgcccatcgatggacaatcttcttcgtcctctgggcctttattctcccagctgtctttgctgaagaggaccaggcgacaaagtcggccgatgcgtcgcgaccaggcccagaccaaacgatcgtcgacatagcgtccgctcagaatgctccactcatccgccgtcacgatcaccagcacgatcacgatcacgatcatgaagagttgcagcatacgcatagccatatcgagcctcgatcaacgtcgtcttcatcaggatcgaccttccccacagcctttgataccagtctctccaacaacttcaccacaacctcttgtccatccttcttcacaagcttcctttccgactcctccttcacagactgccatgccatctcaatgcttctgcgcgactccacagcttttttccatatcctcacctccgccgcctcaacgtctcgtgttttagacatcgcctgcgcagcagacgtctcttcctgcgcctccaccctttcgagccttgcgtccgacctgatcgacgactcaaactgcggcaaggactatgccgacggcaaccccctcgtgacaaatgcctacgtcgacctcatcacctacgagcccatctaccgcgccacctgtctccagaacccagacacctcgaactactgctttgttgacgctgtgacgaatacctccaatgcagcagactacgacgtctattctctcccgtacggcagtacaatcaacaacagcacctccctgcccacatgcagctcttgtctgcaggcgacgctcgaggtcttcagcgagtgggcgcaggtcgaaaatcagccgctcgccgactcgtacctcccttctgcggaggcgatcaatggcaaatgcggatcggactttgcaaacgttaatgtgactgttggcacagaggatttcccgtcttcggctgaaccgcgactggccctgtcacttcctctttgtgtggcgtcactgacgataggtctcagttttttgttgagcttatagcttatggcagcttcagtcttccattcatttctgaatttgactcgaacatgccttatacctcttagcaagctctccctgctacactactctctttcatttttagcgttgtcctcccggttttgatcatgtatggatgatgacagcgattgcttcctgctatattggaaatgcttagactactgtatgctatatagctataatctcattgaccacaagactaatcaccgtcattctgtcgctgttacaatcttggtgtacggactctacagaacagaacaggagggcgactggaattgactgatcgccgggcactctctagtcgtgaaagctagagttaggggtgattaatgctttccattcatcgtgccgtgaggccattctctcttctcatttgaaaaattctactgaattcactgaattcagtaaatgctgtaaataatgtactagatagctctaactaaagtgaggtatatccgactcgagtatataccatgtacgtagcttgggggataaaatgaacaaagaatttgacaatagaatgtgcatagaagaagcaatcatcaaacaggccgctccataaaagcaagaaacaatcgtttaccataacagataggttcgtggttagtg

SEQ ID NO: 14999 - DNA, 490 bp, Emericella nidulans
caaaacaagttaccccactaataaaaccaaacaaaaaccaggggccccatggaaggaataaaaccaccaaaccccaaaaacccaacaccaaacagaacccagagcgacaagaacgacaaacgcagggcagaaccccgaaaaaacaaacacctcagcaacaacctacaccgtagaacccaaacaaaacaacctccaacgcacacaaaagggagaccgccagcaacccctgccatcgacccacgcacaaaaaaagacccgcaaaagtacacggtagaccacagaaccacacacgttgcaacactaagtcgagagaagctacatacaaaaacgccacacgcatccaataaacctgcacgccaaaaccacaagggacgctagacaaaggctaaagagacccctaaggcgacctgcacagatcagaaccgcaaaaaaaaattcggaccaaccaaaacatacaagaccgaccagaaggcgacccgggaataaaaac

SEQ ID NO: 15000 - DNA, 4229 bp, Emericella nidulans
ttatgcaggcaattgctaaaaagtgacctgccgatctgccctgcacaatatactttcctgtaatcaggggatctctttaggccactcaaacaaaccaaagagttcagaatacaggtacacaatccaacgaggctaattttcagtccgcgctgacttcgtttttgaggcaccggtccaccgtcctagtctatcttgaccctgttattcatcggacgccgtcggttgtctggaagatgttcaaagcacgtaggttacgacaaactttggtgccccagactcgcccctccccctttattgacgtcgatttgagccaaccacctgtgattcgcgatgtcttgaatgttccaagacggcccctcctttttctcttgtcctgggacaaagccgttgatccacggatcccaagagtaacgccggctgttacagaaagccggtttagctttcgagaatccttcttactcctgatcctacggattgtctcccattactccgtgttctgggtgcttctcgaatgttaacttggttgcctaggcggttctagtgaaccagagagccgggatatcatcccctattattacgcggcccgcctggctcctgccactctaagctgactggctggaatggaagtgaggattaacttcggagatgaaaggcactctagagcccagaatcatgacaaggagcacggaggacgccggaaaaacggagcatcattgtttgttgttgatggcagcgaacctgtttgcatttattgttttcctggcatttgcggcgggaacgaaccatggaacagactcagatgccaggacctacatagtagcgccgggtaccgcccatggttctgtatttacttatcgagttcgctgaacgtctgaaaagtctcgaaagcgctggtcactaacaacaatggccggttcactactccgtgtatacagagtgccctatagacgtgtcgtgaccgtaaatttgaggcacacttaggtcaagtctaggcctctagcgagacccgcgcacaaaccatgaaaatcgcgtgtcccaaccagctttcgagcccagccctaattatgggcctcaaggatgggctgggtcgcgttacctctccgtccgttcaggagggtcgtactcttcgtcttctacacgtagaagccaggagtgtcgagagttatgccacagttttcaagatcacgcgtcagtacaaactgtcggccatctgatactgtttacctgactcgcgtcttgtccctgaatcctgtaagcattcagctagacggcgcacatgccgcgggaaaactcggaacagaaactcgaatcgagatcggttcgagattcttttgtcctttcatcccgtgttgtcatactgtactttcgaaatatcggtgaccaggactcttcaatttggagacgctttttccttcttgttgaataggagcggtcaggaaacgactccaattcttaatgagacaaccgatcctttgtatctcctaacgtgccctaggcctcaccgacacggcgacttgagagtccaagagcccttgccaacatcacagaattctagacattccccacacgaagacgcggtgacggtggggctgggactcatcgcgcgtcgcgatcccttagtttttaccgtctctgtggaaataatagtagctgtggacctgtggaatcgtggatggcttcatccgcgacaaagggaagccaagacggtctgtttgtgcttggaattggtccttggaactgccgacattcgttagtgttcggggaagctgttcctgaatcctgcaacggtatgcagtggagaccaagctccgaagcaaaaggacggaatgaaaccacgaatcatccgcttgatccatgccactggtcctctggaattcagtgacccaaggaccttgagaatgatcgaccgtctggagatcatgaattgcgattaacgagctcgccaagtaaggagcaaaacggactgttgcagacttgcagtctacaggccacaaacttggacggggatatgaggcctcacccctgcctgaactattgaggcttaatgaacttctcaagcaagacatcgccgtccgtgagattacgtcgaatcacagaagcagggccaagggccagtggtgacactgtcttggaggaagaggaaatgatcggtcacggacaaaattttgtgcaagtgtacgtacactcatcgtacctttgttgatcgcatattcgcaaccgcaaggcacggagattttcgcactattgtccgcttcttccaccgtgcgccaatctatcgggcttatacatggcggcatggctgcatgccatcgatagtgatgggctggtagtcaatggagtcaatagtgtattcctccctcagatctccaagcctcatcctcttcacgttgacacggctaagaggcgtcttatcttctgcctcaaaagtgatgttgagagtggctggaccggaccgctgcatggtcgggaagtggatcgacaaacaagatcccaatcacggttaatagaatctggatggattcaattccaagaggctggacctgtgaggtcgagacttgacttgtactgcttcaccgctctgggtagtcgatgctcgatcctcgatagctgggcagatcaaagcggtcaatgatgtcagtatccggaagggtcagagctcagaacttggaaagcagcatgctctaaactgatgatcctccttggagcatgcggactactgtaagggttgagacgcgcacaaacaataatgaaaattgagcacaccggatgcgttcatagcaataagggcaaattggtttccggagtaaccttcgttgatcggaccaagtggattcagcggcatattcgggtggatgcactccacctggatatgaagtactttgttcttgagttttctactctggtgttccatacgagttgaggcttctttgtttcagtaacactcttgatcttcaacgacgttggaattgagaagagtgtgactaactcgatggggcatccagtcatacgtgcatactcggtctcaaagaggggcagacacagtaacaagttgacaactggaagtcacatcgtcatctgacttcacttgaagtgctttggtgggcctggaattactactaatagtgggcccggaagcaaagcgtgtctccgaactgaggctgcagccacactgctcggtggtctaaccacatctggtatgaagaaggcgcccagattgtggctcaagtttcaacacgtatacaaggatcttggtcgtaatatgtaggatatttttgtgcgcccaatcaataactgacagggtgttccgtccagggaggaagactcgactattctcgaaaggcgcaaacagcagcgcccgtcgtgcgctgcattgctgctggttcatctcttactgtgcttttcgcagctgaccaggaatcgggacaagggggattcattcccgtttgccactgacagcagtagaccgatgtgcgcttatctcagttagtcacgatcgcgggtgtgggatgtgaacaatcatattaatgtcagctcgggacggagtatagcggcccctatttcacagtagcggataccgcctagctgagcaaaaagcaccgttggttcgtcgcgaccgtgtactttttagacgttgttaaccttgaagaatattaaactgtttcaagaccgaacgcgaacagcgaagtgttttgggataaaagcatatggagtaatcgtcaacggctgagctcagttgacggtgtagttcggcccactcgctcgggttactgggttaaatgtggtcattgattttagcgggcctcggtcacaagtgctgcctcccagggtactgtatctcgggagtagtggtacgggaggggctgtccgcttgaggggcttggaggggttgctgaggtcagtcccagacactctcacatggaggggaaggaggggtctcactgcaggtgcgctgatgagtctcctttttcaaaggtctcagtcagatcatgttcgatagaagaaaggggctgaaaaatgaagatcgaaaatccagacgcgaaaaaccaagaactcgagaatgagacatcataggctcgttgttgcgggtggaaatgaaaggagcaattacagcaattacacgaatcatgtggcattcgacacgcccgcatccttgttggaggggcaaaggggtgtgagtctctgaatcgggtctgacggggtctgacgaggggccaacaagttggaagggt

SEQ ID NO: 15001 - DNA, 483 bp, Emericella nidulans
ggaagcaattaccagcatgaccgggggccgtgcctctcattacctgctgggcaatggaatgctcgtcttcaactatactcttgcccggagatcaggggttaaagacactcatcgggggttgtagaaccgatatataggatcagagcctatacggggcaaagtcctggtgctcctatgcacagaagcttcacaagcacagttcggacatactggacgtgtatcatcttcaatcactaaagtgagcggcctcgtggggcacggaatcgggacttctataccatatacttgccgcggaacatactgtcactatgggtgggacaagtcttatgattactggcaaaaaggtactggctatcgtatggatcttatgccaccggatagattggttgggcatactggttgctttacgcgagaaatacacttgatttgctatggctacctgacaccgtacatctgggtcgcggttacgacgttacctggcta

SEQ ID NO: 15002 - DNA, 2145 bp, Emericella nidulans
cctacgtgtatattcaatggtttcattagctgggccagctgtgagatctatatgaactctggggcggactttgaaacagttttgccccctcatgaagtctgaattgttcaggcgatgcttcaatggtaaataagtgagcccgtgttgtacaagccgatatctatatagctaaggtgaatcaacaatagcaagaacattattatgtattaaggccgtgcatgtacgcatacagccttcgttggcaggcaaagtcttatagagtcgaccgttatcactcccaaatccaaatcaatgtgctgctctttgaatcctaatcacataatatcatgctgcagacctgattagcctctagttaagaatcttcaccaaattcagactctactaagccaaacagcatgccaatacccaaaatacctttccgctctgctgtaactgtccagagtatggcgtcctaacagcgccgaacataaccgaccccatgacgtcaatccagacgtcaatccaactaaaaagcaaatatctcgtaaacacgtagctaccatttgagtctgccagcataatcgccagttaggttatactgccagattggacgtcatccgtcacatatggcggctacatggttgcgaattatgatcgtgcatgtcgtaattcagagactgattgttacaattcagatatgagaaccggagggattatatacaagaagaacatatgatgaattccaaccaatctgagtcaagaaaaagctctagtatttacttgatcgagcttcaatcaaacaagcagcctttgcttgctgaagccacgcacgacgacatgcttgtccttccgaatccccgacagagatgcatttgattcaatattttcacgacacagaccactatggcatacagattatgccagcgatagcctgggccgtctcttgaggagtgatagtagttccgtcagttgtcctcaggccaagtgcacggtactctgcggcatcgctgacggcctcctgaatttcatcagctgactccccccgttgctgaaggcgcgcagtacgttcccggtcatcacaatcaagtattacccattcgcgaatgggccatcccgctaactgagctggggtacagactccgagaagcagaacagaattaggagccagcatatccaagactgatttcacaagagccgcatagggtttccaaagcgattcattgtcgcgaatcgaacgtccagccaacatttctgccggaaccataagctcgtcccaatcgataataatccagcgtggaagtagctcgcgaagatatggcacgatagtcgttttcccagagccaggcgccccaagaatgtaatggatattatgatcgtgcatatggctcatcatgggccttttcgttgtaatgaggtgactgggtaggggtgctgattgcgatcagtaggctcttttttccaactgcattgaacgttcgatatttattatcgatcctctgtcaccgctagtcatttcgccttttcctaattcggatatcggggaactgcatgctccagctcctcgaggattacggaaagattcttgctatttttacagttaaaagtgtctctccagctgctatataggtcggttttcttattattccttgggtacctaaaccacgatataaggctagattagggaatcaccctcattcgtttataatattgacgtcgatgcaaatgattatgcctagcctgacgcctcctataacagtatcatatgcacttgacttgttagttgcttgcccacttggacttagcggccagcgcctaaagataggcgctgccaggcaggtgtctcaatatacctaccaacagctctatgaccatcagcgtccgattgatcgtttggctaagaataaattcggcagtgcaatttacaatcttaaaaatcttaataatagcatcgtgttgtacatattggggatatatgctgacttgcactgctctcggtactcagaggtaaaaactatctggtatttggataaatgcgagcaggtaggcctcagaaaatcagactagcagcataagcccaacgccgtttcttaacatacttacacgagattctagccgtttgcctcctgagctgattattggtctgaacttgacctccctcagcatgtt

SEQ ID NO: 15003 - DNA, 366 bp, Emericella nidulans
  unsure (1)..(366): unsure at all n locations
acccccaccatgaacattttagggaacccctttaacgctttaaggtttttggaacaggctagctgatgcacgggccctcggcaggctaatagaggacccttcgatattacctgtatgcacctagggagcctcacaaccgnnccatggaattgaatgtcccgaatatgccgtggagcctctatccacctctattcatgatgccgaggttccacaacaatatgacacgactcctaacgcgacacccaaggcgacagatccctaacgatgcccgtacggagaggatactaccagcccacgtggcaggagagacacgcgactaccactggcttgcacaatgagcttgctcaagatcataaactttaccgc

SEQ ID NO: 15004 - DNA, 2698 bp, Emericella nidulans
gtgattgatagacgcgagggtacgcagtttgaatacaaggggctgaaggtcgagaattactatgcttagtctgaatcaggaagcaggaggaagttgtggagtgtaacagagctggacaacttggcttggagaagatgtatatcgtttcagtggctgtcctgatctccaagtatgccacatgaattggagagctgaggaggtaggtcagttcaatagtatgttcgcttttacgcgggagttgcagagcatagccctccacaaagccctaaccaggaccatttcgactttttgcaggatgaaatactgatagtgctcttggaaaggctccagaagtacagtaaaacttcttctagaggttcacttacaaagcgttatgaatggccatttattcaggaaacgcactagatccctatattcttttggcctgggcagcctgggattataccctcatggatacgaaacccgtgtggaaaagagcatcaccaaagttgcaaatgtctctcataccaagctaactttctcacgcctcgtcctctattgtcttgtagtgcagtagagggcatccttaggcaactagatcccatgctcagccacaacaccactcaactgcgcagttcaataaaagtatccgtctagactcggaagaatttacccgagtttatcgggctttatacccagctctgattgcaggaaatattcttagtcactcacatttcctccatttcttttctcttgtcaggtgtcgtagcctatatattcccaccgtccgctccctgaccgctagcaaataccaatacattatactactcccctaggcttgcaagcactattcttcagaccgcgaatagtgcgttgtacttgaatatacacattaatctctaggcatctaatacaaacacagaggagaagaataatttgatatgacttactaaccttgtaggacattcgttcctggattttggaagacttctcgatgctgtaaagggcgatcagaggcagtgaaattctcgatttctctgaaaacgaccgcaagatctgacattaccactatcataacagattggcggatccttctctctggccaggtcgcgacctcttttacgccatattctaagacaacgaccagaacaacggtcccgaactacctcccacgttctctgatgaacttgcgcatagaacaccttagagcaaaccccatcctactcacctacctactgacttacccagacaaggaagtccgaaaacatccttctgtgaatcccgaaagttacgaaatgtattcacgtagtggactgcagaacggataggccagatgtgctgttggtgccagccccatccctctatcgcgcacagatctacctcttcttttttccacctatttagtataatacgttagatgcatggttagtatagacaagaagaaatagcagtgccggtgggagtcattatgctagataacgagaggtatgaatgtgaaccaatccgggggatctggttactctgagggctgtttgactcgtaataagtagagctaaagtaaccatggccccttttatttcgatatgtatggatcacggctgagtgtacagaaaaggcaatgttcctaggatatgtcctttctgtctcacgtggatgaatttaggacgcgcgttggggatatggatggatccgaaacaccaactcatcaactaatagtacaggctcttaccaaaacagccctctatgctatcaactacggttatacgacgctattggtgctggaagcttgcccggctaccgagcttataaatgctattgcttagaaatcctgtttcttagaaattccttgaagaatattaatcatttaacatgattctgctattctaaccaatttgcggttggtttgtattctccttcttcatgtatgcagaccaaggagatcattgacccatctacttccaggcattccaaattacgatttcagttccagcatttcacttcttacaccgtgcagagtggccaagacacacgaaaacaaggccagcgccgaagaccacgcttaaatgcttcagaagcgtgattatatcttgctgatcccttggttgccggctgacaacttcaatgattgtaaaaacccgagattgccttacgtagtgttagtagaagtcatgatggtgagtcctgtccagctagatcagagttagctaggaactgcgagagtaaatcagctgcgatgtgttcgtagtgttcatagatttcacttatctagttgcagtcaccgggctcatgaccagtggtcctcgcagtacaataaccagcatcctcaatgggttttctttaccgattttgttaaaacaatagctgacttcttattggaaaatttctaccttgtcggccggccacttcaagcagaacaggtgatcagacgagagcaaatacaatattccacacttgcttgaggagtccgccacattgatactccccctttcacataaataatctgtaattttacgccgtttccacactatcatgtagctgcaaggcagcccaataaatagcagtgttcaacggatgctcttcccgctcattcactcggaggaattccccgttgcttgataatgctggttacaaatctatcatttccatcttctagaatcttgttctcgctctaatcttccattgcattcccattacctaatcgaaagcaattaataagact

SEQ ID NO: 15005 - DNA, 2568 bp, Emericella nidulans
ccctcggatgaaatctgttgtcaacttggccaagatgtacgcttcccttattgcggatggcacgctcacgttgggaatcctaaaaactcttaattttgcgtacttgcagccaaagacaaaggcctttgtcgaggtgcttatgattagcatcatacagcagtcgcaaaaacagaagaaaaataagaagtccaagtccaagtccaagtcggaggacagtctggatgaacaacccctagtcgagatcttcatgaaaactgaatatacgccgcaaatcataaaggggtgtattttcttcttgcggaaggttgttgctaaaacggatattgttgcgtcggagaaggaggctgtcatggtgaaatggggtgttagggttgctgttgatgcactaaaggttgtggagtcgaaggagagcaagttttcataggcgttcagattcttctggtccatcaacggggttttgatttgtagcaaggcgtactggttgcatttggtatgggaaaagtcgcattgtacatatagtcgtccatataagtaaaaaaggaatgtatgagatagaattttgggttatgttggctttgacctgcgcatacaaatacatgcgaaacaattatgctacagcaaagcctcgaaagaattctagggcaggtacatctacacagactgtatgatctcccactccatccccacaagccatcctccaaattctaactcagaggaccgctcactttcatccccccagatctgctcatgccgatgttcggcaggcagagaaacagagcttttgcaagcctgcatgccaggtatttcccaaactagccagcgaaggatacccaccaagtttcccgcttggagactaggaaccccggaagagggtcgcagctcactagcatgcaaccgcggcgcacccataaggagaacatttctcgtatcagtaccggctccatttgtttccaacccactatcatgcatagaattctcagaggataccgacgtcgtcgccacaacctggcctcgtatgaaagcgagcgggccgcaactcccaagtgcggactgacggacgtcacttatccgcagcacgtacgagtactttgaggggtcagccgagcacacattcgcactagtatgtccacggcctgaagccatctgcatctgctgctcgcgcttcgttcccatttctagaatccagctgcgcacctctgaagccatcccgccgggaagatagctgggtgctggtgaacgctgccttccacgacggcgaagcggatgagatgacggggagaaaggggtgggaatagcatatggtcctagatcgccagtttgctctggtgaggacgggcggggtaatacgaaggtcggcttagggggcggtcgagatgcagaggagacgagaaagcgggaataactatggacggacggcttagctgttgccggggttgctgatgctggcgttggcgccagtggctggggcagagaagtcctcaggtttcgaggagttgtgcgatgaggtagggatggcgagggcggttcgtgattgagagctgcattggctgcaaacgtccaaccataaggtgaggttactggagaggatgtctcaatatcatcgtatggccttctcttctgaactttaggcgtgcctaaggtagtagactcagggatagaggcacggcgacgtttggacggatgtcttttcggtccgaacagttcttcgaattctgcatctacctcggtggtatcagggggtgggctgctagggatatcttcaaggaggccgctagtatcattcttgggggtttggttgtagtcttgctccagttctaaatcgctgctggagtcttcaatgacttctttctggcgcgatattgtttcacgagccggcgttggagttggatgtaggtttgagattacgtctacatcatctttcagaagcgtgtaatcattattccccggctctttgcgttgagacgaagctcgctgtgtgaacaggaagcgcggggtggaagcgaattgaggacgcgctgtttggcgggcaagcgcgcgtggtgtctatagatggatcagtcatgggtctgacttgggggaagaagtcttactctcgaggggggcatttaagctgatttttatgaaaccatacagtcatcacatcattgctggaagtattcactccagtctctggttgataatgatatagaggcgagatggtctgggcttttcaatgacatggagattgcttagccgaagatactgtagttcctatctgggttagtatggtgatcagccgcacacctcaggcaccattcttttcttatgaagatgaaggacatttagaaaatgtattaggtgtttcattccatccatcatgtgtcaccgtagatacactcttatgttgtttcaacgcttaagtacatacaactatgtgatgagtgacgacctcagcagaagaacaatattgcgcctaagtctccatgctattaagctaggtactgttattgggctagaaaccatacgacggacgtaccggaaaagcccagttatagggccgttgattgggacctcgattctcgaactgct

SEQ ID NO: 15006 - DNA, 1746 bp, Emericella nidulans
ttcggccgattaccctactaagggataatacctggttcctagttatatctactaggtagcctctagttgagcctggtccagcctatctaaccgaaatcttgttgacggaacatcatgcaatgacgattctaggcggagtcaaacttcagctagagatgccgccgggagtccgaagttgatgtgggattgcgggcgaggtcggacatgcgaatttgcagagttgaagaagttaaatatgcgggtgcttgcttattccggatggggtcggaggttgtcctgcatgtcagtgtccgcattactagggtcaagttatatctagacagaaatacgaatgactggtagaagtatctcttattcactccgctgcttttccttccttcccatgataattacattcgtggacaccgtcagtcgcatagcaggcgttctaaaagtccgttctcccagccaaaattgaacccttaggaaatagtggaatcagaaaaacgaagtcatgcaagtaaaattcccatcatcgcacttttaatacttcttgccctggcgcagaacgtcgctgaattcctccagagggctgcgggtgagcttggtctcggtccagaggttgggggtaaggaagccgtaggtgttgacgacggcaaggaaggtagccttgagggtgttctcgagggtcttggtggagccggaagaggaggtgtaggcatcctggacaccagcgagctgaaggagacgcttgacagcgggagaggcaacaaggccggtaccacggggagcggggataagctaggtatgtaagtaacagggaaaaagggagtgggagtgcgaaacatactcggacggagacggaaccacacttggcgctctgcttgacgggcagagagtgaggctcaccgaggttggtaccccagtaaccgcgacgaacggggagaacagcgagcttggcgatgatgatggcggcacggatggcagtagcgacttccttggaggtcttgattccgagaccaatgtggccctcagagtcaccaatgacgacgacggccttgaaacgggtacgctgaccggcacgggtctgcttctggacgggtttgatctataacgcggcagtcagcgcctgttgctgtatattcctgtattccaatccactctgtggcacgtatcgtccatcctctaattccacgtccatcggcgcaatccgttccgcaaaagaattcgtatccgtaccttcataacctcatccttgagcttgggcaggaagaagtccacgatctggtactccttaacgggcagagagtggaggtagatctgctccatgctggtaatcttgccggccttgacgagacggccgagcttggtcacaggctgccatcacttgttagtgacatatccccgtatccgagcacttcatgggccaaacgagtgatccaactaacctgccattccttctcctcagtctttcctccgcgacgaccacggccacggccgcgtccacggcggtcaccaccacggtctccgcgagagccgaatcctccacgtccacggggagcagcgtcacgcattttgaatataaatgtgccggagtataaacggtaaccgggcgggagggtgtcgttggaggtgttgtcgacgtcgaggttgcgaccttcgatttctgttcgctcgctatccacaccctttggcacccaacgaaaattcgcgggcgggtgcgctactccgtaagcgagacccggccctactgcagcggaccctaag

SEQ ID NO: 15007 - DNA, 619 bp, Emericella nidulans
ccaattcccgggacggcccagaatggctcctagccctaacgctgggccttttcgagttgttctccctggaagaaacctggtggggggggcgggagctaaacgactgggagcgcgacggccctagctcggacgaggaaccatgggtccaaggagccgcatctgcatattgaatgacagttcccaacgagttcagcgaggataccgaatttgagcgcgagccagaatccggattagaagaggctccaatgcggacaaaattgaggctcgaagtgtccagggagacgtcgttggggctggagggcggtcctatggggataatattcgggcttgtattactagacgagacaacgaccgagccataaggttggcgagaaacggaatcgggaggaacagccttaatcgttggcgcgctttgaggaagagtcggttcctcatctgaatacccggcacttgaggcatccatcctgccggcgcccggtcgtcgggatcaaccaactcgcttctgggaaagaagttttgcttgagctgggatcaacctcccaccatggagcggcgtgttttcggcgtcgaaggctcagggattgtcccatcaccattgagggttcgatcagctgctgga

SEQ ID NO: 15008 - DNA, 1450 bp, Emericella nidulans
  unsure (1)..(1450): unsure at all n locations
ttgcgcatcgtgccgagcagagcttcagttgtcattgcagtcaggacctgtgtgaggaggatgagctgatttgcttcgaagaggacaaggctcgctgcaccagtgctgaatgccgttccgttaagcagtcccaatgcctccttaggtctaaaggtcaacggctccaatccaagctccttgagtgccgcgtccgcagtcacaatcttgtcatcctttgtccctccgcactggacatagatatcagggttaccctccaaggcccccgcaatatacgccagcggtgtcaggtcgcccgaagcagagatactcccgcgcagcggcacaactggcgtgtaatcctcattgatcatcgtcgcaagattgcgcacaatatcaatgcgaacagcagaatggccacggatgagagaattgcatcgcgcgaccattgctgccttgacgatcggaatagggatcgagtgcgccgggaggctgcggattatcgaagagcatgtttgccccttgtctgaaggcagaacaacggccgtattatggtgctggatgagcgctttctggaggtcctcgtgggcatttgtacgcgtgtccgcgttacctccaaagcctgaattcacaccatatacgacccgcccttcggctagtcttttgtcgagcagtgctacactggcttccatgcaagaaagcactgaggggtcatccgttactctgacgcgagcgtcatatctatactacatcagtatcgttgagctgaatcttgttggacaaagtggaggatgtactttgagaccgcgacggcgtcgctgagacgcagagagtggccatcgagatggacaggttgggctcctttcgcagcggtttcgagatcacgaaacgataacagtacggattgtgtgtattcggagaggtcgctggccatttcagtgggttggaaatgattcttgcagagagaggcgtctcccatgattgtttaataggagcgaaagtcaggagacggtgagagattccagcgagaggatgcgggctagcagtgttatatagcctgatccgtcaggcgcaaacccagccagccagccacttcgctggaagcaaacgtatcaatgtcaccaagtgattccatttatcatcgagatattatgagagatccctgtttcaaggtctgactggttgagagagcgacgatcagatcgaagattgattcactgtgcattaaagtcttagcctcacgtcataagatcacctgcttgtctgtactccgcgaaggttttcagctattacccgtacttcagtaactgaactcaaaggccgtgctcaagtagtctattaggcgatattaggcgatcgtataagcaaagcagatcggagtatatacatcataaatcataacctgtactaagccaccctgggttcagctatgaatttngtgtcgttttattcagcctcaagctccaatcggatc

SEQ ID NO: 15009 - DNA, 2815 bp, Emericella nidulans
gatacaaatggaaagaataattgaaagttacaataattttccgtctcggtggatttgttttttacctttatagagctctcaggagctgggctaacaagacaacgaaagaagacagagccttgttctctggtgagatagttgatttgtcacctctattccgacgccggccgtcagcactgctctaaacaagtagcatagcagtggcagagcgtcgctcagccttgttaagccacacaaaggctctgtggtggccattgatatatgttgctgtaggcatcgcggcttgagattggtttagtcagaatggaattaagggacatataaatggtagagttggtcgcaatgactcgattaaacgaatcactatcatggtatagcagaaaatatgcttcactctcctaacctgctaaaacggcactgtcaaattaatagggcttttgtctagcttgctctaaacaatgctggggattgcactgtgaaggagagcagattaagctatatcattaacacgcatgtagcatagcggcggccatcgatgcatcttttatcacctagcagtgtactatgacctctagttcttgatcctctctagaccttaccaccatcagggatctgcgaccggtcactacaattgtacactggggatgtggagtctggtataccttggcagtgaaactgtttgggcgacgacacttcccagtggttgaatgatttaacaatacaatgcctcttcttatcttgagcatttcaatgcacacgggaaaaatgggcaagaggtcgtgctagctgtgacagtggaatgacatcctttgctgctattgtagcctgtttgtggtggaccaacagctgccattggtacctgggcttatgaccatatcaaaggaagcatataaaaggcgattgttttcatcagatggttgtgactgttcagcctgcctgcgagcaacgcgtgacagtgttttgtcggttggaactgggtaatagaatcgcactcggcgtccctggacacagtttgaacatagaacttcagcatttcttcagcaatgattgatcctcattgttaggctaaatgaattactgactctcgtatttgtatgttttccttgtcgtccgcagcaggtataggtactgataacggactgacaggactatcgcctggactcggatctcagcaagaccaacaaccacctgcaatacgtctccctatcctactcacagaagactagagtatatttcagcgatcatcaccattcctccgtgtagtggaattcaggcaacggtggtggctattgctaagcctgctaatatccacatccatctcttcttcttccccatcaggactgtggagaggtattcagactgttgatgctgtgatgctaaggagggaatccaacgggcctactaattctccgcgctgagatatttgaagtagttaatttgtggtagattggctttcaaggaccgggtgtcgttttggttggctgtagaatcaggatgcgagcacatatggcttgatttcacataagcggattcctgttcattaacatcgtgactagagctcttacttctcattaactgctcgtaaattgaatgttaggcagtatctagactcttgttcggtaataaactattaaagatacttatagatcatagttgaaacgaaaaagagtatcaaagcctcaatgcggaaaagtactggtgcaactctttatagaagcattaaaagtagtgattggcgtgaagagatgtgtaatatcatgaataaagaaagagagagaacttgagtgttactgaattgtcgcaactattccagagaatagccgccgggtatgctcttacttttggtggtcagaattttatgataactcgcaaaaagatacttgaagttgtattggtctaattccaccgaatagtagtataagctttactccttccttcggtgtaaaaacaacatgtcttgctattctacctgacgcctatatctcggcgtggtttgacttagcttcctgatgatggacctgaacctgaattaatcgcagctctatttaagttcattccaggctgaaccaagtacattctcaggctccatcagggtaaaacttacctgtaatctgatcaaactaaacctaatggtgtactacaaggtaaccaataaccacctatctgaaaaacaatcgtgtgaacatgtacataaataagttgacaccccttcagcagctgtatctccctggttcacaaattacttcatcagcgctgagaaggcttgttattgaacttacccagcgggttatcagaaagcataacccgtcccgattcttggcaggttgggacaggatgggcggatttcgcgcgcgggcttgccagtccatatcgaattaggtaccaggtgggtaagattaaaggcttcaggcttcagtgaagactaaggccagaagtcaaaaaattaatactacacagctggattcgatgtgtcaccacctactactaccaaccggtgtggcttagtccgttgacggaggaaaccctgtttcaccccctatgtcgattggctgtttggccccggggattttttttcaccgattttgggaacaggtggggccctttacaacggcaataggggatagggggggcccaaagcagggggactctgcggtccgctttgcccaggcccttattactttccaacaccctggggatttgaaactggggttaaaaactttttaacctccaatgggggccgtttggttattttgttggcccaattttttatttgtttcgtaaaaaaaacacagggcccatagttttcccttgtggg

SEQ ID NO: 15010 - DNA, 553 bp, Emericella nidulans
cacactgtttggggaatgaaccagatggctgaaccaggggcatctgtcaatcagcgaggaggacagtggcacattatcataacagcgacaacagcttctggaagatgcataaagtattcttggatatcccgcatacatagcactgtggctgaagaggcataacatagctgatcagcacacgtactctctgactcatgcacggttatatccatagaactcatagacggacacgcgtagcgccgggttctcgttatagtaccacacctagcaccgtgtactactcatacactctacgcataaagtaccagacgaatcagatcaacaataccacatgaacactgggtggcagaatagataaccacgctttgacaaaaaaatgccttgtgagaactgtccagcgcacatgcaaacgggtacaccgtaaagctccgaatacacatggggcaggtaaggaacccaaaaagggttaacccggtacgcgattcacgcctaatattgaacggcggtttcgttgaaaccgaccgataccggtctattacccgcaatgttgggt

SEQ ID NO: 15011 - DNA, 2264 bp, Emericella nidulans
tatacggaatagccctaaaatcattaacaattcatagtctggaatacgtggcaagcgcgaccatgtgccatggagccatgagccgtgcgagacaataacggctaaatctagcttcttattctccgacacttattaagcatctcacttctacttccctgaaggagacggaggggccgtggccggatgatggccggagaatggccggatcggcatgatccttctgacgctgctcatcaggcctatcagcccagcagaaccgtcagaaccatctcagatacccggcctgatcgtcatctgcggcccaccggactttccacgggtcaatgtgttcccgatctatgttgtatcgcgtctggccagcagtgcaacagtaagtgcagcagtcagtgccggattagccgatgatggagatacgtactgaacgtctcgcttcccctgaaaataacagtttgattcttggcctcgccaccatcctgcaccaagccttcggcggcccggggcttggtccttcagaggtcgaaccctggcaaccccgtgggtggctgaatgcaacagcggctggagaaacagtagagcaatttgtcattgctattccaccgattgatccggccttttctctaccccttgctcggcccttatgtttcaagtcgacagggcttaagggctttagggctctcaatagtccaatggacgaacgcgcattcaacgcaaggggcaggtatctggcctgccccggacgggcttcccttggcccagcccaaagagcagaagctaactggcaagctggcccattgctctctatcattgttctaggattcattctattcggagtaggatccgttctaggatccagcgtaaaaaaaggcaacttgctcgtatcctcaggcgccgtattcgaataattcattctggcttcctccgaaattgataggctaaggtcgaccagacatcaggaattaaacttttgcatcaatctgtccttacatgcttctggaataggcggacttgttcgggttatctccttttaggcactggcaggcttgatcgtcggcttcccatctgttcttgacacccgtgatttcagttcgaacatgcgggcgtgtacgatataagaaagaattggccgcggaacagatagatccttccggtggatcttgctgcctttcttgttcctggtagccgtcaggaatatatcgcgagtgatggcgaccagcgatcgtcccgctttgttggtccgacaagacatgatggacatggaccgatcagcagtcgacttttcctcgaatagtccccgaattctcgccattgtgggcagtctaacggcctttgctgggttcctggttctgttgcggtgctatgtccggctcttcgttctgcggcgtttctacgtcgaggatggaatcatggttgcttcaatggtacgcttcgcggtcacagattgagagaagagatgaccgagggacaccctttactcacggaccatacaattagatctgctcctttggagtccttgcatgtttcgtcggcgagagtcaccatggcctgggccagtatatggccgccatcttcatgaacaacgactttgggatgctaaccagatggttttggggccatgcgatcatcatcgtgttgggaatcagtctcgtcaagatctccattgggttctttctgttgcagttcgcagcccagaagaaggccctgaagcggttcattattggatcactcggttcgattgccagacgttgctcccatcagcacaaactaacttcgtctagtatttctgcttctattcacgatcgcctgcatgctgaccttgatcctgcaatgcatccccgtagaagccgcctgggactcggctgtcagggcacaggaggggacaagatgctactcgtctgcgacttacctgaagattggcaaattcaacagcggtatgttcgaatgctctgttcgtaatcattatgagaaaaattcagtcctgacacgccggcaagcaatcaatatcgtcactgactttctctacgccaccctccctgtcttcatgttctacgatattcaggtcaaccgacgcacaagggcatcgctcatgtgtatcctgagcttgggctacttgtgcgtgtgacccctctaagaaagccagctttcaccaaatcctaacactcgcagtgcctgcgccgccgccatcgtaaaagccgttctccagagccgcgtctacgaggagaccgagccgtaccgcgacgcaacataccatatctggaactcagtcg

SEQ ID NO: 15012 - DNA, 448 bp, Emericella nidulans
aaaccggggggcccaaagccggcggccggtttgggataagactgacaggtctttatcagggggctcgattgggcctcggtggggattcgtaacagagcggcggtctagctctacagaaccaaacacatggggttggcacagcatcatccgaccggcttgcagcaaccataccctcatcctgtattccagcgggttgcccatctgatacgaggaaggctacaacccgcatgagggttgggagcaggaaagacgctccccattatggatagaggtatacagctcccactcttatacaacggagggcagttgtagggctactaagaccacatagggctctgtctgctgatccataattgcgcgctcagccgattgttggaggggaacaccacctggatagaccgggctggactttcaaatggaacccatgcagaaccgatgactaaatcca

SEQ ID NO: 15013 - DNA, 2538 bp, Emericella nidulans
gttcgtgcccatcactggaaggtatgcgtgcatgcccaagcaatgccctgagggtcttcatattaccgaaaatatgcttttcaagcagcggcatcaacagcgcctcagattcacggcttataacggttccgaagctcatggtgaacccttcgaagattgctcgtcgtagtccgtagatttgatcatggtccgcagcgtaaataagcgcacgaacgagcgttcgaatgctaaagtgtggtcgctggcccgcaccgtccgttagcttgttttcattactgagcttcttagcttccatgtaaagctgggcaagatccggtgctgctctggaatcgctcagacttaagtccccaaggtacttcttgattaatgacaaaaggtcatccagctcattatcgggagattgcacatatagttcggtgaatctggatcgaagacccggtgggaggtcctttttgcctgcatctgttgctgggttcatggcaccgaatattcggaaatctggatgtccaaatacccgttctacatcaccagcctcggaaagcagaacggagggtgaaccctcactgccatgatgcaagaggcttgcgatgttttcgagtgtatcgggtgacgcgagattaacctcgtcaagaagcacccactcgccattgcgcagagcacgaacaatctttccctgtacgaaagcaaatgcgaacttggcatcgccctgagctacttgcgcttcaaagtcgttgagctgtgctgcaaatctttcccatctttgtcgcaggagctgatatttgggtgaatccagttttcttttcttggtgggctgttcaccttctgctggctgggaggcaccgttgccggacttgaagacgccatctgctaaccgaacagcttcgtgccagtgattgactaagcgcacccaattcccgcttgcaacattctttgcaattgaagtgagaaacttctggttcttcttcgcagaaaatgttaattcaaacaaggagttgaactcgtcgaacattggaatggccattgtacgaatgttgactggcttgaagccgcctaataaatcagaactctcactttgctgagataaattcactaccgtgagtttctgtcgcatcaatgtagcaagatgctgtataacggtggttttaccgatacccgtctctccgacaagaagaacaggctccgccatttcgactgaagcagcaacttgctccattaacttcaaagcggctctcgttgtggcaaagcgagacgtagcagatgcaaatttggaagctgagctacttggcaccttgatcttgcggcaagcctctctaccgagtacgaggctgtttccctggtccaatagcgctggcgttcgctcatgtagacagaatcgggcacgttgcggtgaaatatggagtgcttccgcgactttcaaggctaacgaatctgataacgtggtatctggtaggtatttgaggaatatatccacaacgtcgagaaagatctcgtcgtcaatcccttcaggagtggcttcgtatccagtcttaacgccaagtcgctggagtcgcttgttcatcctactacagagtttgatgagatcacgcaaacctggtgtgcgaccctgggagctttttatggcgaggcttccatggaacgaggagcagagcttttgataaacgttcatgatcgtgaccactcgacgttcgagcagaggaaacttttgcgcaatcacgtcctgtacctcatttatcgtaagcggatcaatctgtaccctgttccagagtcggcttccaaggatggcagtactaggggcgacctcttctccggcgatattgtacgacgacttcattgttgcgataattttaaagccttccgcacatttaatgcgctcccgtctgctagctatagtcagctcgcccttctcaatgattggaaggatgagaccgataacttcggagggagcacgatctaggtcttcaatcaatatccatcgaccttctctcgcagctttggtcagaacaccgggttgccatgcaaagcttcctgttgccggggaagttgaatacattccaagaaggcttttggcatctgtttgctcattcaaatgaagagtcaccattgattccaactggcccatagtacccgcaacgtcatttatcaggcttgtcttgcccgagttcggcagtccaattaaaagaattggctgaggagtaatgagggcccctgcaatccgtcgcaagttacttactgctgtaggcgttttcacgattgcggatggtgtgagtgaggtatcaacctggcgagggatcaataccccagagacttctgcggttcgagcagtgaggaattcacgcaactgctccactcttgaaaggctctcagaatatgaccgcgtggcccttatcgaacggagttgtttttccaaaatttcccaacggcgctcttcccaaagcccgagacagcgatagtcaattttgatgccttcccaataaccctccactatatcgtcgccacaatgtgaccatagaatccctttcgtcgacgcatcagccgcac

SEQ ID NO: 15014 - DNA, 2463 bp, Emericella nidulans
aaagttcaagacgaagcttgacgatctcaaaaagcggacccgagttgaagcgtatcgacgaaatcgcaagggcgctgcgggtgggaatttcggcgatgagattgggaggggtggaaggcatgtgcatcagtggggtaggtcgatactggaccccgagacggggatagggacgaagaagtgtgtagattgtggaatggaggttgaggagttggagttctagtgctgtgcagtcgacactggtcttctcgtcctggcttggcgaattgtaggccggttacgcccttaatgcagcaattattgctccggtgacaggacctaagctagttttcagcttcacaacaatccccgctgttctgtacttgaagatgtagactttaatgaatgatgccaaagcgagccagccgatgagtaatattcctatcatgtcgagctacatgcgctgcgtaagatggtgggtagactctaccaaaacacaagcgaatgatcagatttcgtcaagaaacaaggtatcgtagacgccaccgagagtaaaaggagccgcgtgaatcatcaaaataaccgatgggttgcaatacaaaagagaatatgaagatgacatagcttatcccccgacatttgtatcaggaggtccctcgttcgacgagcctgaccccgccgaaatcagggtcggggcgacgcggcgcttctttggcggttgcgcctgctctgttggggtcaaaccttgactctcttccttttcggactcactccgcttccctaaaacagtactaccagcgttgctcgcttcgctctgagacaacggggtttcaggaggtgtggtaagcggcaaggtagctggtggttgggcagagtgcgtcgcagtgactagcggcacagatccaagagttggtgtaggattgttgacaacggtctccgcctgttgagaggcgcgctgcgtcgcgatagatgatactgagttcgatcgcgcagggcttgcaggtgcggcggactgtgttgaaggtgagccggcttcgtcgggtccgtgggcgtatgagcgctgacgttggtcccgtaccagtcgtctgtggcgcggatagtggtgctgtgtatggttgacctagttcacccggcgcgaaagagagcgtagagcaaaagccgtcagaggaactcatgattaacgttaatccatcattcgacctaaatatcgttagaacatccttcagactttttcaggttacttaccaggccaaatccgtgaatgtagcaaaatgcaggttgctcaccacgcagagtggtgcttgctgctgggtgtcgtagaccaaaacggcatcctgggtagctactgcgtaaactacccgataaggcagggagaaaacaggaggtggaagctgattggcagtaggggactcgaagggtttagcggtgatattgttcttagactcttcgccagtactagtagccgatgcatcctccgcagacgtagtacctaaggtaatatgcttggaaggctcaggtgcctctcgaagagtatagagaattggtgaacattttaccgctacagacggttttttgtggcctggaagatgagaaattgggggtctgttaaaccctgcccgcgtatatatgtagactgtgttgataacttcgtcaactgtctttcccggatctgtcgatgaaacttgcgacgttttatactgtcccgcaggtgtgagcagcagacttccatcaggggtgaaagtcagccgtcggaagaaagacgtaaatgtttcgttagcataaatgttcgcgttcctgacaccgagcccacctaggcccggagacgtcacttctaaaggtctgacggcaggcaggggtagggacggcgctggcgatgcggaacggcggatgtttggtgaggagctgaaggaggaacggcgactatgcgacactggcgggggatccatgggcagatgcgaggtcatcggtgttcctggagtcgaaggagcaggagaggcaacagctacggagttgctagtggctggttgagatcgaaccgagagatctaaaggagcagggctgctgcgcgaaatccgtctggccggtaaatccatcttgaggaacttcccatgtgaggtgagggtgaattgcccatccttcgttttcaagctgtaaatgtggacggatctatcagacgattgcgtcgcaacgaattcgttgagggggtcccaggctactccttggacgtagtgcgaatgctcagcaatctgccgcaccatttggcctaattccaaatacaccatcagtaatgattcagccacctccacatataacgggcctaccagtctgcgcattgtatattctagcaatgttatccatgctgccggtgatgatgaaaacgccatctggggaccaggcgagggtcgaaaatcttagcacccgaggaccgacacatatgcttgaccccgcacgtcttcttgtcgaccgctcgaaccttttcaaaacccg

SEQ ID NO: 15015 - DNA, 2664 bp, Emericella nidulans
aaaaagaataaagaaaaatgaaaaaaattccacaattaataaataggatcgtggcaaatcatggaaatggaaagtcaataagtgaagggataatttggggcaacaaaggggaaaaaaaaaagttagggcattttctcaacgaagtgatagagctcggaagcttccagcccgggaagtttaatacgaggtatcaaataaacaaaaatttatcttttagaacgtcaatgtggggattatagggttacacttcagggaggcccagccgaggcttaaatatccaaaaagtatcgtgcgtctacagtcaagtgtttgcaagcgtctccatctgtgatgactatcctagtgttcaggtgcgcacagtctgttcaatcatataaccggcactttgtattttctgaagccgttgttcatgatttgactcgctagataccagctgctggctgaactgcacgtcctgcctaataacttccaaagacacagagaacttagccccattttaggctgcatcgggtgctattctgtgactaagcttattcacgtgactcgcttccacattttcgtccacaaaatccactttttgacgcctaacaaccttcttctctgtcaattctggtgagatgtcgactcaaacgccagctgaaggttgaagccatctcatgaggacaatcctcgaggctgaagcgttccgatcagcaattggccctgtcttaggcgccccggttgcatgatttgcccagggaagctgatggataaaagatgaaagccagctagccaacactggtcagccttttggttttcctcaaatactgaccttttttcactcaaggtaagcaaactttgattctcctttttagcaacgcttcttggatccattcctattatgatgagcaccataccaaaaagcatagttcacctgaaaaatcatgaacgacaacagtaccatcaccgtatatatctgatactgctctttcgtctttattttgaccctgcttgatgcttgtcctatgagctgacgaatgaatgcaagtctaggtctctcagatagttgtcactggtagaaaatgaagaatatcatcttggttcctgagtcgaaatctccgaaatttttcaaattagtggtgctaaggatgcattgctgcccaacatgtccgtgcttctctcttcagcactctcgtaagttaatcagaacgattaagtcgatgcatcatcaccttcaacaacgtactttttgctcgactttggaacccccggtttgatgcgtgatgggcttgcagcgcggggtctgctctgacacggtgacatcttgaccgtgagatttcagcctgcgctcctgcagttccgcgcgttgacgtggatggcctttcaaccagaggatgaagggtatcacagggcaggcggggccggggggactgctagttgtgctgctgactggctcagggttgacccggccgcttcccatagtttcaagctagcctcatttcgccgtgagactgcatcatccggtcgggactactcgccaatgatagttaataggggcaagactgcttcaccgctccctcgaccaaggaaaccgaatcgggacgtgccgttccctctgaaccagtcattctcactctcagggccacgtcaagcccgctggagagtcctgattggggtgaaaaaggactgagagtgaggctgcctccacttccctggttgctaatgctcgctctgccgctgtgcgtgccctctgtcatctcatgtgctcgtcgctactataaggctgcccaaccccccctcactctcgacttttcctttttacctcaactccctttttaaccagaacctgatcgaccattgtcaccttaccttgccttctacttccaaggactcgatacattgataccacttgataccttcctctttctcgcacctttatatatactcttctctacacagatttgtcacagtcaaatcttccacttgctctgctctgaaggaccgtcttgttttctcggcagtctcgcccgtggatatcttggacacagttaaagcctcggagattttcccattggatttcaatccgtgccctggataggattttgtttctgtttctttcatttttatctactcccaggcttcttgtctgagcagttcgacacaacaggtagtcccctcgatcatttcttactcccattgttttgtgcttttatttcattgcaacatgcgcgccactccaatggaccaccctgaggaccatcgtcgaccatacatagcaacaattgcctggatctcttgaacatctccttttgcctctacctggatcttcggtgccgcatcgcggttacccagaatcttgatgacaatgatggccatgaccatttgtctgcggcagccgctgcgagactggacactacgagtgttgtttaatgttggcacactcgcttcgacaactggactatctttctactctctggatttaatcacctctcactcaaagcctggagtggaggatttggacattgccttatatgaaccgctggttgcctgatctgtgacttgatgacctgatgtgattacctggaataaaccgaactccggccggagttggagccacacatggaccttgaaagaactacagaatatgaaccagatttctcatttccctggacttcaagctgctct

SEQ ID NO: 15016 - DNA, 531 bp, Emericella nidulans
ccgagatcctgggcagcaaagggtgacaataatcctcatgaccctgtagtgccggtttcttaacaaagacaggatgtacatgaccataggctggaggcttaacctcagtgagtaggtggtgtactagcattgtgtcagtcagcctagctacatacacgtatctgtggctagcacctgggagagggacacctcacttctatctatacacacatctcatccaaacattataaccattatacatgctcctgattatgcctaggtaactagacataggcgttacccctcatactaccctaaatgttacccacatgatattcagtggcactctaacctttgggactacaaatgcacacgatcccaatcgctacctgacaggtatctgaccacagcattttacaaaccgtatgtctagcccggataccatacaaactcacagaatgagcctcttgatgaacacacgccttgctctgtaagcctcaaacctgaccaaggcaagactgagcacaacatgttctaccacagccagaaccc

SEQ ID NO: 15017 - DNA, 4555 bp, Emericella nidulans
atcaggcacttgttggagttctattgaatcttgctcatataatccaccagttccagtcctcaaagtagtgggtggagtcgagagtatgtcctgttagtcaaatctggcaaagatagtgggcctgagccagggccagggccagattgccagcacgaagttgtggatgcaattcgcaccgagagagagacatgttcgagcagtacagctgaactcagagaataacatcttagagatatcggctattgtgaatgataagaacgaaaagatgaaagaccagatatgcgagatgctcacaagaccaaaaagagactggagccttttgccagttgatatgaaacatgtcgacgaggtcaggtctgtgctttctcgtcggagggcaaattatggcctccgcggacagcttgggtgagattagggtttgaatatggagaataatggttcctccaccgatgaaaagacgatgaggctgagatctcgagcattgcgttctcccctgatgggaaacagctcctagccgctgatgcttataccggcaaaatatttcttcttgatgtatcaacgccagaaaaatagttgaatttgctggtcatgcatcagatactgacagtgttgcctttgcacccgatggtaacagatttgcttctggatctgcagacgagtctgtccggttctgggatatcaaaacacaaagctcaaaggaattgaaggggcatacagacaaggtatcatcggttgcattctcctctaacggcaaataccttgcttctgagatatccaatagtatgattcgaatctgggatggagaaactggacaatacctgcggcagatcacaggacacaccggcgcggttagggcagtggccttcctgcagcacggcaatgacaacattctcgcatctgcatcgaacgataggtcaattaagatgtagggatgctgtgacagcaagccttcatcgaggactcaagcgtcacacaaatacaatagtcggtcatgcgttttctgcagacagcagacaaatcgcttcagcgtcatacgatagaaacgtccaaatctgggcgctcacgagagacatcatcgttcactcagcaaccagcaatgtcaagctgtggcattttcaccaactggactgcattggctgcgggatacgctaatggttcgatcagggtatgggttaaggtctaaagccgagccagaaggctggtctttggcaatgaaaatggttgcagagagtggaacacctgactttggatattcaaccatatcatatctgatttgatactctagaatgatagtttttggatgagacttttctttcccaagacatttggtgtttgaaaatttttaaaccccggcaacagttcacaaaaagcaatatcaacccatagctcttgcatgtacgcagtggtcttcttcatgcttagaactttgataaatcaccagataggcacctataccatccaagaaggaaaatacggagtcttcttcctgcctgatgcggacgttgctgttctaaaacagtaaactgggtaagcaaagtagctcactcgataattgtttctaacccacgcttgaaagcggctgctgtaaattcattggtcttcttacgttgcttcattgctttttaattgggcttgcatgttaaggcatgtttttagcatgtatccgatggtgtgcctttgacaaggcttcagctctgcctcgggaagttctgtcactgtgacttcgaatacgaggtcgctagtcaaacatgcagccacacgggcgggcatattttagagatactcgtggattaaaactgatggatgttatattgctctggctctgtgacacttgggtgttcgtgacaggttccaaatatttacttagcagcgtgtcagatggattcctgcgccgattcccgcactaatgatatgagccctcgacagactgaacaatatacctattcttacgagagtcttaaattgaagtgtgtcatattgctgcttgttgttttgccgtggaacctggttttctactgtgttccgtttctatcagcacgtcctcttcagctcgcaacgaatctataggatggtcattaccaaaagaacttagcacctctcagggagatatgaaaaagacctcagtcattctacaaaagaatcatggattagcagatctactggccctatttacagtgaaaatggaacctggagggaaatgaataatgcggacttgcatgtcattaaacggtccatctagatgcaattagcattatggggcatagcgctcggccttccccgtcctggtaggaacttgcacaggcagtacttcagctcggccaccgtatacctagtaaatggtgttactacctctcagggtcgtttacacgagtaacagtcaatcgggtaccaacggtgacggtggaacctcaggttcgcagatgtgtcaacttcttcggttatatgattatgtcctgatatagatgccagtgaaagttagaattggtcagtgctagatttgaatttccggccaaattggactcctccatcgtcagcttgcagaggtgctcttctatctatcagcactggcgaggagacttgcgcatccggtagttgggactgagcggcgccatatggcaatgggatgcattcagccatgaaatgatggccaaaaatcgacgtacggccaatcatgcttatgagacgacgcagactgtggtccgcctagtttatctagacctgggagcagcttcatgtattcacaattgtaggctaaatgaagcttgactgaatgaacatctgttccgctcttgggtatcctatcccagagtgtaacatacagtttggatggagagttgctgtcgatgtatttataaggtggttttcatgtcaatattgaggtagaccagatgtaggacaggattcacacactgcgagctcataacccccacaccacagacttgggcatcaaagttcaactcttcagcgcccaagtagccaagggaatcacatatggtcacttagaataatcgtatttgggtacagtcttggctatcagcgttgtgctcaaacaacactcagttttctggtctgtctctgtcacagtgtaatcgctgtccaaggcgccagtcatgaatgcgaagagtaaaccgaggagcaactaccaattcaatacttacccaagtacggcgcctttattacgaggctgaggcgagactcaagtaccgagatgggcaaaatgggagggaacgtgagaagaaagccacagccttgttcactggttatttagccaagaccctgcttaggatctaaagcggagaatcactcatggctagttatctctccagactcgctgaaagctcctagagcttcaacagcccatatagcagttatgtgcagcgccagggagaccagagatataaggctggggcttctggtatggccaaccacatccagtaataaagactgtctaccatcatgatgagtaaatactgcacatttgatgatattgctgttcaacaaaagacaatgcagatgtgggctaggcttaaagttctagctgatatcaccttttgtttctaacctgcactttgtgccttccacgatatgagccctctttttttcattattcccattaatttcagggcgtccagtgggattacaactatgcttccatgtttccttgtattggagaattcattcattacaaggctgattgcttacccgtgtgcgctggcaatattagagtccagtgtctgccagactgccaaccttcaaccgctcgcagttcaactttccaatgagtttcaacgaggccccaacttagatcctagtgtccgactgattcatccactatcatagccagcaaatgataagtggccatacaatcccgttttgggttgaaatcacatgcttccagatcttgctgagataccgcggtgcttcaccagaagagatgaccaaggttctgttccatagcgtctcatcccaaagtgcattgacaataacccggtccccggcttttcgtggcaaggctattgattaaccgagagaatgcttacgttattcatagaaaggttttgaattcggaagtccacgcacctcagtaagtggcggggttctacatcgcctacgtgacttcactagctgaaatggaatataaagaaggggccactgtatttgggtgtcttattcactggttcaagcttccaattggtgtagctttttgacctatatatatcccagaaatacgctttagttcgcgagttagccataataatcatcaactctaaatttgccgcgagtaagctccaccttcagcgctgtgaaggggcatcgcagtcgtttatgtacgcccgccaggctgagcggttgggtctcggctattcccaatatagcgagccaccgacgtgcactcggtaatcagccaaatgtgtattggaagacttggaggaagttgtggtatgtgcagtcgaatattcatcccagatatccagagttgtgcgctgaacgatgaaaggaaagggacggtagccgcgagccattgaaaatgtcgtatatatgcaagtcggcagtc

SEQ ID NO: 15018 - DNA, 1616 bp, Emericella nidulans
aaatcaatacagtgaagtaacatgctggttggcggatagctccgacctcggcggtttgggagggtagggcgccataaggccatgaattaggtgtatctggcccacaacagtgaggataccttgaggtacgaatgagagaatctcaacaaggcacgcctggcaatatggatacctgcggttacggttagcctaaagcaggcagtgatgatgctctttgcgtttggctgtgtcgcagcggagggtctcggcgagctggaatgtctcaaaagaggaccctatcttgaactcatggatgatggtacgaagcatcggttattttttttgtcatacatcaatcaccatccaaatcccggaacgggtcagttccaggttcagatgtaacatcacctgcaactggcggctcagggctagcctcaaaaagcactagtatatgcatggagtccagcgcgaaaggcttcctactgaacatcttcgaccgcgcaaaagtgacagtggctgggtacatggacgagagattttgaggtaccttggctcagtcaccattgcaggcattggccagatacatagtcttgcaaaattcagtccctccccatagcccaatcgttgtctttcgtaagtctacaatgtctccaagtcaggctccgcattacctctacgttggacattgtgcgcgcctcaagtctatcaaggggcacccgagtcgtaacgaatctcaacctactactgtgcctcacaagacgttgtgtacgagactatcgcggccagaatggcagctcaggcaacttgagagtttgagacagcgagattaagacggagccgcaaggcgcgtatatgaggccaggaggctcttctgacagtaccgttaggagtggcgctgattgatgtacaactaaggtgccatctagacagctataggtctgaaatgatgcggttgcccgcagaagcttgccgcataccttagagactcacgagatcagaatccgtagaggctattagctgcaatatgatatttagtgcttaacatccatcagcgattgtagacccatagcggattggggctactttggtcctaaccactgtatgctgtcttcgttatttatcttttttcgtgactctaggactgtttgaaagaatccaagttagcgcatcttgcgaggtctcgtttctacttccggtacctattagccgagcatgttgaaagctgcgctggaatccgtagtcaaatctccaataaacatgaaacattgtgcaaatgaggaagatattctgaagctgcgaacattgctgagggaataatgaacactcatcctttccaggatgtgccatacatcttcttgaggaccatcggacactaccttccgaagtactattcgcggatgtatgtacaaggctcttgcatatgctatcaggtaacctatgcatttacaggtactttatgccacagttagttaccctgaaaacacactggcgtatgaggcccatgcttaataggtagggtcttcagggcctcctttgatacatgcctttagcgatgaaagggcttgctctaggtcagtaaccacaggctcagctagtagctagtaaataaataaaagaagtgttgtgcggtgcagtag

SEQ ID NO: 15019 - DNA, 2528 bp, Emericella nidulans
gctcagcagcccctgtacgggtataatatcctagaccatcgaatcgcttcagatttggtcgtctgtgaaccgagtccagaacgtcttttatgtacactgtcgccctgcaggtcggggttataaagcaaagctcctttatggatagagtgctccgatagagtgctttgagacacagtctcgactcttgtgcgactgggccatagcccatggacgcgattggtcgaatatcgacgacgtttgtgtcttaaaccggcatgctccctgctctccttgcagcgcgagcgttgacgctggagcactaaggcagactagagggttcatgcaggtagacgacacccgccgaccatagcaaatggactggtcagttctggagaaaataagcatcagctaaaggagctatgatgcgagctatgatgcgagttatgatattgatgaactgacgtgcgaataaagttgacgcattcctgatccgtctcgtgttcttctggcagggacgcaactttcggtcctacattcttgacatgaagtaaaagaataccattaaacaataatcgctacactcgctataaaacctaatgagcgccatacagaaaataccctatccaaaccgtcgcaccgttgtagtatccaagccgcatcaaacataaacacatgaatcggtaagactactgtctagtatggaatgaagtcgaaccgcatccgatctgcgaccattagtttagatttcaacataaacggaaatcgacaaaagcggaagccgcgtacctaggaaccgattccaactctcattctcatccaactggtgagcccagtactcctccaaaaacttcagagactgcagcacattcggcacccggatggtatcatacaactgcgtcaggagctgccggacacgatcccggtcctcaccctgtgcctcgcagcccgcgatgaacagcggcgttgtgagcatcgtccacggactaagaccgggcgacggtccgatctgttcggtgcattcgatgatcttcttgacagagcgctgcacctttggcgaagacgccggtgtccggcggagtcgacgttcaatttggatcaatgcgctgtgctgaaatgcggcgttgcaaagggtaaatcgaacaatatggtcgggagacagtccttcgaccacacctgggtagaacgtaggcggtgctcgctcaccctcatcaatcagctcgagaacggatgactccagtgctgtgacctcctcggcatccgctggttggtctggcggcgtctgccaggctgctgctccgatgcctcggaataccgccgatagactgaccgtgaagccccagtaatcatcgaggtagtctggcgtctctggcgtcggtccgacaggcgtcgagacagtctggcacgtaacaccaccaataggcggaccgttccccgtcaacgccgtcagcgaaacaatcgatctgtaccaacgatccagatacctgcggaaaccctctgacgaatccggagcccacccatcttttttacgagccgctatcattaacgcctgcgcaccctcaatatgcgctcgccatgagttaggctggattgcacctgagtggatctccgccagacatagcgtacgtgccgtcgccagcagcgcatctgttcccctcgtacccggactctgaagctccttccggaaatgctctaaactcatcgccatcagtcgtgcaatgtctggtgctgacttgacgttctctgtgtgattgttcagggcctggatatggattgcagacagcgccattgtcgcgtacagtaaggacggtgtctgcaaggccattggcacgagcatgcggcagatctcctgctgcatgcctgaatggcaggctgtgatttgagaagcatcggagaggaagtgatggaggagagatttctggctgctattaagggaggagaacggatcgacggactggggtattgtgatggtgggaggcgtagaagatttgggtagagtaatggctgtaggtgtagagggtacggtgactgcggtcggtgatactggcgatgtcggtgaagtcggtgatgcgttagcggtggtgtagatgaattctccaggagagtattctggcaggtatttcctatcagtgctgatctaggcacaataatcccatcaaacctacccagcttctgcatgcatgccccaaatcttgacctcgagaaagcccgacctccccactgcagctgcatcgcataccggcactgggtccccgcagacttacaccgaccacaagtaggacgttcctcatcacatttttgtcgccgagacttacatcgcttgcagccgccgaaggatcgtgacattgggaagggattcttcttctctcgttgcgtgtcaggggaaggatgacaggaaactcgttctcggcgtgcgcgatttttttctccccgcttctgggatgcctcgcgagtcgccctcttcaactatgtggtatagcgaaggacaatacgtgcagtagatggccccaataggctaagaagggagagataaaatatcaaaaaaaaaagca

SEQ ID NO: 15020 - DNA, 545 bp, Emericella nidulans
tgcatgtagcgttccaatctcctgcctcatacactatttttaagaatctcacgcccaagctcaagagagcatccaaaaaacgctggggcctttccattattcttcaccatcttactatcgccactctctaacaccatacaatgatgatcaccctcatgctgaattcccgctatctctagataacaaatcctacatgaaaccaagccaaatctttacccttccccactggatacccaacaaaaattactcttccttcaccatctatccatctgtcatgcatttcttatccaacaaatctcccacgctctactcgtattgcctcaccgttcacagatatcaaaacccccctcctaatcatatcgttggataaacaggctatcatttccttcacttctgcccaacatactcctggactaactctcaaacaggttgctaactagcggctcacccccgatgttggaacataccaagctgaaaccagaataagctccatgttgcattcccacctaatatttaaaagttctttccccttttttcaatgctgg

SEQ ID NO: 15021 - DNA, 2290 bp, Emericella nidulans
caataatcgaacccgccatattagggtcagcgattggagatcgatttccccataagtcaccatagaagaagatatgacgagccatatacgagatgctcggcgccttttgctcagtcatcatctctctcagatgttcattgaggtattcataaatattggtgttgtaagattccgcaacagaaagcgcctgattgtaggcggggtgagtctcaataacgtgctttagcagctctccggtggcagactgcccgccctcggccatccagaatccaggtatgattgtgtcgcggtatggaccccaaacacctgggacgaatacaggctcaggggacatggccaaatggcaggttgacgttccagcaacagccgccagacgggaaaacgcctgagtaatatcattctttgcggcgtccgatgtcaattgttccgactcgagttcgactttggcgccaacagtgccaatccacccggcataagcatcaatgacgccactgccaatggcgattccagcgggcaatcccagatccgctgctgctttttcacacagtttgccaacaagttcgcccgcactaagataatctccattctaaaataacggtcagctttcagtatccggagctatggaaaaaggctcaccaccccgtcgacgccgcccatgcgcttgaaattgtcttctgtgagatccttcaggccgatttggaccaagaagtcttcctgccagcctttaacgctaccgtcaacaccaacagggacgaaaccctgtttgcaaatgacactgcagtagcttcgtttttcattgccggtggcaatgtgagtcaaagcatcggccaggtcgtaaaacttgcaatcagcgaagagctctttgggcatattgttctttagccacaagaccttcgggatttccatctccacagacattttcccacccacatatcgcagcaggttgtggttggtcgcattgatcttctcggcttcctcaactggtctatggtcgagccataatatcacattgcggtcagtatcgaagttaggccctgtcacagatattggctcatcagtgacattggagaaaacagctaaggagcatgttgcatcgaacccgattccacgcactgtctcagggtcgatgttatgctggttgatagcccgctgaactgcaacacagatgcagcgccaaatatcagttgttgattgttcctgaaacgcctacgtcagtatagatgtaagtctttaaaaccatgtgtgatacctacatagtatccggtctgaggctgccagagcccaatattctcggaggccaatccaacaatgtctcctttggcatctataatacaagcacgggcacttccagttccaacatcgattccgatgaaatgatcagcttggaggagaatctcgtctctcgtatctaaagaggcctgtctggatgccttgcccatgggtcgatgaaacggaagggcaactgaagccattatatccgataacacgaggacgagctgtggattaaccggtaaactgcaggaccgtaatctgagctggcagttggtaccaagttgaatcccagggttaggagcttacaaggccgagaactgcgagactaagctttctgcttatctacccagtagatagaggagggaacaagaggcaaaaaaaggacagaagcaaaaaatatccgaggaacgggcagtcacaggaaggggcagttgtttataagtactgtcaagggaaggacacccagagagaacgcccaatgctaagtaaacctggttgtttgtttgggctggttcccatgcttaccgccaccgaccgcctggaggcaggtagtccgcactggtcgtatgcattcgtagatcaggccgtgaccagatagtggggtggcgaagatgctttggtttacaaagtacggagtactccagtgtccagaatgggaatacatttgccaagctccagtgtgattcgatggtaagtctttgggtagttgtgagttaaactataccacgtctgcccggtccttttcaaggatatattctagaagcatccgtactacaatatgcagagcacctccggggcgcacagagggatttcctggccttgtgaaatcgtattctgtcagatgatacattgcatcctccagggatttgaatcaacccacgtggccattcctggggaggagatgaagagtccagactgtggtagatcagatttatgatactgtatctatgtatgtacgtgcacgggtgtggggcttcaggaccactggtaatcagccagactggtcaggccctggcgg

SEQ ID NO: 15022 - DNA, 2380 bp, Emericella nidulans
gttatccggccgggagtggcagtagacagggaagaagtacgcgagtgcctgtcggagtgcgggattctcgcgagttcggggatggaagaaggagacaacgagggactgtagcagtgtttcgatggcatgttggttgaactcttgaatggcatcggggatattggcggcagatggagtaaaaacaccagtgagcagaagcttagaaagagctgtcgcagctgccgtttgtacagacgcgggtgaatttggtttgagagctctggaaaagaccttaagcagtggcttctggaacgccggtggcgcaactgtctccttatcggcctgggtaacgggagccagcagcgaaggatggctagttaacatatcgcaaaggatatgaatagcagtgacctgtaggttttcgtggcccttgctgtaacagtgaataaacagcgtcatattttcttctgcgagagtctaacagagaggttagagaagaagatgtatttagtaaggatggaacttaccttgtccagcaagcagcacagcccaagacattcgagaccgcgctctcgaattggcgcctcgtggctccgaacagcaggtactaccaagttattcaacatggtcaccagattcatatttgcttgcaggttgccttcaacattctggagcatgcaaagggcaatgtgcagacacttcatattaataacgatttccttgaggaccttagcctttgcctcctccttgttgaatggcttgtcatcttcactcatcggcgtttcggatcgttggcggctgctggcatcatcgctaatctcagactttgcagaaacgaaactatcctcggtgctgattgtgtcatgaacttcagcaatggcttccagaacaacactgcagaattcgctctctgccgcggcgtcgggcccacaaacacatctcagtgtctcaaccgcgagcttggtcgattcctgagggagctctgggacagcgagagcctcacggagtagagaaaacatctttcgccgcccaacttcgtcgctgtagtctagtgtcatcgcgatgtgaagcagttgctcgacgataaattcgatttcgacggtatcgtcgtcgtttacgtcagtagcatcctttgtgagcttcttgcgctgcagaagctcggtcatgtacttatgaagatacattgcgagggctgtaacgactgggatcttctcatcggcgaggctgtcatatttaccttcgttttcaacccggcaaaagtcattgaatgagcgaaggaggaaagcggattctgctgtcattgactcccagaaggcttcgtcgaatagtaccgcctctcgatagtctggtcgaccttcccagaaactgcgcatagcttcgtgcgctatgccggattccatgcctgagttcaccacatcgatacgctccaacaactccagtaaagcgggaattctcggttccgagcgctgcccgaatttctcagggtcattgttcgtgccagcgatatcctcaatccagcggtcatagaacaactttccagtggccttcctcacactttcgtcgcgatcacgaagaccccatctgagcaacttttctctcatggagagagataaatgtcggaaatctcccagtgtcggaagtagacgagaatataatgcccttcgtgtgggagcatcgaggtcacgggcgcgttcgaggaggtatggaagggtagacggaatcaatgggaggttgaggagtaatgtcctccgaacctctgcagccgtgtcattttgcattatgtccacgagcttctccacaagggcactggtatcatcattttcgtcatcgtcctcttcatttccggccaagcggccgagacccatcactgcttgtacccgcaccgaaggttctttgtcgcgaatccgttttagaaggccttgccggagagtgtggtataattcgtcgtctacggtatcgagtgaattgacgatgtgcgcgataatttgcgtggtacggaagcgcacaaccttgtcttttgcagacaacaaaggcactaacagggagacaagactggtggtcaagtgggcagtcggtctttcgtgcgaattctgcatatcgtcttcatcttcttcagagccgaagatctcagcgtccttttccgaggcatgagtaaggaagttcccgagaaaccgcaggattcgatcgccaacaggctctgtcttcttaatagacaagatgcgcaacacacaacgacctacttcgacgttgaactccttttctggtaccgtctcttcgccgggaatcaatcgctcttcagttgaactgtcttttttggagttcttctggggtatagcacagcacacctcctggattttccttagtcggacgacaagtttgcgatgaccggcagtcgaacgct

SEQ ID NO: 15023 - DNA, 1674 bp, Emericella nidulans
acttacaccagttgataatccttattttgaaagcgtttctttgcttgacgaaaagtgtcgcgatctgtggaactgattgagaacggcgggctgtggttgtctgtgctggtcaacaggcaaaaagaacaggattgcggtggccagccaaagtgacgttgagaccgggcgcttggttgggcgcttacctagccgagcggctaacccaatagccgcgatgattgggctatttgtgccaaatcactgctaaagaggactttggatcttacaaaactcgcttttgattatcgtatttatttgatttgtcaatttgattattttatcttaacttctcttgtaagaatcatggctatgcacccagttctacagtctcaaagccaaagcaaggggtatactactccgtaaccaccctgatgcagtaaaaagctcccaaagacagtcatacactaaaagcggtagtaaaggtggtgaaggggataagagtaaaaatgaaagaataggtaagtatgttcaagaagagaaagcgaccgccgtgtaaatgcagacacaaagaccttcccaaagcgagtgtgtcgaaagggagatggtagagaaagacgtggacacgtaatgaccgcagtgtcggagggttcggtaagagtcatccaagtatatacaataagaggtggatgattttctctcaaccgtaggaaaggtgtctagacggaaaggacaagctgggagctctcaccgacgccaaaggctctcgtcctttcagcgacctcgagaccaagctccttcatgcgttcagcaccttttccgggaatagggcgtcgctccatctgctctttggcagctttgcgacagtgttggcgccaaaatttttcttttcgcttctggcgtttcttttctaggccctcgacgatatcaacaggaccccgggtatggatctctcgattacgtgacgattcacgctcgtgggattcttgaattggcacgataccagaccagcgatgagagctttccattgcgaagaaagggttgggtgtgcgagggagtgactttgtgcgagccagcacgggccgctggactagctcgctgatgttgaggccatgatgcagggtgggagcgccttttactccaccattcgcagtcgacctgagcttgatcggaggcggcggagaacgaagacgtttgggtgacgctctgccatggcgacgaggtgggggtgaaatcattcgttttggcgaagggtgaggcgaaaccctccgtgattgctccccgcctgatcgacctcgaggcccttcgtctagtaagccagagcccttgacctcctcatcgtcatcgtcgtcgtcatcgtcgtcaatgtcggaggtaggaaagcttggatcaatatcctgaggaatgatgacttgtttggaaagacgtcgctgctcgaggcaggatttgtaggcaacctccaagggtcggtcctcatccagtgttccgcacacgaaatcggtactgtcaggaagatccggggtgccaggacgtaatctggggatcttaatcggccgacctgtcggttttccagcgagagctggcggccagttcgtacgcggatgttcctcattcattgagtcgaaagacattgccgagtccctgcggctgatgggaagtcgaggatgttcgaggggactcgtggcagctgtcgtacta

SEQ ID NO: 15024 - DNA, 2375 bp, Emericella nidulans
tacctaggttaaaaagaggtctttgagatattgtgccaactgtatcgtggctgacttgaacatgggcgcattggagtatacgtctgtcatcaatgcacgggcttctgcattctggaacaggagggacaaagggtctgcttttccactaagacactctgctagtcgcgagccggtagtgtgtagtagtttgtgctccgaggcatgctgagcgtgtttgttgagtatcttcttgtagagaattagggacggaacggtgccaacgggctgttggcttcgaattatctctgattctcttcgctcgatgagatcggagtattcgagcacagcgaccagctgattcatgaccttgccatgttggggaaggattttgacaggtggaactacctgaccgggtgtgagcgatgctaggtcggcacccaatgcgtgaaatgcctccaccacatagctagtgacaagctccatctgttgagggaagacggtgtcgcagaagcctgcgaaccgtgtcttgcggctgaattcggcactcgtgcgtgtggtagcaaagagtttactagctttatcgacaaatgccgtcggtgatgtatcacatactggcgcaagatccaccgagatactctttggctctcggtctgtgattgtgatttcggtctcgacggccccctgactgtgagttttgatgcggacaaccgagtgtcccgggaagatacgttgtaccaatccgccaacatccgggatttgtgtaagctcagcgttggatatagccactccaaaccgtttattaatttcggttaagacttcagtgctcataagcgagtcgacaccgatatcgccgagggcagcagctgctgagagttcgtcggcagagattcccagtagttcaccgagcatggtctgcacagctagaagatcaccatcgctactcgaaacgtgagccactggggtagaggagagagctgtcgcctcagcagcaacattaatggagacctgctctgcctccgttggcctggcagtatgattactcagacggtttagggttcgctttaacgattgaatggacacacccgtgaaggtagcggacagcatgcagacagcaagcgcccctgtagtatggtctagtacaaagacatcgcatactattttcttttttgactccggctcgtagttggaatacacagcccagggaaccgtagctgctgtgtcccgtcgcacaaaggattcaccgatcaatacatcccctaccgaactacacacgaaaacctcatcatcatgcgtttcagaaagacagttaacgtggatgccggctacctgaatgaagttgtctatcagaatcgggtcgcaaggattgcacttggtcggcgaggaaggcaggatgactcggccagtggcttcgtgccctacagcgtaaacttcttcaacggccgggcaatagtctgcgtagttgacggccctggcaaatgcttggtagactgttgagcgcttaagcccactggaagaaggagacgtagcaatggagttccagcttgcaagattcagtcgacgttagcaggagcttaagcgagcgcatatcccggtgttgctaccggcagcttgtaacgatactctgcctgtagcatgtgtcaccgcgtcctgcaaaccgtcacgcgtggacagcacaaatgaccactgtccatggctctcatcctgctgcgtcagctgcaggagaaccgcaccgggcatcccgaggacaaggggcgagcaaatgttaaggctctcgatgtgatacattgttggctttgtcgctgttgatgagacaagtaatgctgcctgaacgacaagttcaaaatagagagaggcagggcataaattctggttggcgactgcatggccggcggtgcacattcggaagacgttgtccttgttgttgatggtaaagagagcttctttaccatcttgtctcagcagccgcacgagactcgcttcttgtacattttcttgatccggtacctgcggaggcgaacggaaggcgtcagggttatactcaatccaatggctggttttcgcgaattggtatgggggcaggttgatccacctgtacccggtctccgaaggatggaacggccagaattgaaccggcacagcttttgaccaaagtgtacaggtcacctttgcgagatttgcctgggcttgggcaccggaaagatcagtcggaaggtatacatggcttttgagcggccgtgacgcttccacgacacgacgcaccatattaatgactggtgaagctgttcctgcctcgagccaaacacatgggccatcgacacgcgaaagagtccgttccacggcatcatgaaaaaacaccggcttgcgtgagtgtcgcacaatcttgtcactgtgaccat

SEQ ID NO: 15025 - DNA, 2692 bp, Emericella nidulans
atacgatttaggtgacactatagaatactaggatctgtagtttggtctgcaatgtcgggtgtgccaaatcgcctgactatgcctcaactgcagcctgcagagcgttgcaggcgtttttcatttcaccagcgtcaggtaaaaaccctgctcatgagtccagtcatgaatcatgctgacgtttaacccagcaatcggaagtggtgttgttatggaaacgtttttcaagaaggatcgagcaaagtatatgggtgtgtggacgctgctcctcacgcttggaatccctctgggaccttttatcttcggtttcgtgacctaccgggcaagctatatttggatctattgggtcctagcaattgtaggtccctgaccttcctttgaaccgccatttattaacgttaggccagatcaatggagtccagtttatcctgtatctctttttcggaccggaaacccgctatatcggcaccaacgaggatcccaaagagcctgcgtggaagagagaatacctcaaagttcgacgaattgatcctacccctctccactggtctgagttcatcaaaccactgggcctgtgcttccgaccttgtgtcatcgtacctgctgctgcatactccatgatcttcctcctcagcaacgtcttagccacagttgaagtgccacagctgctgcaggggaagttcggcctcaatgcggaacagctgggactgcaattcttaggccctatcattggttcactcattggagaacaactcggtggccgcttatccgatctttggatgaacatgcgggcgaaacgagtgcagcgaaaaccagagccagagttccgactctggctcagctacttgggctacgcctgttccattgtcggcatcatcgtcttcctcgactgcaccgagaaggccgaggatggcaagtggaatgtagctcctattatcggcatcgccatcggagctgttggcaaccagctggtaacaaccgtccttatcacctatgcggtagactgccaccccgaagatgcctcgagcgtcggtgtttgtatcacgtttgtccggcagatttggggttttctcggaccgttctggtaattttgaatttgactcgatgcgcgttcgactcgctaacaggtattcaggtttccgggcatgttcgaaaacgtcggtatcgctgcgagcgctggtgtctgcgtggcgcttatggttggagccagtgtcctgccaacaattgccctgcagtggaaaggacgctctcttcggccatcaatgaaagagtagtctgagggatgctttatcagtaaacggcagatctgaagcttgttttggtggtttagtcatggcttgaagacatggtctgggagtactctgggatagatctggtatagaatagaaaaacgcagcgggtttagacggtataagagaatataaaggacttccccacggacgaacacttactagtagagaactagcccacatctgccaaagaaagttgccgaaattatcgggtcaaaatcagaccacctgcagtggtgccatatctattcatcggcattccgatcggcctgccccaacgaagccggcacactcaggactcggccttccgaaaatttggcggttgagcttgatgtcgttgacagcatggcgggtcatagaatactaaagaccagaaatctagtagcggtcaaggacgatgtatacagtgttacagtcctcttttgacattcattctgttctgtatgagctgtagccactctagccactcaagcgatcacagggctgacggcggataaagagtgttccgccaggctaaacgcataacctccgactcaatatacgatcggactatgagccgacacggtgtatgggccatacacgaccttcagagtatttaaaaatcccgtttaggttttcccttgtctacagggtcgtctctggtcagaattcaaagcgatatatgcgccgacaagtgtactgacaaataggtcattcaggcataacatatgtacatacctcggattatccgtgctaatgcagtgtggggagaatcgtggggatgtgggagggggacaatccgtataccaataccccaggctctttaagcttcgctattccaacaaacccaacttctcctgacacacaactacaatatacaagtcacttaattcaaaatgtcctcccctaaaggcccctttactctcgttaccgtcaacaccgcgcccgagcgggccaagcgccttatcggtcgcatggtcgaggcgcttaaggacccgtataccattatccatgttgataactgcgagtgaacgttgcccacctgatccgtagaaattggggacataaagctaacaaagacatatctattgaaaggttgcgctaaagtgaccacataagctgacttttggacgcgaatttctaaacagttcaggcaattgtttaaatgagcaaaatagtttacagctgtaagcagtattgcccacaatttttcttattggtccccaaaacggtaatcattatgggttgataaccattaaatgtgaatccaggtaacgtgaaggctcgcatttgacttttaaatgccggtttgaaaaaacaacccgcctaggattgggggggacggtttcttaatttttttatattgggggtgccccattgttcatttatttcaaacataattttttttactctttaactaactcttt

SEQ ID NO: 15026 - DNA, 563 bp, Emericella nidulans
ccggcagtaccctgtttgcgcagcgggggccacaaggtactgcattccatgtcgatggcactgacgacgctatgtactgctatgtatttgcgtcagccctgttagtatatgaacagaacataaactttcgagcacaggtctaacctctgctgtctcataacttagccgtgtgacagctcttcaacaggaaacctgcgattgcacttctagcagaagcacaacccattgatttaatcttgaacaaactatctgatgctgccagaaaacaccatcggacaagataccacttcttggaacatcgctatcatttgggagcgggcacattatcaactcaacctctgcatggctggcacgtacgccatgtgccaccgatttctcatataccagctgtggcgagcccagatgcctaaacgtaggttacactcggctggtcaagcgctgctgacaagaggtctcataagagcgcctggaatatacacgcacccatcgggcattggattatacttttggtcggctagctgcatatatccctggctgacggagaattcgaggtgatcagactg

SEQ ID NO: 15027 - DNA, 3642 bp, Emericella nidulans
ctgagggaaaagggctgtacattatgcccccgaggcagaggttaaccctacgcggcgaggcgctaggtttttttaccaggcggaagatatcgaggacccggaagatgaagagggtgaggggtatcccttgggacggctgtatcatgattactgggatccattgcttttcggcgatggcgaggataggcatcttgaaatggccgattacccggtccagcggccagacttacttgtctgtgggggcgagtcgtactggaagcccaaggttagggtgatcgcagtatactttgaggcttatgccgacgctgatgatggcaatagtacaattgcttcccgaacggcatcctttgccctatacttgaaggtcttcgaacactgccctgtggagcggattgctacgtcgaatcacagtacacatgctttgagaacaagttgtgtcccgttctggagggtaacgcaacgttcccctgtggcgaagactgctatcttccgtcggagtaccggtatttgctctgtctctctctctcacactacatacatgctgaccattcacagatgcgttaattcaaccttgacccaaatcttacccaacgaatctcccggccagagtcctgatcagtcagggaaagtgcctgtcttacctactcacgacttggactttgtcatggaaggcaccacgtatatcattagtcctacgccgaccaccatcatgaacggcaacggagagccactgaccctggcgcctgcattggttgtgattggcacaaagaccgtttggacgggcccggcatccctatctacgagcatcgttattgacgacctgacaatcaccgtgctaccacatactacgcaggatgcatcttcaactggcgagccatcagcgggcactctgacgagtcctgtaccatcaacgagcccaacacccgcccctacagatgccggtgcaacagggggtggcccaggaccatcaactggtggcggggcttcaacttttccaagtccgacatcaggttttcccagctcctcatcagccgtacattcacctgtagaatctagcaccgtcataacgtgggcagcaacagaaggctcttccagcattgagatcaccttcaccccgacaaccctgaaacagttcacatcattggctacattgagcactataacaacggacgttgatggagacactacaacgttcgtcattggccctggaggcatcgcatgggatccagtcccaacggcaacaaccacgtctctaccgggatttcctccccttccattccctactgcaccgcctgctcctgtgccaccaagttctagcacgctccctccggtgacctcttcatcatcaccgttccccacggtatttccctggccggttccgccaattacgactgttacaagcaccattgatgatgcgagtggtcctgggcctataacgacaataatcaccggcactacgaacccagatggtgctgtcgttcctatcacctctctatcaacagatgaagccgtgagctcagcgcaggctctcctttctgaactgggtgatgtctctgccgccatcgttgcgttctcttctggcaccgcagataccgcaaaggctacggtggcgttggaaaaggttgaagacgcacagaatggtaagcgacaataaccaagtttatcaaacacttgctgactcttaccagacacaaacgacttcggcagtggcctgagcatttccggaccaggctctggtctatggtccatctttggcgacacagttagcgggatctcctctgcactcggaggtctactctctacaatttctggcattatcggcggtggcggcgcgagtgggtcgagctccctgactggtcctctaaacgacctgacgagcctgtcggatgcattgagcgcagacataaacgaggctgtatccggtacgacaaatccagccataacccctctgccctcttcaacatcattcgggacatctaccgggaccgagccatcttcctgcgaagccacacagcttacaaactgcgctgtcctctgcgcaacggacacaaaccccgtcacaacgacgtgcttctcaacgacatgcacagtggagacggcctgtggtgggagcccggctacctctacagctatactgcgccatgtctgcccgctcgacagaccgaatgacattgggaaggtgtcgaaatttggcggtggtgctcggccgactacgaccagtccccaagacgccgggagtattacatctacgaccaatattataactgatactacgagcactagtacagatacaagcagcgagaccgcagaacctacgacgccctcatccacagcaccacctacgtctaccagtgagccgacatccacagaaccaccggcgcctccccctccagagcccacggtaccttcaagcacggagccgtcaagaacctccaccagtgagctggacccagccccaacttggggcggccgctgttctacctacgaagactgcccacagtgctcggacgggtactaccggtgctgtttgtcggggtgccatggaatgttggtgcctgggtccaatacgtgtgggtgtgtcagagatggtgaggttgtcagtccggtttgcggttgtgtgtagatctgggtttacaatagaatagagagatttaggttatcaagggttctgcatagaggttggggctcttttgttggccttttgtattaaattgattggaagttatatattttagagtaaaaaccagcattctacttgctaacgggaggggaggactggcatagctaatcaaaaacacaatattaccttggcatatcaaggttggttacctccttggaacacgccatctagcttgcatcactcaacagcgccaaccagtttggtggtatttaatacatagccagtttttcaactaggtcgaatattcttgacctctctcattttgaaggtctataactaatatcgcataatacttagtggttactgtgacgttcgacagatgcaaagcataggctaggtgtagataaacacgcatgtctcccgactattaggggaattcagggttacatttgaccatttactgcagccctgctatcattgacagggaaggctgctatgtgccattctcattcaagaggttattgaatcctgtggagcacggctgaaaccccaatgcctcttatggattaccagagatatgtacatgtatatccaatatgccaattttcgctctaggagctcacattacttcaccgaaaagcgcaatcgttattgatttctcagttcaaccccccaactcgtacctctccctctccctttcccccgaatgcctcgcagataccgaccccattccagacaccgagttggagcccgcatcggagagcggcgaacgcataggcagactagcaggcctcgtatcactgtcagcatgcaactccgaagcaaatgcattcccagtgtaaactgccgggtttcctccattcgcattcgcactcgcaaattcagcagacacagaccccggtccaattgttgaaatctcgcggattgtcttgggccggtaggtcccagggcgacttccgggacggtacaggaagaagccattatcgctccgagatgagagcgccagccccgctccaacccct

SEQ ID NO: 15028 - DNA, 436 bp, Emericella nidulans
cattccggggctctagatacgacaaaccgtcatggcgaaaaggacaacattctctccaagctgcgcaccataatcgacggagcctcgaatagaatactggggcttaccatccagatagccaacacttatatcaaatggtgtcccgtcctcctgactgacggtgatacatccgattcctgggatcacaaccataagccatgatggtcacccgtaaacgaagataatatgacgcgggtatggggttcgaatctaccacgcgcctggatttttttatactgcacagacttatgggacgaattatgcacgctgaagttggacatccaacggaaagaccgcagaataacttgcaacaaacatattaccccttactgcatggtgaatacacccagatttgaccattgtcactggacactgattttgcaatggccagccatgg

SEQ ID NO: 15029 - DNA, 2642 bp, Emericella nidulans
atcccgcatcaaggctcttttgataatcactcagcgggattggaactaattcctgccgaatttctttaccatccctaatagtagatgagcatcatttgcccctaccgataggtgaaagcgcattcaggcggggaagctcaccagaggccctgtccgggcgctaaatcctcagctagctcatacaaggcattattttttcgaagggtgccaaatgcccccttcagatcataaatcagcgtccggggcgtgtatgtttcactcccgtctgccccaatgcctgggcgaaagtggacgtcatggtctacaggagattcctcttgtccgttgtaagtaaaatatgactcctgggcaaaacctttagcttcctaatatatacaacaggatctctactttagcgccatgtggactcacctgaaggttccagaaatgggtcgccagatagtttgcgcgctgccccagctgaagcgtcaagatctcgtgcatgctcaaaaccacactactttaagagtcattgacacggcgtcaaaatctgtctatgggagcaaaagaagcccgcagagcactgtgatgagtaaagcagacgtacattctgaggcattatagtttcaagaattggaacaagtattgtgaagtagaaccagtctcgatttgatccaagggtgatgttaagcacggaccatgttaaatcacgtggagcgctaaggaaagccgtcactttggctgggtgctgtttgtttactgcgggtcgggcgtgttgtgcaccgctgaagaaacatcacttctccccacatctttggcactttcttcccgcacatgcttcttctgcatcggttttcatgcttagtgtcatcgtcattccagcatagatacgccaattcaaactcaatccatccatacggctatggattcgccgtcgagctcccggtcaagcccatcgaaggcgctcaatcccctatcgccagagcgcatgaatcagcaaacgataccgaactcaccctcaactgtgtccgagaccctgcgcatgcaacgtaagagtcaacgaggtctttccgacgtacaagctagagtcgcatatcttaataatctgtctcgcggcggtagtccggttggcacttcgggatcaacttcgacaggaggagcagcggcacttcaacgagctatacttggacgtgaggaagccgagtcagccttagcacgcgtctcttcgcagctttcagaggcccagtctcgagaactccgcatcagcgaaagacttgaatcactgttagaagaattacagaatgccaaagaacgccaagcccacgaaagactggtgtttgagaaagaaattcggaaggctcgcaaagaagcctttcgcgctggctccgcacttgtgaaaacgcaggaggaactaaagcacatgagagcggaggcgaagggactaagtcaggaagtccagtctgagcgagaagcaaaagaaaaggccaaacaggaagcttttgaacgcgcctacgcaattgcaggtctgacagaggagctcgaggagatcaagggcaaattacgagcggcagaagcaaagaatcaagcgattacccttcaacacgcacgagctcgagagatcagaaagcaggaagtcaccagaatgtccctggcagagggagatctcgccttgttgatgacgccaagccctcgaaagcctaagcgaccttctgatgccctaggtgatgaccttgcacagggacctacacaggagtctgcaaagcttagccctcccgcccaccaggatacacccccaaagaagctagtaaagctatctgaccccttatctccgcgatatccacatcagtttgaagagaacccccctctgacagtacaggagcttgttgatcgattgcaaatggagcttaggtgggaaagaaacgagagaatcaacgcagagaaagacgtcgaatttatgcagcttcaatgcatgttcaagatgtgcgcctgtcgcgagttagagaacctggagaacgaagctcaggcaaggaaacaagaaaggacagctcagacccagggagctgaggaaacgatgaaggattgcgggattcccgaagaggattctcatcaacaattgaacggcgagcctaccagaatagaacctagagataaggaggaccggcaagaacaggttcggatgcaaacgcaagaacgggattccctggaagaaactcagcaacaggatgtgcaggaagaaccccaagagagcgaatcccaagaagaagagatcacggaagaacaaacccgggaagacgaattcatggacgaagtacaagaagaagtcggtgaaccactcatcacattctcacctgttacgggtactttccgaacagtgccttcaccaattcgatcgccgcacaagcaacttcaaaactccaaccttcatgaattacgaacttcacctataaaaatccaaaccataccggaagcccactcctcttccgccagccctggccagaagtatgaatccctttcacatgaagttctgtctgaatcaatttctcaaagcgaagcttttttcagagatttgactccagaagctcacccttctccagtggcctctcaagcgcagtctagacagaatacgagaatgtgcatcaaaatcacgtcgatcatgtgaatga

SEQ ID NO: 15030 - DNA, 403 bp, Emericella nidulans
ggccatctcccgggatggtgccatcgagcacagctgccccgggctgtccccattttttgatttacacacactccgtcagaacggggtatctgtcacgacgggcactaaaaccctactctgcctggccaaatggatcaacatccacccctgggtactggcatgccttgacatgatcgaaccaagatattccttccccgtaggctggccccttcaccttaacgactataatgccattattgatgacgacccaaaatcttgcccgcacgtccatgccaaccgcattattctacccatcactgccctcctagcatacggtcgaaactacctagactcgaaagatcacgaccgaccgggtaacaaggaccggaaaaaggcattatgggacgtgcgccatctgcatgca

SEQ ID NO: 15031 - DNA, 755 bp, Emericella nidulans
ccgggcgttgacgacctcgagtcatatactcggttgtgattcttctcctcgccgcatttgcgcgcccgattggagggggaaatagtcgagaagagtacgcgagttggtccctatgggcccaaagtagactgtttttccgcccttggcgagaaagagcaggtgatctaacttttggaagaggatcgtgccgggttgatggatcgagcattaggaacgtttgtcccctgcctgtttgcgttcggtggaaggtgccgattgcccatgaggattgggagttgaggcccctgttttttgttctttacattattccctgcagaatctgttggacctctacctaccataatcttatttgggctttcatacatgtagggagtttctaactctctggcatctggcgggtacaaacttatacgctcgataaggtacatattggctatcgttccctgttgtgaatgatatgtgtgtgcatcttttctagggcggcaggtctgatacatatagattgctagcctcttaataatactttatcctccatggctttactatagggatccttttgttgtttctataagtcgttgctcttcgtcactcatatatgccaatccaattatgtcttggttagatcagtctcgactatagtggcctacgactcctcaattatctgttctacttctcgagtacgctttgtatctggcatattcccctatttattctcgcctgctgtctgtattgcattattctgcactcattaagtc

SEQ ID NO: 15032 - DNA, 490 bp, Emericella nidulans
ccccagctcttctgttgccgcttctctgggtcccaaccttttggtctctactctctctgcaatgggcgctggggttcccagctctctgggtttaccgggttcgagcattcttgcgtccagctcttctgagtccatcctttctgagtccagtccctctattccaagaactagcactgttgccatttgcatcccaagcgccagcatagttccaagcaccagcagcagtgccgtcccgagtaccgagggctcttccagttcgagcaccaatgctgttcccagtactaggactggagagatttcaagggctaacaccctgtgcattcctagcggaagcagcagtgttactcccagcattagccctggtgttatctccagcactagcaccagcaatgctcccggttcaagcgccgactttagttccaataccagcacatcgttaaatccgacgagcactcggtcagtgactctttttcaaacgatccttctggga

SEQ ID NO: 15033 - DNA, 289 bp, Emericella nidulans
ggggttgatccttgtttaccatcattgacaggctcctgaccatttttccctggattgctaacaatgctcacgggggctgctcgactgtcttgatggctccactcctgatctctccaggcatcggtacctgcattgctcgcgttggcccgcactacctgatagtcaaggctcttactcataccaacatgtgtcctgtataacaggacttataaggcgatctatccatgcacgtatgctcctatggccgaccacttatctagtacagtgaatcagcgcgatgagatggacc

SEQ ID NO: 15034 - DNA, 2080 bp, Emericella nidulans
cttcacaggactaggagcagccagtcccgctccaggaagagcagttccggggtgttgcgaggacggatccaaagtagacggggatgatgcagccgacgatattgaattcgggctcgccgtcgatgggaggccagtggcagtagtcggaggcatgtgtaaatctacacgagtgctggtgaccttgcgcgctgggattcgagcgatatgagctgcgctagacggccatggtggtggcagcgggagtgctccatctgaaccccgcccatgggacggcgacatgtccatagagggattgcgcgtctgcggccgtgccgaagatgcttcggttggtgactctaggtcttgcatttccacatcttctttctcacctgacacacttggggtggtggctgtcggcgtaggaacaagatgggatgatacttcaaaggtagttttatttgattggggtgaatcaggttgttgacgactggtatgttccatccggatccgatcaatgtaacatcgcttgaggagacgttgggtaagagggacgaagttgggccgcttagaggaaggaggggatggcattacaccgttcgcaacctcgatgtctgcctggacggcagagtcgacgtatggataccgtctggcaggcgtgctaagagcagagggtttgcgtggtgatcggtgaccacctccagacaatgggggtgagaatgaccgacggtcggaagtgcctggcccagttgcatgagcggactgcccactaacacgctttctccgtttgtgggttgtctgttgatcctgttctaactgctggaatttcttttctgctgcggcaatcttacgcctttcgcgagcggacagctcagaatccccaaagccaaaggcatctgtgggagtctgtaaggttggcgtcaaatcacgactgcgggtctgcccacggttggaactcgatgcagaacgactgtctgcatgatcatcgtcgtccagagtcttgacagcttcactcccagcacggctattattaccatgcggtgatacattgggtttgctttttgttttcctccgtttagcatgtgcttgttttacgcttccatccgcaagtttgggatgccgccggcaatcaagactggaaagcaggcagctgtgtggctcaacgcacgcgcagccaccaaaattggccagtacattgctgatacaaacagcagccacttcctgcacactgtccccgggctcttgcttgactatcccattggtagacccaaacaactggggatctagataccatgtcgctgtaatctctgaatccggtgcgatatcctctttggcaacaaagcaaaagtgatattccacatcattcgtaatgtaggtcttcatagtcacattaggacgacatgaccgcctggcgtaacgcaggatactgccttcttgtcgactgtcgatgtaaatcggaagctggggatggaaaaagacaaacggctcggggtgtcgcaactcttgccaacgattaccgggatcgaggcaatagtctcgtagcagaccaatcttgcctgtgatttcgccaacaatctcgtctttaccaacggcatcttgggtcttgagaactttccaagtcggatgcttgccgccaaattcagtactgggatctgttactgaattgagagacagggaaggccaatgagaccgatccaaagttgcgccagacctggtgaatatctcgtccgcagagcggccgttggctacctgagcgagtgagacatgatctttcacccacgaggccaaatcagcggcaagtgttagattgacaaaaagattaccgtccatatcagcatgcccatgatcctggtcgtacaggtggagaaactcattagagtagagaggaatcgaggggccgaacgacttgattgggctcaaagaggccgcggtgcgcttgcgactgtcagaagtaagcgccgagttcccgggcaaagagttgaccgagcctgacgcgcgatgaccagtttttgccttcttcaacggaagctgttcgcgactgctcgactctgaccgctgatggaaaccatttacgtgatccgcatgatccttcgcctgctttttg

SEQ ID NO: 15035 - DNA, 3999 bp, Emericella nidulans
tacatgtatgtatctaattgcgacaattgcacgtccatcaggcactcaccagagtttttgaatggtccgtaatgtccctaattaaacccgatccttgcgccgttggctctatcaccagcgatgaaatcgatctgatccacgcaacagttgacccgagaccacgacgggaaatatgccctgaacgtcaattcaaagaggcaaaggctaattgtatcgacacttcacgagtccagcaagcgaatgccgagtgattgaacctgtgccttcaaaggagaagtggcgagcaagagacgtcgaagaacggcagatccagacgacgaaattgcggtggtttttcacgcttttcccaggctcgaattgcaggggcagagaatcgaaatagcctgctcacagcgtccgactgatgcggcgcatataagtgagaacgatcaacagaagaaaggaattgggaaggaatggagtgaaggaaaggagaggagagagagaacggaagagagaaatgaaacgagagccttagacggcgggcagactgaatgaagatcggccagtgagcactgagaactgctttctagactgacgaactctttgtacagcagcgcacgaggtgcttgctgcagcccaactggcggcgtacaggggatggcgcgggcgaggtcgagatttgaagcgtggcaggatcttgcaccagctgcagacgctcgtctcaactactttgttctaccattctacagtctcttggccgcaagttctgcaaaactcagccagcttgagctctggctgaagcgattcaggggcaaaaaacgtcaaggggactaagtctagactcccccactccgactggcttggctgggtttaggtttggtctgcgagtgctggacggccgccattcgagaacttcccgtctcagcggcagcccttcgctggcttacaggaccgatgcactgctgcactgatggactgatgctctgatacggatgaactgatcctctgatggactgatactagacatcgctgatggcgaggttcacctttggcctgctacgcctgctaccaagacgctgaacataacgatagacttgggctggattggctgtgaccgagccgagctgggaggtatgacccagtgcgaccggcataagccttcaaaattgggcccgacgatcgccaaactccattcatatctaacgttcatgcagtcgactcgccagacggggatcgaatcggatccagccggctcatatttcaacggtcatcgaacctggaatttggatcgaagagaataactgtcgaatatttggagttctcgagtctcaaggcttgggtgttgggaccatcgcggcttcatccggccgtggccaaacactccacgagcccacagactcgctaactcgcagttcgccgtggagtgggcacgtggggattgcagtcctccgcctgtcactttgcaattctgcagcccaattgctgtcccgctgtgcataaattctccgtctggcggcatttacagaccgcgtctggatgtactttgtgcttcgctctgaaaatgctgtctcgactcctgatatctattggagcggtgtaattagtggcagaaaattgcccgtcagcataacttgaagcgtgaaattaccgtacgaccttcagctatccacaccatccaacgaaacacgaaatgtcgtgtttgattggctggctccaaccacccaggcagcatccgttcgattgaactggggtctcgggcgagttccctttgctccgctaaccaagtaaaactgttgccctgattcatggttctgtcgtttgttcagttcaatggtattggcgacccctgactctgactcgagtcggagtaacttttgcctctcgaataactagtccgcatgcgcaggcagtgttgggaaatgtttacaaagaatttcatcatctagtgccatcatcaattccaaaaatcgtcgcaatatgatacacgacatagaaatttgatcggtgttcctaaggtctttaaatacctgaaaactgcaaagagggttctgcctcaccaggctctaacaaaggggaggggactctggtcgaccatattatcacgcagaaacagttggcgacgcagaagcagcctctagtgactcgacgctccatattcggaacggcagaactatacatgggctgctcggacacaccttctcccgctgaatgttcttaaacttcgggccattgggccctcctacgtacttggcttgtccgaacaattcagggcctccctggagcgcatcatcgccccatctcccgttgaagtccagccagttcactggaaagctggagtcatagggctcgaaggtctgcgtggctggcacataagcatacgcataggcgcccaaggcggggtcccacaaaacgccctggttcgtctgatcaacgagaaagccagctggaaggttaaggccagggattgtgtgatcatggccactgggaactggttaatgccggtttatcagggacggccgcgttgggatctcaccctggagttgagtatacggcatgggtcccgttcccagagtatgctacgggccgctttccctgcttctctgtcgcatcatatgtgaatgcctgtcctccagagtgctggctgtaccagatggcctgcggcgccccgtcctggaatcggatcatgttatgctccctgcatcagccactgtcagttcaaagtcctgccacaagcgacactactcaccagtctccaacgtggttgccaaactccattcccaagaccgtgtttcctagattatagctatccgcgatcagaacggcactctcagcggatagagtccccttttccggacgaagaacttacgagtaaaaatagaagtaaaacgcatcgacctctccatcgccacgatcatttacgacgataattgacgaaacatcgctggcttgaccgttctcattgaaatctgcgccgtaaaaccactcaggctgcgggttcgcgtcaatgccttctcgcgatgtcagatacacgctctcattacccagcgcattgagctgatccaggttatctagcgtaagcggcaacgagacgccctcgattgattcatagttcaccttcggcaaggcatgatccaggtgctcggcgatgccggaaggtctgtatcggtcttcactgtgaagccatactaggggcgctagtctcgtcagttgttctgtagcgctagacccaagtgtagggagcaatttaccataatccagcacgtagtccggtatagccgtcgcagccagagcggcttctacagaacgaggaaggtacatggacatcttagcgacccggttgatcaaagtcttctcttctcagcaccaaatgtgactctttaatccggcacggtctcaatgcgggaaccccctcgcatgcgctgcaatagcctatatagcccgacgacgaacagggcttgttacatccaatgcagccctgcacaacactagaacctcagctgccgtgatcactgacctgcgggttgcagtcggcaatgttagaccctatccgtccactcatcgcggtgggtagaaaaagggatttttgctgaatggccaacgattgcgtcaggggatggctcgtgggcggggaatggtcatagtacgcacggggcgtagtcttaggctgttcgtgagcaccagcctgattggtgcccttgtgtgctggggtcgaggggcatgcatattgcagaataatgagatcccgaggtcattaggagtgattgcttaagttcgccacggccggctgacgggctggccgctggtcagatgaatggatcattcattacatagttgcaatccctggaatttaagagctgccaccataactttctcaggtcacataatactattatattgttgagcgcgtcctagttcatcgcatgacattatctagcttcgatcagatatatatatgggtcctcatccagtgactcctcaagccagtcttaatcgagcctgctgtgagatctcagaggc

SEQ ID NO: 15036 - DNA, 1651 bp, Emericella nidulans
cgatgatagatgtggctaagacccacacgaggactaaatcaagctagcaaggacggatataacaacgaaggggctatggatctcatctcgtaacaaacactacctagaaaccctttttcggatagctaatacgagagcggccgcagacttcgcaagaaccagtcagcatacgaccgctatctaatacgcccccgggtcctacgggatgttacgaatctggacacatctactactatatttgggtcaaggtcaggttcccgttcgggttctcgccgactgcaatgcacgctctagcccacccggacggcgaggtggctacgtcaaaagcagcggctgcgagtggtatcttggtggtatcgtgatgaaactgtcgtgctactcgaccaaaatccttgaggatgtcatcgcgcacgcccaggaacccttacgctatgcagctgagtctgcttaagaacaaagaggcgatgatccagatgattaaaagagcggaaggcaggcattgaattggaggggagtggcgattgctgaactgatatttgacagctgccgggttcaaggcccttttcttactatcgatgtgcgctacctcggacgacgactcaacgagttgcgcaataattttaatatgctcaggggcatggagtacccaaacctttttccggggctgagcgtgggtaacctggatgatgggaacgagatcatggattatggtactgtacatcttagactgttgtctcaccaaaactaacccgtgccagactgcagttgggaatggcatcaactggtctccttcttccgacagcacaccaagatgcaaatatggggaaaaggcagtacttggatgcaataagacacatcctactcaagttgcgagtgaacttgacttattttcaccagtctctaccacagcagatgctgagctcgccatcatccacggccttgatggaatagtgatctccaacccctgctggcgacaactcgactctgtcccttccacactagatgtcctgcgagaagttgcccctgttaccaagggcaaaatcaccgttgccattgatggcgggaggagacgaggaacagatatcttcaaggcgctggcgctgtgagcggacatctgtcttgctgggaggcctgtcatttggggttagccgtaagcaccgcggctcctttctacattacgcacagggcttatgatttcggttcaagtatgacgataagcgggagtggcacttgtgatcaatctgctctatgatgagttcagaaactgtatggcgcttgctgggtgcgtcacatctcctggctggttaagggtcggtgctgatgatattgacaggcgcaagaatatctcagagattagtcgcaaccatgtctctctcctgcagcaggatgggcgactgttgaagttgtgattgggtttgtgcatttgccagcttagagctagcatcagacatacggtagaaaaatagacttgacgcattgaaatcgcgcagcgatacaaaaaacctcaatcttctccttcagagtgcaggcggagactctattcccagtaaagttcaaatttcgcttacctctactctcgtgattcattcatcgatcgtttcaaaatagttttgcctaagaattctacttttcgttccgtctagggtttata

SEQ ID NO: 15037 - DNA, 2181 bp, Emericella nidulans
caaactgggctcgtatctctcatgttgatcggttctgctctctggcttccaggaaatttaccgcatctaatggtaacgggccagcttcgggtcgtctgtgcagcgtgacttgataacccttccgtgagcttcaatggtcaagggcaagaacctttccagcgtacaaactcaacataagtccgttgctgcagccagataatcctcgtcagtggtttgagtgacagcaaatcctttcaagcctatatctcggatcctgtctagaacccggccaaaccaaacgggggcacatttcctgttcatattgtattagtctccccgcctatgataagcacagtatcttgtgatagggagtgacttcactactttcgctagggaaattctcgtgaggcgaagagacgctgcctgatgaacgattagaaagagtaacggtaaggtttctaagtgaggacggtataaatgggacgctgtaacttgtctatggtcttgccatcaataatccagactttcgtctacggttgctgccatccctggccagactcgtagtgtctcatgccgatgctctgtcccttagcgagccggggacatttcaagaagtgtcagcaagatttattgtggattgtaggtatggagccttacctgaacatgttgggcgactcgtgtagtgattggccctgcctggaagtcatacgcggatgctgtatgttccccttggatctgcttcacacaaatgagggactttggcgagacgaagggaactcaggaaacagaaatcttctaccaccactcactgagtacctgctctgagcatggaagcattgtcaaagtatgtcgcggcgatatatgtctccaattgacaccgttggccataccaatttatctatgaaaggcacgatcgactttcacagcctagtcaccttactaggctgaatatactgtatcagtatgcccgtcgactttttgtatcggcaggaggtttgtgtcactaatgttggcccaagtgttaggtacctcgtgcttgaacccaccgtagggaaggaagctggaggggctcagaagtggcaaccagctgtacaaaaatcgaggacgaggccaaacctcaattcaagtcctgatacctgacttccaagggcagttcactcaatccatgtgaattgagtcttcagacggtatcaggtcgaaggccatattatggtatcctcattcaagtgctctatggggtcacgagaggctggatcctttggtttgatatttgcgctggccttcttcaggcaaacaatatcttgttgaagtctccggtagtggattgcggatgagaaagagagatagaacctgaaggtttcaaggatgggcaatgatgggagaggcaagaggagcaagtgttgggccacagagggcagaacaaagagagcagctttaaaaaggtctgattcttgccccaaattccatcgatttattgagtgttgtctaaagacgtttttgtgaatgagctacgggaagtgaggtcattttgatttctggccaacaggctctttcctgcccatggtcaagagaataaccattttgtgttctctaacgtggtatacatacagctgagctcagttaccgcttgttttgccatttatcggccccggaaagcaggcttcctcttctccgcgaacgcaatcagagcctcgcgcctgtcctccgtctcgacaacaccatcatacgcctcgttctctgccgcctcaccctgctcatacccgttgactgctttcaatgcctgctttatggcaatgggaccaccgtcacagatgtccagagcaagcttgatgctctcacgcagtaccttctcacgcgcagcaccctccttctgctcctcttccggaaggatctcaaccagtcgatcgcacagcccgataaagtatgcctcaggtcccgtcacacggcgtccggtaagtatgaggtcccgggcacggttcacaccaatcagcgacggaaggcgataagtaccgcctgcgccagggatgatcgccagcttcgtctcggtagggcgacggggctgttggagccgaaaacgcggagatgcgtgcaaagggcgagctcgagaccggccccagggctagggaagatcaacaaagatggagggaccggaagagcacaagtcgcgaatggcctctcacttggcaagatgcgttgttctgt

SEQ ID NO: 15038 - DNA, 2210 bp, Emericella nidulans
gcaccgtacgacttcgacgtaatagacgcgagaccgacgtcgcgggggagggggagaagaggagcggaacagatttcggattgccgaacctagtcctctaacggggtgagactcgttcatagacatctgctgggtgatgccatctataaagatgacaaacaccggtcatgacaaagagaagatgaagatggtgagaaaaagaagagaggtgagagaagaagtggacgatgtatacagactctgtgatatgaggggcccatctgaggatatgaaacggggcacatgagacgtactcggagatatgaaggacagtgggaggagacaaaagtgaagtagtcgagagagaagcaaaagaggaacacaatcaacagtcagatagagaccataattgaaagaaaaataacaaaaaaaaataacaaaaagcatcaggtttaggtttcggtacccaataagtgctggttgtcggtataaatactcttctggctcgtttggcggttgttcattggtttgagcgcgtcttgttcctttttatttttagttttacttttttcccccttggattcagtaattcaagtagcctggcgtttccactgcagggtgtccactacagtaatatgcatagtagtacggagtataagtccgtaaccatagacatagtctccgttgaccatacccagtggtctcgacaacttaaaccgcaggcaattactaccgtgatcaaagacagtcggcaataacgagcctcaacgggatgtggactgtcagcaactcagcggctcggcaaccagagaaagccagggtcactgggtcgtcgcgtgttctcctgctcagctgtggatctgaaagcggcgagctgcgatagggcgatcgagattgaaatcgagatgaaacgagatgccttgcaggttggcagcgcatcccgacctatgaaaaccgatctgtcgttcccctaagcgccctgccaccagtcttcctggcgacggtgccggcctaaacgacttaaggcaagtcgactttcagtagcattctcgacaagttgaaggatccaattccttgagattcgagacgctcgatcgaggctgccgatcctggttaggggtccgccctggtttcgacccaaggaaccgagctagcagaaacttgggattgctatacggagtacgagtggtcttgttctgccgtaggcgccttgacttttgatatgaatcaaatgttgtgcattgcaagtggtgatgtatggtggttgctggcaaaaaaatacatccaccgatcggaagcgaaatatccagaccctgaacttctttgcttcaatcaaaatgcggagcttcaggtagatagcatcgaaagtctttcactgtctttggattgccgtcggactgctaagtctgggagaggcatccttgttcgagaacgtcttgacgaggtatggcgtgctgttagcgggcgcctctgtgccccctctctcctacatcaggcaccaacgagccatgtgtttgcccaatgcattgcgattctaggaacaatagaatgttcgaaaatcgacagagcagggtccataacgtgactccttatatgcttagtccaacaacaagggtcgcatatatgatacatcgagaatctgatatcgacgatgaagtgcagtggttgtaattgctctcattgactggtcccggcctaacccggccaaacccgctctgatcatcggccgaagcgggtatcggtattgggctgtgactggtatgatacagtaatgagctcctatgaattattccaagtcaccctctgcaccatcacagacacttgtagagaaggcggcttcactaggctcagctcctgatcagcccctgataatataactgccagctcgtacccatcgctcgattgagtcatagctccagtcacccaaaacctccagctgggagattcgatgtgtttttctcgttttgccaccatgactttgtatggggtcccgaacagctccacccaggcacacattcaattcttcattaccttcgtaaagtataaggcgtactcatatatactcctgtcttttggacacatgtaagaaaaggtaccaaggtatttagaagaagctttggactgtccataatggttcccttggggtagtgtctgtcccgcttcgcattaaaggagtcacttcgtacgtccgatggttgctgttgaactctgcacgcgggtgtggtgctgaa

SEQ ID NO: 15039 - DNA, 2717 bp, Emericella nidulans
atcagcttcccacccttccacggtgaacggactgatcatcgcgattgtcctctgccgacctttgtccgcatcccaaacttgcaccctgggaaaccgtacaatatctctcatcactcagggtggtacatacgtcgagactccgttcttataacttccgaaccagagtaatactagatatagcccgtgtttccgtgcgtcagtaatgaccgaatccagttcggtaaagtcaaattgaccctcaacgggctcgaccatttcccaggtaacggcgccgagaagggtgttgatgcattgttctttcatgtaattccaaacagtggacatgtatctggcagaggagagcgaggagttgtgtagttcgcccggaaggaggaggaccggcttgtctttgacgacaagctggaacccattaggggtttgagcgaggtgaggcaaggacatttgtataatcgggctgagaaaaaaagatgccgctaacattcaaagcattgacaggcaaggctcttaagtaggcgttaatcaatgaccgcattggtagcaaccatacgcggagtacaacgcccgttccacttaaggaaacgataaccattcttcgtaatactgttctgatagcgcagcgatccctgaccactagcattgctctgttcagaacattggcgctggcttcgcataaacctcggatatactcacgagctcgccaacaccgcatataaaagactggtctggttgggaatatcttcgattaaacctcggatgctgccgcgtcacgttggcagtttcctgtgaactagttggttgaaggaacgtagcatgccaatgcagtttaacatgctatatcctacacaggttaaattgcagcagaggagcaaatcgaacaggcccttcccatctccccgggccattttccttagctctactgtcccattgagaacagggtccggagtaatcgccaacggaattagccgagagagtatataaactcctcatcgactgtttccgtctgaactacagtggtgccaggataactaatcgataaacaaatatccgaatataaatttttctggtagcctgcccaaactctagctagagacctaaaactgtgctaatgattctgctgttaaagtgtgaaatgttatggtactaatatttctcacagatgtgtaattctaatttacgtcaatactgcataatttcactcattgaagcttttggactattcttagtagagtgaaaggagatgctggttttggcattaccaattatttcagacgaagttttgattgtcataaaaagctactaactactctggtgaaagaaaaagcgtgaacagatccatctcggtattcagttaagataaaaatgatgtccagataaccctcctgcagctcattttcttgatggccgatgttggtcatcgctgcaatcccaaaggaaaatgggcctgttgaaggaccgcttcatactatggacgatagaacacattagaaaagaaacagacgtggctgcatcaaaaatgaggttgaagctctccatagagatcggaccaaacgcaaccaaagcctaatgcttgcaccttgcatcctcctgcacaataactgaccaattgtcattgtggtcaatgacgccgccagacacatccttgcccttgtatttcgtcaagcacttgtggtagacgtcctgcgctccttcgcgtatgtgctggtacaacatggtcttgtagtgctttttgtcctgatagttatgtaaagtcagccatgacgtcgtgacagatagaaagtatatagaggatgttgtgaaagactcacctcgttacaccagcggatgctggtactgtagaagcagtaaacttcgccgcaggtgttgggttccagacccatggatggttcaagagaacctccaggaccgctgatgcccccgttcatctcaatgtagcgcagctggtcgaggccgtgtctgaagccgtcggcaggggcagcaatggcttttccggcgcagtggatagcctggtaagaaaggtgattagagtgttacatgaaatgctaaccaaggatgaaatagattgagtcaaaagaatataagtaagtcagtgggaaatgaagcacttacaccgcaggccatggtggcaaggacagatatcataatggcaataacctgaattatggcacacatatcggtgttcaagggagtgaacgtgttttctttgttggtggaaggatttaagaagatgaagagatgcttgatggaacagagagaagatccggatacttgaccaaagcaaaggctttataagaccacgaggaaaatgatggtgggtgggacatggaagaggagaggcagagctgggttatttatgcatgtcctgggcttccttgaagaagattttcgactctgaaagaggtatgggagagtaattgttaatgaaacaatctgtgaatgaccatttaaaaccacacattgtcagatgtgttatattgaatatgatacaattcactcagtcatgccagtggaaaatcttgttacatgcaatgctttaatataacagactgacattctttatagttacaggatgagactaagtaattttgtttcctccagtctctttatcttctttggtaggtgaccgctgtcactgtgatccagctcctgattactcatgtactttgactagcaacacttctagggcttctctttgcaatgtattcccatcccattcctac

SEQ ID NO: 15040 - DNA, 856 bp, Emericella nidulans
agggacatcgacatatgacggcgggcgaggcgggaggacaaccaaatcagggtgcgagtcatggacggggctggttctcatgctcggccaagaagggaggaccggcggaccgtcttgcgctctcggtctgacatcatctcttccggttaggaaagagacgagggcttgcttctcatcacttcggatcattggctaaaaaccctttgatcggactccttggggcacgtttaaccaaacgtccctggacatatgacctgccccacgcaggccaaacgacctgccctcagattgccgcgtcaggtttgcacagacacgagaatagtgcaccacgaatggttctacacagccaggagcgatgctacctcgccgaaatgtccaagcagagcccttggataatagcgtagacccttaccacacagcagagggcgaggctacaatacaggtagtggtgctggtggcaccaagatgcgaagcccgccagaattgacaccagtgacaaacgcctccgactctcttttccaggggcgaatccggcgagaaggcccccctgaaccgagggccaattgctgacgaccaagccgaccggaccattcgcttacaagccgatgaaaagggcctactaacagcacggttatgcgacaaccattagtcggctcaaaagattgcccggctgggctgcccgtagggggttgtgaaacggccccagcccccgcggagggcaacgagctacccttggtttaataatttaagcctaattggccattgggaattcccgattaaaccggtaatccgggtctgttcagaggaccctgtggtcatacgacttttgcttgggccaacccttgggaaacctttg

SEQ ID NO: 15041 - DNA, 849 bp, Emericella nidulans
  unsure (1)..(849): unsure at all n locations
ggggcgctgcccactagtgactagagagtccgtaggagtacagagtatataaagccaggagctggtcgcaagtgacaagcttctgcatgttcatgtcataactggcccaggcctttggtccttaaccttttgggctgacgacagttttgtaaaaccgctaagcgggcttgaaatttataatacagcgccccacctcccgtttaccgctggggcccacagtgactaggagcgggagttgcgaattctccattcatacagtacaaaacctggctcgccccttcgccaaccactctcctgcaccatcgccctttctgggttcaactcaactacagctgtctcaacgcaccttcgccacaacaaacctggaactctcatcttctcctgggttctactcttaccgtaaccccaggatttgtgacgtctgggcttcaagagtcacctccagaagatccctcggtccctcgcccagattctctgcttgacacagagcggagactcgaatccttgtctcgacttcactcaacgctcgggattcgaacgtcgttcacatgcacgctnnttatatcacaggcttttaaacctcctatcccccgaaatcgagccacgtgacgccatcgtcgtgctctctcgaaatcgtgtccttttgaccgcgcgatcggtttttctgacgaaacctgacataaaccggtgggcttcggttgtttgtagcttatcggaatttggctttcaaaatggggtctgcgtgtttgcactaacggaccatttatgttgcgtaggacttctttcctcccccgagtcttttgtccgaataccgcgtttaacccttattggataacacctttttccggc

SEQ ID NO: 15042 - DNA, 1656 bp, Emericella nidulans
ggatagccatgaccggcgatagaggaatcgtcgaggtccgcggtagaaggtaaatcatttcgcgcgtccacccttggttgcctccaggaacagcacctttttcttgacaacgggatcatacttcagcatgctcaaaggacggtgcgcacggggtcgggtcattgtgcggtagtagccagtcatggccatcgagatcaggcgaacggccatggtacgtgatttcgctgtcagatgtaggattagcttagcggttacaaaacgggtcgtagaggcgggttcagcggtggaaagattgtgtccacccagaattgacgggctgaagcgtacctttcttggccatattggcggctggacgctgtgaggacgggaattgaggctgtacgagaagttcgtcaatgttcttgccggaggttcggaagaggtttggttctccgggtcacgtgccaatattcgaaaaaggttagcgccatatgccctatcctctctatcacatttaactcaaacgagactcggttatcactccaaatgctgtcgattttttaaattaagacattgtttaagactgctatatgatctcctgcccaagactttcgcgcatatcgagcggtcgcagggtcaaggattctcagttcgcctggctcagggctgccgttaagccgcaaagaagtgaattggtgccttgctgctttgaagggcgaatagcccctgtcagtaataactttgtaaagcaaggatgttcccgtatcctgggctgaatacaagctctctttcccgcagccactttcttagcttgttgactgcgggtcgaaatgccctgcattgtggccgtggcctcagttgagaactccaacgtactaacacataagaccaggcgatatcggaacgcagtcatttgatgagagaaaggacaaatatttggcaatataaagtttcctcgtgaaccatgccgagatatggccagcttttgcaaggcctgacggcaccgtcaccctcgcatcggctttatgaaagttgaaagcgtacagtcaataaaacgagtaaactgcaatactgcaattgggtatcctatcatttatcgcactgaaagtttattggcatggctaactacagatcttgcttccacggcccatgctatagtctcatggaagacctcaggatacagcccgttaatcactaaacctgccttcgacctggcgtggaaggagttgtgtgttgactacatgcgcaacagaagcatatgttaccatgatataaggagtcaaagaagtgtcgcccgtagatagaagcagagcacctgttgcatatttctatctcagtacaacctccctccaggtccatcatcagctcacgccatctagggaatgtgctgagggcgtagaagcctagaaataaaagcacagcgcccatttttggcccggctgttattagcagttcggtcatatggaatagctgccacttgcaatgacactcacaacaacaaagaggatgaccttgtccttcaagttatccgcggtggttagcagatcaggggaatctggcctgcgtcgatgcaccgcgctagtccgttgtttcgctcacgaatgtatctctgtccaacctgatattccttgcgatgcagagccaaagtataccacgcggaattctaagtcgcccgtc

SEQ ID NO: 15043 - DNA, 972 bp, Emericella nidulans
  unsure (1)..(972): unsure at all n locations
cccaatccaggattttgtgccatcggccccgagattggaggcatggcgagcatgttcattgattggtcacctttgccattgtacgcattgggcgccccaaagccgttaaggaaagggccattcggacggttgttgtacatcccgttcgaaagcggattgaaattcaacatattcaaagggttccagttgtgatccatattgggcgggaagccgggcccagcgggcaatcccatgggattcataaatcccattccttgcccccgaatgcggcgtcngggaaaggcatgcccggaaaaacctgaccttgcattaacccggccattgctaaagaaatttttggttttaaaggcaaagtttaaaaaaggggttaatttttttttcttttggggttctggttttttttgggagacaggggaatttttcctcctttttttttttttagaaaacccccctcgttttttttttttgtttttgggaagggaaatccccaaaggtttttttttttggaaaacatgggcccccgggaaaaccttttttttttttggggaaaaaataaaaaatacgggttttttttgcgggctccacccccccgcggaaagtgtttttttttttttttttaaaagtttttttttctgtcgggtttttttttgagagaaactttttgggggggaggagtaaaaataatattatttttttcgcccggtgaaaaaaaatattttatttagttatttttatatttttcttcttcgtttctctctcgtggtgggtttgtgtttaaataatataataatactttctccctccgtctctcttttttttgaccgcctcctctcctctctttttattattttattaaatatgtnnnttctctgcgtatttaataaataacgtttcttcccacatccatttttttttaattattttttttttcttcatcctcttttttcttttttattatctattttgtctata

SEQ ID NO: 15044 - DNA, 785 bp, Emericella nidulans
taggactctccgaagctcgacactaaccggcaaggttggccgaagctcggtttttctgagataccttcttgctgcgctggatgaatgtgtcgaactccacagatgcatatggccgcagggtcggggactggtactgtgaggctgggtaggtgttgtgaaattcggttgcacaaatcgtataagattaaaagcctacatggccgggtatgaccgatcgcatatgcaaaggaagcagacgtcatctttaatcaaataactatcctttaatcagccggacaccctttttggtctgtaaattccgagcaagaaggacatactgtaagttatattggcccgattcaatgctcgcttggggcgctgagttgcgactcaatcgacgaaagatcatcttagctttgcgttttgatttcagagagttctgtttcagcctgtgggtagttagtgaaacgagtacttggtcgcaacccggcaaaggatagggaatttcaacgcacctggtcatcatccaaccgacgctgcccgcatcaggcctgccctaccaaccattagcttcctcatctctttcaactaccttaatccacaggctttttatatcaacctggcatttgggttgatttaacctcttaaaatatatacccctttgggtttctgatttaaaggtttgttggttcgttaatggcggcgggacctcggttgtggcctttttaaaccaattggggctttgccctcaagaaggggtttacagcttttgaaaacacttcgggggtccttacttcattttttgc

SEQ ID NO: 15045 - DNA, 355 bp, Emericella nidulans
  unsure (1)..(355): unsure at all n locations
accttgggccggcaaggcaggccggcacaatggtggccgtatgcatatcatctttaatgaatcccaccggaagggggaccgcagggtatggagtacggcctgtgaacttattgtttgaacaacctaacatacgagggggtccatcgcgaacacaataccgacggcgtggcgtacatgccgtctttagcatcaggaccttgaactctggaaactctggcctggtcggctatccggaagaaactggtctgtagcatgtctatgccacctacacctggctaggcagttgtacagntcaatggaggcacacaaggtatccatatctacatagtgggcaggtgtatagtgtcatgtgtga

SEQ ID NO: 15046 - DNA, 617 bp, Emericella nidulans
cccgcaaatccgcgacgagatgtaatcttcacctaaaggtgaaatttgaactcttcatttaagaaccatgccatcaggaacaggggtgacggaaatgttataggccccaatatctacaacaagagcagaagccttgccggcagcaaacctggtgtgggcagttcagaaccttcgatcaatgccgcgcatattatagtggaggaatcaatcttacgacgccagaacaccgttcctcgcaaggtaaaaggctggggttccccatttctccatcgcgatttcaatggtcttttcacgagccttcgtgggattccagttgcatttcaaacattagcagagggctgtccgcaagaggcttctcgttggtttcaacaccttccatcttcgttggcagcttgccctctaccagatcgttcaaaccattatgtagtggattgctaggtttcgcaccagtcagttctgactcgaaagagtactttcacagcttttttgtcatgtgccaatcctgtacaacaccattcctgtccatggggttttcacccgcaagctgtggcggggaatttctattactcatcggcgaaattaactttcctgcccctaaaagaaatttccatatatgt

SEQ ID NO: 15047 - DNA, 521 bp, Emericella nidulans
aacacggatttctggagacgactcagacgggctattccgcgatgggagaacgacggtgctccttctttttcgaagggatctcatgagcctccgtttagcgtcactgttgcattctcatcctattggtccactggtatgaatgcgagggacatctgtgtcatccccggtggatatgcaggtcattcaacaaacagaagactcatttactgagtcatggccttcttttctatcccacactacttctcagtcgttagtccgccatacagggaatgcaaatagctattgactatcacgcatctaaactggtaaccctatcacacccatccttaacgagaatctggtccatcatgtcattgcagatggtaattccaataccatgtccatgatacatgcacagagattctcttcatgctcttctcacttaatattatcgagcccgaagctgcaaacgagtatagatgccatcagatcgcaacgcagtagagttcgcccatacagcagccctaggcgtgtagaggcgt

SEQ ID NO: 15048 - DNA, 4197 bp, Emericella nidulans
aaaaacccgacaaggtttgtaaatccatatctaaccagccatggattgcgtgacaatcgcggcggcatttcagctgccttctctcttgtcatcatatcgacaggcatccagatggccatagaatggaaagttgcgcccaacgggagcgcgccacaaaaagcttgaggcaccataaggaccaggaggcttttgctattagagtggggggctctcagcctcaccagcggcctttgagactatacacatggctatcatggtaaagaacgtatacctaatttatctgacacttgcgcaagactctgaagatgcatcggcgtgcccaagatcccagcgtgatttatcgttcactccgtagaggataatgccagccgagcaactattcttgaggtagaaatgaagcttcaggaaatggagtttcagagtggggagacataatacccttaagaagtattccttccatcgcacagccaccgtcaaccggacaaacggcgaagcaaaaggaacaaactaaccactcagctattctcactgaacgtcttctcattcctaatcgagcagcacgtaccaaagtttgatttgccgcgacaacgatggtcccgtgcataatgtatccctaaacgatcgtgctagacctcgctgaggcgtatgcttctctggacatacagggtgaggaaagctgactctcctcgcctcgtacgtatctgtaggataatagtctcaatacttgtcctagcggcaggcacttgaaacagtattgcttttcagctccgtaagacgttaagaagtagccgagcttatagccgtgcctgggcccgtttgaactgtatctgatgcagcattggctttattatggaaatatgtaaaaagctgtaaagtagctcccgcgttctggttacatcccacaagcaataacccgtacaggccaaaaaagtacccttgggttatttgatataaactgaccagcttgatattattggcccgacgcactgcagcttagcgggcggagcacgaccttccgcggccgtccagaaaactcttttcttcgcaaccaaggacctttcagtttatcacccacccagctataccacaatccccccttgagctcatcgaaatggcccagaccccggcatcttcagggttctccccccttaaatcccttgtcatatacacttcccaaacgtccggtctcgagaaaaccctccgccttatccaagccacctctcaagtcgttggcgtaactactgccagcaaagccctggcaacacaatgcctgacggcgcgtgatcagctagccctaagtgtgtcttttccgtccattctgcaaccctcagtcccccaatatccgggctgattgggttggttttaatcctggctgtgccggcgttgaccatatacatacagcccggcgctacttccgcctccttgacttctatgggtgctttgagcgcgtgcatttccttattaatacgccttcatcaactggaacgatactctccgtcatggagcttgcgcagtacacgttcctgggactttatctgttgctggaggacctcacgattgtacgcggcctcgtcccctctcacctttcgtccaagacgagtatcttgctaacgatcggacacagctgcatgacatgggcgtcgcccgggtcgactggtaccatccgcttatgacagaggcaaataagttctggttttatgcgttgatgctttcagtcattcgctgcacatgggagctcttcttcccgtcggcaccggtgacaccaagcaagacctctagctctggaagcgagaagtctaaggctaggggtcagcagccacagcccagtccacccaagtggccgcttgttaaacggatcatcatcgatggctgcgacctgactcttccggggtcattcctggggtggactccagttacatcgttgcagattgggcttgggatggttcttagcactgtgttggcggggcatgatgtttgggctgcgcagcagtaaagtatgcttgagcgcttgtgtatttgatcacgatctggggtaactgaccattctgaacgggtcggaaaaatggaaccagctaatgaatagagcatagagcgtatgtgtatgcgtgtctataggtgggttacagatgagcactttgtaaatacctgaagacagtgctgcttagtcggctcagcttcgcctccgcttctggatttggttcgtcaggtagcagatacttcggtatacactgtcgggaacaccctaagccttaccaccacaatcaccgttcattggcaccgcagacgagtggtctgatgacaccaaatatgtcaaaacgtataaactcaactctatcagtgtaatcaatgccaccaagaaaagcgagttgttgtgatgcgtcttccgcctcaacaaccgtcctcacacatgatagtaaatgtccctagtactatcgataggtgttgccctaaaagaccctgaatctcagaaatgcaattatatgagcagtccagttaagttctggtgcgtaagctgggcctggtcttctgtcctcgctagttgttggccaaagtactggctggaataaatccagtgtcttgcgagagtcaaggctcgcatatgctactgataaggcgagttcacaatagcgcgtcataagcgatagtctatcgtcaaggaaatgtgggatgaagagcgccgtgacgtgggctggcccgagatttgagagattcgcaaccgtatgcgtaaccagcttgatatggaactcggccgcatactactcgcggcatcctcgactacgctcgcatattttgcatgaaccagagtcagccatatggacaggcacctgctccgccgaacatcttcctctggaaaccatcgcatcggccgtcattggtgtacagcatggcattattcagcggcagaaataacggcctcgtaatgcctccggcgggtatgtggttagattgaaaaggtgactgatctaggctcgagggctaaagatgcagacggcgcagggtctatgccttggaatcccgtttttctctcccttcatctcatttctttgtcgtacgtctagctttgcgctttggccccgcaagcatatattaattggcgacatcagaatcaagcaagaaactcgaacgtgcagtatagtagcagtggacgtcaatccacctgcagatcctgcgatcttctagagtcacactggcagtagaccgttccttctgcagcctgcagagaaagtattatatgttgtggtcggccatgcgcctctcaatgtaaggaggccctccaggagagacgtattgtgaagcccgagacgggtgatgatgattacgacttcctccaagcttgaataaagcctaaatccacaatcttttgccccggctgcagtagctaatacccacctttagtttcatagacacgcgcacgccagaaggcaaacttactagacgcagagaccatccaagtctgagatatttgtcgttctaattgccgggtctaatagctctggtagtgctgcctcagcgctcttcgcagaggccctctcacatcctgcaatctacgcgcgcgtaatcgatgagatcaaaacagcattgcggatggggcaaatctcatacccgattcccagtgatacagaggtcgcaaaagcctgccttgttcaatgcctgcatcccgttacatctgtcctgttaccgcgggataaaccccttggaccttgaaattgagatctaggcccaaagagaccgctcggtgtagagttggcagcgaatccctggatttctcacagagacaagggccgtgtatggtgaggatgctgaggaattcagccccgatcggtggctggatgatatcccgtcaaagtaaaggaactggagaaatataacctagccttcggcgccgggtcaagggtttgtctcggcaagtattttgcgatggcgatgtttataaggcgcctgttgccgtaagtctctgcctatacctaactcttaccagaccactcgccggctcgttaccggcccgttatactgactgcgacggcaggtattcataaggttcgacgtcacactatgcaaagagacgcttcagaaacccaagccctcgtcgaaaatgaatggcgcagcccgggcttggaagtaaaaagcttgccctcaaaaggcgtgaccttgggtcgcggctcgagagaatgggcgagcggttccaatgtaacatgt

SEQ ID NO: 15049 - DNA, 2302 bp, Emericella nidulans
tctggctgtaccgtctatacggaagtaaagttgggttggtggtcgtaactgcggcctatcagcaccggaatgtttctcaggcatcttctacggcgtgccgaattctagtaaaacagacgcagattgaccgattccaagtcccgagaatgccattgttattgccataagcagagtatgtaacagagaatcataaagatcaatgcccagaacgttcgcactacaatatatgcaactgtagattcttgatagcatcaatagccaaagcccgcgcgcagccccttatctgaacgaaagggttggagtagaatttccgccattgcctgtcttcctccgttctcaatgccagtcgagcccaacgcagcgtccagcgtccgcatcaaggccccgcgccatcaccaattgtccttcctctattcttctgaatccatccgcaataagtttcctacgaggaagcaccaccagcgtacttcctcgtccactcccttgcaatctcttcatatcgcttcggtcctcacgatattgctccgcaatgcgtccctcgacagcatcatccggcatcggctcgccgagcaacgagcgcgcaaactccaggacggcggaaagtctggaggaaggcttccactcatctgctttcagcattcccagacacatactacctttgtcgtcgttcgttacattggggtgataaattttcgtgacgaacgagacgcttggtggcttgaaggggtactcggtggggagggtgagctttagttcgaaacggcctttctatatgaacataaggtcactttggccgttcttgaatcgctgcagggttggctgagggaaagaggtgcaacttacgtggtagggagaaccctcgggaccatccatgaacaccttccattcatagaggttggattcgttcgcgagttcgactgttatgcccgctggaggagactctgtgagctcggcgagttccttgaggcgtgctgttaacttgcttgtcgcgtggataatggcagggaaaggtgagtaaggttgtacctttgctatccgtttttgactgcccattttctggaaactcgtagatgttaattgaaagtcttaaatctaatcagagcgagggtgaagtaataggacaaagagcacgaaggagagcatggagcagaagtaggcaggctgcagcttcagttggcggggctcagttggcggggcagagcttcgacgtcagttgaagttggcgtattgaagttatggtccagaccagtctactttagggtaatatattcttgctaaaatctgagaataagactcgagccactacagctactttactccctttgcagtatgaccatcaatcccatgatcccaagcaaaacactcttcagccatggatgctcgctcagcataatcgtcacatacccgaccatcggcatatatccccgtacactccccacaatatcctccttgcgatgcaaaaattcctgcccgcgcgcatataactccgtatcgtccgcgaggttgttgtcgcccttggtcagcagcatgttcggcggtgtcggcgtggacctaaaccatcatgtagttagccaagcggttctgaatacccagtaatggaaagcctagatcacgtacacggtcacctcctttactgtcttctccttctttccctcaacttcggggaacgtgcgcacgacacggtgcacaattgggatatccttccccttgacgttgtagaccacgatctcaccgacttctgcacgagggctgcggttccagagaaataagagatcgccgcgctgaaatgctggttccatggatcctgagagcactgtagcaggtgtgtcaggtatgtatagataatggggaattgtggtcacgtaccgacgacgatcggggaggaagaagccgtgactaccgaaaggcccttccaaagcataaaagctgttgaaagaacgagcgcaaaattgagcacttgcgctattgattgtcgcgtgttcgacagatttgaggataggaaggatagcatgacgacagtgatcctgttatgagtcgcaaaggtgttgcagagaacgtacggaggagtgagatgaatggaataagaagggagtcgatattgtcgcctgagttgataaaaaaaattccctgagatcgctcgtcgaaattagagttaaccacgcgcaatgcgagacaaggcgttgctgttgggaaggttggcggagaccgagacgaaaggtgtcctccgcagcccgcagcagctggcattctccgccttcgatctatacagcctacaacaaccgtcgcctcttatacagtggtt

SEQ ID NO: 15050 - DNA, 706 bp, Emericella nidulans
ctcgttttgaggtgcggcgtcgatgtactgcatggctgcctgcagtatttttggatccggcttttttagaccagtgtgcgcgggtgaaatgaaggagacacgcataggctcacggtggatcgtgtcttggtcgaaatcatgaccgtcagtgaggatgctcgcattacgaacggctacgatgaggaactgggcagactccttgatctttttcaatgctggtgagatggactcatcacgcgctctctataccgtgaggatgcacaagaatagccagcctgcgactatctcaggcaccggtggatatgcctctgagacactgctgagatctactttaggctggctcgggcaggatatgtcgcataactatcgatactgaaagtcctggtcaagctcagactactaggtagcgcccataatgctggcttcgcgatccaagtgtgacgcgtactgctaggggagctggtgatcgatgctgattagacccggcttaaacctgctcactgcaatcgatataccagaagttaggacggtgatgaaccaatgtgctacacaatgcagggggtcttgaggcttacacgcttgaacaaggctactagttgtcagcagggcaagggccgtggtttcggcttgccaatagtccgccatgttaaagtttttggcatgcgcggcaaaagctttttaaagtttcccaatattttctttcctg

SEQ ID NO: 15051 - DNA, 898 bp, Emericella nidulans
ggcaagtggcatactgacctgcccgaaagtctcgcgcacggcgccatcccaggtgaaatgtcccaggctgtcgaacaggccgccagcagggctaccacacttggcgaagtcgtacggctttgtcccgtcaatcactgcctgccaatagtggttgtacttgcgggtcgtaaagcggtcgtctatgcgcgagaactccccgctgtaggtgtcaaactcctcggccggctcgacccagctgttagttggggtgttctggggatcgaagatccaccgcgtcgacttgttctgcagcttattgcgctttgccacagtgccggcgggggtgtcaacagggggaaagaagaagaagacgttgccatcagcgatgggcaggtccaagactaccttgtcgttgggcgtgtaataccatctgaccttgtggtccttgaatgctatacatccttcttaagtcctttttactataaagacgcctcattcacttaccatttctttgaccggttccattgttatccccagttttttctcctgcttggcacaccctctaccttggtctcttccgttcccaaccttgggcttttctttttatcccctccgttccaattcatacggtctagaatttacttctacacaaccccttatttattcctccaaggccttttcacacctctttttctatcttgttatttctctcctaatttcaagtgctctctcttttccttgttgcatattctctcttttccctctctctttctctactccttcattcctttttttctacttcttctccttcctaatttctatctttgtttattcctcttactcttttatttcatctatcctatttttcttatttttttctcattttcttttcctcttttcttcactcctttctttccac

SEQ ID NO: 15052 - DNA, 502 bp, Emericella nidulans
ggggggaaaataactactggcttgaggagaacttttactgtaactatacaggggacgatgaagagcgggggtgtcagcttttaaagagggtgaccccaagcaccagggaggtggggggatgtgctccttttaacatggatgacaatgacatgtttagacatgaagaattgtaaattaacttaaagggagtacagagcgggtattctgttatgaagggctgactcttccaaccggcggtcggactctatgatgcacgtcccatacttggttaataattgggctcatgacccctactgacatacatacaatacatttgaaaattacgagctggaatctgtcattgataactcctggacatgaaatgaatgaacgaactccacaaggtcctgtagattgacctctggctgctttcgatgcgaaagatccaaagggactgggccaatagagctgttcaagatagggacgcaccctctgtgatcggaggcatacgaatattgacacc

SEQ ID NO: 15053 - DNA, 4717 bp, Emericella nidulans
cgtggacacacagattgggtcaatgcagtcagagtcgacacttcctctcgaactgtcttctcagcatctgatgactgtactgttcgcctttgggacttggacacgaaaacctgcattcggactttccatggacacgtgggtcaagtgcagcaggttgttcctctgccccgcgaatttgagttcgaagaacatgatgccgagtgcgagaacgacgatctcagtaccacctccggcgacgccgacccgccgtcaatccaggcttcgatgggtttggaacccaacgcagcgtacagccaatcctcggcctttgggacttcgttcgataacggccgtgccgcgccgccacgatacatggttacaagtgcgctggattctacgatccgcctctgggaaaccaccaccggccgctgcttgcgtacgttcttcggccacttggagggagtatgggcgctgggagccgacactctccgcatcgtctctggcgctgaagaccgtatgatcaagatctgggaccccagaactggtaaatgcgagcgtactttcaccggccactctggccctgtcacttgcattggccttggtgacagtcgattcgctactggcagcgaggactgcgaagtacggatgtacagctttcagagttaatttcttcttcctttcttggcatgatcttattatttttaatgacttgtattttatggacggatacccttgagctggcgttttgattttgctgggtttagttccgttagcatgcaattccggcgttggatggactatcaggctcgaagctattcctcaacgcatagcaaggacactgttttttgtttgaattagctgtcagagtaatgaattcattttctaaattatcaataagtgtctttagctgttccgtaactccttgtggtaaaatgcgtgcaccctatctacggctcccagatagaccgaaccaatgccaaggcccgccctagacttaagccctaactttatggttgtatagcttcagcaacagcattggctgggaaccgttgcgaacactcaaccttgaaggcaggctaaacacagaagctataccggactatacttccaaaagcgtcctgctgtctcccctaaccttcactgttctttcctcttctcattccgctttcaatctatctctactgcatctctttaacggctctgagttatgtctccgagtctccccgagcagacagtcttactgaagcttgggccctaacatacttatgtctgggtgaaagagtaagccttgagcttgcaatgtgacagtaatgagtgccattccatcaaggctctgttgggtgagttcatctgcaataagcacttgcaataagcacccttaccaggatggcgtctccagatccgctttcgaatacttgcaaccctgggctggaggcctggtagagtaaacgtgttggccatgccaatgtcgcgagtccgccatggacgcccgttccgtgggttagggcttgcttttgaggttcggatcgtaagtgcggaatatgcgcccgggcttgagggaccaacaaagcctgctatcggcttttggaggattaattaaatggtgaactgctatagatgccattgtgtagacagatcatgaccatgagcccaagtgctatatcttgcagaagtcggcccgtacttctgcctgtcttgccctatgtagaacgtgtctcgctccaaacttcctatcaatccgtttcacatggactgtaaactcaggacccttgttcctctgactcacagcacattcgactggacaggaacctatctagcaagagaaaccctagcggctaccaagaaatcttcccattagccatgcgtatccggcctccgtagggtgaagggaaatggcatataatcccggctcaagcgcgaagatcactcgtctaatatttccctatctttccttatgcatccatgtggacctcgagcatcaatgacaagatgtccattcccgccatcatcgacccctttcccgaaccccaagcggcgttccaagtccgttacgctgagccaaagactctcgagtgtcctaggcccagacaacaactcgataccagcaaactaacagaaatccacggaagacacgttcgattcgctccagataccaccgaatacatggaccggaagccccttcgatcttcgcctttcccgacaaaggcaaacatcacccgtcttgatctcaccctgaccacagccaatagcgatgctgacctgctcccgctgcaacccgcacgcacgcctatgcgtgtccgatttgctgctgagatctcgattattccccgacctgccgatagcttcgaccacgttctctcggccgtcgatttcaacacgacccatctcgacagcactggaaaaacttgtcccgttatgcaacatgttcggttcgccgacgagtttaccaaccacagccacgcccatgacgtctttcccttaatatacgttcgagacggcgagcgtgcgtctgtttcttcctcccgctcctccagctcccccagctcgcttggggctcggcgtgcggatgagctggagcgctcgtcgtctctggacaattttgtttttgtggccgagaactgcaggaggaggaagaggaggtttaggagggtctgtgggaaagttaaggagttgtttaaagagaggaagggcaaggttgttttgtaatgtacagaggatgcctttttccctcccgtcttagctggcttttttcccggtagggttttgcccagagaagggttttttactggccctcaacatgatatgacatatatgagcttgttggtctagaactggagtaattggtttgtgctatgagggtgatttatgttatctctgcatcaagttgagtggatgagattgggtcattgtttgtatccaaattgagagatattgcatatcctttgataaggtaatggtcatgttatccattttattatgttctttgcatatttatcgtttagccaagactgtagcaatatggatggatgactactgccccttagttccatcgatcaactagatgcggtagtgctcttttcctttccctcctttgatgcagtagatagtaaccaacagtatacagtaagtttttattgctgggagagtgcaacggtggagaggtactggctttggtcttggtaggctatgccgaaacaacccatagaagttgaccgattgagacctggtgggatgtatattttcttctctatactgctggccattccttctggcttctttcccgagctgcctttgttcttgattgtgacaatcctccctgaaacgatgttgttttggctttattatggcctgcattagatctttcattcacatacctgcagacttcataggaggatttcttccatgatagagacatactagtttgttcgtcacgcagagattctttcaaagtgaggctgtgcagttttctttattgaactgattcattttctacactttgttcacttctcatccttatccatctacttctacctgccctgcatgtttattgtcctcagtcaactgtacctcccaacagcacctcatcccagatcgccgtctgggtttctccctgctatcctaccttttctatatactgactctacaggcagaatgtccctttcgctcacccaagcaacctgcgacgcagcaagcatcaccaaccgcaaacgtacgcgcttccttcacaaggtgaagggcattggtaagaaactccaaagacctatgcgccctgttcttattgccttaggcggcctggcagggtgcctcactgggattgtcagtgtcgtgattctgttagcggtgaagatcatcttggagttgctggcgcttgtgggcaacttgcttgcgtcggttcttcttgtaccggcggggattatcgtggctttgttagggggtaggtcaaactagtaagcttataggcagatagctggacgagattgaataatgagggttaatgattatttccgcgcctagcttgaattcagttcgcgcctgttttggttaaaagtaaaaaaaatagaacaatgaggatttggtaagtaataaacaatctgacgctggggatttatattgatagactattattatcaaatgataaattatgatagtactaatctatcagtgtcaaatattggggtttaacaaacactaaccagcaattctagggtattatagggctttgctgcctatctaacatccgccccgacaactcttgatataaaaaaatccaggatagaaagctcgaccaaaaaaacaacctccctcaattctagtcaagaagtgggtttgagggtcaaccacaaaggggggcaaaaattctggggggagcggggaatcgcctcccccccaaggggcacctggggagtttttccaaaattttgaaaaccctagtgcccccagaaggcggtgggttttttaaaaacacaattttgtggttgtaacaaaaaaccccctcaaaataaaggtgcatcacatgcctctaatagcgctcttattattgtaagttcaaagttagggctatgttaggataatcctgtacgctctgcagattagacgccgtaacttcgaactctcctccagtaaccttggtctaccgcgaatcagggctggcagtcaacatttcgtttgcagttttttcataacaacattgttgttatctgtataatttttcgtcacgataaacgaaaggcggctgtca

SEQ ID NO: 15054 - DNA, 800 bp, Emericella nidulans
cgagaaactcgggtacggcaagctcgttctggattcgaggaaggaggccgtgccgcagcggctggcgctgtcgagcccaggcatagaggaccgacgctgcttgcgggacttgggagcggaggcgcaaggggtagaggcacggaccggtggttcggggtcgtctggatccttggttgacgggcggctggactgtttctgggacgaggaccggtgttgacgatgttttgatttgagcgaggcagatgacgatgatgagagcttcctattccgttcgcggtcatttagtctcaggggcagaaacatggcggatggagctggaggttcgtggaatggaaggtgagagacgacgaccacggccggggaagtcttccctgctccggtttcgttgtgactgttctagttacctcgtagttgtgaatggtggctttctcagtcggacaatccgtcgacaacaagcacgctatcaattgtagtctggagatgtcgctgagtgagtcgaaccgcggaatgtcgtgttgtcggtagttgtacggagtattccgtaggttgggtcgtctggcgcttgggcgacgtaaggatagcagatctgagtggttgggttcgtagctaggcgcttatgtcactggatcaccaacagctaactttagagtcatgcgacatgctgtcgctcatggaatccgtaggagcagcaaaaaagaattccaggtgaagtaaggaaccaggaaccagcaaagtgatggatgactgacgaaggaaggctggtggaggattttcgctgaggtaaggtagcgtagggccaa

SEQ ID NO: 15055 - DNA, 812 bp, Emericella nidulans
ggcacagcaccagctgacgcaaagctaaacaccgaaccgcacgcaacgcattacccaggggaccacatgcagggtgcttgacaaggcacccgacagacagaggggggccatcaagcacaaacagtcacaccacgcaccactaaacgactgcagaaaaccgcggaagatggacgagggcaagtacatccaaaattctgcatactaaacagcacaacagggcttggctgaatcgcacactgacgaggaatgcccacaaaccggccactgacagcctcagaccaccaacagggccaactacagaacggggcgccccaaatcagctagcataagaccaaccaagtaccggacataccccagagagccatcaggacccaacgctagacgaacagaagcaacagctaggacacgaagacaccctgtcgacacaacggcctccgattacccggaagcggcctacatgatctaggcaccaaggccggcacaatatccaaaccgatcaaagacccccatggccgggacccaagcaaggagtccgcagacggctactacgacctgaagacgaccacccggacggacatgcagctcaccggcccactaggtagagggagaagacggtcagccaagttgaaggagcccagacatacacggagctgcaactggggccacattccaccaagaagaagagtcacctcccgaaagaccgggagaaccatcgggagggtccggccaaacgcgacaaagcacagccctaacagcggcacctaagggggacccccaacgagccaatacccccatacccacggtacagggcc

SEQ ID NO: 15056 - DNA, 2643 bp, Emericella nidulans
atagaataaaaaagaaaaagatcacaaaaaaagaaaagagaggtggcatcaaacaaataactaaaggcccgcatcttttttgccatgatacatttagggaggaccacaagataacccgggagtggtgtccttaaaaaaggaagggtcgattagaaaattagagccgtttcccacagaaagacaggagtcccttgggcgggtggccaaaaataggagtgaccaataagtgaagtcccctggcatattgggtggcgggtggtatgaatgttccgacaacccaataatagcgggacaaggtaaaaataaaaacctggaaggaaaggttagatttccagtggcatgccccaagtgaacatcaaggaaactgggcggcccaaaagcaagacagggccaccaacctgctccagcagggaacggctctctgtgaccgagagggcaagactagaacggggccgccaagccttctggttttgcaccagggagacactgagactgctcgcttgatgtatcatgacagggcagtggtaatactgtaactggaagacgggaatggtcgcatgtcggtatattgcgggaatattctccgccgtagtgcggggagggctggttccttgactgaagtgactgcttccactcgtttagttcacgatctaagtcccggattattcgaatcaggtcagcctcgctcttttgaaagcgcttgcggtgaacataactctcccttaatccgggactggaggaaggcgagatgaacgtagacgtggagatcggaccctagtttagggtcaccatgatgaaagtgcccaagatccagatcgcattctgcatcatccagcctcggcggcagccctgtcaccatgctgagccccttatcacagacgtaaacgatccagaaaagtgtccgggtatagcgatcgacatcagacggtttctcccatactgcgcaaggggagacatgccctttcaagtagcaagcgtaccgcgcggcagctgagagcagctggtcaacggtattaaagtcgccggccagccccggcacaaagacactattatttctgtcaacttgctcgaatcagagcttgatacgtcaacactgcaccagcattaaaagggtctgcaagccatgtaaagagacgggctcctcgaatatacgtggtagcaaccgatgtgctcttcgcgtattgatcactatactggagaggataccccttcggcccatgaaccgccaaggcagacaatgcctgcatgccttggcacttgtgcacgccaggagacagggtggagtacttttcacagtaggcggcatcgatagtgctgccgtacagcaagcgatcaatgatagggaaaagaacgccaagttgcgaggcctgatactggaggatctcttcataaagaaacgtccaatcaggtaaagggagatcaaggcctgtcggtgatgaagggagctgcgcagccgactcatcgggttggaggtactcggggtggaagtctcgccggtgcagtgataaacccaatcacgaccccaattcgaaaagaagggggtgccatcgaatgtacagatgtttccctggtagcgaccggcaagctgtaaattgtgggcgaaggcaggggcaaagatctcaaccagtccatctcggccaggcggtacctttgcaattgtcgggtggcgggggaaataaatacgctaacaatagcgtctggataatatgaggacttagctaagattatgataattactagaccaaattattattagaataaaaagacccacagtcttgccggcaagggtagttcaccttgtagggtctggccggcagccacaccacagtaggctatatgttcgacgacactgttctgaaaataccatatgctacatatgcagttacgacgacgggacaatatgagttgaaaaggtctacgatctgccctaagaaacttaatcaccggtgttaccgagcgcaagagtagaagcgaggaggcgagtatatgcgtctgccgtccaaaacttaatgagcagcgaagagaaacaatcctcaagaagcaagctggtctcggcgtgcagtatgatgtgaggttaggattggggtaagccaatgtgcaaatcgggccgtgaaaagtcgtcatcagcactatgccgagcccctggttgggctcagcactatgagatctggtcacggcattttgagatctcaggtagttgttgagtatatacaaagaatttaggtatatacctaatagtcaagtccattgtctagaaggataaatgaacaatcctcatcaggtcagcttgggagtattgaggctcgaggagtgtgccatatatgtggagcatgacgtgcttatagacatgatagacatgccttagaaattcatacaagctataataggctgccatgctaccgtggagcttgaagctagagatcctgattccagaaaggataacgcgttttgaatgggtcctgacgtgcttcctgctggctcagataaaagcttctgccagcctgctctttcagtgtcccgcgcgatatttcaactcaaccatgcttctcaatcgtatcaaaagatccccccggtcatgtctgtttcagatgattatcattgggctggtcgaatattgcgagcctagaatctggactgccttca

SEQ ID NO: 15057 - DNA, 604 bp, Emericella nidulans
  unsure (1)..(604): unsure at all n locations
aaggccagcccccgatagtacaggtaggtgcctgggtactggaccaaattctatttttatgcaaatgacaagcagtccctgggtcggcttgaagtatcgaggcgagtcgcttgattgatagatatttgcgccaatcattccactgacttgcacccacatgttgtacagagaagctgagactgttctgttctgcacagagcccgcattcctgcttgtccaggcaacttggatggggtgggtgtagggaaaagacaataagaccgtggcgatggcaaagtatacccatgggcctatcgggtccgggagcgcgatcaaggccacaaagcagggcagcaaccaggcgtcttctgccatcgatacgaagcttcgattgttgatcagttcactgagtgcagcgatcaagagcattgtaatactcgatccgatgatatagggaattgagagcaggttggtctgaatgacgttgaagcccagttcgcgcaacgagagggtcaggtattgattgacggggtacttangaataccaaatagtagccccagagcgtataaaggccacatatcgtagtctttgaacactcccacatttgcgaacgagagccctggc

SEQ ID NO: 15058 - DNA, 3161 bp, Emericella nidulans
tcccactaactagccgaaccatgacgcctatcccagctataatgctaagaaggtcgcccttcgtgatctttccaaacaacctccagaaactttttttggatctatacagcagctcgtggtcgagccttcgcttcctttttcgccttagcctcctctttcttgcgcttcttctgttcttggattttctcgtcgtcgttgcgcttcagggttgctttctccgcgtctgtcttagcaaccggcttaaaaaatccttccaaacgcgactgctgtgcggttttcaagttcttctgtaatcgggcagcaccgttgcgcacccggtcttcattgaatcccttatccttcaccagaaaatctacaaggccttcgatgtccggcgcctcccacttgaagtcgcattcggggtcgttggcatctcggacatctgggttcaggaagagttctctggcatcctgatacggccaagattccggaatgacatatttctgcttaggatctttctcgatggactcaaccaccttttccagggtaccgtggtcgcggatcagttttagagcggtattgggccctactttgggaatgggctccagatagtcacatccaagtagaatgcagagatcaataaactatgtagcacgtccagaagtaagcattcaacgcgccaacctgcgtgggaagaaattacctggtttcgatccatgcccagtccctccagagcacggttcaaatgaatctcttgaataggctctttcctctgctcactgaaagtcagatgcctcagcaggatcggcgcctcgaagcataacgtatccatatcttccgatgctgcggcatagactttgcccgcgcgagccagcacagcacattgcgcctctgcctcggtaggagcatcgatgtacggaatccccatcaacttcaagagttttttgcactccgcattgtgctccctcgttactcgcacagtccgtcgcgagaacttctcaacatcttccgccgtgcccgtctccttcgcttcttcatgcgcttcagtggcttcgtgtttcctagcgctccgcttggctagttcgcccgatttgagtttcggtggagctccatcaaaaacatatagaggcttgatcccattatccaccatgcgtagcgtccggtaaaacatccccatgagatgtgacgtggtctcgccggtatcgctcatgagctgctggccttcggagcgtacagcgatgagaaaactgtaaatactcattgatctgtggcgtatcagcataaccattaggcgagttcaggcttcagtccgacagcaacgtacgcatcctataaggtgagagacgtcgttagaaatggttctctggaataattccgaaattattaaaatgcttttcagcagaacgtacgatggcgaccttccggccgaaatgattcttgatatcccctgccttgatggcatcgggcgcattttctgcgatcacttgatagaggtctgtaatcacaagcaatgagcattggcagcttgcagtatgcaccagtcaaagagaagttatgtactcacgcttgattcccatgttgagcttgtcagtgaactcagtaataggcaagaccgcagcttgaaagcagagcagtcaagcacggtggcgggcatgaaacgcgttgaacgcgctgacaccattagactgcatttggtatagcgtcatgcgatatatacacgtgattcccccacttccccagtcctacctatctagactaagtcctctacggagccctgaagtactagacctgagaactgccacagccacattggctcgacaggtgggcagatgaatgagaaggacctgaaggaaaatcaggcataaccatgtctatgatatagtccgctaccttttgattgcgcagaaaagtagaaggctagtgcttgcatttacggaggacaggactcgaggcaccggactcagcctagcccgagcgggtctttaacccgccagtgacccaacgctcctcttccttatccgcccgtctatctccgtatcattgcaagagcacaccccgctcaagagatacagaagggccgccggtgtctgattgtagacgatgagcagcggcattgcgcaatgaaacggagtcgtcctcatcttgaagcgaatggtgtggggtcctcgagttcgtctcctcagggcggtcttccgcaatccgcaacggacaatgactctcgccagcacccgcttcatgttccgaagatctcacgaaggatacgtgcttgcacggagtgcaaacggcataaggtccgatgtgacatgaatgtgggggagacggtgtgtcaacgatgccgtcggatgggactagaatgtgtggtcaacaaaagtctccagacattgctggatgacgaagcagagtaatgccttttctaatccgctgcttatgatgaaatatggtgtcgctgacattttgtgctacgctgcaggtggaaatcaaccattgagcttgccatggccgacttactccgaaaagctcaattacccgacttatcgtattaccaagcggccggaaaatcagcagagacgcccccgaaaaagagaggccgtaaagaatccaccgtgtcaacggaagatacccctccggccacagaaataaatggagcgactgtgtcattcggtgctgcagtacgccccggcgctgagaagccaagtcttcctacgacatccccagagcaacagccacaatatgctattgacagagaagagaatggcgcaacctcacttgtcactgccccgatgggaagtttgtatgaagtgactcagttaagcgatttccgggctacatctccccagcgacagcatgcacatgatcttgttacggattttgtctcgcgaggtgcaatagatctgcaagaagcagaggaattgtttgaccacttcgaccgtgtcctcaaccgttatttatgggatggtatattactcgtacataaggatcttacttctttgcgcaactcatcttcaatgctctctgctgctattttcgccgtgacggcccttcacctccctcataaagaacggactttcgatacctgttataccgagttcgcaagattagcatcagagtcaatgcttgaccggcatcattccttagatgacttgcgcgcattatgtattggggctttctggcttgcggatgtg

SEQ ID NO: 15059 - DNA, 504 bp, Emericella nidulans
cggcctttcccctggttcttaccaatgaaggccattttatctaccggctccatgacctgccctctccaggggtagtcgacttctccagcggccgagaagcgctctcgaacccaccgtgtcaactcttcaagtcgttgagctgtttcttgcccgactttatggtcacaccccccaatgaccatgtaatcgtcggtttcattacatcccgtcagccagatatacttgtacggcttggcggtgtcatagatcagacaatcctcgcgatgcagtatgtccgatagtaccccatctccgcaacgatagacaatttctgcggcggaatgttgattgcttcgacgacatagtctttcggttagaaaacatgatgtcgcttgagtggacttaattcgcaattcatcggccactagccctaacccgctacgaagtggggagattggtcctagaggctgttgacaagccagaggcaaaagtcttattttctttattttggtcaataaaaaaaca

SEQ ID NO: 15060 - DNA, 1699 bp, Emericella nidulans
tccgcaatcggcttctccttcaacacatggacacccttcgctgcgagagcagagatgcattccaagtgggcgcaatggggcacagatacgatggcaaaatcgggccggtggtggtgcaggagcgaggacagggaattgtaagtgggaatgtctgggtgttcgaccgagaacgattctagtgccgtgccattggtgtcacagacggctgttatcgagagggtcgggctacccaggagactgaggaaatgacttctatacccccggtatccggtgcctaccaaggcaatgctgtaggccctcgatcttgccgcggcatgtgagactggccgagatctgggcgcagagctgacggagtggcgtcgtgctagagcagagacggccctggctaacgaacttgctggccttgagtattgtaaatatgctccgatcggcatgattcacgcctctaggttcgctgagtgagtgctcagcggcgcaatcgtttagtggtacgctgcgtggtcctttcgaggattttggataaacacatacggcattcttgttgtttttatgcaaagacggcgcttagaataatggatcttactaaaacaagagaagcagcagagcctcagagctgtggagtacacatcggatatactcgcgcgaatttggggttcctagaccccaatctttgaacgaagcggggtgtcatggccaataagggcgattcacgaatgcggtcttgtctagcccgcggcttgaatctcttcagtaattggttaatggcctgccgcttgctgtactgggcagccatgcatggagggccttgcgttggcatctgccattggttatctgtagcggcctaccggcaccgagtctcgctgtaatttcgacgcccatgcaatatatcggcaattatggctcagcaagaaggtggcttggtgctagaggctagccacggttgcccagctgggtttggatggtccatgacgtttaatgtccagcataccatgtcaatagcaggaacgggtcagggtacgttatgaagacacagtaagacgcacaggatggatttgccccaagggcttgtctgctcatatatgatgcctctatcaacatgattataatggtttcttgttccagtctgcaggctagtcgcactgtctgtccacaggaggaggcatgctcttccaccggtagactcatatatatcatgtatgatgccctcaccccacccaacgcctcaattgcttctggtggaggtggctgcctttactctcaaacgtcaggaccgccacatcagacttgggaactggccggtatggtctatccacagttggagttgcactctaaaagcatttcagagcggcccctgtccgcgtgcttgtctgtgattttctgaaaagctgtgagagtggcgcgtatgacatattacaggtccacctgtcttcttgagctctcatgacgcttctagaatgtgtcactcacctgtcgctgccgctgcacccagcctgcgtcctgtgtttttaccagccaatgcaagataggcagcttttcaagcaactcggcctcaatgtcaggtatttactagagattattaagtatccttttatatatgaccgtagattgcgcgtagtcacgtcccttaagggaaatgggagcctttgtatgggcgcagtaggccgagtaggccgactttgaatgaggcttgatcgtacct

SEQ ID NO: 15061 - DNA, 2523 bp, Emericella nidulans
gatgcaactgtctgtcagcttgagctcttgaggagttcgccactcttactaagttcacccatcatcagtgctgcgtctccgagagttaaatggggtttactatttcctgacgtcgttccctaatttatcttggttattcatgatctttagcggtcagtaaccatccgccgcggttctggccattattgccaggcgccatatctccgcagggacccttgtgttgttttcttctgctattaataccatctcttcagagctgcaaaaatgcctagtgcgccaaaacaacgcaagatagctattgtcggcagtcgctccgtgggtaagtgttgcgcgcaaaggtcaccgcactcataactgacactaatcacaaaaggcaaatcctcacttacggttcggtttgttgaacatcattttgtggagagttattacccgacgattgagaacaccttcagtcaaatcatcaaatacaacggtcaggattatgcaacagagatagttgatacagccggtcaagtgaggacttatcgctgcgcgcattcatcgcaaacgctaaccctgagcaccaggatgagtacagtatattgaactcaaaacatttcatcgggattcatggatatattattgcctattccgtggcgtcccgccaatcttttgatatggtaagggtcatcagggacaagatactgaatcatctcgtaagttttccatgtttacaatcaatgctttcttgcactgaagcattattgtagggagcggactatgttcccctggtcgttgtggggaataagagtgacctcaagcctgaacagcgccaagtttccttagacgaaggccgacagttaggtgaagagtttcgctgtgcatttacggaagctagtgctcgtcttgatttcaacgttgcgagactttcgagttgatgattggggaaattgaaaaatcccagaatccatctcaaccaactggtggtaacaaatgtgctttaatgtgacgatcagcctgcaaaatcatagacccccgttttattttattcctcccttttgttcaggtgtggcgtctcctgtatgtagccataccaataatgcctgggatggaaatgctgttattatgacgaattgtgttccgttgatgtgaattttaggcatcaaaagttggtaaagaattaatattgaaaagagcggagtaaatcccaatatgcagtagtcttaactgactgtatcgtgaatgaaactactacaaaggccatgtggaaacctccgcagcataatatttacactgaacgtggcgcaatagagccatgcccggattaatttcgatgcattacaatgaagttggctgaattgctgaccagtgactcagggcgctagataagtgtgggtgccctaggtttactcaccgtacatatcggagaaatgtcgaccaaaattcgtgcccctcaccccgcccaggccgaagtcaatgcacatttgatcaaacagccagcaacagcgacattttgactgacccgactccataaatttataccttccggatcctagttaaagataaattagaaaatgcttgaccttgccgactttatcacagaccgcggtggagatccgaataagatcaaggagagccagagaagaaggtcagcccctgaagctgcggttgacgaagttatcaccttatacgaagaagctcgtaagggtaagtcatccaacggcgcgaattatatggcgccagaataagctgatggtttatcttgcagcacggtacgaggtttctcaaataaattccaagctcaacggccttctcagggagatcggcaaaaagaagaaggtgcgggctcttatttcagcttttcaggagactactctcactgacctctgagattatctagaacaaggaggacgcaaccagtcttctggaggagaaggcaaagttagagagtcagcggaaagaggcagagagtgttgccttgcagaaggaggatcttagggacaagaagattcgaacgatcggataactacgttcatgactcagtccctgtcagcaataatgaggtcggtgatgccctgctggaaatgtcgaaacttgactgatcgatctcaattggattctgtaggatgataattctgtcatcagaacatggttcccggaaggcttcgttgctgagaaacccaattgcctgtcgcatcatgaggtcctcactcggcttgacgggtatgacccggagcgtggtgtcaaggttgttggccatcgtggatactgcctaactggctacggccttttcttgaaccttgcgcttgtcaactatgggctggaattcctctggaaacgtggatataagccaaaccaaccgcctcacttcatgcttagagagatgatggcaaagactgcccaacttgaacaatttgatgaggaactctacaaagtcacggagagcgaggacaaatctaccgacaagtatctcattgctacttcggagcagcccttatcagctctacatgatagtgaatggctccaagacaaggatcttccgat

SEQ ID NO: 15062 - DNA, 520 bp, Emericella nidulans
gggggagatacgtagcatccacacccacactctatattttattgttctaagcacaggccctactaaccgggccgaggtgtttaaccattttaagaccctgccagaaccgagttatagactcaaccgcgtttgcctatacaacatggatgccggcgtgaacaatgtcacatgatacgtgacagcggtgttattggatctttgcattgtcaccccgcggacctagcctgtgactgttccatctctaccactatggaggtggagtgtggatctcttacactccgatgataaaagccttctttttatcctacatgaccagactgttacctgctaaaaacgatactcatcaggacacgtgccagagagctgactactttctcttcatgtgagagcgcttggcgctgaccccaggctcaccgccgtcccctcaagacgacaggtggtactgtaccactcccgacggagtccatgccctagaggcacttctgagaccgagaccggtacaggatgacttatttatcca

SEQ ID NO: 15063 - DNA, 2021 bp, Emericella nidulans
ttagcgactgattgttatgaaatgagactgtcctaccgcatcggggcggccgccctccttgtcacgctcgtctttcttgttgggcgcctcttcaacttcggttcccaggtaccacgcccacggacgccctgggtctttaacgtcggtagcaggccagatcctaccgaacttgcttcatggaaatcgcgatggtccacagcagagtcgggggtcaacccgcagaattacgattcaacgcccatcatcgtccccaatgaccgaattatcgtgatggccaaactggccgcggaggatacaaactgggtcagcgccgatctcacagagtgcgttatatttctcttggattaggggcaaaagacggaaccgtgtgctgataaaaacaacaacagttggcggaactacatctacgtcgtcgacgacccgaacgcgccccgtcacacgcccatgaataaaggccgcgaggccctcgcatacctccagtatattgttgagcattatgacgaccttccttctacaatggtatttatccacagccaccgcgatggctggcccggtgcctggcacacggacaccatggactacagcaacgtggagtcggtccggtcgttacaaatcgactttgtgcagcgcaacggttacgccaatcttcggtgccaggaaacgcccggctgccccgacgagatcaggccgttccgcgacccgccgcgaccgggaaagaccgcggagaagtactacgcggatgcgtggaaggcgctgtttggaaacaccaacgtccccgaggttgttgccgccccgtgctgctcgcagttcgcggtgtcgcgcgaccaggtgctgaagcggccgctgagcgattaccagcgatactacaattgggtgctgacgaacgatctcccggatgacataacctcgcgaataatggagtatacatggcatattatttttggacaagaggctgtctagtatgttttccctttccgtttcttgttcccgcgtcaccgtgcgatgcatagctaacgcagccaactttccagctgccccgacgtcttccagtgttaccaggacgtctacggcgacccctccttctggtgattcttgtacatacttagaccaccgcttatctttttctgacgacgacatacgtgattatcttcttctgccggccaaagccaggcgcttgttgtatattaatcggacttgcattagggtgcttatttatatcatagacttcaaagcagactctgttgatcctcgcattcagtgcgttgtgctccttccgctcattggtttcgctagtccgctcttaggtgctatttggaacaacctgagaccccccggcgcggtctaccgccctggacaagtttcattgatgcatcgggaggcgaagcagacggtcttttttacgtctacctgttgtgattcgagtccacagatgagagaagcagcgcgggcccggcctacacaaaacattcctacgaacaagattttgtttgacgtccactcgctgagatcacctagtgttccctgttctgttgatattcggtatcattatcccgcactgcgttcttcgacttaccgttttctgccgagccgtgccgaaggtatatgagacgaagtaacgtgataatttgccttgtttggtaatgacttattcgtttctgttcggttggtcaaggtacagacgttgcatgtattcgagttcaaaggcatactgacctacaaaactggccaagtcctcaatgctttaagctagctatacggtcatccccttcagtccgccatagcccgtgcttgtgattctcagcacgcccagccgccaaaatagactacggttgataaattgtatttattagccgttgtacttggtttggtgaatgactcggcccagtctgcgcaatctgcggtcttagacacttgcgccattgtccatggaaaacatagcatcgtcctaacatcattgaacgcattattccctgagctcggtaagacatattacgcatttctttctgcctacccggtcagta

SEQ ID NO: 15064 - DNA, 765 bp, Emericella nidulans
tcgctgtgttgtatgacaaggcgagagccgcaacgctgtgttcgttacaagacgatcccgttttgctttgttagggaagactgtactgtggactgtgggatgtcatatattatatgacaggactgccagagcagagttgctgtgcaagtcaaaggacacgatacgctacctaacataggacctgaactgcacagcattagatgacagggcaaggtacaggacgggctgggccaggcaggacatacacgaggcgaggccggccaggctaggctgaaggtaagatgccagtgctctggactgtgagatgtgatcagggacgggaccggcacgcaatgcatcctctacgtgcgactctactttgagcagagcgcaacgtaacttagcctggcttggatcgaggacatcgcatttgcattgtacattaaatcaacgcgttaccagacctggcctgaggggatctcttcttggcatactaaaatgggcagggccgtgtcttcggtcgtgattgtacttacaggcttggtttttggtggtatgtggttgaagtttgtattggttcggtgttagtacggaattatttttagttaggccggctggttgctgggttagatatttacctcattggtttggtgtttcatattgttttcgatatatgtcatcactttttgttattcttctgcaattattatttatatgagtgtccggttaaacttaatccttcgctttgcttaatataaaaatattgatcttttttttgttctgtta

SEQ ID NO: 15065 - DNA, 519 bp, Emericella nidulans
accccaagcgtgaaaaataccattcgacctccaagcacggttttgttatctactcaccaccatatccttgaaggggggggtttatgaccccaaatgctccccccccgaacgtaccacaatatgagggcaccatcaacaaggatcgttcatcaagtagtggatgcgcctctcaaaaaagatcaaggtccggaaccacatggaaaacagagggaagagacggtcgccctaattataccgttgagaagcggctgacaaagacaacaatgactgcactcccacccagcctgacgcacttaacacccccttaagaaccaagaagatgcaagccagcgaggagaacccacgagaccaagttggtcaacgcgtatacaccagcttaggcgggcggctacttgatcgcctgtataacactgctggcttgacttcgacttactgtttgctggcaggacggcctgccaccgcgccaattccggggtgaacgacaaatgcttagcagacccctttccgtaacattaactt

SEQ ID NO: 15066 - DNA, 815 bp, Emericella nidulans
tccgaccggagatagtacccggcgaccggtagatgcagggaaacataccatttcggactttcacctgaacggcggattatacccttggtgacgttcttcacgctgcgcacgacttttgacattgtgacggtgtggttgtgtgaggggcaggttaggtaggaggtgggttcacaaatgacggggggccaggaatccggagacggaggtgaggttcgccggtcaagtctcgaggttgagtgatcgtaaagagcgttcagtgttaggtatcgaatagatttaaagagagggacgattggagcagagccagtccgtctcccggaatcgtagataggggtggtaagagcgagtgggagttggaagaggattagaggattgggtggctctcgtcgtcagtctagttctgttagtccacggcggcagtggcagtggcagtggcgtatgtaagccgctttcaggtggtctgctgtctttctcacccaagacggtgagggtaccctgaaaaggcggagattagaccgggtgcaatatagagctaattgcccaaggagctggccgtgatgaaagactctagaagacgtgagggctggttcttataaaagtaaatttgtgtggagaggcccaggctgcaacccttccaagacaggtgtccaaatttgccgttacaagcccacccaagaggtgtttttctccggacggccatgaagctttgacattttatcgtaggttataaatgaggtccctttaaggttagattatcctacttaaattcaattttcctattacacgattctatctttttgttactgaatctttgt

SEQ ID NO: 15067 - DNA, 2569 bp, Emericella nidulans
cggtggccgatagagtgaagatggagaatgacgctgagtttgatgccgtaatccctcggtgtgtcaacgggtaataattattatcaaggctgcttttttgggggatggtgtctcccttctcggaggatttgttcctgaaaaccttttatagtacttgaataaagggtttaaggaaggggttcgctctttctttttttcttttttaattttgagtcagtctggaaaagaggaggaacttgtggaaggcagaaacaaggaaccaattcgggagggaggagagggagtgagtgggttaagcaagcagaaggccgagatagccgggagctgcactcgggcaccacaggaggcagagagggcagactaacagcacgagaagagggaaaagggaagaaggaaaagagagagagaacagaggagaaagaaattggacgaggcgactgacactctggaggggaacagtcgccctctggggcctcgtcaggtcaggttcgagtggaaaccaagtcatgcctggtcacgtggctagcgcagatctcagtatacaagcaacctgcaatttccaagctaatcaaaatagcacgcacaccttttcgatacctagacaaggcttttctgcggcatgaactgaatcaaataaatgatcctcctctagcagggctagcactgcatttgtgtgctccatgtctcatatctatccccatctgaggcctcgcaaagggttaggcaaatccttccgctttagaagtttagaccatagccggatccacatgtctgcccctgctgactggagtagaacccaaacctcacctccgacacttgccctggacggactgatctgcaaaaaccatctgctcatccaatggtattggcaagcaataataatgcaactatcttatactcgccactgacgatgattgatgttgctcacgaaggcctgaagagtaaatgcagcagatatctggactcccgtcattctggaatactgttagtccggatcagtcattgcaggtggccactgggcacgtccgtaatcggcggggaaaggtacgtaggttccgactgcccctccctagtactaaaagggccgaccaacgcagggcacagacaaagcacaaggattgacattaagtgtattgttgggctgctgaagaacgagcatacggctagagaaggcaagatagagagttattcccctcggcagaaaatggcttaagcaaaatgtgttgatcttcctctgtgagcataaccagtgtctatatacagaaaagaagcgaaatttcgcacaatcatcaatgtataaaatttcgattctagcaaacaatgtcctcaataatcagtctacctccgaatatctgagcacctgggcagcagtgaggggaaccttggaacgtgaagagcgctgccctattccgtacggtacctacagagctacaccgccccgctgcccctctcaacgcgacatcgcggtctcctcatttaatcgcgattgtaatatagtggcaggtaaacacaatttttgtttcatagctttccgggctggtcgatacattcattatcattctgtttgactcttctacccctcatcgtctcccaccatggagcacgagcttctcagcctcctagccgacacgcaatcgccggttgctgatacgagaaaagcagctgagctcagtctgcttcgtctgtacccaaacgagaatttccctctctcactcgcagcgattgcgtcgcatgactccgtgcccactaatctccgtcaatccgccctctcagttctccgcacttttatcgccgcagcatggtccccgaatctggatgaattccaaggacaaatcttggtcaataatgccaacaaggcgcagattcgacaagctcttctggagcttgcaacagtcatagaagtgtctgagcgaaaggtcaagtctgcagccagttttgctgtcagcaagatcgccagcgcggactaccctgaacaatggcctgagctattacctgcactcctacggataatcaatgatacgaatagcacgcccggtgcgctacatggtgccttgaaagtgctgctagacctggtcgacaccggattcaatgaagagcagtttttcagtgtcgcgcgagacctcgtcaccaccctgtttaacgtggccaccaacacatcaagaaagccaattctgagagcattggccgtcgctgttttccgttcgtgcctcgatacacttgaaatggttctggagcaacacaaggtggctgtcaagcagttcatggacgaagtcttggcgggtggtctccgtttttcatcgaaaccctcaaagctccgttgccgcacgccctgcggacagacgcgaatccaaggagaccgaagtcccgtctcagtggaggggcgtcatcggattgaagttacaaattgttaagaccctcatgaagatccgcatggtcttccccggtctattggtcgcccagagtcccgtgtacttttcgactatctggacggagttgtcgaattctcaggcagtatatcacgaattttacatcaatgatgaacgccagggacggcttgttgacgtggatg

SEQ ID NO: 15068 - DNA, 649 bp, Emericella nidulans
ttgcagtatccctcacctataatacccgcagctcctgacgtctgatatggcaaacttttttgtcaccagcaacctattaggcactgttgacgcggccgcgaggctatgcaactacatgagcgtatattaccctgccctcggagcacgcgagagcagaaaaggcgtaagtcaagcttggaccaattaagagccatcatggaagagagggctcgtaccactgccaaactggttctggcacttgacacatagagagtcacatgctcgactatagaacactacacgtcatgtgaacacggcaaagggaactggattgtaacgcagagcctgtacacaatcgtcggatctgcagcgctagcgagctacactaaatatctcctggactcaaaggtctattgcttgatcactcacgtcgccaaacaacatgtgctctgacgacactagagcagacactgacaggctacagcaaaagctgatgagggcagagacaagcgccattacaaggtctagcgcatgactccggtggagcaggcgctctcgcgtcgagatcagatagacttggaatctaatcaaatgccttacgagcgtgtcacgaagttcactgacgccagctggatattgccacgctcaacacgagtgactgtcccggcca

SEQ ID NO: 15069 - DNA, 3077 bp, Emericella nidulans
tccggtatcgtatgggtttgggtctcggcgccttggtcgcttttttccacacgttgatcactctttccgagcctttgcttctgattcctgcaattccaggcgaaatcccaaagtcttcttgatttcttctcaggattagaatccttcaagacaagagacgagagcttccgcggttggcgtgcaatgaaaacggcgctggcagggctggtgatggagaagagagtggaaatgttatagattattaagcgaaaaaaaaaagggtaagaaaaagaaagcaaaggggaattagaacaaggtcgattgaggggatagaaaagaaagggagtccgagtagagagaaagagtaggaagaggaggaggagatgaggatggaaagagagaaggagaagaggacgaggaagcgatgagagcgaaaggcggactgaacgacacagagccagccgagattgatagtcacgctaatcacaatggagctgctatttatgcgaacatggcccgacttcagactacggaaactgacaactattcacaagcttggagaattatatcacatctactcgatgatttacatcgcccaaacacataatagcatccatctcctttcttcttcagctcctgtgttcctgtgcctaaccaggctcgacacctcagggttcaggctgtgtgctgaactcctgagccatgactaatcctatagcggctaggccagccactgtcagcacattttctgtactgattggtcatccggtaatggtttgagtgcctgaaaacacaggatctgcaaatcagatggcccgtgacctcccaggctgccgacctccggagtgcgcaggggtctgtactcgataactctggccaaataataaattatttagtgtctccagactcaccgatgctatccctctggaatacaaatgagtttcattccaaaaccaactgacgctgctggagccatacccaccgttaatatcacctgcagcagtacaagaaacagccgctctcctccaccaatccaaccccggactcgtcctgtctcaggtttagcagtgggaagcacctccccaacccgccaaacaattggcccacactcgcagaaccccggcttagcgtcctacaacgtggcttccttcatcgccagttagatttgatttctcttgcgagattcgctcaggaaccgccgtcctggccagtgtcagtttctctgcaagtttctgcgcaagtgggcgggagctttcgtcagtcgctgggaaatggcgaatggcaagcttgtctgttgaccactggctgtcgattcgcttgtcctgcttcatgatttgtgctgtgttttgaggtcagagtgtaaagcagcagcagcgcagcaaaagtggatgcgggatccatgaactctataaaaattgatcaccattcgtatatatctaaaatcgacggccaattataatatccaaactcgtacaagagcaaattccaaattaaaatatctaatctctacccctattcagaagcaaactctcgagaagaatactaagcaaacccttggctgcccgtttgtcgaggcctgttctagagcctccttggttcttgcgttcagcttctcgctggagctggtctgggcggccacagcgatatccttggggcggacgtcgctgaagagtcttttgagcacgttctcaatcacccaacaaccagcatagtcaagagccatcaagactgtcaaagtgaccttgaactcgttgctgaaggggacgagacggagtttctcatttagctccggaacaaattcagttgcgcaagagaatgcaacaccggatgcggcaaccaatccccagtacatggctttgttctcgcgaatggattctctgaacggacgaccctgatagttgatggagaatgtggaaatttgctggatgagctgaagaaggtagatagcactgttgaggagtgatggttcaaactcgccctccaggtcgacatcagtgtcccgtctgcaattttttagtcagcctgcgcgctggcgcactacatcaggaaacatggacatacggttcaatgctgtacacatagttggacaggtagatcaaagtcgcgatatggatagcaaattgtccaagaacagagccaatgatgtagacgttgaaaatgtttggctgtgggcgttccttggacagaccctcaacagactgcaaaattcattagaataacccacaaaggatagctaggagaatattaccttggcacgggaaattgagaggaagcagacactcatcagcataccactgatagtgacttgaccgtcaccgaacttaataccatcaagatagataacacttagactgtaggcgctgatcagacagttcaaagccagaatcttatacatttgaattgtcgcaacgagggtgcagcggccttggcgaaggatattggggatggcaatgacattcgccagtttactggtaaatggagcagcaacggaggcgtctccgagtttgatagtgggaggctcattgtcgtcgagctcctgctccatcatggtcgaggtaagcttgtcggcgaatccggcagctgcctgttgagcttgctgctggcgttgttgttgaggggtcaaattggattgttgtagcgcttgtgcaccgggcgatgtaatcgtggggatagcttcaggctggttcgcagcatctttggcgccacgcttggctgcctctctctccatagctttttggtagtgaggattgccggggccgggtgggtagagatgagcaatctgtgcagggactggtggcggaggttggttgaatcgttgcatcatattcacctgtttctcataaatctccttcatcttggtcgtgcgataatgttcagcaatcctggtcagatcatacggtgagccgttcgataggtcaacaccgacgtgagcttccttaacggcggccactcatggttcatgccatgtgtgcacatccccgccgagtaccgtgcatcattgagtccaaagaggagaacctccctatggttgggaacgacacaagcgatgtaaacatgtatctcgcgaggccttgattcactttagtaaggggttaatt

SEQ ID NO: 15070 - DNA, 1166 bp, Emericella nidulans
agggagaccaaggcactccggctgagaaccaggttgcaactgcggaggataccgcttcgacagatgttgctgaagatgccatttcaggtgaatatgtgcctgcgacgacttgggagggtcttgatcgtgttggacacttggggaggtggaatgatctccccccgaagaccgaggatgcctacacttcgtatgtccttttctcttatcataattctgaatggcttcatcaagatgagagactaatatatgcagcttctcctcgaatcgccgccttacaaagcctgacgatttggccctggctgctcatcaaaccgcggttgaactctgcttgatgcactcgctgaacaagcccctagtcagcgtctgtgaagttgtcgaacacgaggagccaatcctaaagatgatccaggattgcaagatccgaccgaaggcttcatgggactccgccctagagtacccgaacaaggaagcagaggatgcgctcctcttcgtcttcaagcaaattggggctcaggaagcggacgcagctgaggcgactgagtccacagaagctgaagagtccgtgaacaactctcccgcaagggctaatcaaacttccttagcagagaacaaggatgttcatgataagggctacttgaccctgtcactgtctgatccggcgatgaaattcgctgtaagtctatcctatcataaccctgtagtgttagattatactaactaagctattcgacagttcctgaagcgattctcccaactctccggccactacttccccgaccctgccatcgagtcgattttctctgttaagcaagtcatggcccacgttctcaaggagacggcacctaagcccaagaaacttgtagaacatctcctagccaacgacactctccggaatttacctaacgtcaagatctttgcgaagagacagaagccttggcacaaggatgaggagcttgggcggaagaagcttattgatgctgaacttcgtagaaggggtcttgttgagtgatatcatgtcactacgaagtctctgtccagttcagttcttgtagcatgtcatttttatgattgacttttgtacaatagttgaagcatctttcaagctatgaatggtaatatgtacatctatattcgcgcgatttaagaagagtccaaataacctcgta

SEQ ID NO: 15071 - DNA, 456 bp, Emericella nidulans
gagctcccaagcgccgcgactgacgccggtatgcacgctatccgcgctcgtcgtatttttgccacgccgaaggacacattggccgccgacgtttaagtgatcgcgggcaactcggaactgtgcaccgccgctccatctacgcagtctacgtagacctgcccgccgaacaacatggccatgcactaatgcgcgtgctggctctcggaaataccatccaaatcaagccgaccaagatctgtcaacatagtcaatgtccaacagctgcctgagatggacacagtacgcagatattagattaaaatggagaccttctgtgacctcagagtgatacggtacaagaaagccaatgcctgagccggacaggagccgaacctactctatagaggaacataaacccgctgaaatgcactactcaggtcaggcactcaaaatagagcttcccccgacaaggaaatt

SEQ ID NO: 15072 - DNA, 424 bp, Emericella nidulans
cacccgataaaaataccattcgaccaccaagcacggtttttttatctagcaatcaccatatccctccaggggggggcttatgtccacatactctcccccctcgaatgaaccacaatatgacaggaccttcaaaagggatccattataaagtcgtggatgcgcttctgcaaaaagttcaagctcgggaaccaaatgaactacagcgggaacaagctgtcgcacgaatcataccaattataaggatgctaccatagacaaaaatgactccttcgtcacctagctcgaccacatgagcgcccctcataagacaggcacactgtcaatccacccggagctaccatgcatacacatgtgcggcacagcggatacaccatgaaaggccgcgcgctgtcttgaatgccttgcaccccactgcagcctacac

SEQ ID NO: 15073 - DNA, 252 bp, Emericella nidulans
ggaaaaatacccctcatccatcaagcatgacacatgtattttttacacacaataccaagcctgacagggggggctattaatgtggacccatcctcgaaatcaacccctaaaagatggttgccgcatgagggctggattacaatgcccacgttgagaatcagcacaccgactccggccgtcggccaataggcctggcgcggcttacagcagcctctgtaggcctcctaatgatgaccggaaatccctgctacg

SEQ ID NO: 15074 - DNA, 511 bp, Emericella nidulans
gggaaaagggcgggcactcaacacgcaagggacatatcgttttaacacacgatctccctccatacgggggggggttataccatagatccgagcccgccaccttatacacagcgcggggttctggatctcggcagcctccgaaatcctaagatgcaacggaccgtactcgaagtgagcgcccaccaatgccgggaccaccgggtacaagtccttatagaggcccacagggttggcgcgggctgatcctagaagaaaaccgcccgcactggcggctatgtttcaccgatgcgacgatggacaggacgtcaaattagggacgcagggggagaacggaacatctcaagttactaccgccgagttccaacagaatgctagcgcttcgggcctgcaggatataacggaagacagactttcgccattgttcgttgagcgaaggaacaggccgcggggccattccaacgtggccgtggcatgaccagatttccctctggcgtagtggagctggggagcc

SEQ ID NO: 15075 - DNA, 720 bp, Emericella nidulans
cggatgagaacgcagccaaaaccagacgtatgcgctggctatttcaaatttgcgaatattggccacttcggaggactagtggccatagatgagggcggacatcgataagatcctacaggaaaacagggcaggcactgtgaagagcactgatacgaacggcaccataattgagaagaagggcaaaatcgtactcgccggttcaggacccgggcacccagatttactcactcgggccacatacaacggccatacaatgggccgaaaacatcgtgggtgacaaacctggggaagatcatgggcaggaactgataccgcgaccaacagaggtttagattcgagcgacaatttacaggaaaaatttgaccaggcgacaaggggtggaaccaaccgaagggcatggaatcactgaaaaagggacgaaaggggcctggaccgaagaagggtgacatcaaataaacctgggaagcgccaacagcaaggggaaaacccggcaagtttaaaaacagtattggaggaagcctaaccggccaaaggtagaagccacctggaaaggtcgggcaaattaagtggacccgaaagcgatgaggcacaaagggaaaaaaaggggggataagcaatctattaatacccctaaggagaggtcagtagggaaaattaagaatgttaaaaaaatattagttgagaatatcaaaataaatgaaaaattaataaatctcggag

SEQ ID NO: 15076 - DNA, 2859 bp, Emericella nidulans
agtacctggtctttgactgccttgtgctggatgggcagagttctatgcaccgcacgctcgacaagcgtttagcgtacttcaaggagaaggtcctcaagccctacaatgcgatgtatgagcggtttccccaggagaaacaacaccgcgtatttgtagtcgaagacaaatccacccagttcagctacggcatcgagatgatgttccgtgagatcatcccaaaggtgaagaagatccacggtaacgacggcctcatcttcacctgccgcagcaccccgtaccgcatcggcacagacgagcacattctgaagtggaaacctccctctgagaacactatcgatttccgtctacgtctcgaattccctgtcctcgaaccagactctgaagacgaggcagacggcatctcggaaccttacccagattacgacgcccttccgattttccatctcttcgttctacataataatgaccaatatcaaccttttggtgaaatgtatgttacgccgtcagaatgggaggacctcaaagcgctgcagatgccgctcgacgatgcaatcgtcgaatgctccaaagatgagtccggccgctggcgattccatcggattcgggatgacaaggcggatgcaaaccattataccaccgtcgacaaggtattagagagtatagaggaccgtgttaccgaggaagaccttatccgtgcggcgccggcgataaagacggcctggaagaagcgggcgcaggctgaggctgaagagcgtaaacgcgccagtggcagagcggctccaccagcacatgtaaatgggagcggggtgaagaggaaatttgaggagtagcatccgtttactgttttccttttcttcctgcttgggatacagcgaacaagtggttttgcgcggagtatggcgttgggttgctctcagtactgatttcttgtctgacgggactggcctgggggcatggtatgtatgcggcaatcgacctacttttatcttgacgttttctattatttatattttcttttcttctcacgtcaaaaggggcgattgaaccctcttcgatctatatacttattctctttatatctgcatctatgctttggtcctcgaaagtataactttggccaagtctgatttaccctatgcttcaagaataaagctcatatactcatatcgtgcaaggtacggtgctcctatttattggtataaaagagacgaatggcaatgtatactataaacacattatcgcttcttgatgctcacgtcaatgttcgcgactgcccatgcagccgcaaagacgctaagtagtccgattgtaatggtaattggcttacgcattccatcccagaaagcgtagtcataggtaacctagttccaagtgagtgactgttgtatatatgcgaggcggccactggcaaacttaccacaagctgggaatcacgggcttcatcggtgagactctccacagttagagttaaagcggtgcggccaagcgtatccatgaaggttttatgagtagatagggaggattggatctggcttgcgctcggcaagccattgctagtaggcccttcaacaatctcgtagcgcacattccgggcgccttcaggaaggatgactcgcacaactaccttctcgtactggataccttcacccattttgggtccttcaaggaatggaaccttgagcacgtaggaatcatcattagatactgtcctacgtaaaaatgatgagaggttgttgttccagccaaggcggaaactgtagttccagccgccgaagacgggataccggggtttgaactcgagattggcttcccggttcttcagtccggggcggtagcggctcgtagagacatttccaatatcatcggtaaagtatgggtccactgaacctggcttcaggggatacttgagctctttgatggctgtagacggggattgctggtagttggcgacggtgtagtccacgcgggagaactgggtcagcagcttggagccattgttgcgaacgcagtagcgctcctccgtagccaagttaccgccccagtgggagacctccaggtccctttccaacagtgatactgtgatgacgggtttcgtgaactcgtagcggaccgtgatgggatatgaggtgcctggtgcgacattggcagtctcgtaaggtccgtaaatataggttgtaccctggcgttcggggtctgcaccagacttgagttccgtggttgtgtagtcagggatatttgcgcttggaaacttgactttcgttttctgcgtcacggtctgataggcggatggcacgtatgcggagaatgagtatgtgaggaactggcgatctgactgcttaatggcagccgggcgcgggtggagggagttgaggagagagtacgaaattccaagggtaagctgcgacgaaggagccagaggttcaggcaggtgtacaatgaagtatcgaacatcactaagcagcgcaggttagtccgaaaccattcgctggctacattgaccgttgactgcgacaagagacttacctgaatggatcgacctcgctagcttccacatcaaacctgcctttgtctgcttcctttttattgcggacctctagtcctccgatctgttcgaagatgtccgacgggaaggacagatagtactcgctctggggttgtttatccacgttctcaatcactacattgattgtttcgcgggcgtacgtttttctaggttcgtattacggaccaaattcacatttttgaagacctgaggcggcttgaagtcggcggggagcagcttggactcgatggatttcgcggaaactatagagctgctggatagaacaagcccgcagaatgcgtgacaacggtagcaaa

SEQ ID NO: 15077 - DNA, 572 bp, Emericella nidulans
  unsure (1)..(572): unsure at all n locations
ctcaggaaggatagctcacatgtagtaataattctcttctctatctctctagacatgcgctattcgatatagtctcacacttcgggtggagcggtggtatacgatgtgcagcgatacgacatatagtctctatcatgaccaagacgtntcgcaggatgagcgagtcacgtcttctattgatacgcctagagccgcgtccaatccgatgtaatgtctacttgacgttgtagaagcctcgattttgacagaatacatacagaacatacaccggcgagacgcactatgcacgtgcgttgcatatacgctgccccaagtgcatcaagactacatgttgaacacctactcgaacaactgtaccatacttattctcaaccaggccctccacccatataggacatgcctttcctttggcccagacctctgcagttcatacatcaactaacaccctacatacctgtctctgccccagcctgaaccaaacgctagatctcattagtaagacactaatactgccagctagctcgcgactaacataagcacccggcgttcatgccttgcctatacgcaaccga

SEQ ID NO: 15078 - DNA, 1160 bp, Emericella nidulans
agcagcggttcaagggctcaagagccgggcggcattcaagcttctacaggtaatttcttactaggtctatgacctaaccgcgctctgtattctgattataccggtatcttccagatagatgaaaaataccgggtcttcaagagtggtcaaactgttgttgatctagtatggtaacactcgaagtcaacaatgtgacactctctgacaaaatattaaacaaatagggttacgccccaggatcatggtcccaggtacgcgcgacatcctctgtcatgagaattactcattggctgactcttcgcaaggtagcgttgacgcgaactcggcccgctggcagggtccttggtgtggatataatcccgagccaaccgccaaaaggtgtgtctactatccaaggcaatttcttggatcccgaggttcaggcgtacgtccgagactttgtacgcaatcctcgaaggggcagaccatactctcaaggagctctccagaaagtcgaggaccatgatcgtatggtagagtctgtcctcgaggcgagctgcaccggtggtgacttgggagaggattacaacggcgctgtggatgcccaaagaacggtagatgtagtactaagtgatatgtccgccccctggcttcaaacaaccggattctggaagagaagtctaagtaatccttaccgcaggatgatgaataccagcggtgtaccttttaaagatcatgctggtagtatggtacagctccccgctaatctattttgattacccccaaatactgatcctctaaaggacctttgccgtgctgctctggagttcagctttgaagttctcagggctggtgggcactttgtctgcaagttttatcagggcgcggaagataaaatcctggagaagcagctgaaagtattgtttggaaaggtgcataggctcaagccagaatcatcacgcagtgtatggatttgcttgctaaccagtgggcaatatgtggtggtttgactaattttttctagcaggaatctaaggaggcattcttcattgctctcgaccgcaaatccaacgtcaaaaagcaagatttgctcacccgtcactaggaccctagagatcaagatacagcacattggcatgcgcgaaattttggtatgcttaatccatgagcggcgttatctc

SEQ ID NO: 15079 - DNA, 496 bp, Emericella nidulans
ccccggccttggagagcgtgtgggctgggagtcattgcgctttatcatttaattgtcgctgtgttcacataataacgggcgcgaggtgctccggccatgaaggcatcggccaaggtaaatcgagagcccaggttctgatatcagttcgatgccttggttggagaccgcaacatccatttttcgaggacaatcaaaggtcgtcgaagagaatgtctgctaacaagaagatagaaagcccacatgagagcattagggcgccaccattgttaagtatcgcagcaatctatattgcatcctgtctaaagtagcatcgagagatggagatagtccgacggagtttgctgtggaagaaccgatgtcacttcctcgcacgggccacattctacctccgactctgtcttgccagtcctgtggctgggcttcagacacccaatctttaagtgaaaccacccaccagacctttatctacgcatcacaggctggtgcttcactcttg

SEQ ID NO: 15080 - DNA, 557 bp, Emericella nidulans
  unsure (1)..(557): unsure at all n locations
tcctccattcnagctaattgcacggtgggccgtgtactggggttccatgtcgaacttggcacatcgcacctgtatcatacgtgcgcgtacctcgctcgccaccatggtgctctgtcattcatcccgtatggtgcgtggctatacccgcatggctacctgcgtctggtactcgcaccgtcttgccggcgttcggctggcggttgtcctgggagaccccaagcttgagctggggaatgcaccactcgaacacctgtctaattccgtgtgaccggtagtgttctgccattcagtcctttgcggtatccttcgccctgctccttgcgctgctgtcttgttccggctctgttccgctttgctctgacctaaatctattctgaaccgtttctgaactcgcttgagtgggccttgacttcatttggaccggcactgaaccgtttcttttcctggatttcttcttgtcttgtcactgggcgcctacatttcatcccaccgaactgttgcaatccttgccccgttcttgcgccgtttcggttccttgacatcaacccgacccgcat

SEQ ID NO: 15081 - DNA, 3041 bp, Emericella nidulans
tgtgccgatggagcaggatacaatcgactgctcatggactcggattgcgaaagatcctaatcgtatggttctgactgatccagagcttatagcgatagccgtctgcacgcacctggaggaaacggggaggtatgtatgatgattctacgcttctgctttcgttctcgaagacgatgggagtgtgcgatcggatcatggtctccttgtgcgggtctatccaactgatcttccaacgcccgcacctcgttgattatccgcgctccaagcgcgcgcgactgaagccagccaccgtacgacaaaggagggtcatatggggtcggggaagtcaagtgccattccttgttggcagcatctaagcgcgcaccatgtctagaataggagacgtgtcagtaggagaccagaacactataaactgagaggtgctaccacataccggacaatgaaaatcgctgccggaggcttgcccatggccgcggtgcaggaaagcgcgcgggagatgagtcaggtcaaggtagaaatctgcccacaggactgagtgaatgaacagaaaagccaggggcctgccagaagacaggcttccagtctcagtgtacctggtaactgttgtttgggcggggtaaaataaactgtcagggcatcctcagtcggacgcggaggcagggcgacacgaggtctgcagcacacgaatcagcgggtaaaggataagaaaagtggcatgatgacagctccgctacctgcatggcttgggagtaaagaattatttcaactttccacctcgcccgtcatgaaatgtgagtaaaggcttgaagaatttctcgaccatcacgggacaaagagaagaaatcctcttcttggcattcttattgcgggcctggcggcatgtgaatatggctccttacgtcagccgctaagggggttcactgtctagagtttcattgttggatggaataaattgcccatcaatgagatggcggggttgaggttcgtcttccttagcgacgtcgtgtgattagagatcaattgcttgttctgcgagttaagaggttgaattaggtaggtcgttcggcactatcgagtcggagtgcggtaatctaagcgcgaccccatcatgacagcctttaacctctcatggaatccttgctattgtgcttcctataagacgaacacaagaaggaatgcatcatcaacgatgatcccttctttatatgggtgaggagtcgagatcgttcctaagataaacatattccccgcgtccaggtaccgtcggttatctggattcctgcggaaccgggtatgggagcggacccatccattgcctaatttatgagcgagtgatgatccagctggatattccgcttcagacggttgcgaacactgaaataaatgcagaaacaactgcagaactactgcacagcagcgttacttgctcttcgaagcccgctctgaacccgcccgagatttgagtcgcaaaataaagaccccgcgtgaccacgaacctggaacgctattaaccacgatatccctcgagaaggttatacaaattcgacagcgtcgagacgtatacattgtcttcttggtgttagggtcggcttgggatacacatgttggagggtggaacgtagccatgacgtgcacctgctggctgtcgttgactgggatcttcccaacagccaatggctcatgcttgcaccagacggtctcactagggggaggttagattatatggtcgatttgcaagggttcagtttgctctggcaggtgtgggcataccagcgttcgtgcgtatctccagagagctatcggacctcgattgctaggctaaccttgcaccttgccctttgttcttgctccttgttggttaatggcatgttggaatgtcgctggcgtttcgaatgccttgttggtctatagcatcagcgctccctgtgttatcatctattcccgccctcctcaacctgcagctgacgtctggcagttattcctgctactccgtaaccaacccagctttcatttccacattgcagggttacgtctaggcttattccgtatcgacattcatcatgcctgcacatcactaggatatatgacgtctgttcaagtgacgccgtgtggtgtgaccacgggattgataagatggcatataagtggaccgtcaagctgaagccggtctttccatcagctgattggacagaagcccgccttaggattctattgcggcccgattcccagacacatgcatataagctcgctaatcagctagaaaattggacatgcacagccaactgtctacaggccggtggaggagtcgcgctttaaaaactccagggcatgcactgttatcgcagtagagtagcggtgggctcagcctgatacgagtccacaccaagcaacccagtgttcgagtaccctggcgtcgtgaactgaaatacggataggcgagtgtttaagttgacgtcgatttgtctcgggactgcccgggtcccctattcggaatatcgcgggtaataaacatcgaaataaagacaccttttcaactcataaatcatgccacttggtttagtcaagacgactcaatgattaggatacttccgccactgctcacttaataatgctcttctgtgccgttaccgacagtcttggccatggtcgcgtgggctgttctcctgctggctgtagtggctgcgacgctgctccacctactctataactattcccgcctaaagtccgtttcggggcccatcctcgctgcattcacagatgcctggagggcaaatgcacagcggtcatcatcatcttctgaatacggccgacttctgaaagagttacatcgcaagtatggggttgctgtgcgtctggggccggggttcgtgagtttaagcgaagtgggggatattacaagagtttatcatactctgctccaggacgaggtctgtttatctggacccccagcccttgaatggtggatagctaactggatttaggtgaggcgactgggtcaggaagcccccctactgagcatcagacggtgcagtatgagagct

SEQ ID NO: 15082 - DNA, 509 bp, Emericella nidulans
  unsure (1)..(509): unsure at all n locations
ggaggttctttcgtgtagttgagtcagcgatagccgtattgatctggggatattgtttcacggtgaagtagactgtctatgttagcatagatgagaaactccagagtcgtattagcttacagatttcttctccggaagtgtagaaatcggagacccttaataagccataatacgctagggcgatagcaaagtgtactgcactnnnnctttttaggacccgagataggaaacggcttgttcaaacattcctccaaggatctggaggagaaagaaagtcccatagccgcctggcccttcttgacccttcccgaaaactcgctgtcctatctccgagatatctgtctggatgtcttccaaaccgaagacttcgccggcaactccttcggctcatccgtcttgtttggctaagctgaactgtaaccacattccatcttccacgctttgattgataccatccaggcgcctgcgaccaaggtcacagcgcccaataacttatagcatgccattcg

SEQ ID NO: 15083 - DNA, 2983 bp, Emericella nidulans
tgaaaggaaagtaggtaagaaaggtagaggaatagagtaagtgataatagaaaagtaaaaattagtggtgatgaagatgatgaggagggtaggtgagaggatgatagtataaggattgagaatgcagagaaaaaaagagatataagtaaagaggaaaaggttaagaaaagagataagatgaagatatggatgagaataaataaaataaaagatggagtaagggatgatagatatgtaaaagagagaagagaggagaaagaagaaaagggaatgaatgaagaaggagagatggaagagggggagaagaaatgaagtcgtgaaagagggaaggatcgaacaacgtttagggaagatgcagacgagagttgacgattcaccacagctctccgacgtcgaaaaatcctccaaaggtcacgcagcttcgctcggcgcctccctgcaaacatttcagtcaaaccatgaaggtgccattgttgaccgaatccatgccgctcgcgggaacaccgacgcgatcatcatcaaccccggtgcatatacacacacctctgtcgctattcgggatgccctgttaggagttgagattcccttcatcgaactccatgtgagcaatgtccatgcacgagagccgttcagacatcacagttactttagcgacaaagcgtcaggcatcattgtgggactgggtgtgtatgggtacaaggtcgcagtggagcatgttgcgttgaacttcaagcctctggagaaaaaggctgctctttaaattcttcttggattatgatactcctgcgacgtatcatgtaatttatgtcaaacaaagtttgctccatataaaatcatctggggttgagtgattctgtcgctatctgcgactcacgcggtagtgtattccccggcgacgttaatgtttgttgtgtcggaaggagaaatgaatcagtctggctggtgtaccgatacagctcgggattgccggcttccggaacgaatcccagattctgcatgaattcgggctggttgtccatcctagtgctagttagttttataacttgcgtgcagaagagaggttggttacctatctgtcccatcaagcgaggccaactcgtcaaacaaggcatcgaggtcaggagcaatccttggtcgttgtgctgagctagtgctctcgatgtcggctaaagaattgaagtgcaaactggcatcatcatacgtttgttgatagtgatgaccggacgcaggaaaaggcgtcgtcaggtcggacattatcagtgctgagttaggctttccaacgaccgaagagcgatgttgatgggtgatttgctgcgaagtagggttcgtttcaactccagacgcgatattaagagacgatgctggcgtcggtagagataatacagcgttttcatcgttcgaagtccgcatccaagttggcgaaagatatgagtcagtggttgaaagattcccagttcgagattcttcgattaagttcgtcaaacgcatattgtttccgggcaggcttatggccatcggactccttggatgggtaccttgctgtgtagcgtgtctcggtcttctctgcgagccagtattatggatccaaaccgttgcgagatgggcagaaaacgattggagtttgtggttgatgccatgagaagcctcaaaggcccatggggcagttttcttcatgcagggaagtggaaggcctaaagtcagagctataccgaaagtcgggcaggtagcagaaaggctataggtctccatgtaggcttgaagtagtgagaccaaccgcttggagccttccgaagcacgtcgtaatccgtttctttcgtttttctggactgccagctgtaagcttatagcggttgcaacggcctcgtacatcatctctaggccgaatatgtggggtgatgccggcttggtcgagactgtctgcaggtctatccgataacttgtaggaagtgccgagacccaaagctgcagttgtcgctcaagagtccctagatatgacatggaattcgctggtgtttgcctcacgcaacataactcattcagaatgcacattagcgagagcagacggttgaaagtgctgagagcatggaggggcccgcgttggaaagagcgggatgattctatcgggcgaagtccagtctggtcttcccaagggtgccattcttccaaaccatcttcatttattaacccaacctttgtcaagtcagtcttgcgcagcgaaggcaacaggcctaatttagcagcaactagagtctccagcacaaagcaccctagaaaaacatgtttggaccgtccagcggtcttctctactcccgtagcatcggaaggatcatttaaccctagactctgggcagacctaacagcctgtcctacaagcatccacgctgctgcgcagtcctgctggccaagctttatcaatgacaggattaagagcgcttgaatatggccgagctggtaggtcccactctctgttgggataagactccgtgctttggcatatagttgatcaggatcaggtcggtcctctggtaagtctgataactggcgcgtagtggatattgaggtttgttggattgaggcaagtgctagaacagcccacaaggccgcgttgtcccctgcggcggatggagagttgtattggtcatcgtcaccttggcggaaagctgttcgaagaatatcgtgtttttctaatattgggaaccaacattgcgtgtaggaaaagtatatatcaagtaaaggccaagggttaggaggcaagcggtgttcttctcgggcagaattggaagcgatcacaggccgatcgtgggatgatccgttagtggtaaggtcttcgatttctcctaggggaatcgtttgcgtgccagagtccctgacgagacgggttgtggatggcctaggcagcctcactggggatggcccagacgctaacgggctttgactcgcaaccgcgatagaatctggaagctgccactcaagcgtctccgga

SEQ ID NO: 15084 - DNA, 670 bp, Emericella nidulans
cgacccaattctgccggacacatactggacgcagcagattgagttgatagcctactgactacggccatgttgtgcaggcggcaattgaactaaaaaactattgttactgcttagtactaccggtgggtgaccacgctggaaatgctagaaagctcttttcagcttactcaagcgagtcgagctgataccactcgtcggccagcaaaggtaagagagacctcaggcacaaaatctgcagagcgtgaggcagcaatcggcgattcggatatcggcgatccgggactcggtgttagaccggggccatctggccaaagtccggcggaagaggaaagacgagaaaaaaagccggaacgggcgtgagtcagactgtcaacggactgtcaaaaaatcaggaacccagggttccagcttctgattcttcctaaggctccagctcgaaccgactgccgattggacacctggaaaatctggggctgagcgaccacctgacccattccttcagctttccaacgtcaaaaagtgccgtcctgttaggaatcagcctgaatacatcttgttacctgcatacgcataattttgctgcaggcgacttgataattcctgggcaaagaaatgtttataattgtaattagaacaaatgaattacgtgaacagatgatgatgcgatcct

SEQ ID NO: 15085 - DNA, 1217 bp, Emericella nidulans
tctagaaagattatcgcactctccctagaacatccttccctatattcttcgtagtcgtcgtattcctattcgagtgaatctgaatgcaggtggtgaccataatcgaaatatgatgaatttccattgcgaattcgtggttgctagcggtgcttctagcggtgacgagcatatggggagcttttggatctcggagatggttttaggacagatctgaatctgtcaatcttggattctgtcaagttgtcatgtaggatggcggcgtccgctgtttcatttcgaggataatctagctccctggccgtgggtgtccagaaggacgagaaagcgtagatgatatggcgcgtgagatctcatctgtgtgaggcgacgggctaaagaaggaatagattaagaagacaagagtgtttggagacgagtagtcctcaagttgcggtgatgaagaggaagaagtattaagatatttatcggggcctgtgagtaactgaagttttatctctctagccacttcagaactatgcaataggtaatagaagggatactgtagtaactgcatgtaagatctttacgagaggtgggagaacacctttaacaaaactcagtatcgccttttcgcaccctctaagggctcccaaccagggccgcaattgctgcttgagggctgaaacccccaggtcaagagcttgtatcaccaacgatttcctcaaatatccgagatttatttaattcctagccctgggcttatccatccatatcagcttagtgaaatcattcaatgatggcctatccaagcgtggtgacaatctcaagcatctcgaacaggaccatatcagactcgccattgccaatggcatttaagccaaccgatggctgccgactattactgttgactcccatcccctgcaagcccaaagccttaaccttctcatcacggtaactaaaccagaagcctttaatctctcacgcatcttacataaatcaagcggcatatgatcaaacggacattcggtcccgtctttcccggcgttacgccgatatgcttccgcctcattaacttatctcacaggcgccgaatgtctttatctctccgcctgcctgtcatactttcgctccttggtggctcggtgagaaattccaagacagcgatctgcgtggcgggtttgaggaccggccgcgcctctacgcctttgacgcctcgagcaggtacggcttcctgtaca

SEQ ID NO: 15086 - DNA, 585 bp, Emericella nidulans
  unsure (1)..(585): unsure at all n locations
atgtggccctcgcaggattcactcagaccatccatcgtctttcttgaatatccactaggccaaagaggataaggggggaatacgcagccagtgccactcaagctctgacagacgcgctgcaaacttttcaagatgacagccaaatcaatggccactccttcgtgccgattccaccactcatgaccttagcgtctcctatattgnnnnttcgacggcttctcgaagaccatattccataactctgtattcgcagctggctcttggttcctggtctcgagaaagctggatgctgaatcgttgttcgccagactgtggcttcccagctgactcggcacagctgttatccgtcctcttgactgagaccaagaaccaaacattggcgacaacccacgcccgccgcgcaaaataaatgaaacggtaaccgccatggatccaggcctttaggtcagacggcgtccgtgccaaaagaggggctgcctntcagacacttggcggcccacgagccagtatagctgagtcggctatactcgtaagcatgggcataatcggggaaccatcgnttatcattattatgcaacagggctc

SEQ ID NO: 15087 - DNA, 735 bp, Emericella nidulans
tatcactcgcgcacgaaatcgtattcgcgatggcggggtagaagcccattttttccgaggaatgttcctgcgtaccgggcgcccggggattttgcgcccagcagcatggcgaagcctgctatgccgacgaaagaaactagtatattgcaaatgccgcgctggcgggtgcggactgcgatgaagccgacggcgactgtgacgagcgcagcggcggcgtatggcggtacgctaaggagttgcgactctatgccggagtagcctggtcccaaagttagagcattgatttgcttgcagggcaatttggtaataagagatagacgtaccctaaaaagtcatgttagctagtcaccatcaattgggtccacatgaaagggtccatatatgctagggtcttaccagttggttgatgatggttggcacgaaacagcgaaacgcatagagacttccatagctccatatagaacacattccgcattatgtttcatccttggaactgctccgaagtacctctatttgaacttctattgtcagaattggctgtggtctttgcaggccctacctttttttgaaatttttgacaaaactctctgtcgggaaatttaccctccaacgggatctcaaggaccggctagactcatattaatctgctccccgttttcctaaaatcaatttgaatttattctgtagacctaagcttgtctgaaacagtgatatattctctaaaggggttttttc

SEQ ID NO: 15088 - DNA, 894 bp, Emericella nidulans
tggacacgtctccaaaagcacgggtgggatgatttactgactaaaatgacgacataaccagggactgattatgcggaaacacaaggcaccagcggaggttttatacaccatgcggctttccagcctgccaacacggttctaacattctacactgtcggaccgcgctctatcgagcttattgccattgcaggccacacggacatacccaaggagatcgcacaggctgagagaaagggatcgcttccacatcggctccagccaattgaatccaaagcctgaaactagacttacccagatcccaactgattcctctgcagattcaacccgttacttcgattttcagagccctgttgaggatacaagacaaaacacctttcactgtaaattccccgcaaccattagtttggtgtccctcctggtctgttcaaatggatccgttcccctgcattaacattccctataaacattcttcactagtactatatatttattgcctaaatccggatatttattaattccattttaacctcctaccataccttaatcaagaatcttagtaaacaccttagggccttaaatattaaacccaccttattataatattctattctatattaatgtatctctattaactattactttttattaattaacaccacattttatctcccttctttttaaaaatatattaacttattccataattattatctacatgtttcatttatataaaattctattttatttattcattaattatactatttctaaaaataatatattctactacatattttacatatataaataaaaattttacataattttactcgtaacttcaattataattacatctttttacaacttttattttctttatattatacttttacc

SEQ ID NO: 15089 - DNA, 593 bp, Emericella nidulans
  unsure (1)..(593): unsure at all n locations
gaaggccnnnanagctaacaatcaagtttaaancctctgcgaagccatcgtgaccctcgggcggaaggggaatctaatacagtnnnnncggttagctcggcctcatttctgttatacaggccgcctatctctatcactaaaatgaggcccaacactatacggcagcatttctcaccgagcctctaacgcctacaggtgagcatataatcactctctttgcgtcgcgaagaaaagacctttcctgaactgttgcacaggacctgagcctccggccataatctaggcctacgatccacatactgacggtacgggggaaggaggacccacatatatacctaacacatctacctcggtagatggagtatagcctgtcggatatagacatggttcatgacactagcaagacctgaccctgcaccttggccgccgctcaaagccttcatcgctagggcatcgacgctagagcagggcttttgctcaacacagtcatttgacaaagagagtacgccgattaattcgagggttaccatgcccaatgtgacatggctggactgttgcacggcttactataatagaaagtggagaccgtgagc

SEQ ID NO: 15090 - DNA, 542 bp, Emericella nidulans
  unsure (1)..(542): unsure at all n locations
ctgggntcactgatcgccccaaccctgtgcctgttatagngccggccacaggcatgagcgggcaaaaggggagcattctggggttannccgccgacactcgtgtactataacatgacattctcgtaaagaataccaagattccacatacccagttaaacaccctttaaaacctactgtgccattacttgcataactcctccatactgaacataggggctcatatcatgatggatatctttccagttcagattctgatgatcgaatattggaagcagtctcttgacctcttaaacgggccacgatgtcttgtaaattagatgcgcatggtcagctaatctccatgcctgaaagctgtcgccaatgggcttatacacaaacagcccctgcatctttacgagtcaaaaaaacctgtgcaccgggccacacagacatacacagtatacactcttcattcaatgcgcatgtacaaacacgcggttcttggacttggagcctgttttgaaaacaatgctacctgtgtattttccacctaacgtatgag

SEQ ID NO: 15091 - DNA, 819 bp, Emericella nidulans
  unsure (1)..(819): unsure at all n locations
gggtactaattatccagaggcgcgctgggcgctgatgatctagtaactactgcatgatgagggcttttttttcgggcgaccctaccactactcaaggggagcctgttgtaacgctaccacatgtttagcctgtcgctttaactcatggttcggcatatttataccatatagaatggggaaccctagagcccagaaccaccgcttggccttcacaccatgattctctctaagatgacattgttttgaccaattggcgattatgtcaaaccgggctgtgctctgcaagtttgtgttaagtttcgagattttcttgacgaattcaaaacgttgttgctacactcgaaggatacacaattcattagtactgacccatttattccactatcttttgtagtatcatcgttccttttctctaactctccctttagttaagtctttccttcatttatactatttttctaattccattatatatagtctatctatatctagtaaattttctaacttttttttccttttatgttaatattactattctttatatctaattctagttttcttcctatcattttcccaatctaatattatgtttatctctcttctctttatttatctcatatcttcttatctcatattttttatctatactttaatatttttttctttctcccatcatttcaaatatttctttatcttacattttatcattctctgttgtattgtctacatttacattctttnaaacctgggggtgtataaacctccccctcataattctggtatttaccactatcattatctttattttttttctttatt

SEQ ID NO: 15092 - DNA, 2067 bp, Emericella nidulans
taagtgcagaactaggcccgtcggtgcctcgcttgccatggcagtcagacacttcccatgcatcagagggattcccgggtacggagccgatagacgcggcatcttcctcgtcaacagagactgaggtcgttgttgccccggttggagcgggagggtttgaggggacaaagactacggggccaggatacgagttggatgccggttgaacgatttctgagttggagggacttgttgaatgtacgcccggttcctgagttgttgcttttgtatccggagtgaaattcttaattttgttctttcgaatgcgacggcctccgcgattcgaaccacccaggatacattctcgacgatcacgaatacatcgctggcatggtggtaccccgggactgccgctggcatctctagacataacagtcagtacctaggcgatgacttccatctgggttttgaacaaaagaaacgtacagatcacatttggatttgcgctgtcgacaatgcaaacatgctcttgaaacacgcttcatttggtgatctggacgagcctttggctttgataccggtgctccctgcacaggtgattgttcgtcctgctctcgaacgtccattgctggcaatcatacaaaccagatctagagctgaagtagtgataacgccattttcagtgctaaaataagaatagtaacacttctttggacagaatcaaggtgttggggaagtcgaagatgagaaaatatgaaaggaacgatcaatgctcgtagcgctgggcagcggaaaacctccgcaatgatctcttcgctccccaagtcgttgaggcgtatctgtctccgcacacaagtccaatcgcgttttatgcgcaatacagcgagacgaataatcaggcgctctgtggttggtccacgagccgatacgagtgcgtgcaaaagaaacttctcagtatggaattgttgcggatggaagaagttctgtcctaagcccaggcagatggctcgtattacgcatcccgtacgtaacgatgttgtttatcttatatcggatcgtcaggtccagctaacattggaaggctgcacaacaaaagcctcccgttctaaatgctctacggagtacaaagcaagtatagttaccgagccccgtcgagattagcgagtagattgacgattccagttttgtttctagttgaaggaaagagcttagtgcccgactgaatgcagctgcaaaagcgtggatcgctgggaatttggaaactagattgacaattcagatcaattccgggctccaaagaagaaattcgataagctactccacaggaggatatattaattgcattgaccctggactcgatcgcgattttctccctcaggcttcatagatatgtatggtaaggtccagcagcgtaagctgcaatacagtatagttaccaggcacgtggttcatttgccgagtgcggggatgtcggcctttgtcggctattgacattagcccgtcacaggagagacgtgattttccagccaattgaactttcatctttacaattcccttatgaatgttaatccatgggcttaggccagacgacaaattcaaagcaatgctgtatttttatgctgagcagcgactgctgggtacactcagccccactggctgaaaaaaaagttccagagtcgctggcgtccacggaatcctgaatgggaacgacatcaggccactatctatcgtcatggatagtttgtctacatggaacttgtcgcgctttgaatgcgactttggcatcaagtgttgtcaagtgttgataagcctacaagggggctgctgcgaggaagccccacgcagcacggcgacaactcacgttggctcaccttcctctggtcatcaacttgtctgtttgagagcgccgatacaatcagccctaaacggcaaacctcgctgaacgattctggttgggagtctcgagttgagtgcaattgctccccgaacccctccttgacaaccccacaaggatcatgaatcgggccgctttacgacataattcagctttcgattcctgatgctcagtcctaccctcaggttttgtct

SEQ ID NO: 15093 - DNA, 1258 bp, Emericella nidulans
tcatctcctcctcgacctgcatccggactgtcctaagctgtcggcctagcttccgtattgtcaagtggtcatagtatgcgtattcatcaatcttcttccacctctggtttcccaggtactcatccagcgcttgcgtgccatgaagccaatcgtcataattctcatgcttgtaaagctccctcctgagactctcccgcttccccctccacgtcacccattgctcatacagaaaaatatagatgcgcgtcagctaccgcccacgctcagaaacgtaatccacccgaggacaaacaaaagaaacggccatttcagaacggtgtagagcacgccctctctcgtctcgtctttcgtccgtcgtggtgcggcacgagcgccttttccgacgtccacgtccccttcgcacgacccgctggtacacgggacgccaatcgttcagggcaacgagcgggtcggcgtcctggtcggtgagggctttttcgaaagcacgtaagtcatccggattgaggaattcggtgtcgtagtcgggtatcgagctaggactgtatttgtcgatattgtcgccagctgctgacttctccatcatcggtttgcgttgcgttgattcatgttgtaatttccgttaatgctggtatcaacagtgttgggaccaccaagatagacagccatggactgacactgacgacatcgacgtcacgggcccctgcacttgaccgcccggcccggatttccttgaaaagacggccggtatggccaaactgggcatagcgcggggactcggaataacatcgttgcggaatgcgagccctatcaaatagtcacgtcacgtggctgacgtggctggtatcatggttggattcaaaagacaagccacccgaagaaagccaaccgttaaaatggggtccggtcatggttcatccctgtctcgtcttagacgatcgtccttcttcctgataagttatcgcgagacgggtcggcggtcgcttgtctccaccccagttgatccaggcgatcagcagtttgtcccgcgcagtgcgattctgctaccaatcagctcccgtcctggcgcccgtttctacagtttgttcccgaggtgccaggcaaaaaaagtgtccaatacacggccgatggagggggtaggtcgatgctacagtacaaaaatgccggtgccaagtccctcgacgacaacggcggcggtgacggttgagtgcgaatgccagatttcaagttcgtgaaaacctccgaatttcacattctgagt

SEQ ID NO: 15094 - DNA, 1721 bp, Emericella nidulans
tccccacggggtggaatgcgaaaaaaaaagaaagggagaaaagaaaataggagccccacacaagtgccaaaaaacaaaagaacatttctttgtgggagagggccctttgggtaaaggaacgacaaacttagggcaaagtcgtagtattgcgtacaacagataagttagtccaattttaggtcttataagcgtctcagccgggcgtgaggctctcaaatccagtaaagtgggaagaagctcggggtttatatctaagtcaatgacaatatcaacggttaatatatttagtctttgagtcgtggctactatccccactgacaaggcgcaacttacggtagccttatgcagaacaccctcgatacactccccgaaatattgtaaagggaggatggatgcaatcaaacgtcacctctaacagccgtggactcctatggtcttgcgatcctagtgttcgaggtcttcaacggcaatttcaccggggaggtcggcaagacgatgaatattccacctagcatgcatcagagctataaacgcctgggcgcggctaaccctaaactacgactaagtccggcacactttgtcgagcaagggaagaaaagtggtggcttttttgagaccccgctgatccggttgacggatgatattgacagtttaggtctaaagagtgatgctgagagggaagattttcttaagtgagtttcttccatggtttgttgaggcgatgcgctaacagacccagtgagctggaaaatctttcggaagactttccagaggaattctttaagatgaaagtgctcccagagctcttgaaatcggtcgaatttggcggcggcggcccaaaggtcttgtctgcgatcctgaaaattggcgggaaattgtcgcaggatgagttcaacgccaagcttacacctgtaattgtgcgcttgttcgggaaccctgaccgggctatcagggtctgtcttctggataacctaccgattatggctgagaacctttctcagaaagttgtaaatgataagatcttccctcaaatggttcgtttgtcttgtgcctaaaaaccctgggtcgagctgactttattgcagacatctgggttcacagacgcggcgccagtcgttcgagaacagacagtaaaggctgttctgcctattatcaccaaactgagtgaccgcacgattaacggggaacttcttaaattcctggcacggactgcgaacgatgaacagccgggcatccggacgaatacgacgatttgtctggggaaaattgcgaaaaacttgggacaaagcgtcagtacactaaatacctggttggtgcgtcgctaaattgttaccagtcaagagccaaagttctcgtcgcagctttcacacgcgcccttcgagacccattcgtccacgcccgaaacgctggcctgttggcactatctgcaacgttggacatcttctctgaggatgattgcgcgaccaaagttttacctgccatatgccctgccctccttgaccgggaaaagtgcgtcaaccccttattcctttagtcaatcactgacagcgtataggttggtacgggaccaagccaacaaaacgctagacttgtacctacagcgtgttcgaaaatttggccataccatggccgatacagctctcccagcaacaaattcagacgcgcccaaagacgctgctcgcataggaacgtccaatgacaaatcctgggcgggatgggct

SEQ ID NO: 15095 - DNA, 525 bp, Emericella nidulans
  unsure (1)..(525): unsure at all n locations
tcccccacccncccccaacgtgtggcatatgatgatttaactccgnnnncccgtatccacccactctcaacatccccttacatcattccaaattgaacacaataaggtcgtatccaacctttaccacatattccattatcatcttttacaaaccctatctcacacataccccctccaccacacacaataatatctcttctcattctaatctcaacattgcttaacaactctttactttcccaacacaacgaatcactccccaataatcccttaactcattccaatcaaactactctaatcaatatctcccttcaatacttccctacttttacgaatgcacacaccacaccatttcattttacagactacatcaccctcactcacttctatggtgccaaccctaccacctctaaatttcctccttttcccacagaatgtcaattttctcattagcgattttctttccaataatactaacctttcatttttagcatttaacccatctaacctttttcatttactaaa

SEQ ID NO: 15096 - DNA, 1834 bp, Emericella nidulans
tcttggcgccacgcctcattcccacagctcaatacctcccactccgtttccagctcacgcgctcgctgcttcgtctttctcgcgcttcaggcacatacatcccgctcgcccccctcctcctcgaacccctgaatctcaccgaacttcgcaaagcccctaaacaagctactctgcgaccgctcgactttacgacaacaatccgcgcgcctaaatcctacctccgcacccgggtgtaccaggatggcgccgccgagcaaatcgccgaattgctgtctgaattcttcgtcctctggagcaaacacatttcctttccggaactgagcgtccctatcgttgttgctctcaagcgctggttgaaacaggtttcatctcggtctggcggcaaccggaatcagaaattaaatcaaatgatcctcttgcttgtgcagaaggtcgaggcgaatgcgaagtggattgaggaaaggagagcgcatgttacatttgcgccgaggaacaagacggaggtcgaggctttcctcaaggatgtagactgggagagtacgccgttgggtgcatttgtaaaggtgcagaggaagctgagggaggaaaaggcggctcttcttgaggagggccggcgagaggaggagaagaggaggcaggaggagagggatggcggggatgatgttgttatggatgatgtggctagtgagaacgatcacagtggggacgatgaggaggaggaagaggaggaagaggaggaagaggaggaagaggaagaggaggaagaggaggagatttcagaggaagaagaggacgatgactgagtgtctattctagtgtacctttttcatgctacacagtatcatacctgcgcttgtcgtgatatttttctataaatatcgccggtcgtgttgttattgctcatatagatatcaggttaaaagttaatggcgaattgtaagagccatatccgctctatgtctgttcagcttccgttccattaagacatgaaaaactagtctatatttcgagtctatgatcaacatcgatatctctatggccaacaatctcgaatctatagcgtcgctgcgctaaacgtgatctaaaacaaaaactgaagaactcaaacaattccaggcccaagatgtccaacctgctgatgctctcttcccgaaaccacattctcctcttcagcccacgcctgggcgtttgactcacttggcagcataatcgcattatcaatagcaaccggcagccctcgatgtctccccctaagcgcaaccgctgctaagataagcttgctaagcgaatgccatactccacagaatgacagatcccggccagggtagccggtgctaatgccgacgcagccataggcagagatgacttcgaagagaatgttgaaggtcgaatatcctacgggatctttggtgtagttgctggactccatgatagagattaagaagacggcaagcgcgatccaccaaaggtcgtggctgagctggtcttttaattgttcgcggaggaaatgcctccgggtgccttccttgttgaggaagaggtgacggcgcagaaaattggtgaccgtgtttggggggcgcttgtcgtgaccgtagagggtttcatcctcggcatagataccaagagagcgttcttcgtagacgtttgtgtgcctgcgtgctattagaacggcaggtccagctgaaactaatagtacgacttacctcatcgtaattagcacggggaatggcgatacatactagacaaggttagctgaagcacgcaatattttgctaatgatattaccatcatgagaactagttatagttagcctagctatttttcgaaagaagga

SEQ ID NO: 15097 - DNA, 2708 bp, Emericella nidulans
aataaaccaaacgagcttttgaaaaattcgcccaaaaaaaaatttggaaataaacgaaatgaaagaattcgggaaaccactcccccaacccccaaaaacacaaaaccaggaaggtttggcattgaaaagggccgtatcgaagaaaggttaccaaacggactttccttggataagggaaagcgattttggtccaggccgtgagaaccttgaccctgcgcaaacaaggttaaggccataaacgagaaagggggaccagtaccaccaaagttacgcgccctgttgacgagtaaaattgagatgtgtctatcctccgggagatgctggttggtcatgtcgatatgctcctgcacggcggtacgcggtagatcacgaattgaaagcataggggtcggtgtcccttccccattctcaatcgagtcttgtaacacggatggagcgattgatgttcgagggtatgcctgctggcttcgcagaccaatccagaagagcatcgttaatgcattggcaacagctttgtggaagctctcccaggttgtggctgtagcaattgcagcggcggtaacaatgccctgcgaatgacctgtagtcccactaaatcgctcaagaatttcacccggttccttcccaagcaccctacaggtgaccgcaaaatgcgccaactgcactagcccgatcaacggcaggctgaccggtgctgacacaaggtaatcgacatcgggctgagtgtctggttcccggagccactgcatgacatttagacccttcggatacagtttgttggcgtctggctcgcgggaaagagactgcagtagctcggcggatgacgatatgaggtcatccacaaaggatgtgtaggtattgtaaacttctctcaattcgtcaaagtactcctcaatgttcccctgccctccgaaaacagagtagatcctggccttctcatccgaagcagccctgaagagtgcggaatcgtagggctttgtcggccttccggcagctgctcgcccagcataataagcttcaacaaccagaactttcttggctgtgattccagggagggtggcggcaaccgcgtggacatcattcccgcgcatgaatgcccgctcaaattcattaagagctaatttgagaacgtcttgattcgtaccgtgggcatcatcttcaccctcttcaacttcgtgagcaacatgcccgatgtaccgagcaaccagctctgctaccgacgaaggctcatcatcctgtgcgagctcgtctgtgggctctggtagtgacgctgtgaaagtgtctttcagctgcgaggcatggaagtgaagcgatgttggcacaagaaacgagaattcaagcgatccatgagataagatgagcggcctcaatgactgtgatgaacgaggtgtattgatgccagtctgaggacctgttgacgttccgtacatcttgccgtgatctcgtgttttatgctgcgttttttttcgtcgtggcaatcctgattggagcgggaacgggcagactagagaaatctgcgaggggtcaataaaaaaagcttcaactcgaatggctgcaaacaaactagaccgatcgtccgcgaggcactatcacatcagagccggaatagtgtgctatgaagccaaatgagcatattcatacctattattatgagtaactattcaggcttgagatcttccccactgaggcagttcgggattatgccctaatggaattgaagattgaatgaaaatacagaaaataaaagaaggtctataaagaagagcaaaatggggcgcgacgaaaagaaaggtggaagaaggccctaagactgatatctttaggtctgcctggcagaaggaaaaagtatcggtcggccgagcaagaagacgtgccgagtagctgcaagagcctgaccgttcatataaagttttgtaatgttgaaccagtcagacggaggggagcttccacggatatggactggttgaacaggaaatttcttaaatgggtatggcggatcgtggatctgccccaaaggccataaaacggttgggctggaccatttgagtgtaatatcgtgacaataccatacctatctatagaaggatctatttgatattagagctgagctgatttgttgcgctcacccagacacttgctaagtatgattagtggagatggtttttctggaataaaaagcccaaaatttcctcagttccagaggtcagctagagattaaattatacatgaatcaatcggaacacttcggattcgcggctctggcttccatcacccggaaaccttttgcgctgggtgcttgaatctgaactcaagtaggaactgtgggataatgtacctaatctatgttgaagtacggagcaaaggagatattatgtggataacagacttaacttcgtccagattacagctaaggaacagctaaggaaaaaggcaggaaaaattacaacctcaaccgcccaccgagtcaaggccgattgttccaggttgcctctagtatgggttttcttggacccgaccagtgcaataataaccagaacacgtctcgccccaacaatcatcaaaagcttgctaaagagttgttatcgcaacacctcttgagcttgggtccccttctctggagcccttttcttgttcttgctccgtgtaatcttctcttacatcttcttctccatttacattactacccacttctttattcagtttttaca

SEQ ID NO: 15098 - DNA, 2938 bp, Emericella nidulans
aaaattgagccgcttggttttgacaggttcaaaacgtgcgaattgatggctgagttgcttcattgcagcaacatggggctgttgaacgagccagggagtgacgcttatgttaagcagagagatgcagagcgcgagaggattttaaaagaaggtgcattcgatcaacaccacgagggtacttccacgtttggcggtaatgactcgaccgtggattttgtcaatggttccgtcgcgggctttgggtctccggatgattcaagggacttagacgcaacgaatgctggtgaggaatgttttgaagatgttagctcatccactgttcttgtcgacaaagaaaaagcgccaagcagcaaggaaggggactctaacttagaaccatcgtcagctgagcaaaccccgcccactacaggggaccagcctgagactgaggccaaagagaaaaccactgctgagagtaagacgtcatctgataacgggttatcgcccaccgatgaccttgcctctcaaatcaataagatgtcgctggaaacaacaccggtcaatgatgagaaccaaaaacccacggagtctacggagactgaaacaggaccggtctcagcatcagccccaatgtcctcgaatcccgacgctgtacctgcccctctgtttgctgccaaggagcaaaaccaagcagcggctgttgctacagctgacgccccccaccaggttaagccttcagaggctgtaggcgacatatctgagaaattgcccgcagaggagacccaaggtgattctcaacaatccttgcaccccgacgttcaaatagacacaaatggacagcctgtagtcggcgactatctgaaaatcatgttcgcagaaaacaaagttgttcccaccatactggtgagtgttcaaacattatcgcatctaccaatgctaactatttccttcaggacttctttttccgcttcccctggaacaacttccttcataacgtcgtctatgatgtcatccagcaggtattcaacggacctatggatcgtggatacaaccgtattctagccatcgatgtcttcgaaacgggcagaataacgcaggcaattattgaaggccaaaagcggagcgatgagactcaacggagcaagagaatccgtctcggatatatgggccatctgacactaattgcggaggaagttgtcaaattcagcgagcgccatcctccagagctgctttccacgactgtaatggacaacgtgctcaacccagagtggatcgaatatgttgagcagacactttctgagacgagagagcgtgacaatgctattcttggtggagttcgacctgatatttccatcgggcatcggcagggtatgcttggggctggtcaatcttcagccctggctgatgctggcttgaatggcatggctggcaaccaaaacttccaaggatttgacatggtgaatcaaggaagtgtatcgggtggggcatttggtgctggtggcaactcgttgctcagtggatttgcaagctccagtgacgatgaggatgaagacatggaggatctggatgaccggcacttagccgaaggaaccgcggaaagcggcaccgagaatgtaggtcacggtccctctgtcgatgctgagatgcgtgatgcttgaatatcctttacgattaccgctgtcgtgtgtgctcaacacatccgcctcatgtacgcagtctgtttcaagacttgggtgggttgcagagtttcttgttgtctgtctggcctaagaatcgcatcttccagccgatagcatagcaagcgtacgaccaagatatcgtcctgacatcgctaacctacaatcccacaggcatcgagccaaccgatacctatcctccctccgcccccagctccccttagccttggcccatcccgggcgcggcgacaactcgctgcacgacttgcggctcagaaacaggcagccgaaaatgccgagggtggtgaaaccgaagacgagaagcagcgctcaaccgagtttcagtggccgtctgatacctttggtggccaagaatcaaatgcaggtccttcatcggaattccccgccgctaatgcctcgtcaccaacgttccctgagtctggatttagcccttcagactcattctccaccggctcttctgatgagggggacgatttcggtggttcgagacggcgcaaggagcgagttccgcttgaggttgatgacgacgatgacgatatgggcgaaatggtgggcccatcaatggactctcacatgatggactcagatgaagaggaagatgccatcctcaatgagtcactagggtatccagaacttgggcccgggcagtacaagagcttccggagctctcgattgggtcaatctccatttggggatgatcaaaatgatagcagcgaaggggaggatgaggggcttgtggagattcttgtcccaggcaagaaacctcagtgatctgcctcgcctggaactctacctctaggtgttttgactcaaactcattctcgacgaactaaaactcatgatgatgattatgatgatgtacactatttgactgcatggcattgtatatcccaacgcgatgacaaggagcacagcgaatacgaatacggcctgttggataggttaggttaacacagccttgagcggcactactcccttcaacattgatctgatgctgaatgatgaaaactacacaatctagtggcgttatactgtgattttgtttctccctttttttttctggttgttgtctttgcgtgcattttgcatttgtcttacgatggggatatcactgctgaagctatggtagcctttatctgcagtactgtacgatagttgattagacaaagaatgctcttgcgtgtttgaactatcccgtctacatagagcagattgcaagtccgccacaatttactcactcttgcggaatatacaagtacgtc

SEQ ID NO: 15099 - DNA, 654 bp, Emericella nidulans
agctttggctctgtctgtgcataaagtgtcggccgctgtccgcctatctcgtgcagctgggctactccaacatcgacttcataactacctccacactgtttcgcttttccttaatcccgctgattggcttccactgctcagactgttatctgactaaatcacttgggtcactaccaatggactcaacaaagtccaacatcctggtgataggatttggcggcatcggcaccatgaccgcatacaatctcgaagcaggtggacgcgcaacagtgactggcgtcctccgctccaactatgacctcgtagcctcgcgtggtttcagaatctggtcctgtgaccacggtcaagttgaaagctggagacctacatcgggtatgaacgctgccagacctgtcagaaacaaagctgacatgatgatagtcacaaaggccgtccctgacgctcgcacaatggcctcacctttcgactacattcgtcgtctgcacaaagaacatcccagatataccacccacggtcgccgaagtcatagcccctgcaatcaccccgcgccacaccttcgtcgtgctcgttcaaacggtatcaatatcgaaagccgatatcgctgcctttccgagaatgcgtgatctctgtatatccctcagaactctcgagctc

SEQ ID NO: 15100 - DNA, 5337 bp, Emericella nidulans
agtcttccacagcggagcctgagttcaagaatgtgtttggaaagctcaggaaggcagaaacgtcaaattatgtcgcaccggacgagctcaagaataacatactcaaaggcaaggctgctctgaacatgactagtggcccaaagaaaacccagagagtggatgaacttaaagagagcattctgaagcagaaagaagctatgaaagcgaacgggggctccgttcgacggaatacacttgagcaagcggaagctcccaccgaagcggtcccggaggccattatgaagcgccggcacctggccaagtcaagtattgacaggactaattctccagtaggtagtctgtcaccgactgcaggagagggtgaagcgccggtgtctcaattactccggcaaccctcgcccatgctctctagcgacgaagaatctgccacgacggcccagcatgcgcaaagcgccgttgatgaactcaggtctccttcaagcgaactaccagaaaaaaacacagcaccaattacatcagataccggggtgagggacgaggctgcgcgtcatgacaccaaggagttggtggaggtaaactcagagacagggcaaaagcaaccgacgatggaggccattgaaccggtgcgtcctctgccaccggcaaatactacgcgaagttcactgcctgtcaaagaggacgtcgttactaaaggtagcctcgcaggccgaataaaccctgccctagcaggtcttctatcccgtggcccacctgctgtatcagacggctcgataaaaccaaaagttctaccggccgccagggaaagcgccctgccgtccgacacagccatttcagcccctgcactcacccatttgacgaaagctcgcgtaaagggccccaagaggcggccccccaaggccattcccgtagcggacgagaatacagagccgacagacttgagcgtctcagccaaaactacaccctcatcctctgatctagatacgcctgctacaaacttttccccaaatgagaaaccgttgcccgacacaagaagttggcctcttcctgaacaaggtctcaacgactcgaaagctgcgccgggagctgattcgccgcagtcctcgctgccggtcccaagtgtacctcaggaacctagagacgtcttaccaccggtaccagagaaggataaatacccggatccgctactttctacgccgtcaaaaaggtctccaaccttggagcgaaaggtttacgaagcagaaaaccagggaaagtctccctccatatccgccttcactccatctcagccagccagctctccgtcaagtcctcaaaacaaccagccacgaacctcatttactcactactcctcaccgacaccctcgccgctacggactagtttcagggagaaccaacccgtcccttctccgcgtatgggtagcccatacaacttcctcaaccgatcaagagattcgtcaccgttccgaaagtccttgccctctccgcctgttccccctaaaggaagctatgcttctactgaccaattgtcgtccccgagatcatccgtctcattagttccgcaagctgatgaatcccttgaagcaatctctcatttctttaagacgcttccacgctccagtgatcgtgtcaatattgatccacagttaatgctgaccgacaaaggcgacggcttaagtatccgaacgttgagaaagcagatatgggaaattacgggagaaggcaacaagcaagatctaccggttaaccaggagtacattctttacgaaggcgcaatgtacttgtgtgtccattcgttcgaggaggatggcagtccgagaaccgaagttcagctttggcgcggcgatgatatttggggtggagcagtggatagcgccttacctttcgcacgtagggttgcccgtgagaatagctgcaagttggaaatcatcagccaggggaaagaaccagcccgtttcattcaggcgctcggtggcatcctaattacacggcgtggctccagctcccgttccagctcatcggccatctttatgctgtgcggacggaaacacctggggcaaatggtatttgacgaggttgatttctcaccgcgtaatctgtgcagtggctacccgtttgtgatatcagccatgtttggcaaggtatacttgtggaaggggaaaggaagttccgctgaagagattggcgcggctcgtctcattggtatggaccttggactgacgggcgaatttgaagaagtcgccgaaggagaggagcccagcagcttctacgaggtttttcctcaacataaggagacagaagaatatgcacaatccgaagattggcttttgaaaccggctcatgatcatttccgccatcggttactccgcgtggaccatgagcttggccagcgatcgttttggatccgacgtccaggttcatcatctccagtgattcgtcctaatgacacagtccaggaggtcgagccattctcgcagaaggacctttcaccacggggtatctacatccttgacactttcttcgagatctatgtgcatcgtgggcgaacaagcttccaataggccggctgagtttgcatcgggggtcgtctttgtgcacgaatacacgaattctggggcgctttcactttaaggatcgacccttttattcccaggaagctttatattccctagggcgggacgccccgagaacttgcccgcagcgccatatccgcaaaatgtgaccccgtcgtcccgttggaacggaccacccacagggtattcccaattgaatgcctgcgattgaccgccattctgatcttaaagaacccatatcttgctatcttgccgaaaggtcttttgatatttcaatgtgggctaacatatcctcttcctggctataattagatgatggggtttcaatttggaaagcaacccatacttgcgcgataatcgatcggtggagtggggccattgtcctgagcctggctttcttttcttctttgggtatttttgtgttatatggggtcactttctcggcctataaccaaatgcatatctgcgcggggttttatgctttttttctttctttctttctttctttttttttagtttgtttgggtgcatgggtgggcatctcgaagggtggtttgaggtggtttcttgactgagcataacagctgcaatatcacaaagattctcacaattagataatttgtacggcctaacaccttagaggaacctgtctttgagacgctgctctttattaatttcatcactaccatgcttatctgtccgtaaagcagtggaatggactcctcacgctggaagctcaatttccatcccagttccgttcttgttgactcgggcatagcctcccattcttcactggatacatcaggcagtaaacatccgtcgggatattgacaattaaatgatttttcaaattgttcattgtaaaaaattggagatggttgaagttgccggtcttggccccactccgcggttggagtttctttagggatatttcgccatcacatcttcgccccagactcttctctcattgttttgaacttaggctttcatactcctcttttacctagctattgttctcatcatccatactcatcatgtcctaactctattaggatcttcattgtgacatcgatacacacaaaagcagccagtatggaccccgccgttgctcgcgagctctcccgcctcgaccccgcggtgccgttccgcgcctctagcgggcatcttcatcatacttgggctcggacgttctactcacggccacagctttatattcagccgcaatcactagcagagattcagaaagtcgtcaacttggctcgccgttgtcgtcgtcggctggttgttgttggtagcggccattcgccttccgatctcacatgttcttccgcgtggatggtaaacttagataaattcaatcggatattgaacgttgaccgtgagactggaattgttacggttgaggccgggatacggttgagggatctggggaaacaactggagcaagaatatgggctgaccctctcgaatctcgggagtatcgacagccagtccattgctggcgtcatcgcgactggcacacatggaagctctttggcgcatggactgatttcagaatgcattgtttctctgacgttgatgttggccaacgggcaattagtgcgatgcagtgcggacagcaaccaggcgctttttcgagcagctcttgtctcattgggggcactgggaatagttgtggaagtcagtttccgctcggagccgtcgttcaatattgcatggaagcagacaaggcgctcgctttcgagtgtgttggatgagtggtcttctggcttgtggacgtcgcatgaattcgtccgtgtatggtggatgccatacgggaagagcgtgattcactggtatgccgacaagacggaccttccgctgaagccaccaccaaggacattctatggagagtccattggctaccatgtataccataatctgctggccctgtcaaattactttcctcggattctgccatgggtggaatggttcgttttcggtatgcagtatgggttcagagctgagaagacggtgacagaggcagtcgaaaaaggacgtactggtctcttgatgaattgcctctactctcagtttgtgaatgaatgggcactgccgctggaaaagggtccggaggcaatcacaaggttgtcggcctggctgcatggcgataccgaaacagcccgcatcccttttcccgttgacggactctgggttcattgccctgtcgaagtcagggttgcagatactacactcaacaagtatcctcgtcctttcctcgacccgagcagtgctgatgggccgacattgtatctcaatgcgacactctaccgtccctaccacaaagaccccccttgtaaggatcgttattatgaagcatttgagtggctaatgagggatatgggcgcaaaaccgcattgggccaaaaattttaagtcaatgggccaagagctgcggcagatgtacggggagaacatgaatgagtggctcaaagtgcgtcaggatgttgatgcagacggcatgttccttggtgaatggcattgtcgtacccttgctttgtccgatgacagagctccggggtcaggatcctccgtgacaagcggccttccattgatggagcgcgagaaggctcgtcggcaggcgaaatttcgcggtgccggtgatggtcttgagtggattggagataaccagtggcacacagatgcaaaagagacgattggtgttttgtcgactatggaagagaagcacaactcaagttcaccaacaacagcaacaagtgaggagaggg

SEQ ID NO: 15101 - DNA, 533 bp, Emericella nidulans
  unsure (1)..(533): unsure at all n locations
caaggcaacaacacatgtaaactttattcgcgagacgctcccctttggggggcttgagggacatgctgtcacanccgggtcgaattatgagtggcatacaggcacggtggttccactgaagcgaatgacatgaactaatacgaagtcttttggcaaccaaggatgcttttcggacgcaaaaatggcgacgcacttgaaggcactttccacatataccttaccagccattgaaagggggcaggtggcccttggctgtacaacgggagtgtgcactccgtttacagactcctgggtccacaataccgccacgtctacggtgtctacactgttatggagaagatctattacgtgggctatacacgccgctgcacgcataccgacagcttccgaggcctctctgttactatcctacggttgccgtcagactggagctctggccaaccggatttaatggaaagaactgctagccagtgaagagccagctccacttagagcggacagagccaggtggagactaggcggatgaggtgtag

SEQ ID NO: 15102 - DNA, 1403 bp, Emericella nidulans
aagtgtatgagtgacttgcacttgtgcgggatccactaacccctattgtggcaaagaccgccaagactttctttcatctctgtacgaggaatcagcagcagtagtcgggtagaccaggggaggtagcccgtacctactgatgttctcacatagggttcaccgggggtaccagaattcccggaacaaaaccgccaaaaccaatgcgcaatgcacaacggtacttttgattggctggctagctatcaagatatcatgattctagggaggccgtaaccggaaggcggcgggttagggccaagctgctcagaactggctgctttgggcctttggagagcagagcacaaagcaaagtacagagcagagcagccacgtgtcgttcctaactttcacatccatctaccatcagcgagtgccaggaacagagacaagcctttttgcaatcttcaccaaagctcttgccagactctcgcgagagcaactgacatgattgttggcatgatcgccacctatttctgatcctcaccagcatccacaagtgtcatccggatagctggaagactagcgtgcagttccagagacttcttcaggggaataaccagttctagcctttcagacagctctttgtgccaagagacctgagcctggattgtggccagtcatttccttttttagggctagacgccgtgcttggcgctctagtaataacaggccctaccacgacttttgtgctattatggtggtcaatagaccaccaacatgaacaatgtcctagagggtgatcaagtagaatatagagtcactagaatgcgtgttcgatgtatttatatcacctaactctctgagtgaagcccaggatggtcacaacagtatcgggtattcagtgtgcagtgtagccggttaagtggggctgctaactcaggaaagcccggagttaccccggcctgaaaaacgagtacacagctcatcgagctctgaaaaccccctggaatccctagaccatagtattatttaccagttagttgatagactatattttaattaagtatttttatttgtaagaaggtgttccaatcttccggtctgctgcgagtgcgaatacagagcatcagctcttggttgttgattctatgatgcagcgcgccaacaggatccaaactcagaccaagctagccttcagggggatgggtgaggacaagtcttgggaatgagctggcataaagagaagaggagatggagatctataggttgagatctgtgaaaaccaagagatggacatctataagacgagatttttgagggcagagccttctggcttgaacagagggagttgtagagaaatgctaccattgagcctcttggcaagggctcctggaccagaacttgtccggtatgcaggattttga

SEQ ID NO: 15103 - DNA, 1849 bp, Emericella nidulans
ggctgtagcggtcataagaccataagtaccctgctccttcgagggttcatgatgatgctgggccactcctcctccatctacgaacggaaggctctctccgccgcacttatccgctccatgccgtttggctcccgctttagaggccgtggtgcaggtgcgtacttaaacactgaatcaggaccaagctgcacagatacacggatgaaccggctgcgggagtcatcctccttcagagattctatcgcgtcgagaaaagcacttttgttgtccaccagaacgtccgagatcaaccgccgctctatcgtatccagatctgtacccacgacctgcttccaggacggactaacccatttaacacggccttccaaatccaggtcgacgatgacatttagggtctgctccgctgcttccctcaggttctcccgttcttcacgcattgtatcactgctcaaagtacgcgtagggagattcttcggatcgacactccgggcctcctgccgtaaggcattcacggccggtggagtaaggtactgaacattttccgcgtcattgcccgccatgctggcgagacgttttcgccgagaggagggaacgggtcccagtgcgtgaagtcaaaggatgtagaacgatgaatagccggaaattgtaactgtaaattgagcagaaccgtctgcagggcagagcggaagccctcgttggttggctacggattcattcgctgcattaaccggccatggcgaaatcgcgggggtggtgaagagcacaagcagccctaccgcgacggattaccggatcaaaatcgtggatgtaacagctgaggtgacgctctcttctcaggaagagaacgggtcgagaaaaaaaccgactgatcacgtaagaggttaagaagtcgaaacgtgaaacagcgtgagaaagcggctatgcggggggattgaatggcgcgacggtcaacgcgaactgaggatgatccgcaccagttgacgtttgagcaggggtgagcgaccaagggcttgtccgaaagccggagcaggagattcagtaaggagagaaatatttggagacggggatagataagtgaacgggagtagatagagcccagcagagtaacagactggaagtcaagactcaagagtgcagagcgagtgctctgaggttggccaatggttcgcgattacggcctgactaagagcccgtactagcggataaacggtcgggaagatcacgtggagaccatcccagtccaaaacatccactgtcttctactagagttggattccggactgtcgatcccgctatgttttttttttctttctcaggatgctgatggagcgcacacagtcttctcagcgaatttggaggaattgaagcaattgacctgtcgaaattaccgggtccgatctgttctaccctatgatcggaggcctgctccacccgccgggacaattaaggacgccacaaacagacgcacttcgtccctcggtcccaagccagatcacgaaagaagtctcaatatcctacagaagaggatcatgctagttaacctttctggccttaccacgagtgtggatgaagccgagacaccatgactgtttacccagccagtttccgtgtccactttacaaggcttcttttactctgggttggagaagcccgttattcgtcaggaccccggctcttctagcattagcgtggattatattttttctacgtattgctgactgttaagacggctcgttgatggggtaccgtttttatcatggtgaaagataggccttcgccgactccaacagtgttccgccgagatcgatgtcatcattgtcgagcgccaaaggatatacatccatggata

SEQ ID NO: 15104 - DNA, 530 bp, Emericella nidulans
  unsure (1)..(530): unsure at all n locations
acagaaggatggctcattcacttgcaatcctatatagccccttattatcgaactatcaactcttgcgtgttcggggagctcatactactcccnccgcgccgccctcttcatatccgatcggattatgctgatgcacaattcatgactccgcttaccaatgatataacctgaatacaactaaccaaaaagatcatggtcacactagctctgcgtgcctccgacatcaaaacaaccgtagcggcgaatataatctaccgtgcggcaataacttgaacgcacccgcctgtgggattcaattatggattaaatgcatacacctggtctcgggtcgatacacttggaacgggagaagcctgtacactaacaccacgctcctcggccatctactaatggagaatgcgcaaacagtgcatgagtaaggtgaacctgcaattatagtcaccaggcgcaccgatgcacgtaggcttgattgatgtgcgacggccgaaaaccttcagccgatccagcatgactgtgctgtatgtgatgac

SEQ ID NO: 15105 - DNA, 756 bp, Emericella nidulans
agattgagatacagggcctccgcttctactatgccatcattgttatcaaagttgcaagtacacatctatgattggcttcaatgtgaagttatgtgtctccagtgaatcctgatatccctcgtcagcaggttgtacataaaacataagcattggttggctcacctcagtcacctgaaagttaagaatttcgatgtcgatcactaacacctcattctcggtaatgtggtttttaagaacttcacgacatgcaccaaacagtttaccaaaagattcgtatgcaagactctcgtcttctagaaaaaatgtttccgaagcattaccttcccttgggggaaacagcgagatctcattgtcctgatagtatactttaaccggatgggccaggggttcggcgattctggggcttgttcagtttctggtcatgggtctaagaacttggaattggtccttgcgactggacttcctgattcttgcatcataattggttggctgaatttggcccggttcttctcatggtccccctttggcaggcctgggccgtgacctgacattgtttaatgtaccgctgggggtctgcttgctccctggggggttgttctgtttttagtttaatggccacttttccaaactgggttccctgaactgtttcggttttttgccgttggtgccatcagcggcccaactggcagggttgccgaatggttggcccccaaaatttgtgcccccggtgggctacggatttaccccctttggaac

SEQ ID NO: 15106 - DNA, 2399 bp, Emericella nidulans
ttcatcgcgtacaacccagcctcctgggtttatgggaaagtagggattcttcactgagttgctgcgcgtctgcctggagaacgcccgtctctcacttcttcacgaataaagcacagtccagtacaggacagagcgggtctttcggcactccaactcccgcctgcacaaccaaagccaagaacagaaccaactccaacgccagaggctgtgtttggatcaaaggaatgacaaacggactgggctcagcccaggtttgcgtctaggggattgcgggtatgcttcggaacggaaacttcgacatcgagtggctgtggctcgtaaacgcacaacttacttggcccccaaggccaagaggagcgagaaccgattacacagcctggaaggattcgggcacgccgtggaagctgcaggatcaagcttcagctctgaggacaatttgagtttcgggatttgttcagccctgtcagccgggcgggagaacattccgacacatcctgtacctgttctaggcttagggcttccgagcagaccaatcaatttatattactgattatgctatcaaaagcacgactcaaatacgtccgtagtggacgtaaaatacatacgatacatacgatacatacggtacatacgtacaatacgagctagcttatatacggtaatatacgctcgacgagtacagggataggtacatacgcaggatgcatccggccacatggactacacgcgctctacccttgcaaatccaacgaccaacgctgcaggaacacccaagtggccagaccgaacattttctgcatactaccctgctagcaccagcctcgccgagaaaccgggagcacaaaagcaggtctgaggtcatctcgaactctgctggtggattcttcgaaatagatgccattccccttatcccacagggtataataataactccagtcgtctaagaagaagtcaccgttgaaaagggttcttacgtggagcattcatcagtgtctcaccaacaaactaggaaaagaaagaaagaaaggtcaaagacgatagggaccagacatggtcgccgcccaagatgatggtgcgcagcggaagctcgcccatactctgctcttggagctgatgtcgtgcgttcatccctcccaccttgtgcaaccataccatataccttggattgtttatcttgactacgactgtttatgttgatcatgcgctttttgatctctcgtcttccttaccgttccctcctcttgtttagttcccggttgaccttcgtacttacacctctatccgcttaccagataccaatttgcctccccagtccgctggattgaaactcaagatgttgtgctcggccaataccgcgccgaacgcatcatcgagattggccctgccgcaacacttaccaacatgatcaaacaaacagtccagtcgaaattcttgcacagcgaccgagcctccctgctgcaacgtcagcttctcgcctccgagaaacaggggaaggatatctactacgaggacgatggcgttggtattggcactggtgcggaggcgcccgctccgagtgccaagacccaagcccaggcttccggcggcgccgggacgatcgctggcgctggcagtagcactgctcctgttacggcccctcccgctcccgccgccgccaaagcagtaccggctggtggcatgcaagccattgaagaccgacaagcgcaagcttttgagatcgttcgcacattgttgtcgagaatcttgaagatcgccttgacagatgtagtcgggacgcaaagtattaaatccctttccggtggtaagtagatttattgagccctcccgctgctgcaatggattgatcaatctaataacgaatccaggtcgctcaactctggagaacgaaatcatcggcgatcttgccagcgagttcgggtctctccctgaccgcgccgaagacctcacagtcaacgacctcagcgctgctctgcaaaagaccttcacaggccagatgcgcaaggtaatactgaaaatgctccacgcgatgttcgcgtcaaaaatgcccggccaattcaccgttgcaacggcgcgcacatacctccattcccgctggggcttgggctctgggcgtcaagattctgtcctgttattggcgattgcacagcagcccgggagtagacttaaagaggaggcggaggcgcggtcgttctttgatgggctcgtacaattctatgccgatgagcatggtttgacgttgggcgcaaattcgggcgccgcggatgagacatcgggtttgggggggggtttggtgatggatcagaaaacgttggcagctctgacaggggggcagcaggagctgtccaaggcgctgttgaagatctatgccaaacatctggatatcgatctggatggggatc

SEQ ID NO: 15107 - DNA, 670 bp, Emericella nidulans
  unsure (1)..(670): unsure at all n locations
gactcttggttattttggggcacccatgtcgcaggggacttggtcaggtgaattccgacaagttctatctggacttgttctcaccaaatgtcttagactgagaagggagaatctgggttatcggctgacatccaccgatagaactccctagcagtctctgacgggaggaaagagcagattccagccgtccggagcaaatgtgctgatcagtccgatgatacatgatgtcaagctgctgcgggttcggtttgggcgtgctgagcttgataccctcctgagtaatacatcgccatgggctaaggtggtaagtgaccgtctagaaacaatatgccggtgtgacatgctcaggcaactacatatctaacacctgctgacgtccagcacttcattgttgcatgacgggacacatacatnggacccttgctactctatttagtacaggcttatgggcacttaacgcgtcttgtcaggataaagtgtcactcaacacctgacctgctcacaagcgagggcccgtattttttctgaacggtccaatgtcttccacggttgcgggggacgcccgggccacttaaattgacacagactagtagattcgcgggccgtctcaacacgagaggttacctgcgtgggcgatctgcgctttgttaaggtatccaacgtagataga

SEQ ID NO: 15108 - DNA, 194 bp, Emericella nidulans
gcgtaggagagttcagaacggataatcccattttataggactgaagaggctgtgtgcggtggcatttatccacacacgggcagagctcattgggtacaccatgaatgaatctgacagatggcaccgtacatggggtcaagcagaatgatcctgtgtcactgacagatctcacagcaataagtctctagtcacat

SEQ ID NO: 15109 - DNA, 573 bp, Emericella nidulans
tatgtgcgcgtacggatgagacacataaatcgtcgagacagcatcatcgatagatgtgctagccatgataatattgcgtctgtgatataacgccctaagctactaagcactatggatgggctatctgagaatcggctgcacgagacataggatcataactgtcgcacagaatggacaggtgttcgatgttgactctctgatggatgagctgcgtgggattgtcatgatggtacgctgtctaaccatagtgaacgcttcatcatattaccactctgggatgacgggatctatagatcaccttgtctttgcattgcacgctctcaagaaaggagcgcgctgaagtgaacgcctaatgatcaactcgatattgacagcggatcgagtctgactagcctgagacaaccaccagaccatgaccgcatactctcatgacgcacagagcgttaactgattgacattcgctataaacgaatgccgatatcaattgatgatgcatgtcctcaataaagggactgtcaacgaccctgatgatatgacgctagggctctggcactacatagctctgagcgagac

SEQ ID NO: 15110 - DNA, 160 bp, Emericella nidulans
cgagggggcagccttccccttgcatgccgggtgctcgcttgttttttgcgatccagagggagcgcgcgccggggggcttttaagcgaccgaatggtgataaaacgctgctcgctgtatgaaagggtgagcagcgaccgtctcactataacacggagtaga

SEQ ID NO: 15111 - DNA, 475 bp, Emericella nidulans
tgaatataggatcatgcgatgcaactgcccggttccacctcccacggaacagatagcaaggacgagctgggggactacttaacaacagaccggcccaggacggctatcgaaagcaccagctgagactgaggctataaccccccgcctgtaccatgctgtacagcacggactgagacatgatggtgccgacatagggcccagccatggtgatcgcggccggtgctgcgctcaaactgcatgaacctacacaggccggcggacacagaagcggcctcccgaaggagactgagccgcattctactcccaccacgcagcgggcgaccgaccacatcctgagactaacatccaatcagcatccaatacgtgctggacgcatcactgacgtaacatgaatcgccggtttcaggggagactgactgacttctgggggacacgggaaaagctccccctcgaaaagaataggtcatacgcctac

SEQ ID NO: 15112 - DNA, 885 bp, Emericella nidulans
tgcacatgatcttctctgtttgtaatatcgttctcctgcgatgaggtacacctcgatgtcatgacctactttcaaccacgtgctataatgtaagttcaggctgtatccatcatcagcagtcgtaggaccctaaagtgtcagagacctcggtaatgcatgaaatacccgtagttttgggtcctgtcagcccgtgaccgtggccgtgcttgaagttcggcacttgcaggatcggaaacatagccagtttcgaaattgagacagaccgcaagattctagaatacatcgaagtgtatcacacacacaggtataggcctgccctgctggcctcggcttgaaaattggccctgcggatcggcaattgtaaagaagtccccactgccatatgggggttcgaacgcatatcccgaagccctgggctcaaattcgagacagccactagagttatcctgacaccaaaatgaacaggttttcggggtcctgtataacgcttgttttgttggggcacgttcctttatcgaaagatattttggtttgtgtccatctagttccaaaacttcgggcttatgatttgccgttgggggggatatggcactcctacacccgttccccgtgggttgttcatttatcccttcacgggtttaatccctaagttggagtaaactcccacccggataaggttttccttgaagggaaggaagaaaagggcatggcccggatccctttttggagggcccccctgattctattgttgtggcccccccccccctccccccaaagatttgaactttttctccttgggactaaccttgtctaacgcggtctgcctatttattggctgcctcccttcccctgtaattttttcttattctcttttgggggctttat

SEQ ID NO: 15113 - DNA, 905 bp, Emericella nidulans
tccggtttgggaatactcagcgcgaccaatgcccgacagacgacccgaagtcggccaaggagttttacctaactcacgccccgtgcttcaggcgagagtttatcctgcgcttcggggatcccaccttcgacccccgtgccgtcatcaaatcagacatggacgtctgttcgacctatcgcggctacatacggttcttatccaaggaccttgcccatcggtttacgtcgcatagcaagagcgcgtaagaggcggccattactcctattgtgcgcgccatgatctcttcgtggccaggtgtcttgctcttcccatcaggaatcagtgggtgagctttgtccttgaacgccatctaccccacccttgaacttctccgaagcttttctgttttctctacatctctatgcgtcatatttgtcgtttttcgtctccacctctcgtacatctatgcattgacgagctttgctctttgagaattttcttttacttttattatcctttttcatcctttttttgataccccttattcttccgtctctgttatcatgtctttttacttatattattctttacttttaattgtacctctcttttcactgtatcctttcttactttatttcttcttcttccttttatttcttatatatttataatatatatcttctttactattatattttttctcttcttacttatttatctaatttttcattttatttattactatcctcttttaattcctatcttcttacattacttcctttgctttattttctttcttttccctcttcattcctttatttttataattttcttttattactcttcttttttttcctatatcctatccattttttcttcctacttatctatccttttttaactcttctttatactactttttaata

SEQ ID NO: 15114 - DNA, 1099 bp, Emericella nidulans
tcatcccgccgctcgcccatctttcatgagcgcctattcggagtcctgtgaggcgactcgaaagtccgttaatcccacgtttgggcccttaagtccgtcggtgtcaaccatggttgaccccattgaaatatcaatgcataatggcaacgaaaagagcgagaaaggcggattcttcaaccggctcaaacgaggcagaggcaatttagcaaccggtcatgatcgcgacaaccaaccgcatcatttccaaatccccgggcgggtccagggggcgtaggctttcaattcaggtggacctacccgacccgtcccaaaccctttaacggaattgcccactgaactcgtgattctagtccaatttgtccatatggagccggctgtaaatgcttatcccccacagctttgatatggccaaatactgctgctattaaccatgcatttgacagtcaatacctatctattcccccactcctatcccaatgtgcttccaaactcccacttatctgccaactcctgccctctgagccgacctcaacgtacaatatcccttcagtctagttactaatacaatgtactctaatatacctctacccaagtcatttctcatcattctatcatacatacacctttcctccttacctacccctcactataatctttcatcctactctttatgcccttcctccattatactgccatccattctccactattacctaccactaacctcaattaaatccatataataatcatcttctccctccttccaccaaatattttcctttctctcatctatacttttctctattcttcacgctcttatcacctactcaatccatctcctacttttttatcctacatcctcttttatccctcctttattcaactcttctcattctccctactcatctctcccctttcttacatcctttacattcactcacatactatctcttatatcacttcatccatatatacctacccaacactctatctgtaacactcttcttcatacctctcttacttcctttcatactctcccttctatatattattatctacaaattctatttaattctacttctattatatcccatcaatc

SEQ ID NO: 15115 - DNA, 2269 bp, Emericella nidulans
ctgatttctctgttttttaaaccactgctaattctgcctggaatgctcgattacactgtacagaccctctcaccttaccaatcgtcgaggacgagagatacgccttctgaaagtgttctcatagcggttcttcagagaggtatcaagcggaattaacaataaagctatgtattaaacaatggcttacaccaatgcgctcatatttgattaggttattcaatgctgcatagtcatcagtcccttgaatccctcgcgccttctatctagcttgttggaaaactgcagcggtgtttgaggagtaagataagtgtgaatatcaccctcactccgtccggggtaaatcactcacgaggagctaacgaccttttgcaagcctctctcgaaaggtacattacttcgtcttcttcacgggttgctcgcccatgtttcaaccattgtatcgatgccggggcagagctttacagaggcttcttttatcgtaatctctgctctcttaatcctgtggagcggcaaatgtgagctacggaggttccacttgccgtgcagcactccgaaagggcagttggccgaggcgagcggccgaaaagcgttctgcatagtagtcacagaagaaaaacaagaagaacaagatgataaagaagaagaagaagggggaagaagaagaggaagaagaagaggaagaagaagagaggacagccaaaggcattgagttggttccaggctataccgtacgtgctgtcgatctcccttgctctgactgtcatccatattccgcttcgaggcaggggagttcccgtggatgaaaatacaccaatctctcgtcgtgcctatacgtatagcaaggctgctcatcctttgttcactctgccggccgctgcgtcttgcaaagatttattcttgaactaggtctatgtcgtgaagaggcccagcacctgctgccccaatgtttgctcgtgctcgtctcataccaagtgcactcatggtcaggtcctcagcgcggtaagagtagcgttatcacaaaagcgactgatacgtagatatgcgcatcgtacatgcacgcagagagctgtcaaaacaacagatacgaaacagatagttctcgcattgcatctctacagcaggtcactaagcctggccaataccttcatcttacgtgactctttataatactcactaatagtttcactatgtatcggagcgttgtatagccacagcgaaattttaaggatatcaacactcactacacacccgggctagcatcagatcgtcttcagaactgtcctgatgtcagactcccggcgggaatggcatcgaaattcatattggcgagcttaactctgggagctagagcttacacagctcaagtgcaaggacttgggcaggccatacgagacattgaaaatacagtctacaagacctccgggaggtggacgagtctgttatcttgaaagacctacccgcgatttcatgagatatctaaagaggttaagaaaatgcggtattgcaggtgaagtaaactatgattgcctttgaactcatctgtctccagtcagttgtacgcagtctcaatcagggctgcaattcccaagagacagccataacttagcttattgaaatacacacaacagcagcagacacacaaattccttccaacacaccacaagacgaattaactggcagggcaacatttcaacggcatgaacagcctattcctaagcttcacaaacatctccattagggggtgtcgtgcacccctcaaagcaaaattctaccaactccaaccctccaacatcatctgtgcaccggaacaatgcgccttctggatcggtaaacgcggcaaaggcatgtatgtcaatgttcgggtcagctataattgtccggagctcagacgcggtgtaccctgtacgagaaagtattagcgaatagggtataatcaaaacgcatgtattccgtgagagaactgtataccattgtactgtagtaaagtagaaccacagtagacccaggtttttctacatgcgtcggtgaatgcgaggactcgcggtgccagagcagccaatacaagttgggaggtagttagtctcattgctaatcggcgagagtacggaaagtggatttggtggggaaggaaatcctgaggctgttgtgaaaaggatatgaaatctgtggagatatatactatgacttccgaaaatgcttaacttgatggggaagcaagggacattccaagtaagacggtgaagggatggctgtaatacttaaaacccaa

SEQ ID NO: 15116 - DNA, 882 bp, Emericella nidulans
ccgtccgctataccgcgaccagacatctcaccttcactggtagctgggctccgcaaacgattcaaggatcacacctggatgcgcttcgaggttgttgactgcgagaagaccccttcaagccatctatttgaaagccagcatgtcgttctggcaacgaactgcgtacacgcgacgcatagtctggcggtgacaaccaagaacatccaccgcatgctccgtcccgacggcttcctcatcatgctggagatgactgaggcggtgccgtgggtggattccgtcttcggtctggtggaggggtggtggctcttcaatgacggtcgttcgcatgccctcgcccagccagatgtctgggacaagaccttgcgtgcaaatgaatacggccatgtcgactggaccgatggccacctgcctgagaattccatccaacgcataatcatcgcgttggcgtcttctcagggccaggatagggtagctataatccccccagctccttcgaagatgtccacggctgacattgcttctcgtcaagctataatcgacactctcgtcgagaaacacacaagccacttttccgctcccacatgcctcccgcccaaccaggtcatcgatggctcccctcactgcgtgctggttacaggtgccacgggcagtctaggctcgcatctggtggcccacctcgttaagcaatcgagcgtcaccaaagtcgtctgtctaaacagagtgagtggttcagacgcaacttctcgtcagcttgacgctttccaatcgaaaggcctcatattggattcggaatcattatcgaagctggaggttatcgaaacagactcctcagcaccgagtctcggcctcgtccccgagagataccaacacctcgtcaacacc

SEQ ID NO: 15117 - DNA, 1556 bp, Emericella nidulans
acaacctacaaacgtatcgtggtcaaggacagcgccgtcaatgctgtctgctacggtgccaagctcatgattccttgtcttcttcgctcgggtaagttttctaacaccatgaacaatatgaaggtcaaaagtctctgacttgggaattagaggctggtatcgagcttggtgaagaagtcgtgctcatgaccaccaagggtgaagctatcgcaattggtatcgctcagatgtctaccgtggaactttccacttgtgaccacggtgttgttgccaaagtcaagcgctgtattatggagcgcgatttgtaccctcgccggtggggactgggccccgtggcgctggaaaagaagaagctcaaatcctctggaaagctcgacgtacgtaatttgacatcaccggtcattattttcaatatactgacgttcataatagaaatacggacgagccaacgaagccaccccagccaaatggaagtccgaatacaaggactacagcgcaccggatggagactcatcgcagcaagcagtcgatgtggttgcaaaggaagaggcctcacctaaagaagagccctctctagaggcaaatgaatctaagatggacattgacgacgcccaggatgacgaagacaagaagaagcgcaagcgacatgaaggcgagactcctgaagagcgtgctgagcgtaagcgcaagaagaaggagaagaaggagaagaaggagcgaaggaagtccaagcaggagaaggacgacagcgatgatagtgattagatcattttcaggaagtcgcttgccaacttgtggccgttggcgtctcctcgggcaagtttcctgtagtatatttgttgctttattggagtcttttgggtcgaaaagggaatgagttctaatttgttttgattttctacacgtttcattgtttgatgtcacgcagcttgttctgagacatgaaccatggtctattttaggacaaatatccaactaagcaaatttctgagattaacgaaatcagattaacgaaatcaaaggtagaaactcagatgctgctgttattgactagtcagttggctcaggtggtgtgacctcccaaagttctccgcatcatcacaagccacaatcaacgacttgctttttcttttctcaacttctggagcatacctaatcaacccgcaacagtaaacgataattatcagatcattacttgtgaacgtaatcgtttctcttgattttcggggagcattgaagctttcgcaatggccgcagagctgacctccacgaagctcaatgcggagaatcacctcctcttagtactgtcccagcccaaccccgcctacgcacttccactcgcatgttaacacgatattctcctgacaggatcaacctctccttcgcctacctcatgaacttgctcgcagaaatctcaaatcctttcagcggatcgtcgagcgggagaaagaatatgttctccccgcactcaaagaggcggcaaaggcctcaatgtctggcaatcaaacgcccgagcaaacactcgccacacttgacgttagatcttaagaacggga

SEQ ID NO: 15118 - DNA, 634 bp, Emericella nidulans
  unsure (1)..(634): unsure at all n locations
ttttggacttaactttcatacaaacatcttcttcttccttacanaaaacaacgcaccaagggggggtggttaaattaaataccattacccaccccacccaatgccgcataacacatatacattatccacatataagcaatgacttgacacaaaaaaatcacccttgatacaatctgatgaaacgacacaacaaccaagaacaccacatataaccaaagtgctatcgacccaataaaatattaacactcgaatgacacacacaccaactcaaacaacgctccacaaccacacagctgcttggcctacccaccagaacacaaactttaccgatcctaggtatacaggaacctaaatcactcaatgcaatcccagaacgtagaatccttacaacactccagctcaaacattgctcaggagtatacgaacccctgcagatcggccgctgtgaaaataaacaatcaaaacatcatttgcaccccacgcgtatatgactatataactgaactcaacgattaaaatccgcttatagagatccaccttacctttatcatatgctagactgctggcgtccacacaatccaaccaatcccgtccctcctgttataccccaaatatcctaacaccacaatttgcg

SEQ ID NO: 15119 - DNA, 4059 bp, Emericella nidulans
  unsure (1)..(4059): unsure at all n locations
ttcctacgaatttgctgccaatacggactcgggactcatggttttgcgatgggtacggcgcggaccaaagaagcgccgcgtatcagcacctcctggctctgtcttcccggaagatagttgccgctttacattcagtgttatcgaccccactactcgccgacacccagtcatcgcatcaatgactcgaaaccaccttgaggtatacgacaggtactcactaccaagcactgccccgtcttctcctacatctgctgctttgtcggtcatcagcgatggctccgagatggatttggcattggaccagcaggtaatggaaaccgatgagaaactccgcttgttgatcaccattactagcatctgggttgctttccgggagggttggtcacacagttttcgctacaatgatgctccgcttaacggaaaggccacccgctccactagcgcttcgagaaatgtgtcagcaccaaccccgggagaagaggaggcccataagccagcatcaggggacccgagcaggcgtgtagtgacctggaccgccgcagcctcccaaccacccgcatcagaccggtcgactcagtttggcagcttatctaaacgatccaactccactggaacggcctttcttgatagagccaacaggcgtcattcatcaatgaatcggcagagcgtagccagtcctcgccagtcgtatgaggggtcgccagagcctaaagctatcagacttaactcggcacacagatccggatcgcagcagcaagaagttcgcgagaataccaaacttgagtcaacgcctgtcactccaaaagcagcgcatcgttctaaacaagagggccgccaaatatcgattgatggccaactggaatctccgcgtcccaaagggaagcgtcgacaccggctcagcaacctttttgatttccatattcgaaagagcgggcatcaccatcaataaacccgcatattatacatgcaaaagttttgttgtgtcaaagtttcttgcacaatgtgatattctcgcccctgaggggagggaaggaatctgttgaacagtatcaatattgcctatagttgtgacacgcctggtgcagatgtccctgtttggtatatacagtgttccgccggcgagatccttctctccgaaagggaatctctccgcttttttttgtgtatttcagcgttgcatcttcagccatgtgggcttctccatctcagccatccttatgccaatatttcaatgatgtacatattagcgatatagccctgcacgttatgacaaactcaaagactctcaactattgactcataactggaaccgctcatttcactagtgatttgcgtctgcattcaagcaccgagtgcgtagtcgagccttagtcagcgtataatgccctaagtcccctaacaccccgcacgggcggaaatgaagccatccccactcccgattcagcatccgagatcggtaactcatcggctctcgcttccaaccgtcggcagatcaggcaaaggatctctatagaatataggacactcttatagccatataatttcccgttcgccatcttgaacctggttatagaacctatagcagtggtaagttaacccctaacaacctacccctcattgaccccacattcgccagcttttgtacaattaactgactactccaagaatcacagtcattccagcaccatggctaccgataaccaaatggaatatgtcacgtatgtctgctgtatttcactcaacataacagtcgctaattgcaggtgaagccttggcaaatccggcctcaagatctccaaggtcattttgggcgctatgtcctacggcaccagcgaatggcaagactgggtgctcgacgaagataaagcccttcccctgattgaacatgcctacaagcgtggtatcaacacctgggatacagtacgtctgccttccaccccgcctgccacccaacctacatactaacgattgtttcgtcgtataggcggacgtctactcccacggccgtagcgaagagatcattggcaaagcactaaaaacatacaatatcccccgcaaccgggtcgtcataatgacaaagtgtttctacggtgtcgatgatgagggcaacctgccctctatcgcggcctgcgcgcaaaacacaggcgcgatggtcaaccgcgtcggtctgtcccggaagcacatctttgacgccgtcgacgccagcatccagcgactagggacgtacatcgatgtcttgcagctccaccgattggatcgcgagacgccccgtgaggagatcatgaaagccttgaacgacgtcatcgaggctgggaaagtgcggtatatcggagcgtcgtcgatggcggcatgggagttccaggcactgaacaatgtcgctaagatgaatgggtggcatacgtttatctcgatgcagaattaccataatttgctttcgcgcgaggaggagcgcgagatgatcccgtattgcctggatgcggggattggattgattccctggagtccgatggcaagagggttgcttacacggccatggaagagtgcgccgtcgttgcgggagagcacggataaggcgatgaatgtgctgctgaaaagccgggagacagaagcggatgagaagattgtgagaagggtcgaggaggtcgcgaagaagaagggggttactatggcgcaagtggtcattgcgtggacgcttgggaataagaacgagaatccaattctggggctgaatagtaaggacaggattgatgaggctgttgccgcgattaaggtcaagttgaccgaggaggagagagcgtatctcgaggagccgtatatgccgaagacggtgtcgcctatggagaggtagtttggttatgatgtcccattctagttgtcacaaaaatatacgaagataggtaggaccactgatttaatctccatacttctcttgtgtccattaggaataccctgcaaaaacagccatcagagacagcagctcagcccatcgggaatctttctgaatctctatacggccctgaggcgtggcaaccttgacctcgtccacctgctcggtgccataaacataatccgactcgtgattcacaaacgccacgaggtcacgaatccacgcatgcatgaattggcgctctgcaggtgtcggaccgtgcatgagggagtaactataatagactcgtgttaataaatagtcaaagtataagacatggtctagtgggtagtaactgacttatggaacggccgatccatagcatggctaaccccaaatgaagtgggggccactttttccgttataaaggagaaacggtaggcaatcatgtaccgccagacgtcactgatattgacgccattctcgatcaagttgttgacgaggaatcgtgacggcgcacggacttgaccgtctgagataattcgtccaaagacggcttcccagtccttcttttcggtggaggtaggtaatgtataatactgtaagaggcgtctagtagtggcgggagagtagtagttcgatacttgggcttcaagagattcaaaattggcttctgggccattggtcacagcatataaggtctcttcattgaggacctcgccgatgaggatgcgtagcccacggcgcttgaactcgcgcgcaaacgagccatcgcgatagtacttgaataagtctgggtgaatgaagacgcagtcagttacaggccggaaggtatggtgtttaagcttcatgatggctccgcagagatcgtttgcgttgatttcacgcagacgccgaagtttctcgcgccctgagcttgccgaggggatcttaaagtattcgcacagctcgtcgaattgtggctggcactcgtccggtgtcttgggctgcgcgggaatggcattggagtacatgactaggcgtcggaagcggttccttgaagactcgggcagatttcctcggaagtcatatagtatctgcgcctgaaccgcgtatgcaaccgcgcttcgtccagatagtgttatattccgcgggtcacccgcaaaggcntggatgttttcatacacccagtctattgccagacgttggtccaa

SEQ ID NO: 15120 - DNA, 479 bp, Emericella nidulans
agagcctgttgataggaagggccggagcacaacagtgttggagatcttactgaacaaagcgcgtactgtctgctgagttaggtggatgtgatgtggcagaccctgcatgtttctagagccatctgcggtgcaccacccttgtgcccgagcccgactacatttatcggctagaatgatattcgtagagcttatatcacagctcgctctatcgcacggggaatatccgttcagacgccacgctgttgataaaagggacgttcgctataggccttgtgaaattaatgatccattgcctcttgtttatgagtgctcgcgcatgacactgtttgcaagctgcatcagttgtgatcgacagacagcgcctgcgagacctgcattgtagctgagacctgtctcgctgaccatctgataggcactgtgtaggcgagacatcagttcattcttgtgctcctgaagcgtgttcgtcgttgactgagatg

SEQ ID NO: 15121 - DNA, 2619 bp, Emericella nidulans
tagtcgttggcccatcatgggcacctttatcacggctgaattacattggtacgtgtctacaagtgtccttacttttctgtcgcctgtttcaattggttgaatagttcgttaattatcttttttaggacatggcttttctacgttgcggccattgtgaccggaatcctgaccctcctgctgctgggcatccgtgaatctcgtcccgccctacttctcgaacgggaagtggctaatcttcgagaaataaccaagatcgactaccttgtgagccttaacccggacagtgcacccgatctgcgaacgttcgcacgtgtcgcactaggccgtccgatccggctcttcttcactgagctcattgtcttcactgtctcggttatgagcgccgtagcaactgccctcgtctacctcttcactcaatgtctgccgccgatatacaagagtctgggtttctcagagagacaagcctgccttccatttattgccattggcgctggcttgagcctggggctacttacaagatacctcgatatgcacctcatcgagcggcgccgtagacatggcactattcttctgccagagcataagctcgcggggttctggatcgggtccggggttctcgctggtgcactctgggtctttgcctggacaataccaccggcggtccagcatttgcattggatagtgtccgtgctggcactggtccttatcggatacgcgctgaacgagattgactacgttctcggcggatatcttgccgacagctacctcagctacgctgccagtggactggcggcgctgagcttgatccgggctttactctcaggtatcctgcctctcgtatcaagtccgatgttcacgaatcttggagccaatgtggcggtctcgctcttggctgctgtagccacattattttgccttgtgcctccgttgttttcacggtttggagagaccatccgggcacgcagcaagttcgccaaatatagcttggacatgtatcaggagcatagtgtggatgaggatgggtactagattctgaggtcatctgacagggagtcagatatcaattgggatattctgttttgttttttttttttcatatctttgggtgcaagaagccatccgtgttttgagtctcttgaagtattgttgggtttcgtcgtatgtgattgtcgtacaggatcagcagagcaggcgagctcaacatacgacccttcttactctctttttttaccctcttgataatgacttgcaggacatagacacttgaaatatcatttctgattgtatttagcgcggcaaagttggtttccttgaggagcagctgcagcggcattttaatggggcctaaatgagccgtccagagtcaaactcccgccgcttcaaccccgcgtttcctctccttaaaagcagcgtccacggtccagagaaccccagcctgcgacccaaactatagaattccggcgtcctaaagaaggcgagttcttcaagctcttgcaatggacgatctgggcctgcgatcccctgactcccttcgtcctctccagccgttactttcttccgtcgcggaaaacgcgtcgaacctggctgccagcgtgaagcaccaacaatataacgatcacgaagaccaccagcacgagcataatcttgaagttgccgtagaagcgcgatctttacagcctctgcaatctgcaattgcggattatgaccactatgagcttcatcagcaaaagcatcagcaccaaaaccaggatcaatcggaggagcgacagtttcggcctgaagatgcgtatgggtcgttgacggttagtacagcatacaaccccatatacatgcgataccatcattgagatttgtgaaattgtaaaattgcgaaatcgctaacgaagccaaacaagccccagaaccaatccgcatccctgcgcattcaacgaccccaaaacaccagcgagtctatcttctcctccaaagagcacggttacctccgcgatgtcgcgtcaatagctaatccacctgatttggaagcttggagagaccgtctcttcgacgtagacgagatgattgtgatgagcgaagaagagtatgcgctatctacctctctttgcacgaccgcattatgtctacctttgtgtccacacgaaaatgcattaactaacaagccacacttaccagattccggacctactttccacatgttgacaacgtctactcccaccgctcaacacaacactacaagcgcaagcctctcgtttcgcactactgggactgccgcctaaagggccgaccaccggggacgcccaaatccgatgaccccaacaagaagaaacgcaagcggacggcgcggcagcgggatctctgcgacgtcaagattaagattactgagtacttccctggctatgcggtggggcttggcactggcgctggcgctggtgttggtggtgcggaagggttaggctcagccgagcagcagcagcagttctctctacccttttctcctaacggcgttgggcgtcgacacgccgattacaactggcgagtcactacctggtgtgaatacactacttcagtttccgtcttcgccggtagtggtagtttcgtcctgggaatcagctgggaggggag

SEQ ID NO: 15122 - DNA, 497 bp, Emericella nidulans
aggacaagggcgagagccgtgcacttgcgcaccaaacggattacctgatgaacttttattttagtgcgacctccatcatagcttgagatgaatctaacgatacatcacggagctggaccgaccaggagatcatgactctgtgtggccggagcgaccggagttggattaccagctattcccagggcgatgactagaatgtctaagggttgagacttcgcattaatacagcccacagaagaaaacacatatagttctatgcaaatagctctgaacggactagcacggagtatgtgagacattcaggatatggcatatcccttactgtatgagacatgaccacaggacgtgacatacagaactgaatcagccgcagggccagttgctgagcatggaggcctagcgcacatactgcctagcgaatgaagattatagcatgcgtgtgacacatacagtgcacgcacgtctgaccagcacatgataaagagtcttctcgatga

SEQ ID NO: 15123 - DNA, 2260 bp, Emericella nidulans
accgatttggcaattgtcggaactttcactgtaaatgttttgttgatggaatagacaggccacccacccagcagagctggccccttttataatttgttggggctggtctcattgcatggggagctatgcttgacgataggcctgacgatcccaaggccctggccgacggagaaattaacactgagcttctccgcaccggaaaaattaagaccttcagacagcttggcaaacttggcatcttcaggaaaattgtggagaggagcagtcattattcataatcatacaatttatagcggggaatttgacttgtcgcagaccgtctcagtccggtggaaacaagccttgtacaaaaacagagcaaaacccgaaatgagtgatctgctcataaagctcgttgaacaaggataggttttagaggttttttaatgccgaagactgacttgggttccattatacgagcacaacgtcaacgtcagcttttcctcccatgggccaggatcacgactctccagaattgagtatcgctgagcgagtcgcgttgtgacatacgctgcttcagttaaggcatactgctggcctacgcaaatccgagggcctccattaaacggcaggtattcccaaccgggtcgtagatcggcccaacgctcgggacggaactcttcggcatcagcccataataatcttctcggcgatgcatggcgtagacactgtacgcgaccatcgtgcccttgggacaaaagcgggcgactggccgtctgggccaccaccaacgggaaggaccgtgtctctgatggcggtgcgtgagttgaccggaacgacagggaagagacggagcgctgcggatgttagttttcttgggtccagctattagacggcttcactcactttcgttgagacagtatttaaggtacttcatattccgcagctgctcgtaagtcggagcacggccttcaagtgtagcgacctcctcctgcagtttcgcccaggtgcttggatgttttgccagcagaaagaacatgttgctcagaagcgaagccgtcgtgtcgcgacctgctaagaggatattcaaaacttcatcacggattcgcctccggtcgccggtttgctgagccaatccgtaaaggaacatgtacctgcgctctgcagcctcgtcgacaatcttctcttcattatatctctcgcgcattctgatagccttgtctacgaactggtccatgctctcgtgacaaatgcgatgcgattcaacagctttcgggtcacgattcagaaacatcagtgggccaaaacggccattcttcgagatgttgtcaagcgagtagttgaaagcttcagcgaagtccggctcgtcatctataacccctgatcgccgcttcttcagactatgaacattatggccgcaaagaaattcagtcgcagagtcgatcgtgaagccgaaaaatagttcctgaagatcgacagtgctgccgtcggtcggtataagggcaaagaggtcgtccatgagttcttcgaaaatctcaaggtgcgcgacttgttctttgacgaagttggggcggatcatatggcgggatcgggcccagtcctcgccgtcagaggtgaagatgccgtggcccaggagagggccaaaaatcctgatcctatcgcccatgctatagtcaccaaacttcagtgaaagaatagcctttatattttgcggatcgcgcgtcacgatcatcggcgtggtgatgcgtttggctcgatgggtattgccaaattccttgaaccgctgaacgttgttttccagcaacttgcggtttctggccagcttggtcaagcgatagagtctgtcgagcgatagaaaaggatcatagctagggatctttcccacgaccggttcgcatccgttctcctttgcaaactggtaccgtcgccatcgtcggtgcaggcaggagagaaggtaaaacaccgcggagagggcagccacaaaggcgagcggatctcggtaggtttcgagcaggccgaggagcgccattctggttgcttgctttgctagttcgtcagtcagtcagtcagtccgttggtcctgggcatcctggcgaatttagctgttgagagcatgaaggctttaagaagcagggttggggtgtgacgttaacgtgcctgagcgggtggaccgtctacccgaccacgccgaatatcagatttggagcaacccacttgggaagcgatgactctgaaagcttgagattggacaacagtataggcgaagagctaagagttgccc

SEQ ID NO: 15124 - DNA, 3828 bp, Emericella nidulans
tctcgagggcgctgtagtagtccctcatttcctggtctgccttctcttcgaacgccgctcgctttccagtagctctgtacatcaaccgccggacagtactgtcacggtacttctcatgcctctcgcgctcgatctgtgtacgctgtctgatatcgtctaattggcggtttgtctttgcgagccgccgtttcagatctgacagaaacgcgcggtgggatttgagatcgctgggggcatttcccacggtctgtagttccgccaggatctggctgtgtcgatcgcttacattggagatgttctcaaagacagacatattgtcgatgtgctagcagaataattctgtacagtactgcctcttcagtgagaagaaaaggaagtgaccagcaatgacgacatcgtttgctaatatatcttcagccacagtgcaggtcatgctcagtccgcgagcacatctggcaaaatagttctgtaaaaagctacctagccacagtaaatggtagtttattgtatctgaacggcttctgaagttattcaacggtcgatatgggagcccacagtccagtgtgctggtcttctatcatgggaagtgccggtttgccaataccgccaagactatgaatttcagatttggactagcgcgcttcctttcccctcaaggctcggctcctcaggctctcagatatagctggaaacgcctgcgcacgaatgactgttgtaataggagctttctttttctttttcctttccttttcttttctcgttgggaatcatgatcggtgacagtgaggttgaagcctagaagccttctatcctttactaatactgcatggctcacgcatggactcggaagagattccagatccaggctgtctgtagctttatccttatccatcgtacgtaacttagatccaggtgcaacatatctgcatttggaaaaaggtaattttagagtaataccttaaatgtatgttggtgcatcttctgttttcattgacacgtactccaacccagttaatattgcaaagctgaacatacacatttcccaattgagctcatacatcagcaacagcttcctcgaaatcgcctaggaagcgccacatccccctgttcttaagatccgcctctttccacgaatccaaggaacgcttggggaaaagccaaccctgatcgccatcttcctcgccagtaaaaattggcaagagactgtggtcgtgggcgatgacgaccaggacatcgtcgttctcgtcaaactcaccgagcccttctatggtggcgttacattggtctagatcgtgattgaactcttccgtaggtcgataaaacggattacaggtattaccaggctggtgacctagcgactcgaatatatcgcctggacagatgctcgcatagcgaggattccttgggagcgggtttggccggactatgtccggtatgggattgagctctgttggacggaacgcgccaggatgatgcgcgaagtcctgataatgaagatttagctggatgaccaagaactggacgtggacccggtacttacacctcccatcaacacgaaagaatcaggccggactcgtgcaagaccgcacatatggtccggacagtgcccgggcgtgtgcagaaggtaaaagctgccgtcaccaaaatagtctatcgccttgaactttccaatagaaagggtcccatttgggtcgttatcaaagtccatctcctgcagttttcgtccccgccagtcagatgacaagacaggagaatctcgttcgccgggtacccggggccgtggctggtggtgaagcccggtccgacaacaagagtcgtgctctgcgggaacaagaggggattgcccgtatggtcgaaatggaagtgagaccagatgatggcactaatctcgtctagctgcacgccattttcgacaaggattttagagacatcgccgggagcggtgatttttgctggcttggttgggtctgtcagacgttgagcgactgctggggcaaggttttcaaagtcagtccgtaaagagaggtcgaagaggatcttctggcccgaggggtggttgatgaggaacgaatatgacgggactatgagccggtcatggcccttgatctgcggcacgacgaaccaggatgccggcaggtcgagacgcacgccgctgcatgagtgagcaagagctgaggatgggagtggtggacgtacgggtcaatgaccgagacggagacggtgtttgtggaagacggcagctcaaccatgatattgtgctcttgaatgttttgtcgtgcaggaaagtccttcggaaaaagattgcatcatgtgggcccttttaccgggcaatcttcggctgatctccgaccagccgattcggcatatggtcagtaatctctatcagccttggatgcattttggtaggctgcctgagcccatggaggctgaacgcaattatttgtcggccacgagcctaaagcatacaaatacaatcctcggaggcatttaagcttctgttgactggcgttgtagcaatattgagtcgtcataaatgcttaatattcaaggctactcgaatcaaaggcaccccatacgcagtagtacgcatgcaagtgtctgcgctttcttgtaaatttcgacatcatcttcgcgggaaagaccttcactggccgtgcctgtgcgtctggagcaaggtaacggcccggctcgaacaattttcaatatcaacgcctgctctctgtagcctggccgacatagaacctgaatctgactatgctagcaattactgcaaaagccaggaggaactcgttgacggctcagacttgataggcgaatgagatatgcgtgtggctttggagtcacggtgcacgcagctccgtatactggcgcgattaagacagatgatgtcgggttgacgccagttatatgccctgaggaaccatatcaactcgaccagcaattcagagataagcatgcaaaatatgaagacggcgaaggtagtatagtacggagaatactggcgcggaagagcggatttgaacgttatcgagcggagcctgagcggagtggcttagagtagtaccagagcttgactcggtggagatatcgggtccctacggcgctacgaaaaatgggcattgaggtgacgtgaaggaggcgaataggaattccttctgagtcctagtgctggccggtattgaggctggtgagattggggatcaccatgacgttaaccagctggaactgtattgtaagctgctgagacattgtaaaagaaggataccgtgcatctgaaacactctttggttatatatactcggagtaatatcgagatagtatcgggaacggaatacagttggctggtcagatgatggaaggattacatcattattctcagcattcccgattgggcgtacatgaagcgaaatgctcgcgtcatccaccctgaagaccaagaattgtagagtctacagtgggcctaggaacttgccagaaaatcaaaatcgcccgttgctccgtagggctaaacggatgaataaatactagacatagccagcagtttagctggaccctgaattggtacacattttgccccccttataccctacctatgcgctatctgggtcaccattattagcaagcgtttatagaataaattccggcggaaggccaaattttaatcaaaatgacagtcattaacgaggaaggtgagagagaacccgtcttctccgttgtgggcagtccaatctgcacatggtgatgtcaaaggcaagagttaacagttccattcaccctaaccatctctttaccaattttaaggagattaacaacatcagaaattaagtc

SEQ ID NO: 15125 - DNA, 555 bp, Emericella nidulans
  unsure (1)..(555): unsure at all n locations
agaccggagacttttctcgagctctagatgaacatcagcattttttttgagattgccactgaacgcttccagggggaaggttatattagtcaacaccctggccctgactaccgcgacgggtttaccagtggctgcgagaatacacagacagtggctgtaaccacgcattgctcatatttaacgggagaggggtgaaatgcaagaattatacgcgtcccactctggactgtcctnccgtgcccgatgcgaatacgtttcaagcgcagcacctctgggtcaataaaaccggcagcccagacacctatttcatatcctacgcgaggaggcgtgtactataattctgcaattgctcgataccctcgctctacagctatatacgcgtcccgcactgtggctgaacccatcgttccagagacttttccacccccagccgaaatggcgtccgtcgggatttaaccatgctcacgactggcgtgcactccatacgtcagatacctgactacctaccgaagggacggcttcaataactattcacaacgtatccaaaatcggcct

SEQ ID NO: 15126 - DNA, 407 bp, Emericella nidulans
gatgggagacctcacgcccccgcggcgcaggagggatcttttggggtccgttctaggcgcgcgtggctgaaacgaagcctgcacttcaccgactgggcagatttaagagcgctaccgcctgcccgacattgtgagaacgccggctgaggcggcattgggcactactgtagtctcaaggctcaccgggttcacggccagggcaaactgacatgacctgcgtttgcgaccttaggtgccgccgcctgtgagctcggtctttcctgtggaccccgggtgcttgtgactcgagaagggctgtgcccgcgatggggatgggtgaggcggatggggcgctgtttagtgtaacaaccatatttattgaccattgtgttaagaagtttttggcggtttgatcaggggctactgaa

SEQ ID NO: 15127 - DNA, 2986 bp, Emericella nidulans
gtgctcgtcatggagtactccatctgcgctcctcttgatctacgcttcttaagcatgtggacgtcgccctgaccggaaaggtcgagttctgccccgagctggaattctggcagcagaacgtgtttcaattccatttccagaatgcctcctcctggtgggtttggggcggcgaggatattcacctctacggcgcgggcaccggtgtcatccatgggaacggccagccctggtgggacgcggccgcaggcaattcgagcgttagacgcccgttgctatttattacagatggttggcacggcggttccattaccggcctgaagctgcggcagtcacccaacgtgagcgacatggcattgagtcaagagaccagagctaaccatcgcagtggcacaacttcatcggcaacagctccgaccttctcatctctgacatggatatcttctcgcgctcatcgtcggaggcctgggcatcgaacttggacgcttgggacacgtttcgctcagacaacgtggttattcagaactctgtcatcaatcacgatgacgactgcgtctcgttcaaaccaaacagcgccaatattatcgtccagggcttgcactgtaacggctcccacgggatctcggttggctcgcttggaaactacccgtatcagtacgatatcgtctcagacctgtacatctacaacaacactatggccaacaccaccacggcagcacgactcaaggtctggccaggcgctgaggccgtcaagaaaggcaatccgccctgggtcggtgggggaggcaagggatacgtgcgcaacgttacctatgacctgatgatcaatgataacaacgacctcgccattcaaattgaccagtgctacggggccatcaatgcgagcgagtgcttggatcacccgtccggcgtcattctgaccaacgtactcttcaagaatatgtggggtacctcaaatggtgcgaatgatcccgttgctggccagcttatctgtggttcagcggatgtaagttttattttcaattcctttttttatcctttcccttcttttggttactgtagttaacgccggtagtcctgcgacaatattcgagcggagaatgtcaccctgacgaactccagtgggcagccgtcggagtggcagtgtagatacatggatgaagagcttctggatcttggtggcgtcggttgcatccctgcatgaagcgcaaaagaagtagtctatgaatatagttcagatctctgctagcattatctcctatttcttccaccttggaaagcccgtccatactgggtcgacatattgatcttcactccaagctcatctgcaaactgatagacgaggccagggtttttctggaaccatcgaccacacatcacaacatccagcccttgctgaaggaatcgttcggcaatctcacctgttttcttaacacctcccaccatacacacgagcaagacattccccacagcccgtttaatctccaaggcaaacggcgcccggtatccgtcgccagatttaatactcgtttcctgcttggcgcgaataccccctgagctgacgtccaaaaagtcaactctatgggtcacaaggataggagcaagtcgacatgaattggccaccgtccagctctcagggaactaattggtcaagcctcccaatcagtctgtggcactgatacgaacgaacagtggcatctctgctggaatggccgcccggacgccagcggggatttctagaagtaaccggttctattgtcaaagatcctcccttactcatcggcctgactgttgctaacggggctcagaaattgatgaagaaggtacccatgcgctgcatgaatctcgaccaggtcgagcccagccttaccgaccgcagcgcagcgtcgtcaaaggcctgtttgaagtcacgaatctgctgaacggtcattgcaggagaggccagataagcctgattataagcgagcgcagacggtgcataggccttgtcgggccagcccccatttgccttctctgccgtaacggtcctctccaagaggggcgccatcttgctgccttgcgatctgcatgactgagctggatcccaataatctggttctgggtatgtacgaagttcgttatcctcttcaaccccccaatctgcccatcttcccggatcccgatgtcttggggacaaatgcggccttccttctgaatacggctgtcgactcaatgatcgaaagcccagggccgcactgaggcttggatccagactgtcccggctggaggctcctgagctggggtgaggtaggaggccatattcaaagagtgaaccagaaagatttgatgacacatgccattctcaattcgcgattcgccaaattgatatagatctggttatcggcaggcagtattgctttcctgccttagtttcggctagctgaccgattggccggtcccggtctcggccgctcccacaactcgccgacagaactttctcaactatagcagtcttcggcctcaacgcccaaccgccgtcttgtcagaaggcaagcatattcagaagaactccatctcgcgcctcgaggaacatcgcgtgagttctttctaggaagccagacggactccgttaacgcacccacagcagccggcgatgccacgcgcgaaaggtcaaatgctcggggaggaccccgtgcgattcatgtcaacaggcgactaaaccggtcgaatgcgtgtattcccgcaagagtcgccttatcaaagtcagcgagcagtgagtgcatcctgggtctcggtattttgctaatcgggagacagatatatcgaggatctaggggctgagagccagcgactccaggggtgcacacaccctccgcattcgaacgaggagaccacgaatggcccgtccttgctgacgcaccgtggtctgtcaatacagatgctcttaaaaacccagtctcgtcgctgaagcctcagactcggctttggcgtccggtcccgcaagccatgc

SEQ ID NO: 15128 - DNA, 2253 bp, Emericella nidulans
ttccatctcacatcatatggaattcgcatctgtaccactatgcggtaaagtcagtatgcgtgctctgtcttggccctcacaaggtttcaaagtacagaatagattaggatcaatagtatcaagagggggaaatgtactcagaagtatcggatggcaacagaatgattagaagcagacccgctatgtgcatcaacaaagatatcccactccggcagagtaaaagagcatttgtttgatgggaacgcaagtgcttggcaggccatcatcggccagtcacgggccatggcacagccacactgtgaccttcttatgtcatacccggtaggccaagccacagcaaggctaactgagcgtcagcggttcttgggcttggactttgggttcttagagtagtcaaggcaccagcaaactgggcgattcttactctctccccacttacttcctccaacacactttcctctcccctttcctcctaagccctagacaccattatccccggttattcctacgactgcttcactcgtatttgagagttccgccgcctccgagccagaaggtgcgagatgagtttaaagggcttccagaagagcattgtccgcgccccgcaaacgttcaaggccaggttcaacattggcgacaacaccaaggatcctgtctacactgatgccgagcgccgatttcaggaactcgaaaaagagacaaagaaactccacgatgagtctaagaagtacttcgacgccgttaatggtaggtttcgtccggacaccttccgtctccactccggctaataccccgcttagggatgctggatcaccagattgagttctccaaggctatgacagagctttataaaccaatttccggccgtgcctccgacccgagcacttatacgattgaaggaaaccccgaaggcattcgggcttgtgaggagtatgaagtgattgtgcaggatctgaaggaagcactagcaccggagcttgagatgattgattctcgtgtcgtcagccccgcgcaacagctcttagaggtgattaaggccatccgcaaggttgctgtgaagcgagaccacaagaagctcgactacgaccgccacaggaacactctgaagaagctccaagataagaaggacaagtcgctgaaggatgagaaggccctttacaaagccgagggggacgtagaacaggctactcaggagtacaacctatacaatgatttgctgaaggatgagctgccgaaactcttcgccctcgaagcagaattcatccggccgcttttccaatccttctattacatgcagctgaatgtcttttacacattgcacgagaagatgcaaggcatcaacattggttactttgatctgacacgcgacatcgaagaagcgtatgaggagaagcgcggggacgtcaaagagcgcgctgaagaactcaccattgttcacttcaagaccacaggtggtcgtcggccgggctcaaagctcactggcaaagataaactagctgcggagcacaaaggccgcttcggatcacggcccagtgaccccgatgttgtcgaaaacccgccgcctccgtactctcctggcgccagtggaagcgccctcgcagcagccgcagccaaaaagccggcacccccacctccaaagcccaagccatcgcagttccgtgcgcccgtcgagacagttacggcgttgtatgattacgaagcacaggcccacggtgatttgagcttctcggccggagacgtcatcgagattgtgcaaaggaccgataaccaaaacgagtggtggacaggccgtgttgacggacgagaagggcagtttccaggtaagcaatgcccagaggatgtctctggactatgctaatgtctcacagcgaactacgtccagttgaattagtgaggatcagtgatatcttagcggctttaattctattctctgcaaattatatgttcgcttggagtctcatcaggctttactcgcataaagaattgttactcgttcatcgctctgcactgctgtgtccaggtggcattaactgtcgccgtgtatatatataccttggggttcgagcaatgattcacgagctgctgtgctttgccagcggcgttgattcttgacctgatacctatcctcgaatgttcttgacgttgtgtacaaagatgaacaaatagcttggactcgtgccaagatatctaattctagattatccgcaataatatcggtttatcatccgtgactgagtgaggcttaagattgat

SEQ ID NO: 15129 - DNA, 5380 bp, Emericella nidulans
  unsure (1)..(5380): unsure at all n locations
tactcgtcgataacaggtctggaacagcgctgcaacatttatagcttcgacctaccacagagacgttttcaaatgtggataggaaccctctgatttgatgcgggatgaccccgagaggatgatcattttgagtgttattcggggtttggggggcacctgcggcagccccaagcgggtgctgaagaagcgagactagcaattcgaccaataaagccgatgcaatggcagctactccaggtcgagtgacagtgcactgctggtcgagcgtctggtctttctgggactttatgccaaattagcaaggggtgtcacgaagccccaagcaaaaactcacattcatgggggccacaacatcgttgcaaaaataacacccaagctcctcctcagggtgttcgttgtttgtgacgccatggcgcattacaacgaaggtgtcgaatcccaatgctgcattcataacgattttacctgccgctttacccatcacagttggtagccaacgtgattcgcgcgtatccatcaaaagaatgataacgtcatgagcatctataagcccttttaggacctcgaaatccgcctttgttttttccgcgtccaatacagggtgacctgccatagggacggctagtacatggccgacggattccacgcctgggtagatctccgacagagcctgggacgctcggtaggctttcttcgcgccgccgtctagacagtccgcaaagttgaagagaggctgcctcaccgggtttgaaaaagacacggacccattatctacgaatgttatcttccttaccccccaagcctaacgatattagcaaagcacgcaaatgcgagttcgattgaaattcgcaccatcaaatttcgagcaacgtaacttccaagggttccagctccaagtagaaggcatttcgtgcctttgattttctcgagatcaagattcgggctgatccgccatttcatgagtttgaggttgaggtcaacagactggtcagctagtcttagtaatagtagagtcagcattgtgccgaagtaaactgtccggtgtaattgtacctcttgggatctagctgttccgtgagatcaacaattcttcccgtcagtttaccagacgggttacgctcccatcccgtcaccttaggcatacggtcatccttaacccccccatcgggaagctgtgatgtcttcagtcgtagagtcaccacaatactccgcccgcagtcacgcggggatggtccatcccggtagcgtaatatctgaacctttgtaagtccccatcttcgcttcacgagaacgagcagatttcggagcatccagccaggggcctcttcatagtttgagggatcgacaaaacaggtaaagcaatccgcaaattccgcgtgtttgaaaaacccgtcctcgtagcttgacagggatgcgattttccaggagacagtatcatcatcccgcatccttacccttcgtgctaggaaaaaacctcgttgcggcgcatctacaacgcgagcccactcttgtaccgaacgggcgagtgcagaactctctacactgggaagtcgatgtgcttgcgctccctcgcatccctcctccagtggggtccaagacgggtctgagtgaagtgcagggaatgcgaaccagtaatggaacttgtattttttgaggtcagcgtaagagaggatgacgaaggcggacagcagagatggacatgagtagatagtgccgttgttgatagcattccatatctagaaccgcagcgttattatacggtgaggacgtttttgaccgccactagactgaccgtttctccagactgttggagcatgcccattttatcggccttcgcgtactcctcaatagtattaacattttttatcatgccttccgctcggtaataagtagacggaactctgtaaagtagctaggtcaggcaaacgtctagatactatgctataagagggtcttgggctcactcgtcgctagtgagggcattcccatgtatttgaatcctgcacgaggcgttgggagcgtctgacgggcgtaactcgtacaggcccagaactttgcgcgcggaatcatcgagcttgtcatgatttatcttgagagaagccagggcaatatagaacggcagctctatatctgaggcaaatggagtgtactgcatagttgccgtttgtagagggacaacgggctgatccgaactgtagctatagtggggttgtaccactagcagacgtagtattggcggggaagtcaccttaccaataggtttgccgatagaacgtacttcgaacccagctgtagcgatggactggctggatctttaagaaaaaccgaaggacgacacagcgtggtatttcaagtccgtactatgtacctgctgcagcatttggggaaagggactatatggcgttcaatacgtcgtgtgactatactgcctttccagctacgtcacgggatactcgtgagcccgggaatgatgccagggaagaaattagtatcgtgtgtaaactgctatagcgttaaggctatcaggcgccatgcgtagataattattgaaaagatgcgtacttccatatgatcaaagacactccaatccttggcggcactctatttacatggttaaagcaggaatcacgtacctgtataggaacggaataattccgtcataaattacttcactggcagaacttgcaatttgttcgaacctactcggcgtacaccatacacctgctcttggtgtcatggaatgatatcttcagagctgtgggactgcatattggaaagagcttgtacaattgtggcatgctcctgctttctgccatgtccttgtgaactgggtactgacctgaatttccaattgggatttcagttttcttgtaataccaaatgcgtgagcgcaaatctttgtggctagtagattactctgtactcaatgaacatatcttcaagtctcagcctctttcgcccctgccattatttcctggcttcgtgccatactcgcccgcgaaaccactnggaaacaatgctaattggtctatgtggaggttagtcggctacgctatcctggccgacagtgaggctaacttactaaaatattcaaggaatctgctccggaaagcatgctgtggcagaatatcttatccaacagcaaaattttcggcgtcttgaagtgacgacaagcgctcctccgcaatttgctagcgaccctcgacttcatttctctgacgcaaccaataatacatctggcggagagccatctttagtatttgagaacttcgggtcgctgatcgattttgcaacaaagagatggcaggaacgctgggtgactacgaatattggggacgcctccacggtagatcgctttctacaacgcccattttttcttttggtgagcgttgatgccccagtcagtctacgatggcaacgttttgcgaacaggtaagtcctagctctgactctgttcgtagtttaatctaagtctgtcctagatgccgaagaaggcgacttgatcctcctagcctagaagaatttgttctctggaatgataagcagttgtacgaaaaggacatcggccgcgcctttctaactgaccgagcacaagttcgcctcttcaattcatcatcttcactggaaaaactgcatgctgctctcaaggcgcttaatttggccgatgaacaacgactgcggcctaactgggaccagtatttcatggaactcgcttccctcgccgcacagaggagcaactgcatgaaaagacgagtaggctgtgtccttgtccgagaacgtcgcgtcatcagcactggctacaatggaactccacggcatctgaaaaactgcaacgaaggcggatgtatggtaccatgacacgataggaactagagttgcttacaatctattaggtccaaggtgcaatcgcggcgaaggcggaggcgtcggcctgtcaacatgcctctgtctccacgctgaagaaaatgctttgttagaagccggaagagagcgcatacgggagggtgcaatattatattgtgacacgtaagctcgtttatccattccctctttccaccctggtccttcccacgatagtctataaactaatctccgtctgccaaagatgtccgtgtttgacctgcacagttaagattgcgcaggtgggaatttcggaggtagtatactcacagggttataacatggacagtgaggtgcgatgaccctcatagctcctgatgaacctgagctaaccacgaacaatcagagcgcagctattctcgcggcagctggaatccgcctccggcagttttctccagtaagattccaacctacccctggcaccagcatatgctaaaatgtatcagccccgaaatggtctaatttaccttgaagaacccgacagaggagaatggtaggaaccctttttttttttcggttagtatcaacaaatataacttgtcgcggcaggctgaatgtgaataccctattgtagatgatgtaagctgttgtaaacctgtccttgcgaaagcctgcatcattctggatacctcacataggaatacctcacataggagggagagctaagcgagaattgcattttctttgtggtttcacagctttcaggcaagagttttacctcgggaatatgataagggttaagaggattgtctcagtgaaggcaccgttggcaacgagctcaacaaaacgatataattctgcctctaaaatctatatctgaatctgacaaactaaacctggggaccagcagcggaatttgacgcataacccactcagacatcaggctcgaatcgtcgaacaaggaaacctctatcctcaaggtattgcttgacttcaccaacagtatactcaccacgatggaactgtacctcaattagtattgctgtagtagacagaaacaggaaaaggtacacatatatacataccatcccagcacccagagcagcatctgtcgtcgtttgatcaaaaacttcctcaaaatgcttcggcataccagctccgctagaggcaatcacgggtatttttactgcagctttgacgtggttgatcagttcaagatcgaaaccactgttgctcccgtctttatcaatgcaattcagcagaatctccccagcacccattgcctcgacggcttgcaccagctggcagacatctaagtctctggtctctctgccaccctttatagtacactggtaccaacagaaattttgcccggcggcgttaggaaatttcgtttctatcgtacggtgtttcgtgtcttctggttggctgacataaacgcgcttcgggtcaacgcttacaacgacagcctggtttccatacgccttagaaatagtttcaatggcagttttgcagacagaactttgccagctgcgtaata

SEQ ID NO: 15130 - DNA, 3210 bp, Emericella nidulans
aaagaacaccaacctcaaacctctgaagttcaagaaaatcaaaggcactaccggcagaaacacaccgccctgtagcgccgattggctcctccacggccatcgaatcaaagcttccgcaaataattggacctccaaacctcaaccctcaactgacctccccgtcatctcacgcttgccattataacttccgcatacgccataattgctgggaagatgttgctgcctacagtccgaagccggatagcggcgctctcgtcgcgcgttgcctcgcgggccgcctactcgactaccgtccctcgcttcactgagaacgctatgcagccgaacgatccgaccccgcgaccggccaaacccaatgtctctgagactgatgctacgcctgttgactcaatgggagcgtgggatgctgcgctgcaggaatctacagacgccgctgagcgtgttcgaactatgcaggctcctaaccggaagggcacctgggcctcaaaccagaagccgagagcagaggcgatgagtggacctcggtttgagcagacgattatgcatcttcaggttcgtcaatggctcggtgaatgtgttttctcggaggcggagtaaccgagatccgggttttggaaagtcaactgacacatggatatagcccacgcctatggccgctatcgagctcattcacaagcagcccgtccgctgggtgaaggacaagatcgtcagctgcgacggtggcggcggtcccctgggccaccccaggatctttatcaacaccgacaagcccgagattgttccctgcggctactgtggacttcctttcgttcgtcattcgagatctttgcaagatacatttataaggctaaccagctagcaggcccacgagcaccaccgtgaatatcttaagtctcttcccacctctagctaccctcttgaacccaccggtgctgccgaggaggtgaacgaaaaccagcgtgtgactgagggtgccactgggtacgagcagcggtaaggtatggtttttggcgttattgcatgtttttttatgtcgcctggctgggcctgtacagttgtaccaatctatggattagaccatgttctttacatctcttttatcagctatcaaaagcttgtcaatcactagactactagtaactataaactacggacgcctcgaggcacgcgatcaagcggcgtaaccctcttccaaggctctactggagatacaccaaaccttctcattgacatcatgcaaaccaactaatagtagcaccctgatactatagatgataatccacatctgcatctagtcactccttctccccctgaatagtagcaacaacctttctcgtatgcctcatagcccggaattccaagtaccaaatgccctgccacgttcccgtcgccaatttgccgttcgaaataggtatgttgaccgacgctccaatgagcgcagacttgatatgtgcctatccaactcgaacattagcacactgcgcgtccttgaaatatatgcctctcctcagagaaaagcacaagggttagaaacatagcggttgcataccggcatatcatcctccccctccgcactgtgccgataaaggttccccttcttgtcagcgggcgcaatgcggtccagcgcatcagacatatcctcgcggacatcctcgtcccagttctcatttagcgagagcgcgcaggaggtgtgctgaacgaagaggttcaacatgccgaccttgtactcgcggatttccggcagcgatgaaaggatgtggtcagttatgaggtaggagccgcgcgattttgagggcagagtaaatgtcttttgcgtccaaggcatttttgcagctatttagttttttttattgggttgcgatgctggcgagatcgttagaagctgagctggaggtggttttgatgctgcggggtaagatagtcggtagatgggcagagtggggggaacaattagggatacgtatcaagtgtcattttgagtagatattaaagggatcacttacagaatgtagagactctatccgggctggataagttgtgaattgaaactttgtggaggggacgctgttctgttgaaaaccgcttggtggggaaatcctatcgacgtcatttttgagcgcacgcctactttgtaacgagacaattccttcttgaactacattcaattgatattcatacatagccactacgcagacggttaaatccgcgaattatcatccttatttttcggctttccatagtcatcaagcgcctcgctctgttcatccattccagcccacttcggcttaccgtccgggatatccattgtacgagcagaatagaagatatgcatcctgtaatatcggattaatatctattcccagaagatgcccaagagagccaaagattagaacatactttgactcaaaagccttcctccaggtttcgtgatccgtacccgacccctcatagtcaattaactccgggaaaatcaaacagacattctttccttcgtctaggatcgggctgcgacagtgcgcacatgccacctttgttggtaactggtagtctctggatttgtcctgggaagagtagaaggacaggccctccgtgcctttgttgaactggaggtcagacttatggaacactgcgcaccactggaatggagcacctataggagttgcaagttagtacagtcttgcagacagcatcagaatcatgtcaggtccgcgtaccatgagtcacttggcagcctcgacagtggcagtacttcgcgttcagtggctgctctcggctgatcttgtaagtgacttggccgcaattgcagcttgcgcgccatttgaccggtccaaactcttcatcagaccgtatcttgtatggcgggcggtccttgtaaccgggatctttttcaggcattgcgggcttgtaaagacgtctagaataactaagatatcgtgtgttgattgggaagcagcgggtgttgaaggtatttaaagcccttgaggagctcgataaaagccggctatagagcatgatgagctgatgatccaagaaactacctcgttaaacagcgccctgtccgtcactttgtagactgcgtctaggctcatgaccgataggtgatgtcatgtcatggcgaccttgattgatggaacgcgattcgaataccttcaagatcaatgtcctgagatgacagcatctggccggctttgatacggtaaaaaatgaaga

SEQ ID NO: 15131 - DNA, 1632 bp, Emericella nidulans
tgatgaaggaattgaaggctatattcactgttaacttacacgatttctgggacagtaggttgtgagagactggcgtacctgttgaggagcatatgtagacaatcccgacgaggaagacaagtattccatcgagcacaagcgcattaacgggcacaccgagggaatggtggacgggtgagagtttctttgagaagaagagggcgtcatcacgagcaaaggaccaggtaagtctcgaagctgtctggtgcacagcgttaaatgcaacacatgagatgacaaataggcaagccatgaacacagttgcggcggctggggaatgagtggccttttcccagatgaagaagatagggaacctggattggccgccaattaggaactttctgggaggtatatgggcaagaggtcgactgcatactcacccagtgttggtggacaacgactctgcaacgtcgcggtagctatagctgatcgcgatagcaaaggggaaagcagtcagaaaccctacaatgacggtggccagcaccgcctttggtacgacgcgttcggggtcaagacactcctctgcaagatggagcgtggcatcaatgccggacagcatgaactggggcgttgacaagccggttaagaaggatatgccgtctgaccaaccggatccattcgtcattatcgcccatatttccttcgagtcaacgtggacttccgagcgagctggacaagcaacagtaatgacaataaacgtggaaatggaaaggacaactggagcaagagcatagctgttagcggcgacgaatcgagccgtccttggagggcaggaactcacatccaatattgtatatccagagcgtcttgttggctaggtacatattgtatactacgacgagtatattgaatagctgatagacaagaaagtaatgccacgacgcgggctgatatgcgggctgccagcgaataatgatcgccatcagagcgttcgtccctgacagtccaatggacgcacccaggcatatccaagagaatatggccgcaacgctgaagtacgacagtcctcgactccatcggcgagaggccaagatggatgtgaagtggtattgcccaccagcggtaggatagacgctggcaagttcagcgagcgtcacgcccgtgcagagcatggcaaaggtgacgacgatgatgccataaagcaaagacaaggcaccgcctgacctggatagcgatggcaaaactagcagcaatagcaacccagctgttcgagatgttgtaacccacggcgatgatgctcaggatgttgaacttgcgcttcatgggcatctccagctggtctgctatacccacctcgcccttcaccaattcaacatctggaatggatgttgctccatagtcggctttggatgctgatgacttggtttcttggactgtgtccatgaccgttgttgtattccgaaccgatcaacaatgaggtatcaaccacggtagggaccagcgtccaccataagcgaactgggacggacggctataaagaagcaagaacaaagacatccgctggttgtcggaacagttacataatggttggggttgctgaccatattgatagagagatacgtgataagtgatatcggaaccgctgctgaattc

SEQ ID NO: 15132 - DNA, 995 bp, Emericella nidulans
tctctgggagagggagatcacttcctcatttgaccctgcttgcttatcaggcgctatcttggcctttctaagtgggtatgggatggctgcgagctgtggaccctgcactcaggggcaccggtagtgtcaaaagctggggatgggacagtgcttcctacacacttgaagctctccttgtctagctggtctacctaggccgctacatattgcaattactgagtttaggcgatgacagagctgggatggagtttgtgtggcgcatgaaagacaaaaccatccaggatcttatcctacacggtgtacccttaccagagttccccgaacccgtatgcattgaaagctgacagtgtgactcccccaagttgaggacttggctaatacgccccaattaaatgcgatgagacccctatttgttgagagacctgtcaactggcaaggcttgatttgcgcccgtttctatggttcgactgatctttgaatgctcggcctaacacggcttagacgctcataaggtccgttctttttggaaacccgtattccagaagaacaaaagcttacttcacctattagattggctggttggggttgccttaccgaagcccaagtggtcttgcctctaacccttttgaaacctcccctaagggttgccctttttcgcctttcaattaaacccatttttttctccttggtccacaggggaagtcaggtttatcccctttaatcacttgggactttaccgcttcaagccttactaatctcccccctaaagccgggctctgaatgtgttatcttccatgactcccaattttcccttggaaacatccattcctccgtgaacaaattgtcataatgggacctttcctcgatattcttggtgcttgatccttggcctttcccttctcgctatatacacatgtttgtgtgagttataactcctctctctttccatcgaacaattacccctttctacctttctataatttctatcttcttat

SEQ ID NO: 15133 - DNA, 598 bp, Emericella nidulans
  unsure (1)..(598): unsure at all n locations
caccgatttagattattggatcattctacatcgaggctggaatacctctctcgacagatgaccctgagtggacattggacagatggacggtctattttgtgtatgatgctgtagctagctttgtgaaattgtacccaggctaacagcggctagatacgagaaggttgaaccttccaccccaacagcctcgtcatattccatagtgggctatgctaccacctaccgatggtggttctacaagagagatcgttcagagaaccctatgcctagagacggtccctttcctccaccagagctagtccgaccgggcgagttgccgtcaaggctgcgaaatgctcagtttctgattcttccgccccatcaaggaaccggtcacggcgtcaacctttacaatacaatccatanaacatgtcttgatgacccaacaatcatggacctaaccgtcgaagatccaatgaatccttgacgtgctccgggactagccgactacaataacttgggccggagttcctcaacacaatatccaatcacccccattcctgagtggattttaaaaaaaaataacgtgtccaaaatcttcttctttcgtaaaaactaa

SEQ ID NO: 15134 - DNA, 369 bp, Emericella nidulans
accccaaatttaacacccatcctaaggtgttagccgacttcgtagctctgtggcctacccctttatgctctagggtcctacaacagctccacctacggtctaaacggacagttgctttcatgaggaacacgtactggccgtggtgactacaaccaccaatatgaagattggaatggggatttgaggagcgtagattattcacagacatcgaggaacttcattgcatggaccaaactatactattagctctggccttggccttacggggccactgacgtgaccttgggctcgacgcggtctcaggcacgcccgctataggcctacgaataaacgtgacgcaccgggacttgtggccgaacaagcgctgcg

SEQ ID NO: 15135 - DNA, 451 bp, Emericella nidulans
aaacgcaccgggatatggccttcacttcgggtacgttagctttttgtaaagcgaaccctgttatgaaggaccttgagataccggatttgctacccaatctctttgctgccacgctatccctaactcggttattcggtgggataaacatctcggatggcttccgtgcaaatctaggatattgtagcatatcttttgaaaatacaatgctgctttgcatactttacagacggagagtactcatataaatctatatctctggattctctatagccctatcctactacaaacataggtcggctcaccgaaccctaacctagcgtcattgacaccaaccggacggaaaccaatgcctctacattaacacaactacaattgcatcttgtggggacatagctggtgggtgccggctgtcagacggcttcaatgttctcttacaagggttaacgcgtcg

SEQ ID NO: 15136 - DNA, 564 bp, Emericella nidulans
  unsure (1)..(564): unsure at all n locations
cgctggtatgaacgcctggttcgtggcggccgacttgcgcactgccagaccttacagctgtggtcagggctgtgagcgcggttgctggtccattctatagctcctaactatcaccgtgagtggtgtggtggcagcacgtgctgccgacacaggcgcctatgtgcttacgtcatgcggcactagagcgttgtccgatcgatgcctatatatatcgggcaggccaatcgacgcaatgtacttgatgttgagggcgcgactgagcatagtattggggttattcaacctgcgtgcatctgcaccacgagatcattaactgcacctacagatgaggactgcccatgaccgatccacgaatgcgaacgcattgtacggctatgacatgctgtgctggctgtgatcttccgatgggcgattaagagatgcatgatcttttaaaagggcatgcatcctcaggatgtgcaagaaattgctgaaggaggactctggcgtgtggtcacacgctgggctaagaatgatcgatcttactcgttaatgactgatgcgcccgtctgnagaacatatttc

SEQ ID NO: 15137 - DNA, 2714 bp, Emericella nidulans
gcatcgcagaagtctcccgatgctggctcagcggccataatcgcgaatctccaagcccaaattgacgatctcaatgcgttgttgcataaggttgttgagaattctgcatcgcctgcggctctacgtgagtacatagaaatgcagcagcgtgaaggaaaacaaaaacagaaagcatatgaagagaccgagtcgcccatgtcttaccagacgccaaccacttcgagtgactggcggttagacccggagcaagaacagacacgcctttctgttttccgcagtcgcatgctaccgtttctcgcgttcacgcacctctcaccagatgcgactgcagaaaatatctttgcaagcaaaccactattcttccaagccattatggctgttacctcgccatcaatccaggagaggcgggctcgtggaagcgatctgaaacgggtcataatccagaggacatgggaaggtattgaatcgagtctggatctactgctatgtgtcttgacatatctcggctggggctatgatactttcgtcaacaaggcctccacgtccagtccctcgcgcctcacgcagatagcaatggcagtagcccatgaccttcgtgtagacacttctgggcttaaaagatcagaccttctttcaaatgaggtcttagacccggaacatcagacgcatgacacgggaaaccctgaaaactcggcgcaacaaatcctggagaatgagagggctatactcggatgctttttcttgagctccatgtacgtctttgccttcgcatcctcaatcatccaaagctgacgtgagctggcattgctcaggacggcatctcattatggccggatggagccgatgcgctggacacctctactggaggagtatctcagcactattagcaggtccagagagtgtccgaccgacgagattttctccttgcagatacgcctacaggtgttagctcagcaggtctgcgaacaacgtgatcagcgagacttagaccgttgccaggtggcttcaaacacagcatcgtcgggttcaacagaacccctgcttaacagatggtatcttgagggcctccagaggaagctgcatgagattacggcttccataccgctgcaccttaaggagaatggcaagttaccttttattctaaatgttgttcggaagactactaacatatgctcatatagggaccctcctgtcccagctgcactacacctctttaagtatatacgaaaccatccatcctgtgaatccggatgtcatgcaaacctcgccttcacttagcgtgtcttccactcttgacgagcgagattgccactatcagacgctgcagtcgatacgagccttcttcgatatcatcctcaggtttactcccgtagattgggcaggatttccgttccatttctgggtgcaggacatccgatgtacatccgtgctgataaggctatcactctcgccaagttaccgcgacgaagttcgcaatacagttaacgtgctcagtgtcatagatctggtatcagataagttaaaaggcgctgcaactgaaatgggagagacttcgccagaagaccttttcggaaccctttaccggattgggaggatgttgcgcgcttttataggccccaagctggagcctgtaggtctttcagagcagcaacagagcgctctcccatatgtggaaacgcccctctggaatgagccggagacggctgggccgtcgcagttggaacttatgcaaatgctcggcttcaacaacctgatggagacttcgacggcactgccctataacccctctatatactactacacatatagctagtccaataaatggccataatcggagtgcctatcctccaggctccgctacaggagggacctctgccctggccttcagttctattaacagagtccactcgagccacaccttgagctacgctctgagatactgaacaccaagccaggaatggactgcagctatggatagaatcgactcatttatctttcgacctttacgccctgtgattagtgtatacttccggtttgggaagttgagaggagtggggctgttaagaacttctctgagcgttccacgggtgggccgccccaagcttggtcactacgttcatgtagtataaatgcagccgtggtcaactgaacttcgcaacagctcgtgtccctgaaaggctggtcatatatttctattcttctcttctaatttcgcgcagggaaatgtcacccccagcctccgtgcatcctgcgacgtcggccctgcacgccgacgactaccttaacttagtcacggatgttgcaccaccaatccacttgtccacgacctttcggtttcccagagagccagaaaacttaatcccgtctgaagatccagtggtgcgtaccatgcctaacaaatgaggatactgtactatactaattcaagcgcaggaggaattcgatggcaaaaactacgtttactctcgggaattcgctccgaacgctacacgtttcgaagctgtgctctcggagctcctaaagggttatgcagtgagctattccacgggattagctgcgctgcatgcagcactggttcttcttaatccgcgtcgtgtctccgtgggcgaaggctatcacggtagtcatgaagttatcggcgttatatcgcgtctctcagggctagaaaagctgccgctcgactgcccagctgaaagtcttggagagggtgacgt

SEQ ID NO: 15138 - DNA, 2039 bp, Emericella nidulans
tagcgttcgtcacaagatatacatataattgggccatgacgaactgctgtcattgacgtcgcttatcctgtagccgaagcccacatatcgatttaatcccccccttcgattgagtcgcttgagttctgagatgctgagagcagtagcacagaaacagcacgagtacggcggacccctgtcagctagcccatccttcaccaccattctgcttcaaagcgtagacaaaaatccaagatatttaggaaggtccgcttaagcagggtctcagctcggtgtacttcgagttctgccatatggctcagacgtgccaaatccgttttctaggacacgttaccaatatttatatatgtatttcatgttagtatctttagtgatctgaaccactgccggcgccagataatgttattgcgccatgattattggtgaaacatacctctacgatcaggataagcgatatgccaggagtcagcgccaccattggctcactccgaccctgaggtctaaccggcagttattgttatatgaacaggcccgtgggccggtccggcggatttgctttaaagaatacaaaaaagtagggctgataacatataagagcctccttggccaatctggcatcgggtagctggatcacctctactaagaccactgtcgctcacagtgtttgatgttaccgcttcaaacgagccttctctcgtttctttaacatcatcggccgccccattgggtaaagtcctgtaagctctataccattgcagcctgtcatgatatgtctcttctgtcgcccaaatagttgatttgcttataccacactagagttcaggaaaaaaatgcactgcggcaaagtgtaggcattctgatatcggaagcaagaagatgatgacccgatcaatacaacatgaagatagcaacaggacgactctgttactaattgaagtacggtctccagtaagcgtctaccagttcggcagctgttatttaccagctgctccagccaatcactttcgagatacgtgggatttgcccatcgattatgcgccgtgacggcgcgattactaattagatcacatgatcgccgttcgaatcgattagctggggtcttgtgttcttaccttctccaaagacgccgcaagcaatcagatcattgtcctcacctataggatctttgcggatcacaagttcagtactagtgtttctattgcggcgtgagtaggtggttagtgagtcggtaactactgcggccaattctgggctcatccaaagggaccaagagtgcatctcccaaccctgcattgattcgatggtctctaccgcacctaccccgcagcttgctacattgattggtgagcgacgtgcagaaacttgcgacaaagtacgcggtaacttgtcttgtctgataggaggatgctgttgagctgaactacgccggtgattcagcctcggcgctaatattaagaagtcaggtgcgtctagcgcggcgttaacgcctaagataggctatttcaacacctgcccacctgccacccaatcttcaactaaaaatcaccacgacttcacatactatctgttaataaactgtcggggtgctctgcgtgcattccacttccgggttccagaatggcggaccctctgagcatcgcagcttctatgctggctgttattacagcggccgttgagtcagtcaaatcgctccacagcaccgtcaagcgcttcaaggatcgtgataagacactacgcagacttcgaactgagcttgaggacctcacaaacatcctcggttcactgggagatgtaataaatgcagaaatgccaatgttggctctgcttcaaggtcctgttgagcgatgcaaccaactatgtcgtgaatttgaactggccatggagaatttcggtcgaaagtcaacgacaggctttcgtgattgggcaaagatggagttcatgagaggcgacatcaacgaattaaatgataacattgcgggatacaagtcaactatcaatgttggattgggtcggatcattctgttatcaaggttccggtc

SEQ ID NO: 15139 - DNA, 893 bp, Emericella nidulans
aaagaactggcgaaagagaaccggatgtctttcatgggaacggggtaacatatcgggagataacatctctggagagccttggctggaacgaggagactccgatgttcatagtgctgaagatgtttgctgaagccatccgagaacagcagggagaagaagatcaaagttgctttcagggagttagagtattggcttgtcagacatcggggtcctgttgataacaagacgtaaattcaggggctgctgatacaacctctagcagttttttatttttctgaccttctatgggaatgagaaactgcatggtatttgagcatcttcgtgtatgtttcaaataaagtaagaactgaatctgtgcaggagattgtcgttctcgtcatgatctgcaacatcacccacacaatctctgagtggtttctcattccaggatgatataaatacatttctcgaaaagatcaatatgctctttagtggttgagtcatattcgaacgaagaattttcaagcagcaggtggagaaggctcaatttggtgctaagcagaagggagaagataatatggcggaaagcgctgctggacagcaaactggtcaaacattatagaggtaaagtttgataacgagagccagggctacgtagtgcacagtcaacaaagtataccaagatatgtctagccctcttgcaagcaaggtcacctttatgctttcttacctgagatcccacaccctggatcaggcaatattaggtccatgctttacacccagctgtagatgtagcgagcgtgggcgtgatggctagctgtagtgctaacggccctggacagagaggacattcagtctcctcagggtcaacagtctttttgtctgatagagatggtatatccaagctacgtctc

SEQ ID NO: 15140 - DNA, 4735 bp, Emericella nidulans
cctcgaatgaagggaccgttattctgacctggtccagtcccagtggtgccccttcaatggccacaacaaactcccctgcgcgcgcggcatctcggatgaagtcaccaatctctgttgcatgagaccatcgaacgtatcgttgctcaccctccccgttgggctgtggtttctgtagcgagctatacgtgtcgagctcttcatcgggcggttgtgactcttctggatggccctgacccttatcgtctgcaacagcgacctcttcgacctccatttcttgtgatgaatcgacagagtgcttggtctttttactacttgcttttcgcgggcgaatagggtggttttcgaactgatatgcgatgaacgagatgctcggttgtctctgggttccattttcgtccttgatcattggtagctcagcctgaatcaaacgttctagatatgagaggggctgttgagagtgtataagtatagcgatggtttccacatctagtcaggttcagtagccttcaaccggtcaatatagaagcagcgacttactctttggatgatcagtaggcagtgggataagcaacttcagcagtctggacggggtagttaatagctttcctgttgttgaatatcagcctccgaaaacttcttcagacgtaagatcgtacctttctccgccgaattgccaaaactatccctagacctggtttctcgtcctagtctctctgttccctcatcctcttcctcaatctcctctgatccatttctctcatgcgagccctgctccctcggttccgtctgtttctcgtaccgggtcgttttgcgcccatcaccactatcaagtgatgatttagtaaatcgccttgtaaccccatatggcccctttcctttgctcaacactcctgtctgcacacccctaatcaatgattgacacccggaaacgccatacgtttggcgtgactctctacctatagcgaaactcggtttccgatacggcgaagaagatatattgttgtatgtatgtgcccaatttcgtcctccacttagtagcccctgcgtaataattgtggcctggcggctccggagagccaattgcatctctcgctgttaggcaatgttaatggtaggttggagaatgctaagagattatctgaacctgttgcggtttcaacgagataagtcactctctatcgtttctgcctacttatcttaggttgctgagagtgtgcctcgaattttaaggtcggatatgagcagtggccgcgcggtgatgaatgctgttccaagttgttcctgcgaggcagctttatggtatgatgtcattattattcagcagtctcgaccactccctcaactatatacatcactttttccttttagggacattggtctggccccatccccttctcgtgatcataagattatacaccgtaattgacagccaacaaaagtgcataaaagtacgtgaatgtactccatgagcgcctgaagatacacaatacttaacagcatcgatactgcgctcgttgttctatgtaatgttcgttgtgattatgcaacttgaaagtccatttgagccaaaaaaaagtccggaattggaacgtaaggtttatctgagaaactgattgttggccattatagagcgaagagtataattgtaagcattctgaaattgtggggatcagccagcagagcagatttatcactctgccaaaagaaatcaacatataacagacagccctaggtactaacaagtggattaacggattcgcaataagtaaataaacacctcgatctataggatattcagtcatgtaggtcatgtcataagtcatcaagtcataaaatgccgtaatcgtctcgagtcgatcaattgaattgcttgtccttcgttccaataccattcatggctttttttccgagtggtaacttccgctccagggtccaggcctgctttggatataaactacaacgcccgctgactgaacgcaaagctcctagagtgtgggccaatcaatagtcgatcgcggcccatccgctccgcctcatagctctcagggctgctgcctccacttctgctcccctcactcgtcgatatgtcgctctcgtctgcgtaacgggaacgtctccccttgccaatagccacagggattccttggacaacaccaccgtggtcgtggccggctggatacttgccgtcattgacggagaagttgcgacaaatgaggtaggcgcgcatggctgcgttttcgcgggctagggtttctgtggtgcaaacgacatccgtctggtactcgcggttgttgacgcggacgatgcaagtgtacccggtagcgctggcgtaggattcataaagcggctctggccagtgacggcgtcggcagagacctgcacacatggttattggatactgaacgtgggacgtttgaaccccagagcaggacaccaatgaaaacagtttccgacgactcagcaaatcatacaatttgaagataagatagcccatctagtatattctctgcatccaaacaaggacctgcagggggagtatgttgagtatgttggcgatacagtcaacaatccccgaacgcgtaaggctcagagcccccgtagagcccaattgaggtagagtttgcggcaggggacctcaaacaaaaatagaaagactacatacttgcaaggtagagaacatagtacatcttgaccacaggcagtgcccaatggatagcgtggtgtacgacgatgttgagtcagtatttgctgccttgacttattgggtactgcacgagatcccgcaatcacccaagggatattgaaacaagccctatattgacggatgtttgtttgatgcccaacggccacgttttgctgcgacaatcaaggtccgcgacagggggaatgaggcgaaaaggcttaggatggaagaattgaggcagcgggaagggaatccacaaggaatatgaagctagcagccctaggcaaacagcaggatgtcctgcgctcgcggaagacgagataaaaggaaaaggtcagcggcggtcatcatgttagttaggtataatgagctcaaataagccaggtggggtccctaaagcagcggcagagaaagagggacaggaaatatcaaaggcgaaaggatagtctaaatggaaaatagtgggaaatattaaaatggtttgaatggcaatggctgccagcggcgcaatggagattctccaccgagtcggtggacagagacatggaagggaagagttcaatggtgcagtgcggtcctaaagtttcctagcttcaatcgtctcgctttccttctgtttggaggttgaaaccatgatgtgctggcatggcttgtagccagtgattcagcatgaaagatcaggaagtattgacccatctgccacggtgtaattcgccgctaatctaggcggcgaagattgacatggcgctcaggatttcccggccaaatcggccgtctcgacctttgtggacttctgcagcatgtgtgccgattctctgggtacagaccgccggcgagcgagcatctttgaccttttggtttttttgattattggctttttctgttgattattatcggaatgcctgtgattgtaaggatgaaaaggcgacttcgcaaccccgcagagaggattgaaaccataaaacaccatctgacaccagcgccaacagtcgaaaaagacctgcataagaggaattagactagggaaggtcttgagtgtccgctaatgcagacaatgatgattgacaatgagtggtggctcatgccgcgcaggaaaggtcagaagttcctggacgagatccatgactgtccatgagcatttggtatggagaaaaataatagaacttagaacaatattcgtagtaatccctaatttcttccaatcttagtgggacttacctgcgcgctttggcattgattgatgctgcttaaggggggattgagctcgtcgttaactcggcttcttaaccgagatttgcatcctgctgagacccgatactctgtgagtaacagagcttatgaaactggcgccgatcattgtatgtcgcgaatgtcccgaaacccaacttaaacggaaactaagccaacgagtgtattcttttcaattggcggtcgtctacggcgacgttcctggatggtacgataggctggtagtcaaaaccctaagaagtcgtgaacttcccacccaagcgtcaaggacagagtggcccagccgtggcccgttattgaagttgacgccggcggcaggcatcggatgcaatgatgagttggcagtttcgcttgcttcgcgcggcggggaaacccatgccacttcctcgacacgaggcggaaaggagaaagacttaaaaaccttgcagccgcattagcacaatcctttctattgctcatcgatatctccggggaatacaattcaccgtcagcggcgccaacctgcctcgctcccctgtcgccgccagcgtggacgggttgcagcggattcctgtgttcgatgtccgtgcatggtgcgaaccggcttcctgtcaagagaatgaatctcagtattgtgatgagagatgtgaatcgaagcgagtaggacttgacggtcctcccattcttttgagctttcctccgatttgatgtgccctgcgcgtgcttactcgtgacggagaacggcttattatgcattaggtcccatccgttatgacagacagcgtttagaggctgcaggtctggctatcgaaagcctgtgagaag

SEQ ID NO: 15141 - DNA, 525 bp, Emericella nidulans
  unsure (1)..(525): unsure at all n locations
gggggnttatgggaggggacatgatacgacacgtcctgaatcataactgatatcatcatagagtgggcttgtcatttaacacgctgccctccaatctggaagattgtcccgactgcttagatcatgagagcatgggcatttcctttcaggcagtgggagcaggcatcctgaacacaaggcggcactgagactagtagtaccttttcatatccaaccttaccagaagatgatcagacacattccagatccacctgtcgggcaaagccatccggccttcgggcccaatgccttgatgacatgccaccgcccctgtccctttacgctcgcaatcccacaaagcaggctttgctgctaacatgatacaccgttgaccatggtgatctcggcctacgcctgtgtcctcttggcgacagagcgcaacctgaaatgagaaatatcttctgcgtcttgacttagctgctgttatagaagaggcagagcatttgttagggtctgggtcgtcgaagagaacgatggtgtttaggt

SEQ ID NO: 15142 - DNA, 475 bp, Emericella nidulans
acgcgacgggggggcctgaaagcatacactgtgtatttttttgctatctggtgacaactgcagggggcatgttgctgcccaccttgataaactaataaccatcagctgcatctatgacagccagactcccaacgatatggtatcattattcagtgaaaattgtcttgagacccggccaccttaaaatgccatatctgtaatatcgttgacgacgacctgggatctagctatatgcgaaccaccactaagaacaatacgacaaccttttgcgttcgcgcagacacagcctaggttcacggaggctaataccatattctacctgagaaaggatagctaacttacacgaaaagatgccgagtacaccatggaccgcaaaggttatatgctagcgacatatcaccgtgttgagcagcacaacattcgccttatcgcatcacatatgtatatacggtgcatccgagagttatgacactct

SEQ ID NO: 15143 - DNA, 2350 bp, Emericella nidulans
ggcgacaggtcatgacagtaccatacagtaccgtaccgtaccgtcctgtttataagcattgctgactaagagtagaaccacacctgctgttgttattcttgcaagcggcttgcaataagcgagagagaacggcaggtgccgtctctcttctatgtactggatactctggactcaccctcgtcaccttgtcccctcgtcctcatctcttctgtactgctacagaatcgcacctgccatttggttgattgttaaaaatccttgacagcctcaagatgtatatattgccaccgtttcaccatcattgccctgatggtttcccattccatgcccattgtccagtctcgtctctgtccatcttcaaacagcaatctctactcagtctcttcatactcactccataacacataatctcataaaacaagatggcaaccaaccaagccgcgtggctcaccaaggcaggcaatgacctcgaagtcggtgatgcccccgtccctacggctggcccaggcgagattgtggttaagaacgccgcggtggccatcaacccactcgacacccatatgcaggacgtcggcgtctttgtccagcagtggcccaccatctttggctgcgacgtcgccggtacagtgcatgagacgggtccagacgtcgagcggttcaagaagggggaccgggttattgggtaagttcatggccattgacttgtcgtttggctcgtgactgactctgatattgtagtcacgccatcaatctggtcaccgggcggcctcaggatggtgcctatgctctctacaccgtcgtccccgccaacaaggcggctatcctgccggacgctatctccttcaccgacggagtcgtcgctcccttcgcggtcgaggcggccgtttgcgtcctctccctgaaagagcccggtgtggccatgcccggcgtctccacgccggcattagccctgccgtatccctctcttgacgatcccgtcaagccgttgggcaaagtcctggtcatctggggcggctcttcgtccgttgggtccatgacgacccagattgccaccgccgctggtattcaggttattgccatttctggtgctcacaactttgagttaagcaagcgctgtggcgctaccgaagtctttgatcacaaggatcccgaggtcgttgacaaggttgttgctgccgtgcagaaatccggccaggagtttgtgggaatctttgacgccgtcgctacacctgacacctacaccagcgatctggtcatcctcgagaaacttggaggaggccatctggctgcggttcatcctccgcccgcagaagtcccgagcaacgtcaaggccggcatgatcttcgcggtcaacgatattgcaaccccggtatggaatgactttgtcacccctgctctcgagagcgggaagatccagtgcttgcctccgccaacaatcgtcgggaagggtcttgaggcgatcaacgaagggttgaagaggtgcaaggcgggcgtgagcgcgaccaagctggttgtggagttgtaattgcgtgccggctgcaacatattagaaaagaatattgtgtacaagttcaagatagcatacaatgaacgattggtccttttctttatttttctttatttttctttcgtcactctctagcaccaaacaatgatgatgtcccgcatgctgaaattgcgcgatttctagtttgaaaatcctgtaagtgacgaagtagaatatttcggcttccccaggggatacggcaaagaaattaggctgccttttgcattgttcgatcttcgttggatttcttagcccacaaagctcccacgctgaactcgtattgccttagcgttcgtgatatcaaaacgcccctcctagtaatatggttggataaacagctattattggcttcacttgggtcgagagactcgttgtcgtgactcgcaggtcgtatgctgagtggcggctcactgctgatatgggaacataccaggctgaaactggtataagctcagtggtacattccacacctgttattttaatagtttctttaccctttctttcaatggctgtgcccatcagacgctagactgtcccaagcggcgtccatgttactgtttaaacatccttggatgtcggtctttctactcgcacggctctgaacaaccaggcttacatagcagcaactcctcaaagctggcactcaatacttgaagtgaggaagtcggtttgcgatggttatgggtagcttgcattggattcagggtttcatcacggacatattatcttctccgcaggtgactgtcatgaagctttgggtggcctcgcagattgtcatgtctagcaaatgaagcgaatgcttat

SEQ ID NO: 15144 - DNA, 481 bp, Emericella nidulans
cgagagtggagccaagggcgctagccctcacgaagcctttgttattgaacaactggactatacacagtgcggagggctatatgcaagctgacagaaccattcctcataatatacaaagaatagagtatctaccataataacattcctgaccggcaatgataatgatgacacacaacatgcgagtcaccactgactgggcggcttaagcaccgttgaccggactggaaccaacgccttcaacaacctatatatgtgtggacttgggagcaacgacatacacgatggagagagattactaagggaataagtggctgaaggccagcaacgtgggagagagccttagaactatactcgcggtgctcacaactcgatatattgcccacaggtgtgtgatatatagaggcaaactgacttgacaacacgcggtataccatataggtactacgctagagagatacagatcgccactagctggacactg

SEQ ID NO: 15145 - DNA, 1504 bp, Emericella nidulans
agtttgcgctcgccacgagatcagggagaactaggttgccacgattcaaacgaatggaagtaggtaggagcagacggatctctttggcaaatgttcctagacgcaccgaaggagaccgggaagtcgtaacgatcggccgaggatcgatgataccggaggtgagagcatattcgtcgtccaagtcgagaagatctgcgtctttatccttcttgtctgctgtcggcagtgattcgtcaaacttgaaatcctctcgaagttttcgatcattcgcgatagatggatcgagttgctttccggttgctagcgactccttcagctgcgctcttttttcggcaatggaagcatcgcggagttgcaaagctctccggtaaagataatctcgacgttcacgagcttgacgacgctgaaatgttcaattaaagtcagcatttggctccaaggaccacagaatctttaagtataaacatacgagcattttgacaatgggcgcaaaagtagaaacaagtcaagtctatcagaagcgggcaactttttttctgccggctgcagtttaggtctgggacgccacccgcacttgtgggatttggtgggcgaactgcccgataaagccgcaatcaacctctcaactctaggcaagagagtgcactcacttatcttgccaccaaggatagcatctctctcacactctctccctttattttcttcatctgcggagctcagtggtttggggaataggagaagtgcagactcagctgtaagtattctaaatggtcgtgctcagattgcccatactaagatctcgatgtatctagtctcattcttgcccctctgttgtgccacactggatttcgtggaagagacacaggggctttcattctttttgttacaagacgaagcgcctgttcttacgtccattgacgccgaccgattttgaccaactccttgagttcgtgaagggctagcgagattctagttgcggcggatttggaggttgagacacgtcttgcgttcgtcgattttcgatcattcttgtctttgtacagagcttgtgtgaggacgtcgctgtccaagaagcgctcgctagactcgtgtcgcgatgtctgcctctgttgaatatcagccgcctggcgcggagtcagaactggatcgaacagttggaggcccgcgtagaaggagacatgacgatgacgacgaaggccctgataactctgatgatgatgacctggaaagcacaactagcgcgccagccaataaagcaaagtatccaggagaattagaggaggaaaaagagctggccccgcatgcttgcgcgtaggtcttcccatttgccatctttcatgccggtcacactgccgtcattagaatttggaataatggctaacccggtctgctttattctatagatactgtggtatacacaatcctagcagtgttgtcaaatgtctggcctgcagcaaatggttttgtagtgcccgtatcaacgcttcttcttcccatatcgtga

SEQ ID NO: 15146 - DNA, 491 bp, Emericella nidulans
ggatgctacacgatttacgaaactgccatggggccccggcgactgggttgcttacatctaggtatccagcctttcgcactctagggaagcactagtcgtacagagcacggctatccacgagaggctggggaattgcaggcgcaaacagggcctgtaccggcaatggtcactagtatgatagaagagccaacgaagcaccatctgttggataaagatactagggcttcgcagtcattaaacgcgggacggctggaccctcctgcacccatgcctgagctcggaaacactgttcatgaagaattctggcttgtatgatccaggacgctgctacagctcggtggtggtagctgagaagacattcataacataacaccgcgaggcgagaatctcaggtttgacacatgtcagtgatgacaaggtgcgtcactcgcaccgtcaaggagcttgacagattggctacttgcgcaaggcagccctgtgccattaatgag

SEQ ID NO: 15147 - DNA, 885 bp, Emericella nidulans
atgcataccattgagggaaggtttcagtcgcaacgaatatggcgccgcttgcacgtcttgcagccgaatctggacttggtgtggctcttgcgggggggaccacttccaggaccagtcatcttgcaggtatagatagagtcaaggagtgaagatgaaaggaagggacaggatagaaatcaactatccacagtaccacgatggagataaagatggcgtggcgatgagtggagaaccggttaaggctgacgagtgcctagcctccttgagggctggctggttgtcttgacccaatttgccagtgtggccccaggcccgagatctaggatagattgcagagacctacaggacagaaaactccaaatttggactctggagtggaggagctctgtcatttttgacttgtttttgtccaatattattggcttaactgatttgctattttacctgtcttttgtcaatttcttaagccttgaagtttactttatttaaagttatgcccctctttatattcctcttcctttttgatttcttgtttacaatcttatctctaaacatgttacatcattcttctttttatttcttcctattatatatttttccttttttcaatatattcattatttacttcctcgttaatattatctcctttcttcatttttactttcatttaatctatgtatctattaatattcttccttttcttctatcttatttatatcttttacatcctatttccctcccatttatatttactatctatatacattttctactatgttattacttatatatacctttcttactctatttcaatctcttctcttctttatccttttttttacctcttctttaaaattatatctatcattcttttttcttctttat

SEQ ID NO: 15148 - DNA, 3340 bp, Emericella nidulans
taataaaaaaaaaaagagttacttatattttcgggggggcgagaggagtttttttctccccccctttgtggtaaggcgttaaatttggaaagtgggccccacaaaaaaactccttgtatatagggggggggagggagaaacacgtacccgtataaaatcgggtattttgaaaattcccccgaactagagtcttttggtgggtccggtaaaaatccgacaacagaggcggggctgaatgtggcaacaggtgtaatgtgaatgtgacgctgcatcaaatgcgacttctaccacatagtcaagctggtttggatgtatagcttataaggggtgttgaccctcgggaatcgggcggtcgcgatacgccagcaggtcctacctaaaggctgggacattccaagagatctacggcttctagaagaagatttttattctagaatatttctcgaactattcccgaatccttctagaatcgttctcgaacacttccatgctgagcattgctcatggggtcgaaattccggggggaaaaaatccagaaacgaacccaatacagaagaggggaagcaattcacccgggttaaagctaatgcatgagctgtgggcaacgggcggttgatgaaagtacccaggacaatcctggcggttagaatagccagctaatagtaagtcgggctcctcacattacaactgtgcgttgctctgccaatcttccgcgccaagtcacacaacggcaaggctgtgaagcatatacccctcttgcttaacggcatgggccaatctagaaggaagagatgcctgcgctgcctgcgctgcctgcgcggcctgcacatgccaccatgtttggtggtcctagtcttcggtctcgtctagaattgcgccgagtattttcgtctctgggtgaagcaaacaaggaaaacctcatgcgatcgtactagagcctgcgaacacatgtagaagcagcaaggatgatcgaagagtctttgcaagccccgcatggacatcttctttaaaccttctctagggtcatgcggtctaacagatcacggtaactgaagttattcatcactgataatcactgatgatcactgatgatcactgatgagtgatgattactgttgttgcagtcaatgtttgagctatattacgttatcttgtgtgattggctgcggggcggcaggtagatgctgtttcctggaaaaccgaatgcaaatgtagactatccagaaaaggaaaggtatctgcaggtttctttatacatagataagagcaaggacttgtgataccaaatgcaggcctttctcttcaaaccttgtcaaaccttggaaaaccagcactggcccatgagcattgagaaacacgaccgtgccaccgtaagcaatcgtcacaagaccgcggcctacggccgccagcagacagatggcaaagtaaactttttgaattccaaatcggaaacaagatgcagctaaggtacagagcagcgatcagaaagtcgcgcaagtgtacagatgtcgtcaggcacacagcctgttttgggatgccaacctggacgccagcctggacgccagcctgggatccttctttgagcaggcttgaagtgcagagaccatagctgaggttatgtaggtcgaaaatagcaacagcagtgacgatgtttgccatcgatgcgatggtggtggcctgaggccagcatcattccagcggcaatcgccaccgatgtactggtggctgggatatggcagctggggaattcataccgtaagctggtaataaagatgggggataaaaagtgcggctctaagaaaggaggagaattggaacgaattggaagcaaaatgggaaaccttcagtcgagaagatcggtaatttaatatatttagacaaggctgaagacaatgacgagaatgtatgctgggctgacaggagagaaggggggaggccaagcgcggattcggctaggaaattgaggctctgtgtctcattttctcaatgcgaaaatcacattcggtgtggagccaggagtttgccaactctagatgattcattttcttgttagccgatcctgttgagcctcaatttagtgacttaaaggctcatgcacacggcgcatactcattctccacaacaccggcctgggacagtgttactccaatgtctgacgcgccctgacggctccggtacgtctctcccttagctcgtaggccgtctcgtccgcttttttggtcagagaaaatgaccaggaacctggactccatcccctacgatgtcttctatcaagtggcctccaagcttgattgtcatgacttcatccatctcagcagagtcaatcgcgcactccatgagttgacaaatagcgactctattgctcggaacacagttagagtatgccacattggcccccgtttcctctggcaaaatactgattcgatagtagagcgatctacttcatacaagagaagggaaagaggccgaccgggccaaagctggttaccgcaaagccatcgggcgtctgtacgacgtcaaggaatcctttgccactgctcaaccctactcggcatcgattctggcatacgggagctcgttcctctacgcgggcggctcgctttgttatatctataatgacgagattcgcgctctggacgtgcgtggtgccagccgcgtggaacaagtcctgaatctccccaatgtcctacgccgtgcagtccctgagtgcaatccggagactgggatggcccatatctccctcttgaactatagcaactgggtcgttgcattcttggtggcgacccccgagattccgggaggctggatcctcgcggtcgacctccagcgccggtcgacgtatggaaagagcggtcgtctcaggctgaaagtacatattgagtcaacaaaccggctgtttatacgacataacaggtcgtatctctactatgggactcattcggcaatggggactcgcgggtacaatcaatgggaagtgaattgtgcagacctcaatacgggcaaagtcgcaaagccaaacatgatcgttttggataactttgctggtaacgaaattggccagacggtatgctttgaagtctatcaggatcatctatacgccatttccacgttggtggattttgaagaggaggaagtggattggacctcatactacgtctggatctgcctggaccctagcctcaagttatccaaggaaggtatcaagactcatcgaacttggcgtcggcagcatcgtgaaggtccaatcaatgatacctggtcggatctctcgctcagggaagacgaagcaacggggcaacttatgatccttgaatgccgccgggaatggcgaggcggtcac

SEQ ID NO: 15149 - DNA, 5896 bp, Emericella nidulans
caggtagttcagggaggttcgaggtagcagaagaagaggcaggcgggtgcgcatcttcgtcgacagacatcgcagatgtaagacccgtcagacacccgtgatcgagtgcgttgcgcaccagtcgtcatcctcctcattctcttcatctttccgagcctcttcagcatggacaccatccggcgcggggaagtaatgcagcaaccgcgccttcgtcgtcaaactgcccctaacaaccttctccaaataacctgctttatacccctcaatgttcccctccgcataccgatcacaagccctagccaccagcaccgccgtatcaatgatcaacctgcacagttcctcaagtccgctgcggaaattcggcaacttctgaacgtccggccagatgttcggcgccgtgtactcggggagatcggggtgttcgtcagacggcgcgccctgcaaagacgggtccttgtagaacgcgcaattcacgtagtaggaacccttgagtgtgtcgaagtgccctgatctcagggtttctttgccgcaggaccagccgatcaggtatttagccgagggggaggtgagggattctgcgtattaagaatttagcggggttgatgaaggaggttgagtggagtgttgagtaccgagctcatcgtttttgagcgcagcaacgtacgacgcgttggagagaacttgcgcacgaagatgctggaatttcgggtcgagatctttgacaacgatgatccctagcgaggaggggccgaaggcttccgtgagagtgtcgaaagaaacggtgcctggaaggctcttattttagcgttgtcctccgcagtattcatagatgtataaaattgtggtgtgtggaggtagacggaccgtcaatcagctcttgcaggctgacagtcacggcctgagcctgtttgataggtttcgacgccatttttgaagtcgataatggacctttaaagatttctgataacgagagaagagattatatataattctgagccactgtcttccccaattcccctcttttcccgcttcgcggccggctccgactcccgccaagtttgatgctaccctaggtttatgcccaggtagtatcacgactccatggcatgacgccctccttagctacttgaatatccaacatctcggactcaaatcgctctctataccctatttactccctggtaatgacactgaagtccttttgttcgccctctgcagattgaaacatggtatcactagaatatatcccactatagtacaagattcatagtacaagctcgatcatccgccttacccccatttgtcacaacagagacaaataaagcacaataagttcaacgtctcgtcacatgcctcaaattcccaaaaggcaaaacctctgcaatcttcttcaccttagtaaacagcatgaccagacgatcgataccacacccccaaccgcccgtaggcggcaaaccccattccaacgccctgagatactcctcatcaatttctccgggttcattagcatccttgctgtacttcagctgatcctcgaatttgcgacgctgctcccacggtgagttttcctcttcatacatgttcgcaatttctttgccttcgatgaagagttctgcacgcgcagcaacgcgctggttgttatcagggtgaacgaaactcttcgataatggagagagacactcaggcgggttgatgataaatgtgggctgaacgcattgtggctcgacgtagatgctgcagagctcatccaggagacgagggagggtagggtgttcgggtaattggagtttgaggtccgtaaaaatttgggtgacctgttccaaggagtcaggtgctgtaaggtcgggcaactgacggtcaatgcctagttcaattccggttataaaatcgatacggtggaatggaatggtgaaatctatggctgttgggggcggttcctttcgtttgttgaactctgcgatgaagacctgcgctagcccgcataggagctcttctgttgtgttcatcagctcttccaggttggagtatgcctggtagaactcgcaggttgtgaactccgggttgtgggttttgtctaggcctgtcatcataagtcaggttaaattctggaactcaatgaacctatgagggaccgctcaccttcattccggaacgacgggccgatctcaaagacccgatcgaaaccgcccacgaccaggcgtttcagccagagctcaggagcaattctaagggcaagctgccgatctgggaattcggtggcagacgtataaaaaggacgagcgcttgcaccgccaggaatcccgttcagtattggagtgctgacttccataaatgatttatccagtaggaactggcggatatgttgagtaatgagagatctggacttgatgactttcaccgtagccgggtcaccaagcatctgaacatggcgtggatatggagagttttcgtgtccatgcgcatcgagcgggatatcatgcagacacggagagaggagttgaggcaggtctgtggccacaatcgagagctcaccccgttctgtacggtgcggtttacccgttatagctgttgcgttctggttcagtctgtggacggtcaagagttgcgatggggaacatacaaaaggcatcgccgcggcgaatcatacgatagaatctcttgaatatctgctttgagacccctacccgttccaggcgactcaaattgcagaggatctgaactttatggccatcttgatagatgtcgaaaaatatcaagccgctcccagctaatctatacgtacgaaccctacctaattgatctaagtacaagggtccatatcgaagccatcgcaggccagaacataccggttacggtgacttgatcaaaatctacaaattctttgttggctaaatagctgtatcgatgtatgaactccgaaatagcgaatggattggcaggtgtctcaaaacgaggatacgggtctgaagttgcctctgtcacttgagcaagccgcgtcacgaaagcctgcttcttggacagggcttctttggagagagtttgcttcaatgaaccttccttcgacgaggtggccttgctgtaccatctcccaggtacaaaagaccggcatgctactcggcaagacctaatacgcatggtgggttgtactattaacgttccggtgctgagatattggttagcagatattcgataggaatatggcaaatgacagaatcaagagatagcaaaatcagaaatcaagaatctaaagctccgtttgcattcatagcctggaaaccaagcgtcggattgcagcggttctgtaagggacttgaatcatcatgcgattgctgtttacgatagtaggaagagaaaggcagagttgccttaccttgagggaggaggccttcctttcagctgcaaagccaccaggggcgtattaactgcattggagctggaaaggaaggtctaaatagtagtggtatagggaaatatttcgaatggttgtggagcgagaaagctctgaacagcatttaagccgcgcccgaagcgggtgagccgcagcttccaagttcgattccgcagagtcggagctggcctaatttcagcatcaacttgaactatcatcttcatttacatacccttcgtgagtatgaggatacccttcgtcttgaccctattgcatggaagcatactaacagactattctcagtccccaaagacccgtcccaactcacattcaccatgtctttcctatttggcggcgctcccaaaatgagctcggagcagaagattgctgccgcagagaccgaagtcgaaatgatcacagacatgttcaaccggttcgtcagaccttaccatgtcaacgtctggcaattatatcgcccgccattcatgttttctccagttaacataattctgtcctagattatcggaatcctgctcgaagaagtgcatccccaacgactaccgcgagggcgatctgaacaagggcgagtccgtctgccttgaccgctgtgtcggcaagttcttcgaggtcaacatcaaggtcagcgaaaagatgcagggtgttgctggtcagcagcagggtggtgcgggactaagcctgtgaagcgtatggattgcctttacgtgtgctgatatagtgtactctactctcggttgtgtaatgaattcttgttttccctcttgtggttgtcagccggtgcttctctgcagttggcttgtccagatttctcgtggtttggccttgaaagcagcagcttgtctggccggtcttgttgcgtataacgaattggtgcgtttcaccgttctattcgggattatgtacatcataaaataatacagtatatacagaagctgataggtgccgccaatggttgtacgcatgcgcaaccgaagctcagactattgccaatgacctcctagtctgctcaaccaggatagccacgagtaattctgcttcttttctccgcgtatcaaagatttgaccctcagttcgatctcgttgacatggcgttcgaattctccgagcccggtttcaacatcttcaactttagtctctagggcatgcagttcgtagtcaagcttagctcctagcatctcgactcgtttcatatgttcagtgagctgcgagtgctccgcagccagtacattaccggagcgctccctaacttgctggtacagctcaaatcgttcgaggtacttcgagctcatcttctcatgagtctcgtaaagagtgtggttcagcctgtcaaccgaggacacttggctctcgacccatggaactgtgtttaattcgaggtcgcggattcgagcccttgaaattcgcgcatcggaggccagtacgtcttcgtgaactatggcttcttccagggtagcatccgagctctcaaagattgtacggtcatctagaccttttcgcacaagaacaacctcctctacgatgctaaaggacaggtgccgcggccaatattcatttcttctttcaaaactgtcgtctgaataaagttcgtcgcagctatgcggtcttcgcaggaccatagcgcaggatgctggggttggtgctctttcttgatcgcctgaaacagccgatgcgtccgtggatcgcgttttaaaaaggtccaagtcgtgcatctcttcgtctgttcgggatacggatgccttgcgtgacgtttctgagtcttcgttgggtgcagcagactccactgtgattgctggtggtgatttttcagcaggctggtcggccgcgctcagcgtttgttcctcccattttgacgtcattctatatcatgtgattcgggataaggagctttccctatgatttgccaagggcctgtctcattttcacttcccatcatagctgagtttcgcttcattaccatcattctccgtgccatcctcccttttgcgtgacctcttctcaactatctcttctgtcttttcttacttgcccataccttctctagtatcatatctcttctatccctcactcctttccttttctacttgtttcttatcttcttctttgtctatccttctttcctttttctctaactgttaaatcgttcatagtatactcatatcatttcttctgtgatatatatttcacttctcactgtactcttttttcgtttttgattctctttttttccttcttttctctcttaccttcttcatactttcctctatctaactctttttcttcctactgtatctttctattattaccttcttacacattctctcttcttctctccatacttttccatctctttattcttctcatatcctctttcttacgctatattattctcttctcttgttatcatattcttacttatcttatcctttactcccttctactctactttatttttcctcttcttctttcatctctctctatttcttactcttt

SEQ ID NO: 15150 - DNA, 481 bp, Emericella nidulans
ggcgacatgaccgtgataactgcgtttggtttgggatatgcaggtttggggggggttcttctatctatagaactgaatgacgtgcatggaaggcgcgagcttcgagttgctaccatgacgggagacgaatgttggggggcgcagggtataggaaggtctgggagggaatggaacacaagcgggaccagcgcgcgaacacgataggagagggacaacgcggaactggcggcggcaggcagacatgagacacgtgtcggactgagcctgggatggctgagcttgcgggacttgacggagaaatgaagccccagtggagctgagcaacaccaggaccgatctactgctgagtaccgttagaagctagaatgctaccttggaaggcgacgacattcccgcatattagcacgtctcatttaagatctattgacttacgacacttgcttgacgtgacgaatgctttgcttacgtgacttaaccaacg

SEQ ID NO: 15151 - DNA, 491 bp, Emericella nidulans
  unsure (1)..(491): unsure at all n locations
accggtccagaaaggaaggagctacgctaataggattttatngtttatctggaagcacacagaatccgacacgcggggtcttggagtgctaaactattcaaatcacactaatactcggtggaacggaggaaaggctctagctggcggacactagcgaactcatacgatgccacctgcgtaagcacagaatgagggacaataacgtctctaccaacctgccagtcgaacgcgggcgccatgcactccttgagagaagcaagggcagagtcagatatcacagaggacttcggctgcgttacgagcatgctataacagtgaagttaggagctcacggatgttgtgggacgtgacgaaaatgaatacatgtcagatggttatggcgatactcctattagggagtgtggcccatcacgactcgcaatcatatctgacagacagtcgagctgtctataccggcggcaatcatgcagaagtgaacaagattaccggga

SEQ ID NO: 15152 - DNA, 2030 bp, Emericella nidulans
cgaagacgcccttccgtacaaagtcattgatgctcttgtctttcatttcctgcggttccgtgcggccggatccagcggaggattcaatgaccgacggaccctctaaggcatataaactgcccgttctctggcatcagtcactcttggtcttcgcacagcgttaccgaaatgatattactgaggaccagcgagaagcccttttggacttgctcttggttcgtggacacaaggatattggtcctgaagtccggcgcgagctgttagcgggcagaggtcgagggatcgtcgcacccgacccggagagacaacatgcgcttgatgctggagacgatacaatggataccacattataactgcgaagaaactctttttcggcgatttcttacatagatattcccaatcctcttgcaaggatcccgcttgttcatgggcctggatggatggcgttacttgatgacttattgatgcttcatgatatgcatagactcttcccgatcttacaatgccttctcatcgaaccgtgacatttctaggtaattcataggcaagagcgcagcagttccggttgaatgggctccgtagacacgagcaagcggtacacgtatgtaagacccacgtgataactaccctgcgaagtgatcacttaagcaaaacctcttttatgtccacaacacggatgttataagagttcctgacgaatgccgaatatgatactttgtaatacagaatcccttgtcctcgagacttttaggaacaaatcctcagtcaacccttaactcctccattggctccccgcactccttatggtatgcactaagaatttagcaacccatggaagcccaggtatgcagccaagctcttggaactctctgaccgtgagtagagatcagagaagcattttcacaccaaaactggttttattgtcttccacaattgtagctgaatcaacaggcagtcccgttttgcttcgtaaatgagagtgaggatgacctcagacaatgaatcttacgtcttagacggggcatcccaaaggagccaggctcctgaccatggcattcctcaaacttatccacttgcctcaccaagcctctaactcgaaggcaataaaggcgtgacgactgtatctaactgggaggcccacccagggttaggccccctcctttcaatgtacaagtaagatatgcattaatagaatgaatgatcgagttagtttagcagaaaatgcaacctgaccctttaaacaaagggaaatatgccaccaataattttaaaacccaagttggagaaatcgcaaaacttctgtactctgtactttaagaggtgaagcttaaagcatgtgaatcaacaggaatagaagaactccagcgtaaggctctggctgagtttccgggtggtatcccgcaagtgggttgtttctatatttcgaagcaaatcaactctgtagctgcgcggcgatgcaacgacagggttccactgcgtgtcagaataagtctgaattgtctcagactcagggtaggcgaagagccaggctcaggggcgattcctggccgcctatcgttgtacccgtattttacggattctttcagcggcaggcggttgctatttgcggattggagtggaagccgtgtattattccggtcacactagcggttacgtggccaggacgctgctccgccccttgctgaaaggaggtgcacctgaattgaccacgctggcctttaaaacgtcaacctgttcccatctcacagcagcatcacaatcttttatgaacaactgtcctcttcacacttactccccacactttgccatccttggtacctgagccccaacactttcactggtcgggatagtagcctctggcttcgattcgctatgacaccgtggcctctgtcctaagtgactcaggcaaggcaatcccagttccaactcccgacttcgcaacctcatcaacaacctgcttccgtctagttgcagttatcagacgtgagttatttaaatcagcaaacaggttttcgccagtgaaaaaggag

SEQ ID NO: 15153 - DNA, 2632 bp, Emericella nidulans
cttgcagtctgaccgtgtttgcgtcaataggtaccttgtttgtcaggtcccgtccaatatgctgctcaaccgtgtcaagcctgcgtggtatatggccggctttatgatggcttgggcaatcgtatcgaccctcgcatgcgtcgtcaaagactaccatggcatgctcgcttgccggctagtgcttggtatcatcgaagcaccgttctatcctggtgctctgttcatgatttcgcttttctataaccgtaaagaggctaccacgcgcatggcagtactatatactggaaatatgctggccagttctttctcggggctcatttccgctgctgtctttgctactctcgataagaaacatggacttgctggttggcagtggctgtttctgattcaaggagtcgtaaccgtggtggtggctgttgcattcttcctcctcccaaactctcctaaacagactctttggctcacactagaggagcgacagctcgcccacgacaggattgcgcgggacacgactcagaaagcagagggcacgagtgtctggactgggctccgcgaagcatgcttggattatcggacttggatatttgccttgatgtgcaatcttcatttctccgccaacggattcaagaatttcatgccaaccgttgtcgaaacgctcgggttcaactcgacagtgactcttatcctcacctgcccgccatacatcgtggcgactttcacttcaattgccgtttcttggtcttcaggacgttttaatgagagaacatggcacgtcacggtctccaagctactagcgatcgtggggttcgcagtagcttgcgggactctcagcacgggggcacgttacttcgccatgatcctgttcgttggtgccacttacggggtaaacaatatcaatatcgcctgggtggcagcaacggtcggacaaacagacgagaagaaggccgtggcttttgcagttactaatactttgggaaatcttgccagtgtatacaccccatactgtggccagacagcgatgcgccaagattcgcgcctgccatgtacgccagcatcgggttctccgctggggtggtaatattggcatgggtcatgaggttgatcctcatggcagaaaaataaaagactgcgggcagctgatccaggagttatcaacctgtatgctcactgaagcttgtgcttagcttaaaaaggcagccttgtccaggcgatggtccatggggcagatgcccaattcagcgaaacctctcagaaattagctcaacgcatattactggcacacgcgcatcacttatctgcaatgaacctttcctgctacttatttgtagcgtgaagaagacagggccgccggaattgttgtcgcagtgatgccgaaaggcggggttcaagttgtacgcgtctggtgaccggcagggattgaatttgactctgtagggcttggaactgcaagccatgcttgcagagttacattgacaagccgtccttctcatcccgcgctgtcgccttgatgcctgagacgcgagctactgtccttaattagggcaagcgggatagctcaactgtttgataaatatctcttcttgccatcgcaaacaggttgccttctccgaatgatcgcctgtcgcgtaacctatgatgctgctctctgacaaatatgaagatgtatatgaagccaaatggctcaaccatcgttaggctcgaaatggtggccgcaagggtcgcaagctcacccgtgattcataagtcttgtcacgaccggaggagggaaccaaggtttctgctccgcgtcataggatcattaccgacattccgcggctgctgttgaatagatcttggtgtggaggcggcatcagatttcttcggtgtaacgatgacactccgtactccctcgaggcaagtacgaccatacccctgccgaaataagccatgggcgatctgaattcctcaaaggccatagtgctcggtcagggtgcatagccttcgcacatgaaacatgtttgctgtaactgagttcgttcctggcgaggcttataaaagggtcttgatggtatccaggagcatctcatttgtacattcctctcctatcgttcttctgtctcagattccactccaagtattgacgcggctcttcgctagattttttatcacgctatcatggtccgttgtcggctcgtagtcttactcggggcgtgcattcttctacaggccattgccagtccggtcttggatgccgatggcttgatcgcgccgcgggcggcagaatcgcctccagaaatcgctcagaacgacgtcgacaatgctcgacatccgctgctagtcgacgccactgaggcaagcattgacgaagcccgcgtggtcgtcaaagatgccatcgccaggatgaccaagctcaacaaagcccgcctcgacaatcccattctcggttcgtataagtcggggccaggcacaaacatcactcgtagtggcagtgaaaattcccccctgctcgaaatcaccaaggaaattgcgcatgctgcagctcttgttgcggaggcagatatggcggccaatttggctaacgggacctctacactggcccagcaggcggccggcactttctggatgcaagatatcaggcgtcagggaacggtgc

SEQ ID NO: 15154 - DNA, 2799 bp, Emericella nidulans
cgaataaccttgcatgtatccttgtcttcccgccataccaacataagcagctaggaaaactgttgatgggtatcagctataagattagcggctgggagcgagatagcagcctaatcggaggtccggagaagccgctcagtgaaatggggagcaggagttacagtcggttctgggaggaacggatagccaggcatctccttttgcatccgtcctcagatggcagccaggccggagcgggagcgacagcggcgcaattagaagagccgaaggcgcaaaagccgacctccaataagggccgaaggaaacactcctacaaactcatgacagttcaggagatcagccgggctacaggcatgttaacggaggacgttataaccgcactccgaggctttggcgtcgtcgagcctgcaacgccctcaaaaacacgcaagggaacgcagtcagaccctaatgagagcaaggcaaatccagtggttattcggcggtctaaagttctggaatggaccaaaacccataatgttagtatacgggatcccgttagggaagaaggcttcttactgagtcagtcggagcctgctacagaccgggaattggagattccaggtagtgatgacgagtaacgcatttcccttctgttttgttagatatacccaatttagtgcacttttcctgccacgaggtaggcagcttggtaatttagcgatttgcacaggaggctctagttgacaggcaactctgataaccatattcggattaaattttatggtattattaccattattgatcttatcaagtacattttaggcagaagctgaccaagaacccgaatggtatgattctggaatctatattttgtatctggaatccttactccatgccgccgggtccaccttgtttacccatctgcctggctttcagaagctcgtcacagagaagtaggttcgaggcgatacctgtactggaagcgatgcagttccgcagaacgcggaacgagtcaaacacgccttcctgcacaggatccataggttcaccggtagtgaggtcgaggccgacaacgttgccgtctgcctgttcctcctgcaataaggccagagagtcctggatgtcgtgtccagaattatccgccaaagtcttagggataaccagaagagcgtcagcgaatgcctcgacaccccacctggctttccccttaacggatttgcggaagctgtccgatgttaggtgagcatggcaggcgacttggaaggctcccgctccaggaatgacacagccatcgacgatggtattgtacactgatcgaagaccatcccgtaccgcatccttgacctgtgcaatggtgtgtccgttgggacctttaataaggatagtgacagacttggggtccttgacctcctccacaaaggtgtatttctcttcaccgagctggtgctcataaacaaggccggcccatccaagaacctcagggctgagatcttctacactgttttgggcggtacccccgcaaatcagctgaaggcgttccatgttcctccgcttagctctccgcagagccattattccgttcttcacaaggacgtccaaactcaggggatcaattcccttctggttgataacaacgaagcccttcttggggtcatcgccacagacctgcttcttaagttcgacaatcttctgcagtttcgcatccacgaatttacgctcactttccaccagcttatccctttgctcggccgatgaatagtagaacccagagttaatctctgacttttcgtactcgagactgacattaagggtaagaataaaggcgttctcgacgcgcttcggcatatccgggtgtctggcaccatggtccagtgcaagaccacggataagctgtgtatcggaagaagtgcggtgttgcatggtcatgatctcaaccatgtgcaggtctggcttttccggagctcggtggatcgcaagaacggcatcaacaatatcgggagtaagcttctcggcgagggcgctgttcagcttcgtgctgagcgaggttcgagcgacggaaagaagaagttcgcgatcaatcgcccgttcgatcttgaacttatcgaggaactatatcaaaccacttagcgctagtcagagcgatgtttggctttcctcaccttcagagcttcattctttgcgatttcataaccatcggttataactcgggggtgcaatccttctgagatgtgacgatccgcctgcctaagaagttctccaaccaacaacacaaccgacgttgttccatcacctgtgatatcatcttgagcagtcgcagcccgagcaatcatgacctttgaaagtcaatacaggatatcgtctccaaagagtggaaggtaagtcttacggcggtggggttttgaatttgctgcgattgttagctagtccgaccacatcttgctgctgaggatcaacttaccatctcgcgtaacaacacgtttccatccttggtcaacttaatctgtttgtgcaccattagacattgtggtcgtttcagtggcatggataattcgtacaccaccagcaccgtctaccagcctgactattagttagcttaagctttgcagacccagaaatatgagcttgatacgtacatcttcagagtccccgagggaccaaggtttgacttcagaacatcttgaagcccttcaccagcgttgatgttcaccttcagagcctccgctctccgctgtaccttgttagtctctccacaattattgaggggcatttctccatacccacgactccgcctaagattcagcccatgcgttcccccac

SEQ ID NO: 15155 - DNA, 2345 bp, Emericella nidulans
aatctccattcttcattctttgctctcgttgactcgtggtcgcgcttgcaacagctctttggcatttagtgccaaaacctcattgaacgccacttacccaccctccctcctcatcaagagaacattttcagattagaacttggtccgtttaccgcaattggaagcttccaactgcaaatcaggcccgaacagaagacggctatgactattgaactcaagccttgacttcagatgactcgcgatcccatcctggcttacttctcaaggtcatattgccctacggcgaagatctgtaaccttgacccccattctcggccgattggggaccttgaggcttaatttcaaatcacattcggcagaaaacatcacgatatcaaagcgctatttgtgatagtctggctactcccaactgcaccaactcttgaaagttatcaaaattcttccacccagaaactcggtaactgagacgagattccattggctacctgaagtattcgtttttcgtgcatctgggctgtgagaaggtaatgctctcgacgttgagggaatatagggtataccacccatgtcaccatgtgctagaccccataacactattaaccagtagttgcgcgctcaggctccaggcaatgacaattggcttcaaattccaatagtgccatggatatgatccactcttctgctcaaggcacggtatctaagcttagccgttgccttgggccatgcaggtggctcgtggcgatctatcgaatggggatactagtgtggtcgatcctcgcttgtcactgttgacagtcatgcagcttcggctccacaggcactttggatgctctcatccatgacgacgctcctattattctactgcagagaaccaatcatatttgcagaactcaacattgccatccaccaaactgttaccacatctcgaagcagcaaatggaccgcttaaacgtatgcattgcttgacaaaccctgcaccaatcggcaacgcatcataaccctttcttccctatgcatccgccactgccgaagacctacattaccctcagagtactccgtttggcgtacggggaagggatctacttcggcgtgacagtgccctgggtcactgttactgacccggtcgatctgaccgattgttcctgaggatgtccttgaaagtctttcttttgatggagtctggagcaagtgcgggattacatatgatattccgagccctgttgtctggccttactttcccttatatcatttcttccgccagcagaggtgtcgccaatggtatctcgctcggtgctgctacaccctctctttggcatttccattcattacactcctttcattcctgccttcatttaacgacactctttttctgatattttcttctgcttggacgctccactcctttttttataaaaacattcaggatggccctaactcatagaggtggtgctatgatagcaactgtgacaacgctcgtcgccttgtccatagttgctgtcgtccttcgtattcttgctcgaaacaaaaggagagtccgctttgggatggatgactacctttgttttacttctgtaatactgctactcgcaatgcatatcgagctcgtgctgtgtaagtttacgaagcactgtactgccatatcaccaggaacagtcggctaacctctctacaggggtggtcatcggtggaaatggctctcatcaggcagacttgagcgagaaaaccatgcagaacttcttcaaggtaccttaaacccagtccgcaatagaagaacgtcactgacccaaccttccagatcttccttgcaaaccagttcacctacttcgccctcagtcccgccatcaaaatctccattgtctgtttctaccgacgcgtcttcgcaatccaaacttttcaatggacctcatttgccataaataccctaatcgccctctggggtgccgccatctttatcgcttgtggcctccaatgccgccctctaaacgcctactgggaccacaccgtcgttggtaattgcttcgacagcaacaaatacattattgtcaaccaagtcttcaacgtcctcatggatttcgtcatcctcgccctccctattcccatgatctggaacctccagcgctcttggcaagacaagcttgcgctgaacggcgttttcgtcgtcggcggcgtcgtttgccttgcgtccatttaccgtatcgtcgtgctcttctggatcaaccctgccgacatcacctataccgtctatgaagcaacgctatggacgcacattgagccatccatcggccttatatgcgcttgcctttctatcatccgcggtttgtttccacaattcatactgttcgcag

SEQ ID NO: 15156 - DNA, 1492 bp, Emericella nidulans
ccgccgagctttgactcagcggagagtagtgtgcaggtgaagacagaacggggaccaagtctttctttgcccaatatcaacgacatgcgtgggatcatgtcactagaatggaggctgattgaagaacgtaaagatcgtcgtaggttactcgcaaagctggtttgtagcctctccgacaaggaacgaaacttgatggcagagcaagtccctaaatacccgcttttgagcctcaaaacccatacgcgcagagccttggaatgtctaatcaaaggttcaagggatgtagaggggatggaggcttccatgagccatctagtcatgcgaatatcttccttctacatatcatggcttcactgtgcgcgtcatgatcttcaaggtatcaagaaaaggagtgtccaagcagcccttgaaaagcttgaggataacaagaatggcgggtttgaaacatactactctgagcttatcaatcgactggagtgctggcaagcgtggcaacgcgatacggaagctgacccagaccgtgatttggtacctgaagatacaccccacaaaaggcgtaaaagggccgtgcaggagagtcaatcagcaaagctgcaccaggcaagtgcgcaacagcggatgagatggcaagagaagcagagaaagaggctcgagaaaaggctgcaaagcatgggggtaagcaatgatagcccgagccgtcatgctgttagcttcaaagagccaatcgtctacctacatcctcacattggccaacgcgtcaaacttcaccaattgagcggcattcagttcatgtggcgagaactggtcgaggacaagagccaagaaggctgcctgttggcccacacgatgggactggggaaaacaatgcaggtgtaagttcctacctgtggatcacgaagatccagagctgtctgtctttcaattgctgatccgctaaagcatatcactactcgtgacgataactgcagctgccaattctccagacccaaggattcaacaacaggttcctgaaggatttcgccctagaaatgatcttcctgaagcccgaacgctggtcatctgcccattatccttaattgagaattggcgtgatgagatcgttatgtggacgccccaggatgtcctactcacagtgagacaggtggcatcagaagacaatttggatgtgcgcctggccgaggtatttatgtggtatgaggagggcggagcttcttctataatcttcgatatttttcggaatgggagcctaaccaggcaacagttagaaaagacggccctgttagattcaatgcattagacctccagccttggcttttaaagggcccaacttatcacttgtttcaaagttattaaatgaaaattccgactcccggacttttaggtggaatgtcatttcgttccaaaaaccgattgcggtgacttgatctcctccgcaacaatcttgggacaccttatatgggcaactgattttttaatacccggaagttcctcc

SEQ ID NO: 15157 - DNA, 505 bp, Emericella nidulans
agggatggactctcacgagattgataggcgttctctggctttatcaggttggagatatccggatggagaggcttgtgaacacgaatgttcgagactgtggcatcatgaacgtaatatcgtactgggaaaggaaaatcatgaacgtggtaaatagatctgggattgatcgggacttgacatcttgacatgttccatcagtaaaggggtctcacttgtcttgcacatattcttccacagcgtgcgtgctatacaatcgcataactatctgatgttttatagctgataaagcatgatagattgattgattcatacgtcgccactatactgcggaccttgacacaaactctccattcttttggtacctgatggttaatgctggattatatatgtttgcactctcgcatgacatagacagctgtgtccacttttcacgccatgttctaatatcactgctgactaggatacatcttcgatagagtacacccagagctgtgtggagatgaaa

SEQ ID NO: 15158 - DNA, 4558 bp, Emericella nidulans
gggcctgagctccccatgctttccctggcggctggtctcaacggtctggccggtcctctccatggattgtaagcctcatacttcccgataaaagcctggtattgccatgtttcaatgtgtctaatgtgtttcttttcaatagggccaaccaggaagtccttaactggctcaccgaaatgaagaaggtcgtcggcaacgacctcagcgaccagtccatcaaggactatctctggtctaccctcaacgctggtcgcgttgttcctggatacggtcacgccgttcttcgcaagaccgaccctcgctacacgtcccagcgcgagtttgctctccgcaagttgcctgatgaccccatgttcaagttggtcagccaggtttacaagatcgctcctggcgtcctgaccgagcacggcaagaccaagaacccttaccccaatgttgatgctgtaagttccccgccctgtttgctcagtctctccgtgcactgacacaatcctagcactctggtgtcctcctgcagtactacggcctcactgaggctaactactacaccgtcttgttcggtgtctcgcgtgctcttggtgtccttcctcagctcatcattgaccgtgcttttggtgctcctatcgagcgtcccaagagtttcagcactgaggcttacgccaagcttgttggcgctaagctataaatttcttgaacgactgaggataatggggggtattatatcttttatgaataacaaaacagccattttgtattttatctaacgtcttctttggatgaggacgtaccaagtgttgggtttagttcgattaatgtatgataggacttgttcgagcaggccttgtaacaacacttcattttcatgtcagtcattcttttaaggttagatccaatgctccctgtctggcctttgcaagccaaggacaaccagttacgggatagttctatggtatgagtgaaagattagacctctagtggactcggtaggacaagaatatatatagatggggtgtcgaagttcgacgattgatcggaccgacgatcccttgagccatattatgatgtaatatttatccagtagttacatctaatgatggataggtgttatgatggtcaggactctcttcctatagtcggtagaattcctgcccatgagctctctgctcaacggtttctctgttgggacacccgacttcctccgcctcccaactgttgcccgaggaaagtaatttcatacaccgcccgcccagaactggattagcgaggatcggcccgtcagctcttccgattgggaatagtgctcccgttaccccgtttgattggccgacggggggacaattccagactgcgccttgagatggaacggagcctcaggccgccttcggactgttgtcgtcccaactttgagtgataggagctaccgtgtacttacaatccctgatcctcgaggatttgctactaagagtcagctgggagaagtccccgtcccacctttcttcttcttttatattcctgcttctccattcttctcttctctttctccaacgctttgttcctgtctcaagacattctatcttaggcgacgttgacatcccttccaccgcggtccgactgaacaagttctggtcgtcctcaagtcccagctctcgtgatccgttaggcgacctataccctatatcccttggtcagggcccctttcagtgctcacccaaatcagagatgtctacagctacggaagagctgggcaccgccccaaagctcgaaaagaagcccgtcaaattcagcaacttgctctgtaagtatctagttctatgctcttctttactcaggttctgacgcaattactacagtgggcgctggattaaacttgtttgagtaagtatccaaaagtacatgaaaaaaaaccgttgctgatagctcgattagggtcactactttgggacaggtatattatcttctgagcgattgtgaattccttttactgacgccataatcatagccactggaggtgatcaagacaaccatggctgcaaaccggggcgatagcttcgctggcgctatgggtcggatatggggtcgtggcgggatcctcggttgtaagtatacccgcaatccgcacacccgcatatcccgaggtatggggtgggtaaacatcttcgggctaacgcgtgtttgtcgcaaagattaccaaggtctcattccgtgggcctggattgaggcctctacgaagggtgctgtcctcttgttcgtcgcctccgaggcggaattccgtgccaaggtgctcggtgcgcccgacttcctcgccggtatctccgggggtatggccggtggtatcgctcaagcctatgcgactatgggattctgcacctgcatgaagacggttgaaattacaaagcataagatggcagctcagggtgtcaaaccccccagcaccttcgctacgttcatggacatctaccgcaaagaaggaatcagaggcattaaccgtggtgtgaatgctgttgccatccgtcagacgactaactggggatctcgattcggcctttctcgcttggcagagcaggctcttcgtaaggtgactggcaaagacgagagccagaagctcagcgctcttgaaaaggttatcgcatcaggattgggtggtggtctctctgcctggaaccagccaattgaggtcatccgcgtcgagatgcagagcaagactgaggaccccaaccgtcccaagaaccttacggtcggcaaggctttcaaatatatttacgatacaaacggcatcaagggattatatcgtggtgtgacacccagagttggtctgggtatctggcagaccgtctgcatggtggctcttggtgacatgtaagttttcccctgcctgatcaaagtttatgaatctggggtctccatatcctgcactttttgccaatttcatgtgatatgccgaggcgtaaaacaaggctaacctgtgggtctccgctgcaccgagtagggccaaagaggcagtcgaaaaactgacgggcgacaaagtcaccgcgaagcactagagaaggtttgaaatacccttttaccgtgcaagatgttgtggtcgggctagttatctgaatgtgatctgagttgtgcatgagctcgactggtttcgagtatcatgacaaatttgaactatgttacaataattatactactccggaatagagaaaatattctaatgctgctgccatgttcactcggttactgggggaatatggacaacatgctgagtagcctcgccttgcagctagtatccgcccagcatatacagattttcgcgcaccgaactatcatgtgtggcggaagtgcattatagcagagcaagttataagcgcggtttcatgtgacctggtgtcatcttttcccttgtgcagactatatatctcttctactaaatcggcctcggcagccatgctacttataatttatctttattcacttcttgctgcactaactttctttagacactgtttttatcactaatggccatactactacctcttggaaatatattttaaattcccttaggagtgtcaaggaaaaaagctatccagatcaaggaattagcttggagatagcttactggtagtaacttcagaataagtattagttgtgtgagttcgaaatatttaaaggatatatgtgttttaatccgaactaagtactttccgcctacctgtgttgccggtcggcaacaaaattcttgatcagaatattattgaattgcctctgttatcgtgaatctaagaatgacatgaagatatcatgcctaacatcgtcttgcaaaaagaaagaggccccggattgccgtcaggacgatataaggcggctgggatgaggcggggctgggatgaggcggtataaggagctcatgcggcttggtgtacaatttttcgctaactccacgtcacgtattacgctgacatggtaacgcaatcagatgccgcgtaaactgcaactgaaacattctaggagaatggtgaggatatagcaagtataaaataagaatatagagatccgattgtattacagtcacacaactacagccacaataactaacaagaaaaagcgaaaatgaaaagcaagggaaaagatatctgcgggatctatctagaacacatgacgaattcggtgctcgggttctcgattctttagtcccaggacagtctagcatgtattttgtacattggtttgagagtcattgtgggtggaagtgtgaaggtttagacggtcagaccaaggtcggcggcgtagggcagctgggagagatcaccgacggaggcgacggaggccttgcctgagaggagggacttggcgagctgagtgtatacgttagccagacattccaaaagtcaaataagagtgagcttacatccttaacctgtgcctcggtgacgctgtctacgctttgggcgacctcgccaatctggtagggcaaactacagttgatgagaaaggacccggtagcctcaagaccggttgcgagagtaagaacagactcaagagcttggaacttggcgaaagcagtagcctt

SEQ ID NO: 15159 - DNA, 1472 bp, Emericella nidulans
gtcggcaaataatgcacggagcgcttccatgtagacatacatctcatcctgatgctttgtagacttttcatactcgtcgccctcaagctcagactcgtcctcttgatcaatgagtgcttgtgaaaggagcttgaccattttctcacgccattccttgtattgggcagcgtggtcattcatcatatcgcagaaatcctgaagtcgctcgaacacacgacgagattcaagccctttactgtacatatgaagcttcatttccggaatagccacgaaatctttcttctcggctttctctttgattctcttcacgtaatgcttagctttccgggaaatctcagtcagcatttcttgtcggattaatttggctttcgcgtaagcctcctcctctaactttgtcaacgcctgaaactcctcagagtcgggtttggtgagttcatgatcggattttatctgaaaataagcatttcctgtgaagaatacagcaatgtgttcgacctcgagcgcagttcgtagtcgctggcggaatacatggagtcgagagtttttctcggtttcctcactttcatcgtcactgaaggacagcctttcatcatgcgctccattagctagaggcgttagctgcttctttcgttccgtctgaagtctctcccggcattgctgaacggtatcactcgcacgatgaagggaattcttccagaggctgagggcctctcttttaagcttagcattttctagtagctggccacgccgaagttgcgagaggagaagagagcgttcctcagcatgtatgagagcatcgttctggtcgatcatcacctccaaaacgtcattgaccgatcgtaatgggccgttaccagcagcgaataccttacgccgatttccggtaggatagaggcaagactgccgaagccgcacaagccagcttcgcatcctatctataaccgagggatcattcgggttccaatcattgttgcgaggtgaccccgaactatcaagtccgcaatcctcgcacatctcctcgtagagctgtctgtagctttgctcttctactgcggtaaagggtactgtgataacaatccttttctgaggtggcagatgtagctcttctcggataaaatttttgctgtgtcttagagtgatagtattaacgatgcgagccagaactggcttgaacgtggcatcacataaccttttccatatgggcccgcagaaaggttcataccgaaggaagagcagtagtccgagcaaatcggtgacatctttccgaagcggcgttcctgtcacagcccatgctatatggcgagggataagtcgagcaactttggctgcattactgatgccactctcgatcatctgagcctcatccaagcatacccgccaccacgatatcttgatcagcggcgactttctgggctcgaatcgtttttatgccgagattcctttttggggcaacaccgggataagggatctca

SEQ ID NO: 15160 - DNA, 3059 bp, Emericella nidulans
ataggacgacatgacgtcaatgaataggtggagggtgtcatcactggacgcggtctgtcttccaaacgggggcaaaaagccattgtatgtgttcaaacatgctaagaaaaaaggggttgcatttccctgctttttggcccggggaacccaaaagagggtctcgggtttggtttaaaggtaaaaaaaccaaatggccgttcctgatataaaaacccctaataaggcagagccacactagcgcccatagaggccgtcattgctcccaaggggactacgcggcgtacgtctgatgacaagtggcccgcagtcattgggtttcccgtctttggggaaagaggttggctctgctctgatgtttcaatattcactacctcgcgagatagggctacttcgcgctgcttgtcatcatcggcccttgtctttctcctcccacgttctatcggggactcttcgaccgtaagaatatcttcatattcggactcggaatcagacgcttcgcgcagtgtcgtcgtgcggtccgggtgccctaaattcaacggtgcaggaggaggctttcgggccggatttgggaatttctggcttttgctggcgcccaatgcagaactcgggctggctaaaggcgtcgggcttgtggcagctgatgcctcctgggccgaggtcagccgttgggaactttgcgagtcaaatcgcaaatcaggttcttcagttagtaactcggtttcgataagctgtttcaaactaggggtgatgttggtagagtcctggctgtcgagggtgtcggtgcgttgcggttgcccggcagtcttgctgctactggtggcctgcgctgataacccgccgctcgaagcatcttttgtccctggagttgaagactgtcgagaatgaacttctgtagaagggagtggaggcgctgcagtttggagctctttgactttcttcttgtatcgttctttatctttcaaagcacgttctaagtctttgttcagacccatgatcaaagttcgctgcttatcaacgagtttccataattgggcgttctgcgaagccgcatggtgcttctccttcaaaagatgtattataacagcatctggcgacccagccgcatttattaagttgtcaatatccgcctggctgaccgcactgacatcgaacgaagacttgtgtgattgcgaggctgaggaaagggaggatattgcagagtcgatagatgaggtgcgtggcatagcacgatggtttgtcttttctctgttatttgactgtagagagccgatagatgacaccctggaaggtgattctgacttgctagattcggctacatcagagtccttccgggccttgatgatatcgctcgccttttcagtcatttttgtatcatgccgattgatacctctcggtgtccgctgtcgtaatgtgtgcgatgcgctcaaagggattgaactaattcttgatggaggggctggaaatgcggcatgggctatttcactaatggtggtcaggttttcgagcggtgatgtagtcgcagatgaacttggggatgctgtcctctgtgataaactcgaatcggtccgctggggtgacaaagctcgtgcgttcgtatgcaggggggagggtctttgcttgcggggagaaaccctgacagccgatccagaatggagggcctgcgcgctcgatcgtagtgctagaaaaccgccgaagataagatcgtctgcttaacctagtttcaaaaggggccggcgcgtattacctgtagggggttccgcgaaactggtatgcagggagctgaaggtgtggtcgttatcctgccgcttagcctgcgacatggcttgattaggagtcgaagctcaattcaaccggcatggggggtcgagccgcagtgggcgcttgcaggtcgctagcttcgagccggttcgactgggtcttccaccagcactcaggggtaggggggtcggaacccagcgacaattgtgaaaatgtagtccgaggttgtctacctcggatgcgtgtccttgtttttcgtttctcacctgcaggaacaccaatccagcgctgaggggggaagggtgacggaaagtagaatctagaagcttgggacgtttgggtgagcaaagtctgagcggggagggagggaggtcattaatagggatgatctgagaataattaaacaggaagatctgcctgccgggcgagactctagctacaacgtattcagacttgcccacatgctccagctaatgttttctaaagaggaagcaacgagagcgtttgggcgtcttgacagaacaagaaaaatttccaattaattctgctatgaattcatgtaaagttcagaatatatattccatccatttaccttgtgcttgtacaactacatcttgcctgccgatcaacaaagcattgaggtttatgaagggaagagaaatgtcttttaaaattgaaccgcctttatcccataacgcccgtcaagctaatgctatccgttacaagtacatgatcatacaatccttgttaggctatattcccagccattcccatgaagatagcctgggcagccaactgaagcgaccaaaatccaactttcttaaagcgtcgcttacgtgcttgttcatcaacgacatcacgagcaaacgcatcgtatacctgatgggataacaaatcaacaactggaaagtagacaaacaaaaaagggatgacttacagctgccgagagatcatccatgaggccgctgtcatagatagtccagctgccgtcgaaatctgccgcccgtttcaccaggcgacagttgacagggatgaaagtgcgccgcgaatttatgtacgcgacaatgggtcttattaaggcattgttgatgtaagagagatctcgtgtgaataaaggaacaactgccctcacattgttaaggtggagtcgcaggtctgtaactaagaaacgcctggagtcgctggacttgctctcgtcgatatgcgtcaaatcgtggaaccttgaatcctctgtgtatcgattcgaggtgactgtcgcttccaatcgatcgtaaagatcggccattacctttcaagcgtta

SEQ ID NO: 15161 - DNA, 3142 bp, Emericella nidulans
agacaaaggtgatgataaccggtaagaatggttttaccgaggagaagcgagacgaagcggaagatcgctcttcagcctaagaggaacctgaagcgagtctaaaatcggttcctgatgagaataaacatcactatcgtgtaacggaaagggagggagaaagcttcttaagacaaagagacgacggccagatactccaaaacagaccgactctgaagcaaaggagattaaggagaagggcacaggacaggacaaggatggttgctgatggcatgaccaaactgcgggggaagaggtcaaaagccttaacccagcatagccggctgagggcgacaaccaggagcgcggagattattgtcgctaacgttcaaaacacgtcgatcttctgctacctttacaagtttcacatcgtccctctaatacaacagcgagagcactcgttgtatacggttattccgcattaacgtctgagatataatctagcccgactcgaagagccggttttatactccgcatcctacgaagaaaagatatcgaatctcaaagtctaagcaacaaacttggacaacccggccgtcggagtgcaaaaaacggagttcatatttggagtttcacatggatctattcgagagaaacccttgcattgggcttgagtggcagatgaacgtgaatgtggtgttgacaggtttaaattgaaagatatatttcgtatttgctgggcttaagtttcaggttaggcagaagctctgggaataacctggttatttgagaaagaagatttggccacaaggctagttcgggattgccaggcatcattttaccatatataagtagaccaatgatggtatagatggaaaggcaggatttcgtgaaaaagagcatatatcgtaatagctgaattgttgtccactcgaagaacgtcatctaacccttcctgatggtacatagtaaaggacatagacataaaagtaaagtcgaacagactcatataggcatgtcaggcaaaggtgccatggctccaggtaacaaaagtcaatagcctaaaaacaaaacaagtagcccgcatgaccaacctaataaaagaaccaacgccaatagaagcaaaacaaaatccgcccctgggctcaccaaagaaataaaacaacgtagtggcaaaagatattatacaaagaaggtgataattaattgatatagttgagaaactggcctacgcggccatagcgatagcaggcgatgatgcatcgaccatgctgggatgagccggggtggaatcgccatcgcctgagttgcttttttcactgggggctccgcttgcactttggttggctctgctgtcactgtcaccggtttcgagaacgccctcttttgtctctccgttgggttcctgcgtctgggtgcgaggagctcgccaggaagggagttgccattgtactccggtgaagctcttaagctgcaatggtttgcgttcccatctgcggcatggtgttccacttcggtcgagcgcacgaaggccggcgttaattgcaccagtgttggccttggggccaagtcggtgggtgcttagcctgacattttcagaagtaccatcctcactaatcatagccatgtcagccttgctttcattttaagagatatcagtgggtcacatacagcctaggtctcttcttagggccaggttttcctcttggctttagagagttgtctgaggtcgcgttaaggcttcttttagcaccagctttcaggccaggaaggctctttcgattcgcatccgcatcggcagcagtgccgggcaccggtgtagaagcagcgtcagaggcgttgcccaccgaggatgcaggtggaggctctaccccggatgagggtgggcgaaggggaaacttcttccttcttggtaaggaagtcggcgttcgactcgttcctcttgttgctggcagcggtaccgctgctcttccttctcttgtctttgctgtctatgatgggcacgaagtccttcaatagactggaaggcagtttgaggacgacaagcaactttgggttgccagagccactagagcgaccgttggcgcgggaggtcgaggcagcagccggcatggttacgtccgacgggttgaagtagaactctgtaggtcgtgtccgtaggattgtgtaatttctttttccaccttccgatttattcctccggtcgggcggtcggaagagttgtaatgaaggtgaaagatgagcaacggggtgcgcccctagacagcgaggtagcagtgtcgatttagatgtggtggtaaattaaggcgtagactgcaatcttttggtgggactgagctgggattgggcctccctttagacgcggaacgtggcgtggaggtgaagtcagggtgaggcgaaagtctggaaagtcttgtcaaggccaatgtgaagcagataagggtgacatagcccgtttggtgaagtgagagtgcgaaggtgatgaagttgggaggttgtatggaagggagagggagagagaaggtgaaggaaggaggggggagggatgatgatggaagggatggggatgtcaagagcgtcgtgtggtttcattgttgggcgagttgtgtgtgtttctcagtctcgtctagggaacagccagactttcggtgcggtcagtccaggagagaagccggaggaggaatctatgtcggtgcttatggccatgtacgaaacgcgtatcggtaattcttactccgcataaatagcatttattaccgtacgaacggcgtattgttcataatttacatctcaccattcatcctcgtcagctgtacctaggacgaatgggcaaaattgtgtacagtatctaatttaggtacttcgattgaggtcgaaatatcttcttacggtctgcaacaagtaaattcagattccgttcactattcctccctttgggacggtcgttgattccttaagtgtccgcgtcatccgagctgtattccggacaaaaacgcgttgccgcgaatagtccacacagtaatcttgccgttcctgggcattcgctcctaatatcctatcgccagctatggatcgcccagtcccaggcccgccgcaaccaggttcgggtcgatgtgatcaaactgaaatctctccactagcgtcagcattacttgtgtcaggcttc

SEQ ID NO: 15162 - DNA, 3303 bp, Emericella nidulans
agatcccttggacggggtacgagggcgtatggcaagaatctgcagctccagatggaaaggtgtccggttcgcagcatcttcgaggatgcgttgaaacttttggaaaagaagcaggattcgatcgagtaagttcctcccctgtttgaataatattgttgaggcgagatactgactggatccgccaggttcatggtgcaggacattcgcccgctctcacaggcgttgcaggcgtacgacgacttcaaccagatgaggtcgcagaaggttattttcgaggcggggaaatagtctgaatgtcgttatgcgactttctattgtactgaagaataatcatcatgacacaaggataaaactattatgaatgaatggaatcgacttaacggcattgctatctcttcatatcctcaacataaccagtttgctattccaatatacaataagcagagacttgacagatcaaaggagagactgtcagctccttgaaaaatttcccgggtaatgtgtgtttgatgcccgtgtcgatggttttctctcctaatccagtctatcacccgtcagttgtgaccttgttcgcaagcaagactacacaagagtccccgctaacaatactcctcaatgtctacaattgtaggttgcttcaatctgagaatagggcaatggagcggctaaatgaattggagctgcggctgttgatcagagatgtagctctgcttcagaatgtacgagagtaaattttgggactttggacgtgacggagcagttgtactgtggtctaagtatcgacaaactcaggaaggacgtgcccattcttcgaaacgactgcagacgctcagcagtgtcctcttaattggcctattgcagggactgctgcctaaagctactccatgcctgcagcataccatctggcttgcagtatacagtcagccttagagaatacctatgcaagttgctccgtccacgctttatgatgagaagccttggtcatgcaggcgagcaagtcgcccgttgatagtcttgatccagtgtttccggtgccgtttccaggttgcaactcttgtgtctagacatgtgaaaccatgaagagacagctgcaacgcagcctataacagggataatagttgctaatgtgtacgcaggtagggggcagaaactggatcatacgcatcagagtttgcatcagctctgtgaatgctatacttagttgcctggatgagaaagaaccttcatctcctgattacaacgtccaatatctcctggcttggaccataaaatgagagcagataattcgtcatttggtagcatcctctgttagaattatacgaggtcacttagacgccccgtctctgatggccaagtacagcgccaaccccctaggtgttaatgacctccctagatatctgagccagaagctcagtaccatagtagctactgctgtcgcacagcagttagagagtgctgcttccagaggaaacttaggacatcatagtatgactggatagatctgtttacttattgaatattgggggtctgaatatcctggtttgtcgcaattatgtttagaattaagtggctgcggaatctcagggcaagatgcggtgcgatacctatcatcctacctgatcatgctcaagtacgcattgcgtaatctgcgaattacattcttttcacattgactatatatagtgtgcttacttcagaggctcagagaattctacttgacaattttcaaggctgcggcctgtgtgaagttaagatctgcggtcggaaccggatacgactggatttcccgttagggctatagaccctgcattaactggcccacaggtcgtcattcagacctgttatagatctgtcttgccagctgcatcttcggcacctggctgggaccatttttgagacatgccccaggcaaatttcagaggctcaatgacaagttaggcgcgtttcacttctgggtctccaaggacggtcaattcaggagcctgaccgtattcgtatacgtgcttccaatccactatataacggccttaccgccgctcaactcatttctagattatatcgccttgttcacaaatagctatcttccgtgactatgcgcatgatctttctcgaacttcccttcctcgttctcctagcagctgcgggcagtgcactcgcggcaccacgcaacggcgactgcaaactgaccccccacgatgctgcctggccatctgatgaagaatggagcgccctaaatgcgacgatcaacggcacgctgattaggactacccctgctgcatcctcctgctaccctgggaacccgttcaacgcccctacaaactgtaccgaggtaatggcccactggtcctatgcggcgtaccacgccgcctggccagagagcatcgattactcgattttcacaaaccattcatgtcttccgcctggtgtggatgggtatgttgaggcacgggggtgcagcattggggctttgccggtatatattgtcaacgctaggaatgaagcgcagattatgattgccatgaagtgggcagacgataggaacatcagggtcgttattaagggaacaggccatgatttgaatggaaggttcgtcattcttgctgccctaaaccaatgactggctttttttcttagcattttgatatctgactgagtttccatctctataggtcaaccggcgcatacgccctgtccatctggacacacaaccttagccatttccgccacgatcctgcctggcgtatcccgggcacaaacagcacggctgatgtagttgttctcggcagcgggaacaactggggctctgcatacacggccgtccacagtatcaaccgggcacttgtaggaggcgaagacgcaaccgttggactgggcggtcttgtacagaacggcggccatggattgttatcaagtacgcacggacttgcatcagataatctataccaagtcaccgttatcacccctgatgggcgccgtctcgtcgccaacgatgtgcagaacaaagatttattctgggctgttcgtggtgctggaggcggccagtttggggttgccactgagtttgtgcttgcgacgcatcctgttccggagaatgtggtttctggaggtcttacattttatgcagtacaaggagccgggttgaatgcaagcgatgcgtccttggatgccctcgttgagacggcgaggtcgatcccggacctcatggactcaggtctgacgggaacagtgatggctctgacgggcacacgcgcaacttcccttctcggcctcagcatcaatgagtatctacctggaattgcagga

SEQ ID NO: 15163 - DNA, 396 bp, Emericella nidulans
aagcaagaccgaaccgattagtattagctatgcattttatttttttgcttttgcgtaacagtagacgccgagttggtgtgcaccttgacatatatccacatgggtgatatcaggctgagcgtagactattggtagaaaagccttgatgtattcggattacacatttcctaactagtgaacatagcactaagccccctctattgactatatgctatagcacaacattgaggggcgatattacctcaaccttggatgaacactagaacaacatgtattagactatagccctcagacctgagaggaggatgcgcaagcttctatttactctctacacacgttctgggaaggctatagactaggtatgcttcgagtgtgatcagaggcactacagatact

SEQ ID NO: 15164 - DNA, 2684 bp, Emericella nidulans
  unsure (1)..(2684): unsure at all n locations
acagcttctcccaaagtgtttcgtgttgaagctttaggtgaatgaggtgctctccgttgacagacttgatgactttgaatgcaaggatgaaagatatcgagaccttaataaaatataacactaagtcgctcaggaaatatgatgactatcttaccaagcaggtgttggaatctctatcaaggcagttcgctaatttccacagctacaactggagatcttggaggatctgcctaggaacgatatccaaatttccgtctgggaaatgtccttcaagttccgtgattctaatatttgcttcgcggtgatcttccctgtcagcagtctacagagccacccaatttagtcactccagacactgctgaaggcgattttatatgccgcgctgcatgaaaatcactttgtaacgtcacatcctctccacttacctgatttgttatatacgacgatcaagccctgattttgcgctcgcggatcccttcagccactgaaatttcttggctgacgacaaggcgctcatctcactttgatgcaaccattggccgactcgagccgaaggagactgtgctcgttctgccaagataactgggttcgaagttgtggctgatcctgggatcggggttaagccatagagccggttagaacatctctctccccatgttgctaacaaagactggagttaacggcgttagaccctgctcggagacaaggctgccaacatgatcgtcctgcaacccaccattggctatcagcctccgcagataacaaaagagcctcaaacagcaaaacctggctattgctgctgagttatcaagaattattatatagatatagccatagatatgaatatatttcaggcaacctggcaagaagactttgtcttgtagtctgaacgccagacatcccctatactaggttaagagctggtcttaggtagagatagatcccgcctacgacgatccgcctcacagacctctgtgcttatgggaagtattcttggctgcttataacccgacacgtcgaaactgggtctgtgtcctgatatgaagggagcgatccccacttctagcttatacgcgctctccacccacatagtcaacggcctgacccagcgacctatctcaagacatcaccaatactgagtgcctatcatgggcgggctatttggccagctcttcacaaaactgacacttccacccgcatccgccgttgatgggaagactatcctcatcactgggggcaatactggcctcggccgcgaagccgcccggcacgccctggccctcggcgccgccacggtcatcttaggcgttcgcaccctctccaaaggagaggaggccaaagccgatattgaatcgagtactggcaactcgggcagaaacaaagtccttgtctggccgatcgaccttgaatctttcgctagcgtccaagcctttgcagaaagagcacgaaantatgttgcgggtgagaatggtcgcctcgacttggcgatcatgaatgctggtatagcctcagtaatgtgggctgtcacccccatggttgggagagacacctgccaaacaacgtgctctccacggcgcttctcagtctgaaactgttgcccttgttgcgtcacaccggccgacnagcatccgcaagactggcaaaggccgcatctggtcatagtcacgagcgacagtcatgaatccgtcaaattccctgagcgtacggcagatcgcattttccccgtcttgaatgaccagggccaatgggccaaatctcagagattgggaggtccgattgagcgttacggggtgtcgaaattgatggctatcttgatgacggaggatattgctcggttagtgcctagatctacacagggagacccgctcgtcgtagttaattcggtggcacctgggttctgcaagtcggaattgttgaccagggagagtgtgccgtggtttctccaggtgatcgaggccctggttgccagatctgcgcaggaagggagcaaaacactcttggatagtgcaacccgcggcatagcctcccatggaaagtggttggagaaccaagcgatcactacgtgagatatcattttttcgatgaaattgatgaattcatgctaacccgacgacttaggccggggaagctagtgacggaccctaacgaggcggcatataagaagaaggtatggaaggaaatcattgagatactgcggggggttgatcctgagcttggtactgagtattgaggatatggcgaccacgatatgtcgtggtttatactggaccattacttggctttctttctcatgagcagcaactccactctaccgttcttcgatgggtactataatctcgccgacgtctacagccgaacagtcacaacctaagacgtcttcgtttgtcaatatagacgatagttgccatacaataacccataaataggaagcccgtcattcacagtcaacttctgagcacagttgaagaaaagaatatgctctgccaggtttaggctacggcttagaataccgtttccggaagttgcttgaatcactggtgactctaaaagaataatcagttcaccttaatggcttgacgcaaccaggacggggatgaggggctctcagtcgcgtaccagaatatacttataaccagtgctgctccaaaccttttctagcgagctaccaaagctggagggcgttt

SEQ ID NO: 15165 - DNA, 518 bp, Emericella nidulans
ttagaccctccgctgtcaattgagcagccctccttcagggatggatgaatacgaaggctcgatctcttaatagcttgtttatctcaagcattcgccttagttaggcacagtaggtctgactggcgcgagctgtaagctccaacctgttgctatttcgctttctcggcccccttgtcaacccaccacaatctttcgttgcaatagcccaagtcatctaccgaacttgccagcccctaattgccaccttaccagacagggtgatagcccccctgggcctatatagagcgagaaaagtggcaagatgttctgcgctgtctgtcaccccagaccacacgtacagccgaggcacggtcatatcaaatacacagcaatgccactagatgagggacgcctgccaatattggagtatcaatcatcgaagggcacatatcatgtagtgaatacgtgcgttgcattgcgcagcgatcgctatggaggacgcaggcgcacatatgctgctcgaggctggcgcaaatcca

SEQ ID NO: 15166 - DNA, 1953 bp, Emericella nidulans
aaatgtgaccagcccatcctagaacaacccctgtaatcaaaagtccagactagctagggcaaagtgcaaggaaaattgagcccccagagagtcagccaggaataaatgacctaatcttcgacaaaccaacccaaaaaaaatcttcaggagttattatctttagtctgccggctcaggaaatactcttaacacttgtttggtcctcagcctaagccggaattgtcctttggactgactccttaccacatgccactgcaacctgggcgctacagtcctgaccatcaaccgtcgctgatgtccttctttgaggcttctcatgaggaatattctatgggttcttgacgttcgtagaacttcttttgtcctgcttctaagcgatggctttcctagagtgcttcttaagtgttatatgaaccactcgtacacctagacgtaaaggcatctggccatactatttacctacctgccccgtaggtaatccgagttcagtccgcactcgccaccatttacgtatgaacgaagtaaccaaattccaacctataatctaagagctccagtctcgataagtaaaaaagctttactaatagcctattgtttgatgacggccccattactccctcctggtgtacaatccgattcatacacgtactttcgcctcattcactctgtcctatggggaaacccaggaatccgaccgtggaaaaggtcccgaatgtgtcgccacttgccatcattcacgaatttccaacagtcgggcggtttagccgcttcctagcttcctgagacgtggggagcttactctgaacagtgagtatcgtggcgagtcactgtggggtggctgttggccacttgatctcatgcagatacgttgttgcttagcacgaactacaattcttgtactgtacaaacactcataatactctctagcttccaaggtcattgaaatttaacgataacagcacgttagggacacaaattagagtcgctaccaacaagtcgcgaccgaaaacagcatgaatttgatgaagtaatcgcgccttccggccaaactgtaataagaaaggacctgccttctaaaatataggtatacccgcttaagagctgctagagctggaactcgacgagctcgacgaactggagctgcctgagcgcttgcggccgtacttcttcttcttcttgtgcttcttgtgcctggtcactatatcagtatatattgcgcatagataggagcaagctgggcctacatcttggaagcgacattcattcctaccgcgcctgccacggcacctcctacggtccctagagcgcccccaccctgtattgcaattagctggtacctcagagtatagataaatgttcttaccatcttgtgccctagaaagctaccagcggcgccgccgagcaacgtcgatcccaatcctctttccccttcagcaccaaccggcacttgcgcatttccctgctgtggagctggatattctgcatggtgtccaccgtaataggaagaattctcgccaccatggggcttgtgatattgttgctgctgttggggagggtacggggagtggccgcgatcatggccatagttcgcatttgggtcatgtccataatgtccgggatgttgttggccgtaaggtggttgaccgtatgcaccttgtggaggctgttgagggtagtggtgaccctgttgatacgggggaggaccggccgagtatgccggatcgtgcgggggctgaccataaggctgctgttgctacatcattaaacaagttagcccattatagctcgagcggaaagccaagtgcgcggggtgtcgcggcggatggagatgggtaggtgagacttgcctgaggcgggtaatagccttgttgctgtggttgcccaccatattgttgctgaggatagttgccatggtctccgtatccaggccctcggtaatacccttggtcgggt

SEQ ID NO: 15167 - DNA, 3283 bp, Emericella nidulans
gcgggcaagccgaacatacgcagttggttatgcctacaacacattcttgaacgcgctccggccgctcaacaatcgagctcaacgcggcgcgagtagtgcggggacgcgaaaagcgatggccataacacgcatcatgaatgatcaccaaagactcggattgtggatcggcagactgctggcggatgaactcctttttgaagtgctcagcggcgatggaagcagccgttaacacaggctgctctacagcgagcgaagccttactgggcgcggccggaccgcagcgttcgcagaggcggccgtaggtgacgtcgcaagagcagaggacgagcgacgcgacatgctgggtcggggagaggtagaacctccgagttggctagaacggagagaggcagtagaagagcgcttcttcagattaggtgttgattgacgccgttcatctcttagcgagcttgcactgggaacgcgccttggtgctggatgcggcaccgggttgacgcccgaacgtgcgggaagatcggacggcgataggagcgacgaagaggaaaccgcagacggagaggctggtaaaggagtcgctgtaagggacggatcactcagacggtcagagacgacgaagggatcgatgggagggggagggcgagggggcgttcttgagagggtttcattgggagctgcagacgtcttggaggaatccatgacaaaagggtcagtcccatttgaatgagaagaagagaatcattcagcgcgaataatgaaagtaaacagttagttcggacaatgagaagattgttgtagaagcctgtcaagagcaaagagggggagctgagctgaagggggggaaacaggagatggaattcacaggccactcaactacaagacagtcctgattcggccaggacccggccaaggggcagtcgatcccattcttctcaacggcggtgtttccgacctcttctaatactgaatgtttaaatctacgccattagctatgcgagttttgtatacttcgacgagtttttacttttgtacggagtgcttggtacgttgactcttgacagctcctgggcggagctgtacgggctattttgtatagttcccctgcattgaccctttatttagcttgcgagctccaccaaagctctacagaatacataatgtttagaataaagtgggtatgcataatcaaaagtcctttctactgtgtctagtcagattgatcgtgatagtcatgacaaatattccacccaagaacgcctttcaaacccaaacgctctttgcggcaccaaacaccaacaaccctgatatcagaatgccgtccacataggaaagaaaaaaaaggattgaatgaaaaattgaaaagaatgaaaaaaaaaaaaagggaaaaaaaaaatgaaaagaatgatctgatcagattagaaaattcccgaccacctccggtaccaccttctccgcgtcacggacccttgttgggtatccttctcctgaactagactctcgttcgagtacctcgaattgcgcgaagagccagagccagatgtattgactgaagagagcgaagctcggctctgctttctctggtgctttgcatgtttcttctcagtggtaaacttcttggtggcgtgcttgttgcagaagcagtgcatagtgacggtctcgaagccggtaccgggacaaacctctgggccagcgccacacgcttgatagcctgcatcttcttcgcattggcaccagttgtacaaggtaaggtattggcggcacattttcttctgcccttcttcaggatatagaatatatatagtggatataatttcttttctctttttttgcttttttctcgagcgttgtgttgtcccgcaggatttcttttgctcgtttgggcgccgctgacgtcgtgggtttggcgatcggctaagtgtgcgcaaactccgctggctttcggggacaacgcggatagtagtgcccctcagtagacgataaatggatatgtgcagcaggtcgaggagcgcagaattggtttcaaaacagagacttgtggtgttcttgattctcaaggcgactcactagtcgttcgtatagatcgggatgccgatcctcagggttcttgtgctgagttcccgataccactgagagcgcgaggataaaatcaaaatgatgggtaagcggagagaccctttgcgaggacccttgagaatatacgtgtatggatagacttataccaagtgcaggatggattatcaattgaaaaatggaggtcgataactgggggggatggaggtaagtatatagaggtcaaagtagggcaagaggcagaaccacaaaaggactcgctctgtagagttaataacggtctaagagaggagaagagattatatagcagcgagtattcaatatttgacgtcagcacattgaagcgctcctgtggagtgctcgtctaagagcccagcgtcaaagaacatccacctactaccacgaggaaccggtcaatcccactcatccattgcgatctggccaggatcgactgtgcccctcggtcgtctctaaaggacggccaatccgtttttgacgctgcccagattgcaaagtgcttttgtttctctaggcgctgacaatgaccggccttgctggtcttgctggtctttatttaggtgaaagggtttcagttggcgcctcgacttgtactcggcgctttgtgggaaaaaggacaagcggctcggcaacggagtatctagtcagcgcctgattgcgaagagaatttctgcagtgggcttcttttattcggtctgacaaagaagccgataaagagtccagagaccgctctttgcagctccattctccaatagtttaacttttactgcgaagtaggatgctcgtccctggcccacgacagataagcagcttgcgtacccttttacccacagacaagtggtcagtgggttatccaatgaagacatcatgggtcgatccgatcatgtcaccaacccacaggaactggttcgtcgcacgatcgacggggaatgagcaccgatgatgatgtcgacgttggtgatcgatgcgggcctcgtcccctccggatcgggatctaatgcgctagccggctgtggttagtcagctgtgcagatcttcttgatcacgtgacatgtcatcccagagggttttccatcactgttctcgaagcttaataggatatttgtctgttattgcccatgataatgattagagtattgtttagtcagtagactgtacaggaaagtgctgctaccaaatatgcgatcgtgtaagccgt

SEQ ID NO: 15168 - DNA, 531 bp, Emericella nidulans
gttcatggcaacgggttatagtaacccctttcaaatttttcgttttacacaggactcactctacagatgggatcagtggcaaccggtccatcatgcccccctatcaaagcagctggatgagatctcctatatgctagatccgagagcctgtgtacctacacgctcggtgcattcactcccacgaatgagagcttactgacgaacatcttagacactagcatgtcatatagccagacagaattttgatatgctgatggacgccatcgatactagacaatagcctgagctatccattgtggaatccaccacacgttctgacccatcctaccatgctatacccaaagggagatagatcacctcggcacagaggtttcagagattgatgcacgccgggctgcgcaagtatgcaccacaaaccgcgtattgagcggaatgagctgttaaactactctaagactgagcgtggaacctgtattcagcttctgtcgtcgctgagatcccaaaaccaaccagcgctcagcgtatcatagg

SEQ ID NO: 15169 - DNA, 589 bp, Emericella nidulans
  unsure (1)..(589): unsure at all n locations
agggcaaancccgccggaggcaacaggacagtcaactacatgcaggacgttttatttttccccgagccgaaccacgccggggggcagggggactttattgaacgcgccgagaatgccacggacaacgacgacttttgccatgtggaccgacagcaagaggattctctggacaccatactgtatgccacctgcgccgacgccatccatagttcggtcggtgcactacagacagcgactacacacactttactgttagttactgatgatggacgttccacttacaagaacatccacagggaaacccgttgcggatgcgcatataatagacccgatcaagaacagcaagattgcgcccaaaaccactaatacgaccgccatcatctgatacagtcgaccgaagacgaacagaaacgtgcatggcaggtacacgacctcagacccgtactaaccaatgagatgtaaacactcgcaacaatttaacatggcaaccatcgccgaggatagacccacctgattctgatacgatcagtgggactctaccaggacggaacctgatcatacaaggcaactaccacgattgcaggaacac

SEQ ID NO: 15170 - DNA, 587 bp, Emericella nidulans
  unsure (1)..(587): unsure at all n locations
ccacgttaggtggaaagcacgttanccgcgacatccatatagttgataaagatggcaaccctgttagtatggggggggtatgtttttaatcttctttatttatgccaattttcgacgaagcgccaaaacaatgggcttacaaaccacaggaccccgctgatgaccccgagacatcggaggaagaagaggcttcaactggagattcagacgacgagtctgagaacgaagcgggcccgagtacgataacaccaaactttccccaagacaccgtctccgagaaccgatcggaattaagccgcgaagagcgccgtgcccttgcaaaggcgaagaaagccgctgccgccttgcgcaaggcgcaagggcctgcacaacctggcgaccttccgccgagcgattccgagtccgaaatcgaagcacccctgacgaacggcaacaaaagcaaaggcaaagtcagcgcccccgtcgcagactcagaagaatcggacctggaccttcctttcaacccgaactacacatntaaatcgaaaacactgaatagggcgagggagaggaagcgcacctatcgcgccgggaacgcgaggccattg

SEQ ID NO: 15171 - DNA, 547 bp, Emericella nidulans
aggcaggatgtattcactgcctattgctatgatcctggcattgaggatcgtggcctttgcaccatttttttttactctactgtcgctgctctatgggtgggggagggaaagatgtcgctcatacgctcatacgtgatatattggcctatgacggcgcttcatgtgagaggcctatgatgactctatatagaacgcaccgatcattggcgacgcattggcatgaacctgcggtgctgggctgtcccagggtatgtgggccggtacggatatgcgaaccgggccagaaccagaagcattatgattttgctgatcttgcaggattggcttgggtatcttaccatgaaagcggacgtccgatgatgacgatccttgggtctagcgccccggggtgggtgacgttcaatacaggtgcatcgctggactgaatgatgcgaataccaacacgttgacgtgaataacgtagtgctcatgagtaggcacacaaagtctaagtctgtctacaccttgtagggaaaagcttcggaagacgatgtctttagtgcttcca

SEQ ID NO: 15172 - DNA, 535 bp, Emericella nidulans
agcttttactgccaagatcgcactggctgaagacgatttgcagccgactacagaggactggttatttttgccaccaacattttactcttacgggggggggttaaaatggagtgatacgcctgtgcgaacatcatataggaggataatggtagcacatttcaccgtccaccttgttgaaaaataacgactctcagggctcgtttctggaacttcattagaattttgcatactcctgctatgacaatccacaagaagctcaaccttgcacaaccaaatgggaacggattgcataaatgccatacctgcttgtagatgtgcacccctatcatagaacggtcagccctgacaccttttacgagaggtcccacttcaccgttccacaagataagtggattattcgatctgactatagtacctgcgaagtgatgcctataatctaggcttgataagaggctcagcacagatattatcactacaccgccttcagggaagctaaatattgactgcagaggactcggagaggccatctaaacaa

SEQ ID NO: 15173 - DNA, 512 bp, Emericella nidulans
  unsure (1)..(512): unsure at all n locations
aggcctagcatttttgcttacagggaatacgtttgtcctcaaacttgcctccatagccagggcttgggctgtatgttagctacccaaaatggcaaagcgtagaatttctgatatccatcgagacttcactcccggcgcctgcttgtattcaccactaaccttcctttatttcaaccaacctactcaaacagcatcacttacttactgcttccctattgctttcggcttgtcttttaagaactccctcgtcattggtgtctagcctcgttaccagcatggattatgaaatggacatcgagcccacggggccacaagtcacagtgcgcgaggtgagctccagaacctgccaaacttgccagtcttcccaactgctcttccttcgtcatatacggttagtctcaaagagattaacctcatttaatcccgctataggccgaaccctaccgcgtagacttcaaactcagctccgtngacctcgacttcgctaactcgcttcgacgtgtcatgcttgc

SEQ ID NO: 15174 - DNA, 774 bp, Emericella nidulans
tgagaggtgaaatgttcataacgggcgtctacagactcttcggcatctgcatgctcgtccggttcctgggtgtcatgatctggcggttcgggaggctggatagtccccgcgggaagcaccacatcaacatcgacccacggaactttacgttcctgaaacgcgccccggatatcacgcactacctccgtagtattctccaccttgaccatgcgattcgctaaatcagctgcgtgcatttcatcgaacatcttggggatctgtccttcgggtttcctcgcacgagcgagagcctgcaagcactcctttgctggatccgacaactcagcgaagtacttcagcatactgacagcaagaccacgacagacttcatcgccctgtttatctcggggtaaatagttgacggccgcatacagtggtgctgcgggggagatccggatgccccggtagctttgaaagccggcgggcgttagtatatgcccctggatgcgcgagctgctcacggttgcatttgcgggagagaccggccccgaaaacacgaaaaccggccataaccaaggggttggacaatggacacgcttagttgttcaaaggcaggcccgggggcccccaagtggagccctgccggcaagaagtaaacggcccgccaactttaaacccccgggaaaaaaagggcccgcttaaaggggttttaaaagcgggcctgaaagagggggggaccattttagttggacaccccctggagggcagtccccttagggcccagggttttggggg

SEQ ID NO: 15175 - DNA, 750 bp, Emericella nidulans
  unsure (1)..(750): unsure at all n locations
aaagcaaagtgaagaaactgaaaaaataaagaaaacaactaaagaaaaagaataaaagagacaaaacgaaagaagaagaaaaaaaacacacaagaaaagggagctgtgagcaagcaagagatacaaaggaagacganaaagggggggaagcaangaacgacaacaaaacgaaagaatattttttcaaggaagaggagacacagaaaagggagggggggggacaagaagggaggaggaaaggaaaagacaacaggaacggacaggaaagaggaagggaggagacgaacaaaggaagggaaacagagggaaagcgaaagaacagaggggggggaccaaacaaaagaaggcggggaaaaaagcccagaaacagtggagaagagaggaagaagggaaagagaagaccaggagcagaagacaatggaggacaaaaaagaagaacggcgggcagaaaaggaaaaggaaacacgagcagaaaaggagagggaaaaagggacaaaaagagagagggggaaaaaaaaagcaaggacacgaaggcccagggaacggaaaggaatgaaccaaagggggaggaaaaaagagctgccaaaaagaagaaaaggcaggaaaaaagaaaaacggcatcgagaaaaagaggaagaacacggggcggaaaaaaaccggaaaaaaaaaagtgaaaaagggagaaaaaagacaaaaagcaggaagaacgccaaccggggggcaagggggaagcaaagaaaggagggaggg

SEQ ID NO: 15176 - DNA, 4263 bp, Emericella nidulans
cctggagctagcacccaccccaggtggggtgaaagaaccgggtcaaagtgggcttcccagaaggaatcgtctggagggccaccttggccaataggtcatcttggcgtagcagccaggtttagcaagcttaaacggggttagcgtcaggtttgcagggcccggctcaatctcgacttgacttcttgttcagacggagtaagacgaaattgaactttatgtcagcttctgaaaagaagaaatagcccagcaaatggcttgcgcgcattatgtttgctcgagttgatcttcagcagggtatttgaattgagggtccgccagaagtcgggtttggaccgggcgagctctcttgtggatgtcgaattaccgattaggcgactacagtctgcagggatagatggccgatgacttacacgttaggggtgtgttggatgcaggctacggcatgacagaaatggtcatcacagcggatctggggataggacaggacagcggacagacgagaacgtgcggacatggatcattcggagcctcctccaaacttccaagcaccattgtggagttctaggtggcacgatgtccgctcaagcatatttgatggatgttctgagccaataccgtgtcggcgatgcatgatcaaagagaagtcgctgcggggttgaatcaatgggtggggatacagagttgttgctcggccactgccaatgcagaacaatggttacattgggggcctcaaagacttcccaaggccaggaagtcaatagtcagacggtgaagcggctaatcccgccatcaggccatcacaacttgtgagctgcgagttgcaattgcgagcggttttcccccgccatgcataggtttattaggttctgatcgtcaggagggaaactgaccgcatgggttatgcttctgtccaatcttgagtctcgacttccacgtccactgaagtctttctgaggtaactttaggatacggggactgcactcgacgactggctaatcttgaaactccgcaataccccgtaaatcggaaaactccgaagtcttgaatacggtataccgtagtataccgcaatcttgttagatcagctagatgctcgtcaccgtaatgcagacgatgtgggctcaacacactgcacatgactccagcgctacgtacgtgtgtatcccgtggtcgggattggcgaatcgagctttcgctgtcttcaggtgacgggaggcgatgcaacggcgatctcagcacatgggttattcgcttgttcggcggaccaatggcgatggagatgttagtactggcgtacagaccgtaccgtgccaagtcaacagacaacgtgttatgttgatcaagcctgaaatttcgaccagtaccagctgcgacgttgagggacgttgaaagaagaatactgctaccgggctaatccgtcgaatcaggtctcgtgttgaagaatgccgcgagcctgtgatatgctcttgtgaacgagtctgagcctagaaaggccgatcgccgggcacctgatcgagatacggctttttcgtaccagggcagatcgcggccgcgaggttaggggagagaacggcagggggcggctcggcagatagggcgttagtggacgctaagatctggtttcgaagcattctagagaccttgggaacaaaatgactaaagttaatcctttagaagatatacgtcagtggccgtccacaagaatcccgcctcgggcggtgttttccgacgacagacaccggttctttcctggccatcgcgtcctccaaccttccggcgcagacaaacaaaggagcgcgagtgcggcggatacccgcgtcgcgggatggagatatggagacgggagttcttctggggacagactagggttcaagccatctgcaggcaatattgcaatatgcacagggcttccccccttgcttgggctctgcaccacaaccgagtctgacgagaattttgatacacagcaggtttgatcctgatctcggaacacgatggtgccccactcgactgggcgggcgacgggatgaagactcgtcgccagccgctggcagctggacttctggacgctgaattttggatccaggatcctggatcctgaatcctgaatcctgatcggaggaatctcccttctcgtctccgtcctcgtttccgtccttgtctccgccttctgggccgccgtcctctggaccgaaagtagttgacttgacgggtgacgaggccgtggagagccgttggcgtcggcgttggcgggcggttggacttgccaattgccactggccaggaacgaaggatgccagcagccgacgcggcgaagggtcccagaagacgggatcgagtgtgctagttgcgcagatcaattggacgtcaccagtcggagtcaggccagctccaaaccggaagattaaagggcggccaaatgaagtcatctaaatcaattgggtcgttgatttcattgacctggagtggcaactgccttcggcaaggagttgctagtcctgatcgttgatcgatccagagcgctggtaaaggttgttgagggagagtggtggcgagaatgcggatcacgatttgtcattttgcatttctccgtgatttctccagaatccaatccactgcagtgttcggacagatgggagctgcccctgactgacgcgacgcggcgtcactctgctgaggactgtcctcccttgatgggggcacagggtcggacggagggcagccacggttctacggtcctacgaggaccttggactgtgacatctcatggtcgccgccactataccactaaagagtaactatagcacgggagagtatactgagtatacgggtcgcgcgccctctaccgtactctgtagattctggatccgttcctggccggctctctccgagctggaaccagggaacgccaacgcttacagtgtcccatctcccgccccgaaaaaaacaaccaaaaaataagaaaaaataagaaaaattaatgggaaattatcatgctccagacggagaaaaactccggcgatggtttgggatagatgaggagatcgacccctgcgagtcggtgcttgatcgtgcttgatcgggcccattgtgtcgattgggtgcccaacactagctagagtcgtcagtgtaccgggtgtaccagggcgagctggacgactgcttgagtgaagaatcacggtcggcgcatcgtaccagtcgggcagcatcgtcttgagcgtctgccgcacgcaatccctggcagaatatcggtctggcatgtctggcatgccaggcatgcctggcattccaggtggaaggaaccaggcaggaccagctgccaatccgggttgatctgctcgggttgtcaattctgggttggtttgcctgtctctccactgcgattctccactattggctgaagattgaagattgctttagagctgtcttgacgactcgttgcgccgcttgtccactgtagtccactgtatcgctcaagaatccatcgtcaatgaatctgccaatctgccaatctgtaaatcagtaatgaatgatggagctggaatttaatgacaaagagatttcgcgtcaaaccaatcaaatgggctcgccgatctgcgagggcatctatcgattcgtggcggttggaggctgttggaggcccgcaaacaaggccaaaatggccaaaatcagatgcggatacaaatcaaaaatataatcaaataatttattccatccatcagatttgcaaaggattctctccaaagaggggcgggctgaaacaattgagcagttaagcaggttggtaggttggcagttaaggaactcgagcaggcccagcacgtcgagcaaggtgatggttgatagagtgatcacctgagtctcttgactgttttgactcttcactcttcatttttaacacttgaattgactccagctgcattctgccttctgcattcgctgctgaactgacttttaagctaattttcccttgatcttcccttgaagcgtcctgggacccaggccgacggtgatcaagtttaacctctctatcaatcacattcactgactgactggtacgtctcctgctgctctgccactgtctgccacccattcattttctctccgccatccgccatccatccgacccctgtcctggcttgtctggctcgtctggctcgtcctggcttgggaccgtgctggcctggcctggccgtcgacggtgtgtcgggcagtattactagtctgactcgctcatctggtgttgtttgtgttttggtcatt

SEQ ID NO: 15177 - DNA, 2870 bp, Emericella nidulans
aaagattcataatcgtccccgaatccagaataaacacaattaacacacatcgttagattcggcccgctctgcgtgaggttcgcgctgaaccggatttcgtttggtaactcctgcaaccattcgtctaattcgcggacgaagccgttgagggttggcagaagggcgttccagtctccgcctgtaatcaatgttgtatcacgacctcagatacggttagtactatagaatctgtgaatacgagcagcaatccggcagagacgcgcgaatgcaaagaagccggtcatgggtgaggatggtaatggtaagtcgctaggattcttgagttctgctggccggggtgggatgccgtgctcaaggtcttcgttggagatatcaaagggaagctcgcagcaacagtcggcttcatcggtggccatggggcggccaaggcaggtggacattaaactgcgcatataagcattttggaacctgcaattgtgtcgataagaggaagcaataccagtcaagagtgaagacactccaccacgtacacctggcgacctgcgtctcaacatattgggttgttttgggaatgcccagggcagctcctttctgttaatttcattcagtaaactgtattggatatagactgaaggggcgggagttactaaactaaagacatgtagtcctagatcttgcgcaagccttacagcctgaccggcaaacctccagctctgcgagagcgtattcaacccagccgagcagagcgctaacaaaccgagacactgtacctgctctaggcacacttccccagacgatgcaaaatgcaaagaagcgctttttggtagtactcgattccaggaagagacgcagacccagaagctctgggtaacagactcgaggcacaggcgcagacagcaaagaagacagagagaaagccgcgtccaacaacagtgcctcgcctagctccatttgctgcactcatgagctggtaccgccgcatgaaatccggtttgtacaggatcgggaacgtgtagtgcagttggtcaaagtagattccaaccagcaggtccgagacgtattgcggtggtcggctgagatcttgtggtcgagggaggtacgggagttccggccaaacttggccttgtatgaagaaagggaggctgacttcattgccttcattgtccttggagggagcgggttcggaggacccgcctggcgagaggatctggacggcttcgattatcagtttgtttgttgcgccgccgatatatctgcgccatgagatgatgtcagtaaggtctccatccagtaaccgcggtgacaggtacacacgccttagccgcccatacgaatccgcaaccatatgaccgactgcatcaacgggtgtcggatatgtctgtgtatcatggccttgcatgtttcctgaagacccagagacagcacctagccgaaacccaggcgacgtatcctgtatctcgctaatttctgggatgtcgatgaccgggtcctgagacatcgccattcgctccatggtatgtcgcgctggctggattggattcgttactgaagccgatgaccgcggtgaagtcggcacatcctgtctgccattgatcttgttcatggtgatgcagttagatagcgtctttgctagtccctcaaggcgttcgcataggttatccatgtgttggcagcgttctgcgaaggaggcggcgtacctgttccactacagtcagctgttggacacatataaagtgaacaagaccgaccgacggctggtcgacgcattgtcattgctatcctggaactcgcagacctgctcgcgggactggcagttgtggcaaggatcctcgccgtcacatttgatctgctggtgttaaccctgtctcggtgaagataaacattgtgcggacccttaaaggtatctttttcctgcggcaggatagacaggccttccatatccgacctgagctgccaatgtttcatggctttgacgcaccgagtctgggaatgttggaggagaagggtcgagagacaagagactagggtggtttatagtttagtctgttcatgttggggtaatagagtatctcaagccagcccgttttattctatggagacagcctatgctatcttatctccagtgtagtattctctcttatcttaactacattatcagattattgcaaaggatgtgttcgtaatcgaattcaaggtataggtatatgcatacaacatcaactgtccgcgcaacggctaacggcactatacttacgggcgtagtgctggttgatcaacttcagtacaagtaccgaaaggcttcccttcctcttcctcttccctctcaccctcaccttcaatactctcttcatccccatccatcttcctattcagatacctcaaataagtcctcagaatcaggacacaaacacatcccattcccaggagcgccagctccgccccgaatgacatgacatagagcggcccatacttcgacgggaaaaatatatgagccgggaatactgcctatgttccccatcgcattgatgatcccaatggccgccgcacgcttggccggtggtaggaatcgtactgctgatccaggccaatatgatgaaacttagggcgtagtcggctgtgcaaaagtagaggttagctttataatttcagcctgagattgagtagatgtggtaacgcactcgtcatcaagaacaaagatatgtatcctggtgcagtggactgcgttgccattgcgatacgtagcccactatgcaagctgctgctagacctaggtagtggaagataccggtcgcctgttgatcagcgtgccaagcgttgggcagggcaatcagcacagccagatccagggtggcgcggtaagaagagggtgg

SEQ ID NO: 15178 - DNA, 2318 bp, Emericella nidulans
gagacagtgccctgcgtgtagtcgatatcctgcttcagaccgtgcgcgaccggtcactcgaccatttctcgaacgcgtaccgccgccccagatggccagccccgtgacggcgaggaagagccatcccgctcgcgcgcggccgggccgttagagcgggaatgtcgaggatgagacccatgacaaggccgccgagcatctgggcgagccagtagagggcgctgttgagggagcgcgtgcggatgttgaaggtcatcccgttcacgatgttctgctgataggagtagaagacattggcacagaagaagagagggagcatgcagagaacacgccagtcaaggatcgtgcgtgcagccaggcgcagagtgcttttccaattgggcttctcagtctcgaccacagcagtctgagtccgggacgattgctgaagctcttcaaggcgcacggcggacggaggacatatgagcatgcccagaagccagcccacggccatgaggatcaacagggcgatatatgttccgtctgagacagtcccactggtcgagtggtagttgagcccaaagctggcgagcgatccaacgccgccaccgaggttgaagatgatccagaacgcggcaatggcgcgacccttctgggattcacggacgtaggtggtcattatagcgccctgggagacccagagaaacgaagcgccaataccgagaatcgcgccagaggcgataacaaaggccccgtttccggtccggttgaagcacaagagacttccagcgtacagggggtatgtccatcctccaaacagcaggcagatcctggggccgacgcggtcgaagatgggtcctacgacgaatagagcggttcctgcggtcgctgagagaagggctacggtcgcgttcgctgccacggttggatcgacctggccggagcctccaaggccagttagggcattgtacatctaggcggttagtgggcgtggaaatggaggggggagaatcagcgagcaatgcacatactcccggacaacagaaacagatgaagctgatcagaaagatctggaaccagggatgcgtgtaggttcgataaacgatcgagcgttcttcctggccagcggcgactgtccggccatcttctgcttctggctgcgctttctggtccatggcgttcgagatggaagagaccgggggtgggtagatcttagacagctagagatatctccccagactcttataattctcagctatcgcattctctctggcctgactaagaggatgaagccgccgcagcgaatagctgggatgaaaaggatcgacaagcggagacggtagtgaagaatgcgacgctagagtgtaacatttggggccatttacgccattttggggtagatatggggtcgaccgatacggactcgcttatcttcgctatttcgagtgtctattgtgaagctggacttctttttatctgtggaaacaaaacagacactgccgtacgcacatcgccctcccgtcccagaccagatacaaaccctacacgaccggcatggatctggacaacctctcgcgcctgcaaacagaggcagtcaacccacaaaccagcctcattgataagctgtcgaccctgcaaatgtgcacagttatcaaccaggaagatcgccgtgttgcagccagcgtcaccccctgtctccccaggatcgcagcagctatcgacgccctggcgccacgcgttcggcgcggcggcagggtagtctacgtaggcgcaggaactagcggccggtcagtcaatcagatagcttccctaccaccgattggaagtagtagcaggagataatgactagggcgcgcttgcagactcggaatcctcgatgcctctgaaatcccgccaaccttcgccgcaccaccagagcagttcatcggcctgattgccggcggcgatgcagcgatccgccgcgcccaggagggcgctgaggacagcctcgcgctcgcggaggctgatatggccgcgctcgagctcagaccagagctcgacagcgtcgtcgggatcgcggcatcagggcgcaccccgtacgtcctggggtgtatcggtttcgcgaagcgcaagggatgtatcacgatcggggtggtgtgcgtggagccctctgcgctgggggaatccggggaggtggatttcttgatcgcccccttacctggcccagaggtggtgagtgggagcacgagactcaaggcgggcacggcgacaaagcttgtgctgaatatgctgagtactgggacgatgatccgggttgggaagacgtatgggaatacggtactgctcccttcaacctgttccca

SEQ ID NO: 15179 - DNA, 2585 bp, Emericella nidulans
gcctccacaaagaccactccaccagtgattctcttgatccgtgataccttgccctccatgaaggttgtaatgtctttggcagtggcattcttccctggcttcagggcaatatacgctcgcggggcctcatcttcgtccctaatcctgcgttagctcttgacatatcttctcaacatgatcttcgtcatactttggcacaccgatgacagccgcatcggcaacggctggatgttcgagtaggatggcttctagctctgcaggtgcgacttggttgcctttcactttgatgagttcctgtacagtgcgtatggtcagtccaggcacgattcatcagttcagctaggaacaattggatcgggacataccttctttcggtcaacaacatggaaccacccttcattactgacaaaggcgatatctcccgtcctcaaccatccgtcctctgtcagggtctccttagttgcttgcgggttccgccagtatcctttcatgacattcgggccgcgaaccaacaactctccgcgctgattcttgcctaattccgttaccccgtcgtcggcgacaatctttcgttcgcagttgggattgagctctccaactgatgccgtaacggcatttctccatgggactccagccgaggatggagcatgtggccctgccaaagcagaatcggttagtgggctggcatataaccataccggcaatgctcaaaagacaaggtcacttactctgtcattccccagccttgcttgatattgattttcccaggtggccataaggcttcgacctcttcgcagacttctcgacccaacggcgcacgtccgctaccaatatcttccacactgctcaaatcgtacttcccgctcttcacagcagggtgcttcgccagtgcaaccaccaccggagggaccagaatatagtccgagatgcgaaatttttccgtatactccagcatcttaatgaaatcgaatttcggcatcacgtacacaggcactccccggttgagtgcggctgcaatgaagatgttctgcgccattgcatggtacatcggcaggaagcatagccatcttgcccgtttcgccttctccctccagttcgggttcaggtaaaaaaggtggttgtactgcaacatgttcgagacataattcttgtgcgagatctcaacccccttcggcctccccgtcgtcccactactgtaattcagcgcaagcgtggtgttagctttctccggtgtgtccagctcctcccacgcaaatcctgccccctcctcaacgctggcaaccagctccccccaatatcgacaccctttcatcccctccccctttccatcataaagtgcattgttgaacacaaacaccttgtccatatccaaccccgcaatcttcgaagcctcaataccagtgtctagactatcttctgcacagaggagataaatcgccccgctatcctgcaactggtaggcaagctctctagcgacaaaggtagggttcgcgccggtgaaaatcccccccgccatgatgatccccatgaatattacagggaagaatatgtcgttgcccgagaagagcaacacccggtcacccttctggaggcccgacttgcgcagcccggctgcgaatctctggctccagaggcgaaagtcatgggtcgtgaagtagtgcgtatctggacgagccgcttcggagaagcatcggtgcgttttagacaaaggttcagtgggtgatgtgagaagaagagatgcgagatgtgtattggggatctcaatctgccagcgcgatctaaatggcatctttttctgatctatggggtgtgatcttgttgtgtttgccagtgcagacagaaccagtcattaaccagtttaagagtaggagtacaatgtaaaatgacgaatcaacgaggctgagaatgaaaggaacagatttcaaaaaacagaagtagcgctgagcaatatatatgctggatgcggagcaggtttgtacggtgttagctaccgttttgctgttatctcccgcctctcaactcccaaagctctcttggtttagcccagctgccctgcgcggtatgattgggcacgccgtctacatttcgaattaggacagccagcgccgctcctcaattgcgtgtgagcgcgtgatattgatgtaaaatacggagtgaaactgtaataaccctagcggaggacggaatgggccccgattccccgcatttgactgtatatccgagtggaccaatcaatatggtgcggctggcgacgatcccgaggcccatatcgctgacctcggatggcatgcgagtcagcgaggagtcaacgaggagaagcagtaaggaaagctcatgtccagtgcgaagtgggtagagcctggaacagaacgcagccgtcgggagcttgacaggaagtgcatcaggattggttgggtgaggggaggcctgtacgagggcagatactagtctctttctgacggcttcagaatcaatgtactgtaaatgtcggggatgaaaccatgttttgtagtcttaaatgtacacagatcgcaatgaaactagagtgaatgggctttgtatacctagataaccatcgcagatat

SEQ ID NO: 15180 - DNA, 2125 bp, Emericella nidulans
acgccgcctcgagcttttcccagcgtctttttgtagccactgacctgtccttgggttcgtatgcgcggccataatgcggtatcagatggcgggtggaaacagaagtccgaaagcgcgccaccggccggtatagctcctggtggaaaatcgtgtcagcagctttgtagccggcgaatgaccggtgagtagactagagagcgtgaagtttcaagaggaaattatttggagggcatatggggccacactgtctcgcctgcgtacctgaatggaaaaaccgcgcagttgactgaaaggtcgggaagacgtgccgaccagcgcatgtagccacgagaagtccgtcatccaaacttcgaattcagacacgacatgcaagtcacgcaggagcttcttagcgagccctctgtatggtcctcattttgtgcttgcctgttgaaattgaggcagctgggagcttgcgcgggcttcgacgctggcccggaaccgagtctccgaagtgctttgcgtgataagtcagaatattgaatccatagtatccgtgcacactggtatgtagaggcagctacataaactgcatacagaggagacttgctggcttctgcacgtcagataagctagtagtttccagaggctgaaaagtggagatggacgagaagtccagtcaacctctgcagagctcgatagacttgccgcagctgtagcagcaactgtctgtttctcagacatattgtggctgatctgaaaccgaaccagcgtctagtagtcgtgacggaaaagatgcagttcatctaagccgaggacgaagatatgaacatagtcagtatgcttcgcacacagtatagggtagaaaatgtgtggagcgcagaataaatactctatttcctgccggacgcagcacggtaccatttcgagtaaccaagccagatgatgccatgtttcgtagcggttgagatatctgcgtacggtgtaagctgctcgctggactgatatctagaccgctccttcctgcagacgctgttcatgtaccttcgaatcgtatgcgccagaatattatttttaggtatctatggcgacattcggcagcgaggtgaccgagcaatggtcttcatgatgaaccaccaggcgtccgacctcttgttgaatgcttggcttgccacggttattcccaacagaacgccggcagtaaacaagcgtgtcgaatttggagtatacgtacccactatttgggtaatcaggactcccgaaagcaaaatattcccgatccttaagccaacagctcagcatttcagactgagagccgcttctggtcttccagaaaattccggtggcaggatcgataatgatgtcatgaaatatatttatgattccaatcaacaaaagattcatttgattgctcaagtcttagatcccggcagcgatcatctgaagggatacccaaggaacaagagtggaggagttagggagtgatcctctagtctacgagagcccacctggttccgtgccccacaagaacctagatggttaatggagcttactaatatctgccacccaatcatacagcattttagcaaaataagctgttgctagtctggatctataactcggcagcaataactttttgacgagaattcaccgactatagaaggttcaacatcgtggctcctgcattgcatgatcaaacttgtatgaccggcttttttttttttttgttctgtagagataaagaagagatctgattagcgaatacttcgcgcactcaagctaaatcagaccgacattcaggctgacaaccaccacaatatttcactgaaccctatcttttctggagcagagcccggggtggatactatacccaggagctagagtatctattgataagtgctaggtctctttgaagttcgctgagtctccttgcaggtgcgtttctaataaggacaaaaactttccgttgtcggcggcagggagcgctattggagcgacgggtctcttcaggccgtcgctgcggtgagctagatatgagacatcgaatccagacagtctcttcagctcttgttgtacctctcatatccctaccagccgtgccagcaagggggtagctttagggttgatccgccgcttggcatactgt

SEQ ID NO: 15181 - DNA, 421 bp, Emericella nidulans
aaagtggatctgagggggtgaggaccaattgctacctactcctgatggccaatgccgtttatatattcgctctggggtgggtgactgagaagtagtcacatggaaccacaccaacctaagccttcattcgagcaagtgagagcgctgaccctgtggatgaagactagcacagagaagccgtgttgtccagagacacttcccgctacgatcggggggaacgaagacactaccataatgtcagcacctgctgcataggctgagtccatgaagggggcaaggattggctataaaacttgcgctgctgtgcctggtgtagctgctattcccggtgcatcttgggagcctgctactgcagatggttgcggctgccaggctgttgctccttctacggctacggctcctgcataggtgtgacgccctg

SEQ ID NO: 15182 - DNA, 488 bp, Emericella nidulans
atgcaagcatagttttcatttctgggcgaaagcgcgagggtgaatgttgctctctctctctagagggagatttctatatagcaacaggccacccctagggggggggtgttttctgagctgtacgattcctcaggagagcactaggctttctctaacggaaagatccttacctgctaatcctgatatgaggtctgtacatgtcctggcaaaacatattagggtcagagccgacaaatcagaatcaacgggttgtttttctatgtgatactggccacctagtgtatatatataggctgcaaactgtcattaggactcacactgaagcgtttgatgaaagcgggagacttcaatagctcctagagtcgcggagagtactgagtacgcaccagaaattactgtttactcgataaaaagcgcgcccggacaacccgatattataactagatgacctgtaactgatctgaaattggaaggttctaggaagggct

SEQ ID NO: 15183 - DNA, 629 bp, Emericella nidulans
atgccttgtaattgtctacagttgagcccggtctttgtatccaattgcccactggttacgtgctcgatgactgaatgcgcttggcatcgtgaactgctaagtgtcggtgaacccacaggcccacctacctgcaggctgcagctatggtacggcgtcggaagcaatcgggtggaattgctgcgaaccccaaaaaattcaatctcactattttaggtcatcaaccgaggtacattacttcgtacagctagtctacagcttcgcattccacgccgcgcgatccgagctctccagcggcctctcgcgcccatcccagaagagcggacagagctggaaccacttctcgcgactgcagaagacgtggacagagcgcttgtggcccaagtccacgtagctttggatcgtaaggccctgggcattcttctaggagaggacagtgcccccggtcgccttgggttcggcgacaacgcactgggttctcggctcgtcgaggaagcagtagtggatacagctggaccaccaggcattgacgcgctaagcgccacagatgcttttttaccgacagggaatgtccccgcgatcgtagtccccggatcgagtggcaccgaaacgccttccgtttttgagagggc

SEQ ID NO: 15184 - DNA, 1584 bp, Emericella nidulans
tacaggactcgtggcgacgcgctcgcgctgagggccagactgacgaggaagggggcggacagtactacatggacacgcagaaccacttgttctggacctgggacacaccgacactgatgactcgcaagttcacagagatcgtcgatgtggagaagctgggaggcgtgatggcctggagcttgggagaagatacatataactttgagcatctgaaggcgatgcaggagggtgttgcccagcgcgccggtggaactgcgacccctgcgcgcactcggtgttgatttcttggtttctaattaagatgaactgctgtacctatggtgaccaatcaatattctcgttcacgagtcattttcagtctactagttgagagcccagccgcatgtatcagggataaattggttctcgtccctcatttttatagttgctctggcggcacaatccgcgtgctctaagcgccacggggctgttggggtctctctgagccgtcaacagcgaccagccaaggtaagctaccaagataacgcgcataatcactataaagagaagcttagcctcatgcagggaattcagggtctttcttaatcgtctacaagtccacctcagttcagttttctgcggccgtcggcttcaacagcatgaagtgcttcatcgtgttgacctttgttccgctcgttctcgctcttaccatccccaacaccaacaagaatcacgacgccagctcggttgagtttatacaacaacatcaacaacgtcttttcgggaccaaaacgacagtcgcagagtacaaacgtcccagcctgaaaatcaaccatggcacgattattcccgcaaacaaggaaaggacccaggcaactgccacaacttctaatcctagctacatccacgcgctgcggatcgagcaagcacataccatctgatagcacggtactcgaatgccctctttgcgctcgggctcctgcattctcgtccccttactctagggatcattgagttggccggacgcctcttccgatgcgtctcagtggacgaatgtcccgagcgcggacgagagaagcagggaactgaatcgcatcaggaaatagaagagtgggcgtttcgacagagggaacgggataataaaaagcgaccggccactgtcgcggtggaaatgatcgacacaatgaaaatcggctcatgacgtcgtgcattctattttatccatttttcaacataacttacacgattttgaaggtattgtattaagtaagaacctaattcagacggttgatctcctcgacaacagcggaggtcacttctttcgtggtggccgtgccgcctagatccgcggtcaggataccagattcgcagacactttcaacacactgcatcagcttgtcggcggcgtctttctcgccgagccactccagcatctcggctgcagtccagaatgtagcgacggggttagcaatgcccttgcccgtgatgtcgaaggcggatccgtggatgggctcgaacatggaagggttctgacgggttgggtcgaggttcgacgtgggtgcgatgccaatagaacccgcaagggcagcggcgagatcagaaagg

SEQ ID NO: 15185 - DNA, 1273 bp, Emericella nidulans
agatcggcgtctttcttcagcagctgctgtataatctatttacgacgtctcctcgacagcattcgcaaaagccaaccctctgcattcgcattgactcccttctctatcagtagccgcacgacctctataatcaagatatttcctctttatactgtaacgatctactctgtaaatttactattctactatctggtgtggttctctggggcctagcgtcggatatacaaggctccagtatattatcatatcccagaagtgcgagccaagtataaatagacgctggctatcgtcctataccggaggggaaattactcagattcttaaaggctctgaaaatatcttcaacaagtagacatgtccacttaagcttgttctgacagacatctactgtacagcctgaggcatgcaacatgaaagactgtctggtttacctcgtaactattatgactggactcttaatacctctttatatatatttagctgaatgagaggtctctgtatctcggcaaaggatgcatagaaacctcttatcacgaacctgcacaacattccacgctacggcgattcagttggcattctgggaaactggtcaccagaatgttgtcccggtttgcgatgataggttattcagatgtggtagaccgactaaaattgttggtagaatccgagactaatcccagtaccttctactatgcgacaaatggcatatcatccattagcccagctttaaggcaaacatacctccagaggactggtatctgaactgcgtcggcgacgaggaggctgtggtgaggaaagctaatcataggctttatcacggctgtctgggggaagtcccattgtgctagttcctcaaacatgctgatcacgtaaagcagatcctgaccccagggatttctttcataccagcccaacccatccagtatacagtatacttgtaaggatggtggtacctgcagtagaagtctctcgaacagtgcacacagggctacaatatcccctttctgacaagcggcaattcgctcaggtgtaagaaactcaaggttggacagagggaacttgtcactcgttaagagctgcataatgaggcttcggagtagcccacccggtccattcatcacctcgggcttctcatattcccggtgaagacccgcaaacgcaaagagcaccagcgtgtttgagctgtcgagaagactcgagatcaaggtggcgtcgaggattgatatgggcgtgatgctcgccgcggggctaatgtctagatagcctcgacgag

SEQ ID NO: 15186 - DNA, 648 bp, Emericella nidulans
  unsure (1)..(648): unsure at all n locations
cctgttgccatacagtagacaggcgtattggcacccaattaatatagactttccgtgacgaggatggatttgctccgcagacccctgctcccttcgctagtgcttactgaatatattacatttcttatttcccgaatggcttggttccagactcatgtagtgatccactcgcttagaatgtgtcttcgcatagccgcatctcttaaaatctgaagccgctgcctagtcctcctctcactcaaattatctgctctctctccattcctagacggagtattttttatctaaataggcaacatgacagagcagaccctccccgattacgtcctagaccccagtgccgtcctcaacgacacggctgccagctggcgctacggcagaatccccgattataccaagacccgcgagttttacgaaaaaagtccgtctgccttctctttgcctgcaagtccattgaccaaggacttaaatatgtaacgtctaggctgacctctgcagcgaaaacaacattccaccccgacacctngctcgcattttttgccagaacctagtgaaaaactgggaaatcgaagcttattttagacattttagatgactgggcacaattacccataacgtcacaatttcctaacgcggtcccgttaacca

SEQ ID NO: 15187 - DNA, 1293 bp, Emericella nidulans
gggagctgtcgcctgagcctatgtcccccaagactaaaatcgtggtggtatagtcaacaccgaagaaaaacggaatcgagtaccgttcctctccagtcaagtttaccacacgatgaatcgttgatttgaatcgattattcgaccaggtagcgagacagtcccctatgttcacaaccaaagttcctggaattggtggtgctgccacccagtgaccctgattattgcgaacttgcagagctgggacatggtcctgcgccaggatagtgaagcactcccagtccttcacccatcagtgacttctctacgtagtcggggcatgaccttactgtatgagccgcctgccctggaatctcttgcccttccactggctgaggcgggtaatgcagcattctcgagagaactcctggatactccactgccgaatcgaagagatgctcttcctggccaagggccaaggcattcatcttgatcagctttcgagagagctcaagagtttgggagaagtattcaaggtaaattttgcgaaagcccgggaggagacgctcatccggccactggttgtccccgtatagcccgtactcatcttggggaggcgggtcaccggggccttttcgaatatcccctgccagctcgtaaccaatgtcgaatgcctcggacagggctccctcagctggtttctcgagctctgggttggacgcttttcgccgtacaaggggctgtaaccgcggaagttctatcgcagtcagactctagacttcatcaatctcttgtaactccaaacagactttggactttgccaggtaacattccattttctgttctttgctaagagcaaagaaattatgcgcagcctcgaaggtacgaacgattagctccccagcgattccatggttctgctagtgtgagctaggcttcctcattgtgggtggttctcaaaccttgatgtagaagaacccaacctcaatgcaggccttcctgacggactctgcgagtttctggcgttctgaatatgaggactgtttaaggtggacagatcgacgatagggatactatcgaaatcagcccgatgggaggacatcgcgcaggaagctgtgtgcgagtccagtggaatgctgtcttgcgagctatattagtgaaattgtaaccagataaccagcatggctccttccatccgcaagcaatactggttgcacaaagtaccccgcttgcgagcaccacgaaatgggcgtggctgctccaatccccgacggctttgcgacatgttatcaggaattatgcacgagcgcctcgtgc

SEQ ID NO: 15188 - DNA, 2830 bp, Emericella nidulans
aacccatggtgcactcaggctccgtgtgaatgggcgagatcacgattccagctataaatgtcagccgcacgagtcacagcttacatgagtggtggtctggattgtctacctagccccgacagaaattccagaggaccagccattaacatagtctgttcccctctataaccaggagattcgtcagtactctaggcctgttgactaggacagaaaatttcagatacctaccagtccattccccgcatcgctcatacagatccctggaaatcccaaccggtcaatgggctgaatgaatccggagcaagccgtgttagaagacacgccggcagtaagttggatcttctcatcatctgacagttgggccacaaaagccctggcttttgtatatgcagatgcccagtcaccagcaccagtcccctcagctggattagcaagagtcagcgaggataactctacagacagcaggatatataaaatggacgtacgggaggggtaaactggaggcgattccccataaaagaatgtgtcgctagtaatgacattctccgcggccctgccgccaagggcaagggcaagcacgaagcctgtcttcccccaggaagtcaacattgagaggtttgaaaagacgctgaaaattccaaaagtggatattccgcatacgatgccacttgcgtctggattttgagaaagctggtaaggtattcccctttatatcctgctcaatggtactacgggcccctcacctgttatctgtccggcatatccagattgacctagggtgacacctcttagttacacaaactctgccggatatatatcggcataatccaagtaaagaaacctccagtgcatgtttagcgtctttagctaagcttaaacaaggtgcgggtgcggagagtgtggctgctgagtggctcccagcaggattgacatcccactagtcttccccggcatgtggaggaaccccgtgggggaccgcatatatagattggagcggggtagaagtggtgcaatagaaattagctcggttcgttgctgctggactgtcaatctagtgcatctcaatgcagtcctaggtcatctgccatgtgccgccgagacagtccctgcggaaagaccaagtacgagcaccttggtcaactggcgtcgttgtcggttacccttcacaagtcgcgactgacctctgtaggctatattctgtcgactgcctaccatctgaagtgcgttcatcgggactcttgcccgcatcaactgccgatcagtccatgttcatactaccccgaggttacttggtgtgctgggccgtacgtccccgctcatgatgcctggaagtgccctgcatgcaacactcccctgcatgcaacactcaaccctttctcagcaattcctgagtcatgaatgatgtaaccaagcaataaacaaacctgtaaaacttcagcgtagatttttctgtttgttacctgcggggaaacccccccccctttgcacatggcgtcttagcaaatcaaatacgacaaaggtaaagccgcgtaacttggactggacagcaggaaaacgttttccagaaatttgttgggaacgaacgcatggttattttggcttgctaaaatgctggtattgtctactgtgcctctaccacagcttgataaaaatctggaagaaaacctaccagggctgatccctcaacaatggccctatccatagctataataatcatgtagtaacagctgctttctcggtaacaacttgttggcaattcatacctggctttgcatattcctacgcttttccagttgcggcctacgcttcagagaccagtgggacactcgagaacacggtatctggtgtcagattgatcaacaaccaaagatattattatatagaatacaaagtacgctatttatctggcagaagacataatacactgcactctgtcagcgaagcgttttaaaagtgacttcgttgacattgacaacctggagctggtcagaggccatatgaaatccaaggcagagaacaccattcatcgtagccaatctgcaaatatctccagcacactgaagacaatctgggatcagaagcaagatgaaagttttttttttttttttttttttttggtagaacagttttcgcggtgcttctatccctccttcaggcgtccttttcaggtacacaagttagtggcttccagttaatgcaagccgacctgactttagtagaagctgtgcgccaccttgactttgaacaggtatatgatttcccacgatgattcacaagtccaatatctaagaacaattaaaaactttgtaacaatagttatagctagctttatagtaccttgctactccttgtataatcaaggccttccttgttacgtgacgaaaacaaatagatctttctaatcatgccgtacgaacaagcaagagctagaggagagcagattgagacaattagatagaagataggacgggatccatgtaaaacagccaggtatgcttgcattgcatagagttcgaaggcaggcggtaactgatcgtctcttatggcctggtttattcctcgctctcattcctccaagaacattgacaaatcgcacggcttccacccatgaattgagaaacaaaggtcaatccagcatctctagaaaggttaaccaactctactacaagccgtacgccgtctttcttgacgtccagggttcctatcgcctcaccacacccgagctagggtacggtgccggtggcctgagggggcagctagctacagcattcgatgcgtttagaacctggatggacaaccggacggctccaccctcaaggcaggtgaaagc

SEQ ID NO: 15189 - DNA, 634 bp, Emericella nidulans
aaggcgctgtagaccaatttctggatctggctgaacagtacttgtctcgcacgcaggtagaaacagacagacatctatttccacctcctcaagtcaacaccacaagcacaatcgtccagcaattggaaaatgtggcaatcacagacccggcttaccagaacggccaaaccaggaattctcaagcagaagcggtggtcagccctgcacccattgggcttcctccaccacctccacctccccaggacactccaagcgctactccggcagcatcacaccaacacacatcctccgtcagtcctctctcagtcgagcagaagcgagactccgcccaattcacccctctcccctataatccagctgcccccgcggcgccagaaccaatcaagcatcgggagaaaacaccaccgccccccgatgctgcagacgggactgggctcgccgcagctgtagcagcagaccacggtgctccatattctaacccttcccatacaccggccttgggaaggaggctactcttgctcctcccaacaagggcagggccaagcaagcccaggcccgtacacctaccaagagcctacgccttttcaccaccaagcgcaggtacttttcttcccaccccaacatcaagcaccca

SEQ ID NO: 15190 - DNA, 2822 bp, Emericella nidulans
tactagtctttgccaaacgctcagacccagttgtcttcggtgccgtgagagaaaaccgcgtcgccccagaaagaaaaggttctgcggagaacagactttggtaagttgttttttctgggttgcgcgtggatgccgatattgatgagagtaaaggatgggttgtccatccagtcggttattaatatgatttggctatcaactgaggaattggtccagttgcattgtaactatgtgtatgtatactaggttagatatctattctgttcgactatcatattcctgtttctcttgagttcgttttgctccgcgagccatcttacatacctacctacaaaagccccgtgagggattccatgtcctatatgtggatatcgatcgtaaatacgagcggcagcctgacacaccctgatcagtgcttgggaaatcctgattcggaatgtagaactgaaccgatatcagtccgctcattcgcctacatacatataacggcaagagacgcatatatgttggccatccaggtattaggttccaacaaggagcccactttaggacaaccttaactcatacaggggtcatgagttaggacacaccgcaactgcactttacagcgaggtataccggtgcgtcgcaatagaccctagacataagcagtggctgccgaattgggtgtttcgggtaggatccgcttgctctgtgtgtatgctacgcttcgatatggatatgtactccacatctagcccgtacggccgccgatatccatgcaggtataaatatggacatatagacaaagtttgccttttccagactctgtgactacttgttctgcaggactacggaggaggtacgtacataagcagcaaagaagtctgacgcaaaaggacagaaaaggcaagagagcgaggtgaccggggtagttgaaggggttcgctgctgttaccccagatgcagtagcatggattggagtgggaaagacaaaggagacaggttggaccactgaagtttcaggatctcggctgattcttgggctatgcagtcacgcttagaacattttgtatggggcggtatgccgggagactgaaagattgaatatactgacccatcgtttgagtacatctgaatgttctgttgcagtacagaataataatagggaagctaacacagggaccggctcagtaacctgtcttgtttgggtagcatgctgtttcggccgggtatagtatgagacatctgcaggccaggttgcaatgtgatctcggagtattgcatagagacggataagagcaagggttatgattcaacgagaaacatttagcgtttgcgaatcctgatattggcttgtgcaacaccagaacgaaggattctcatacgtcatacattcgttgcgatgtctgaggcgactgcctatgatgcgtacgcagataacgcgaggattggacatcatgttataaactagctcttccacgaacgtgcttaatgttgcctcagtttaagggcatattctcaggtacctactcagagcaagttaattagggctgggcgggggcattatcgacccaatactgtaaagtttggatattaatacacgactctaccgggattagtcttcgacaatgatggcaagccgtacaacgactcctaacaggtattgccaacaagaatatggtggtttgcctgcacttatgacctgcactaatgaccacccccatcgccccttcctccccagtaggactcatgcttaccactgcagtgcaccgcccccgggttccttctgggcattgagagcagtactttcagctgttcgaggtacggcgtggcaaaaactttcctgctgacagatgtcggagccacatccagaagagtacacagaatcaaggcacctcaggaagccgccgaggatggacgcttagccaccaccgtaagtccagttggcggcaaacgacctagagccagcagtaggaggccaagcatccagaccatcgggtgcatatagtgaacaacatacccgtcaacaacacggtagctactgctgggagcagcccattcgtgaaaatgaggaagttatcagggaagagtgctcggaccgaggcttctagccacgaaatgacgccaaaatggaaggacccggatcattcctgaggctcggcggatctcgcaaaattccccagatcctggtggtagatttttcttgcatgttttgcaggccgagcccaggaccaggctattgggattcggagagcgctgtggatgcgggagatcccggcgccttcgggaatgaccgtagggaaagctcagctgactcagcagacagtcggcataccgacacacaaattcacagagttggagaagctctcctcacggccaccgtcggactggtgaggggaaggctggtactattattggatctatgaagtttagagagataattgagctcatacctatcgtctggcagtctaactgacgttgcagctatcgctacattgcccgcctgcccttgagaatgatagccggagatagcgccgaatgcgtgcctattttctcctcactgagtagtccacgggatctggactagagcagagcccatggtcgtcgactcgtagtttcccctcacagagcccgtcgggtcttctccaagtctttctttctttgtcgctcaaatcgccggcggtgcaaagagcgagcagtggagcctgccaaccaacgacggcaaattcccgagtcgagcacacaccggcgaccccaaaacagctcgggcggcctctatcaatgctggcagggaaaaccttgatttttgatttttttttaattattttcatccttgaatt

SEQ ID NO: 15191 - DNA, 2989 bp, Emericella nidulans
gtcacacccccagcatcacaactcccggggctcattcccaggaagcacttgtaagatggcttataagaaggccggtatttcggatatcacccagacagggtttttcgagtgccatggaaccggaacagtagccggggacacggcggaagcgtcagttgtcgcgaaattgtttgaaggaaaagggataatcatgggagctgtaggtctatagcgcgcgtctatgatgcaggctaacgaaccaggtaaaaccaaatgttggccacggagaaggagcatcgggaatcagcagcgtcatcaaaggcgttctcgcactggagcacaacactatccccccaaacgtctttttcaagacgccaaacccaagaataccattcgaagaaggaaagctccaggtcccagtggaggtcatgccatggccaaaagaccggcgtgagagggtgagcgtgaactgttttggcgttggaggtgcgaacgcacacgccattcttgattcgatatcttcagtctgcggtgacaactttcgtcctcttattgaaaactgcgaagatgacagagcgcgcctcttggtcgtctcggcaaggggcgcagaaagtttgaaacagcgcattcgagctgtaacagactatgcaaataaggacttgtccaagctccgggatctcgcctatacacttggcgaaaggcgcgagcatctatctcaccgagcgtttacagtagccaatccaaatgagctgctagacgagccgaactttcagactggccgtgacaaagctccggaggtgacctttgtcttcaccgggcaaggcgctcagtgggcgggcatgggcaagaatttgctaaccgcattcccaaccgcgcgaaaagacattcagcatcttgaagaggctctgggcagtctcgcagatggcccgtcctggtcgattgaaggtaagacgccgtgatctgttaggtccaagctaacgagtgcagaggaattgtcacggacggaaaagagcagaataaacgaagccgaactctcgcagccgctctgcacagcgctccaaattgtacttgtcaacatcctttctgcatggggaataactccttcatctgtggtcggccattcgagcggcgagattgccgctgcatacgcatctggggccatctctgcgagatcggccatcatcatcgcgtattatagaggaaagctcgcgaaggagcttgaaggaaaaggcgccatggcagcggtagggctgtcaaaagatcttgtcgcgccgtttcttgaggaaagcgtagtcattgcatgcgagaacagtccacaaagtgtcacgttgtctggggatagtactgcggttgatatagtggtggatgcaattaagagggatcgtccagacatcctctgcagaaggctgccagtgtctacagcctaccactccagtatgtttatgttccaagggaagacatcgctaacgaaccagatcatatgtgcaagataggagtacagtacgcgtcatgcatcgaaggagccatcgagcacaaggataagatgctcccgcttttctccagcgtcacaaccagtacaatcacagagccgacagcattggatgctgcatactggcgtcgaaatctggaatcgcctgttttgttctctcctgcggtacgcagtatactcacgaaatcgaggtgccggacttttatagagatcggacctcattctgcgctgtctgggcccctgcagcagatcttccgtgctgtagaaacaaagtcagagctctcgtatatcccaactctgaatagaaatgagcctgatagtcacactcagttattagtaactgcaggactcgcgcacgctggcgggattgctatcaatctcaatattatcaatggccccggcaacactatatcaaacctgcctccttatccctggcaacataacacccgttactggcacgacagccgactaacgcgcgagtggcgattccgacctcatctacaccatgagctccttggcgcacgcagcgtcgagtcttcagagctcgagcccgcgtggagaaatctgcttcgtctggaggacgttccgtgggtcagcgagcacgctttgcagggaaatgttatattcccggctgctggatatatctcaatggcgggcgaggcagtatgccaattaattcccgaagcgagcgacttctccatcaaaaatatgctgatcaagaacccgcttttgatgaaagagtcggctgagtacgaaatcatcacgacactcaagccagtcaaaatcaccgaccttgttgagtcagattggtactcgttcagcatcgtctcgttcgatggtgcttcctggacgaaacactgccatggccaggtgcgcgcgggatccgactaccctccaaaaggacgaaagatcaaacaatacgctcgcgtccttgacgtaggcacttgctaccgtttcgtcgagagactcgggtttgcatatggccctctctttcgacggtttacatgcatctcttcagatccaaatgatcgaaaagcctcagctaggctgcgcgacctcggacgaacccggtatccgcttcaccccgccataattgaccacctgctccaagctttcccaatggccatagctcaagggttatcccgacggttccagatcattgtccctgcggcaattggacatatctatgtgcgacgggccgacgttccagaaagcgaaatgtcgctggaagcattgatggccgagaccggcttcgggacatggatgggtcatggtatcatgatggctggcgacgggaatgatgctgtgcctgtcctgtcgatgacggatgttgccgggttccctgcgtccgggacgggagacactgcttccataccgctggggtcacagattcggtgggctccggatattgatttcgtagaggcgtctagcttgctgctacctgctgagccgagcgatgagtatgtgagcatgatgcgggcatgtgatgctttgagtatcctgtatatccttgaaacggcg

SEQ ID NO: 15192 - DNA, 3361 bp, Emericella nidulans
aacgatcgacgagccgactacgctggtctggccggtttcgctgagaagtcgagcctgagttagtgatggaggaccttctatgcttggcgcgttccataaatatatttctgcagccggccggggaatccaaccgggtatgttatgaatgtcagtgttgtccggtcaggcaagtaagattcggtaccttccccgccatttggtctctaatacgcagggggcgctagcgatgaacgaatcctacagaaaacagcagcaattaggacaagggaacgatcactaccaagatcagtcacgggatgtcagcagcaagtcacatgactttacatgacttctcgttggagaccgttcgggatgtggcggaaattccactagacatgggtctcgtgcaactgttgggtgaatcagacccgactactcgagatgagaatatatcccaaagctaaagagcacgcgtcagcgcgcatgaacccgaggtccggaagtcgaggttcgctctgcttcgcgcagcggctcgctcgggcatcattttgaccctgctctttctttctcttttcagttacctgttcggttccttataccagctcacgggacatactcacaatctcaatgtggttctggtggactatgatgacggcgtgattgaagatgctgtccgtcaggcctcacagcagctgagcagcgatagctttcccaccataatcaatcaccctccatcacagtatccacagccagcggctctgcgatcaacggtctgcaatatcgagtactggggtgccctctacatctctggtggtgcttctgaccggttagcgactgccatctcaaatgcgcaactgccgcgtcctacaatcggagcgacgtcctcacctggatctggaatgaggcccgatatccgaccgtcatcgatactcttgcgcaacagatcacatctctctcagaagccgcacgggttgcatatgtgcaactcaatggtacaggcgccgttcagtccctcgacgcgacaagcccggctgccgtggctgcgtattcgaatccttgggagctcacttcgataaacatacagccgactacccagggttcccgtgtggtctataacaccctggttgttgtattgatactgattcaagagttcttctttctcgccaccatcaatggtctttacgtccaatttggaatcttcaggcgtattaaccctaaacgcatgatcgtttttcgcttcattatctcggctgtgtacactctggctggatcaatctgtgcaaccggggccatttgggcttttcgtgctggctggcaggtgaatggaaaccagtgggctctgacgtggatcactctatggctttttgcacacttgaacttcctcaccctcgatgtttttgctgtctggctgcccccaccctatgttcccatgagcctcatcacatgggttgtgctcaatataacgtcaatcctagtcccgttcgagctatccccagctttctataaatgggcctatgccttgcccgctcacgcatgtttcaatatcttgattgacatctggtccggtggctgtaacccgcaactcggctacgcgctacccgtactttttgcttatgagctgtctagcggcattctcagcgggattggtgtttatcgacgggctcactacgccgtgatcacggccgaacgcgaagaaaaatcattgcaggagaagatcaccaatgcaatagcagattcccagagcagatctacccctgttcaagaggcgcgccccgctggcggcgcagaactagatcgggaagagactgttgaatccggtgcccaaccgcagaggacgagcagtgccgagagcatatccgatcgggaagagcttgcagatatggtctggcgagtcacgtcgcagatgacgctggaacagtcaagctcacagaggagagggtctttggggccgtcattcgccttatgataagtccgatatagcgtatgaaaacatcataaatattgaagttggacaggcaagattgagcatcgaagcctcataccgggttctgatgcgaaggtagcaaggtcgcgttgctctattagccgaatgatctccagaaagcgttgaatatgtacgctgttactccacccccacagtaggttatattttaatgaccataataataccttccccaaattgtccacccacgggtatccaccaaaccgccgtcgtgcttgatcaaaaaccaaccgtggttgaagcgaaccaagtaacgcatactcattttgagttgccaggatagcttggctgtcgggctgtttatgtcaaaaggccacaatgaactgagtctgaagatcctgaagacagttatccatccttgaactaggtctcctgaccgtcgtggcggcgggatcacatttaatgaaattattgttatttgcatgtttagaggattgctaacgttaatataaatctagatatacaattctatattcattcaacaaagggcagaagtccttatcagaatagggaataaacgatacataagatataataactattagctttcttatggataaagcctgtgcgtttgtgcgggttgcaggacctggtcagatttgcctaccgattaacaccatcattttctagagttcattccgagcacccagatttacgggcgtttggacgtcatctgtggtattgtggtaagctatatcccacgctgggggtctcgggtcaacatgcatttagaccagcgcccaggattcatagaggcgttacgcatccttccgaggccgagcgaatcacggatgagtaaacgaatatgtcgtcagctactatgctggcaggggtatgatatagactcgaaaatgaccacttagggaggggtatattacagccatagtacgtatcaccatgctacttccactaatcatacatatgccccgtatctgcccatgcgttctacatacgttaaagcccataaacacataataacagaaaggcggactattagaaactctagttgcagagtcgcatgcccagacattccactttcttcacttgttgtagccggcagacggcagctccgcaacaatattcccgtcatggctcatctcgacaggcggcggtgcctgcatttgtggtatatgaccgtactggtgattgtgggccatcgcagtctttaactgttccaattcacttctggcagatgttgctttctttctctcacaggcaccccaaatcaatgcagtgcccgcaaggatacccaatggaagaccgagacccaactcgaggcctagtttggtcgacttgtcatccgatttctccgagctttgtaacaaggtggtgttgctgttattacacacgggacaagtggaactgggagtgcttgaagat

SEQ ID NO: 15193 - DNA, 2217 bp, Emericella nidulans
ggcgcttttgttcttataaaaagggacaaattgtcagtgtaattaataattggaattagaaagaaagggaaaatcattgtttttgcacagtagccaaaaagaaaaattcactcaagttccagtcgaattattgtccgtaaaaaaatataagcaattatattctcggttgtcaacaacaacggtatgggcactgcatatggaggaaaaaccaacccctcaaaagcgacaattcttcttttctttgtggccttcaattggctgtcgcctatcttgagcacaagaacgctctcaattgtcccaaacggcgcgaacagtgccataagcctgtccttgccgagattcacgccccgtccctccctaacccagcgcactttcactgcgcgctcctgctcagggacatttgtgcccccttcatgcgacctatctacgcgcttcgagcttcgatcttgcgcgcgccgcttctcttcctcttcctcttgtatccgtttctcatcctcttcgacttctttccgtaacttctcctccgcctctctgcgtctccgccggccatcctctgcaatccgctcaatctctctcgccagcttctcttccgcatcattatcatcaaccgtagccccccacgccctcttcacccctctctgccctgcagttcccgaagcagcagctccagccctctccctagcttccagatcctccctcattttcctcttcgccgcatccatcagctcaacctccctcttcttacgctcccgagcctcccttgcattattgtacagcccccggactgcagggtcagaaaggacatcgttagcgatctgcaggaggtggaaccggtcgatatcggcttgcgtggggtttgtgatcttgtccgggtggtacttcagagccgtgcgacggtaggcgcgccgtatctcagattctgatgctgcgggggagatgtcgaggagggcgtaaaagtcgtgcgcatttgatgtcgcgtgggatttcaggtcgtccgttggcattttggtggttgtttggcaggattagtcttgttgatatatgggtagatgaaatgaacggaagataatgagagttctcgcggtgttccaaaactctagtcagattaattgagtatggggttgtgtgagtgagctgtttacaggttggatatggtgtgcctctgcgggctctgattgtggagtacataaatttatgctgacagtcctcatatgcactaaactattttagggtgactaggtatacctcgagctctactgcacaaacctgacatacaaacaatcgtcctatcatatccacattcaagctatatcagcgagctgaatattgacttctgtattgtgctcattacgcctcatggatattatatatttgttcctcgaatatgagcattctgaatttatggagtgttaatatatattcctggaagatgcttctcgagttatactacaggcaaagtgctgaattttcgtctttaccagtattagaagatatccccaaacggaaatgacgcgactcgtctgcagcttgtctatcactttgctacaggcttggtagttagacatgccactttggaggcgaggatctgagagctggagtcggctactcggctatatgcaacaaccggcaattccatcggagtttataagtcgagcaccgtccttgaattatattgcagtttcaaactactttcatccagtcagagccattgagaatgttcgccagggcttcttgtccccgttgcttatcgcagccggctatatcacgaagcgtgcggcgcttttcatgtgccgccgcacgaagaaatagcgacaaccagggccccttggctgggatcacggtagtcagtcttgaacaagcaattgccgccccattttgtacccggcaactggctgatatgggtgcgcgggtgatcaaaattgaacggccgggcgtgggcgattttgcccgtgggtacgatactcgagtaaacggactcgcatcgcatttcgtctggacgaatcgatcgaaggagagtctagcgttagatgtgaagaaccctgaagatcacgaagttttgatgcgacttgtcagcaaagcagatgtacttgtgcagaatctcgccccaggtgctagtgctagattaggcctttcattcgagacgctgaaagaagagcatccgtccctgattgtctgtgatatatccggatacggacaagatggtccgtacgagataaa

SEQ ID NO: 15194 - DNA, 3895 bp, Emericella nidulans
cgcacaatggccggttgcacgcaattttgatgggccacttcgacaatatatctcccattggctgtgattcacatcatgtgctccgtaagaaaggcccgtcagcctcatgtaagtggaaggatgctctgtgtgaggtgtctgatgcatattgcgcagttggaaggtcttgtgctgtgctgttaaatgtgcactccgaccgtcaggtagcgctcttctttcctccatcaccggggcgttactctatatctgtccggcagaatgaatgcaactctgattgatataccaagcccctcaggcgtggccacacgactgtcagaagggaatctaattgtgattacctgggttggtgctgggctcggggcactcttcacgttgcttcgtgtggccattcgtctcacgcggatgagacgtcttctgccagacgattattttatccttctagctttttcatttctcatcgcaaacgccgttcttcagaccatacagattcctcatctgtattatattatcctaaaccccactggaagcgatattgcgccccatgccctcaagtatgtgcactacatgtttgctattattgggctcttctggtccgtcctctggagtgtcaaggctgcctttctggcacttttctgggccatgacaaacaaccttcctcattatcgtcggtggtggtttggtattgtcatcttcacgtttgcgtcgtatgctgggtgttggtttgcgtctgccttcacttgccatcctccgtcaacatacttcaaatttggtgagtagcagtccgcgagatctctaaagaatagagtctgacagcccagctcaatgtgtgaaaccgatcgaccagaagggggccgagattgcgattatctacagcacggtggtggacatattgactgatcttatgagtacgcccagcgcccgattcgagcccctttttctgataatgacagtcatgggattcgcactcagcatcatctggtcaaccaatatcagccttcatcagaaagtcggtctagggactgtcttttctctaggccttgtcatcattgcattcgctgtggtccgagcaatcaacattaccggccgcagctactcggaccaggcagggctggcagtgtgggggattgccgagtcatccatctgtaagaatctagagtactttatctggaagtccttactgacgagaaagccgtaattgttggctgtcttccccctttcaagactttcctctctcgaagcagctccagccgcgcctctcgataccctcctatatactatcgctaccgccagaaacggtcggtcacgcaaacaacaatctcaagcgatatagcattaagacctctttctgagtccgttgatagagtcccaaagggagaaatacgcataacgcagggttttgtgagtggccagagtctaccggagagcatgcattctaatctgaacagggagttatacgggaagaacaggttgaggactgactgtaataattggaaatttattcaataatgttgataacccattgtaaactggacctaatcattgaggatataagacaatgcaggtctgcaatgtaatgcacgctcaaaatgcctttctatttctgaacccctaaccctgaacatcgtttacttgttgggtcccccaaatgcaataccagaaggtgtaggttcttagttatcggttgctgaagtttagggagatcagcgtcatctccgaattgctcagcaaggagccaccgtgatcgcgaagacgttgtccaaatgctgaccaggccgtatcttccgacataatccagacaccgccaggtattggcaaggcttgtcagccattgctcaagctgggataatctggggcccacaaaggcagtccggtatatgtggttaacccaaacccttgcaaggtactgtcgttttttgccggatccaatatacaatatgtttgtcgttcttcgccagccagattgagtcctctgagtgcaaacagccaccagcacgtaaagtccttcgcaaatcccgtaaggtagggcaggtgagatggccgtcgagacctggaagccgatctgggccgataatgcgctcgagctcgtcggaaaccctttttcgctgcggcaatttgggttgtacaaatcatcagaaatagtccgaggcaaaagcagacaagtcatgaagatcttgaacggctcactcattgtgttacaatatgctcccacgacatggaatctgcttgctccatcgcagatcgcccgagtctagttcaccggttccacagtgcgaccacctggttggctggcctcgatggcgtgtcatcctctcgtagaacagctggtatgcccttgacttccatgaaatcattgtcgaagtcactttatcgctggaatagcgcccctcgcttgtacctaccaaaacggtgcctggatcagtgctgaatgccagttcactcccttcaggcaagaaggcccagaataatttctctatattaccctcgaccgttggcgctcatccgctgtgacaatatcataagagtcgacccatctcggcgccttggcacttgtagatacgtcagcacgccttagacgactttggtgcaggtatatccaaagatttttcttgaggtgggaattatcgaccataagaaaggggcctagagtctctctgtatgggcgatgtgcggtctagatgtgttggtcttgccgtgatcgtcaggcagatcctaacatgcctccatgctagagatgaaaatgattgggaaaaccctatcgagaagaaacagaccacggggtcgtaatgtccatgcctttgctgaacctatgttatctcttgtctcattatcatatggacactgttgataattgggagcggcatagatcttgaggaggatacccgtggcggtattcgcgtctcgagaaggggtgtcggacgtaggccgtcgacaaaggaatgagggttgaaatgggaatgaacggtatgagcactagaatttcaaagggtagaacaacctgctgtgctcatggttagatttaagtacacactttaaaagaagcccggtgatgtctcccagctgccgtttcaatgccctcacaagtcttgtaccacagcctggcccgagctggtttcagatcagatagggcacctcattcaggctcgatcggggcatcgaagcctttgattgcctggctgtaggatttactttggtggtgtgatcggaaattttcatgcctagccttcgcgtaaccctttcatcatgacgtcgtacatttgacaattacagagtacatgtcctactccctacctctatggtcacttaagtgcatgtcaagctgcaagagaaagtgattctggtgaagcctaacgctctccaaagtccgcgcagcgtgtacgctggttcataaggtattgatcaagaaacactggaagactccacccatctcgtcttacaacattctgagaccctacgccaggaatcagtggacgataggcagaccatacgcatccgatgtcatgtctcgcttcttcacgccggcagcttccatgagcaacaggctgtacttgatccgctcagagcccttcattgtcacattgcgtcgttgccagccgagctcggtcggcatgcgttcgtttcctgaaaggtaggttggttagtatctgaacggccacatagattaggatcacgtacggaaccagtagtcaatgtatttcttgtccaccgtcccagtcgtcccatccgccatgatctcgaagaacgaggcgcactcgccccagctgaacccgtcggcaagcaaggacaactcgaactcagggttcgtcttcttggaggtagccaggcgtcccatccgagcctttgcaagctgctcgacagtgatcattgaggtggtaaagtacgaaatcgtcgcgctgta

SEQ ID NO: 15195 - DNA, 589 bp, Emericella nidulans
cctaagccaaccgatgtgtcactggattttacattttttggcactgctaagacctaaggatggggggaggtcatggtttttacctcaaacggctcactctaaacatggaattcgaacttatactacagtagagtggagtacatgtacatggcaggagagtgcactgatgactctatagaggaaaggtcatagcaaattgttacgactatgctggatcggaactgagccagactgtcaatgtgcgccaaacgggtgagaagatggcatggaatatcgcgttgggaggcctctgtgaacacggatttcttggcgagcgacactactgacggggttagtgagaggagcattctatggcactacatgggaggttatcgagcgaggtcagcaaaaggtacacgccttgagccgaagcgatatgatcagctgagacgacctactgggacgacatcattttttgaatttgactgacaacgaaggagaacccgcctctgatgcactaagtacacaaacggtagagtaagacacacttctttcgcgaatgtcggctattgatacgacaaaatacgcggactggggttgcaacaagtta

SEQ ID NO: 15196 - DNA, 1437 bp, Emericella nidulans
ctattctcttatctactagagaatactctcaccacagccaggcgacgttatacttcgcggggaaatctgtcattgctcaattctcttgctaaggggccagtttgcagacaaccagaagagatattcgaatctccactctgggaatggtttgagtcgggctgcgacaaacacgtgtcagtcgtcagagatgctgtttcagcacaaagagccggaaatcgcttgtggggatgtggagatgtctggggtagtggtgccaggcagggtacgaggtactttgcccttatcctaaacatgactttgcagttacatcatccggtggagggtaattgaaacttgaggttcgagaaaatggatattgactcttaaagcattctaatcctcgcatttctactagcatcagataattggataaaggaaccaatataccatgccaccctagaatgctactcatatgagcttacagcccctcgctatatacccgccatctccaagaataggcgttcctaaccgcatattactttagtataacggcttgcgtgccagtcaagtcagtgaagtagaccatgctaatacccccaaagggaaagttagtgtcatgctcggagagaaactagaatatgccggctgaactgcggaggaccactcgagtggcactgatatagaccaccaacgatgatgtagtgagtatgtggggtatttcgtagaatataaccgagttcagaaaacgtggtcggccttcctggagtcgggaccttgtaataatagccttcggttatcgagaggttggaactgggtcaggtcagaagtgtgagagacggaaaaatcagatggcgaatattatgtaccaacgtcactacccaggcaacggttatccttatcagccactgccacagcatgattaggagttttcattgtgagcgctgggtggttccattcacggcataacggcgctgccaatgaggagctttaccgagactcgatagaataggatatggcgttccaaatcgattctggcagtgcatgcgccatcagcataacgcgcgtcttccagctcggctgtgaccacagccctgacgatagtccaagccttacaactggagccattggaactgtgaacttggtagagatcgatgcttacttaagaatcttacattaactagttagttagcagttgacttatgcgcaagttgagtctcaattggaaacggggaatataactggtcttgcgagcgcccgacgccgccccaggcgtactgaaaatttaatgcgctgtaattgtacgtagtgttagacattggagttggccatggagttggtcttctaggcgccaggataaccaattgcctcgtttggcggttctgtagcatggccggcatcacacacccttcaccttacttgacccaggatcaaacaacgttaacgtctcatgaaactctc

SEQ ID NO: 15197 - DNA, 1981 bp, Emericella nidulans
aaccaacattaggtgacctttaaaatactggatctgctgattccgcgaaaagcaaggacaccgaaagggcctggaagatggatggctgggtacgctggcttgaaggtctacgagcaggttacgaacaacgcatgcagcagatgtgcagtggcctggaggagggtaaatatatcgcactccacactaggtcggatgagttctccttgagcgggaatgaagaagactcatgggaggtcttggaaaaagtacaaatgtacgacttcgcatggcccactggcggcatgttcgtctgggttaaagtaaactatgagagtcaccccttacgtcagatatatggacctgagaggctctccaaagcgctatgggtgcatttcacccaaaaaccacagctctgcctccttggtccaggcaccatattctcgccgacggacgaggtacaagctcgtggtcatcaatacttccggctgtgcttcgctgcaatgccggcagatgatgttgtccccatcactcaacgagtggtcgatggtttcagatcgttttggcagagaaagaacttagacggacttgaaggtgatgacggcattgcacaaacgatggagcagctgcagatggaaccatctgctaattttctgggaatgggctgttgattgaattcgctactgacgtacagttctcggcgttgggttatctttggtgcgaatatatgaacgtcaaattttgatggacttatggacaggcttgtagatgctgatagatttttttgacatcttaaatacagatgcttctctggaatcgatcaaagccgaattccatgcttcgcgattcaagttcaaactttatgcccaaattgtatattactaatcgtaacacatggcgagcagagatatgtactgcggggaataaatctccaactcctccaactacttctcagtcccacctccaacctgcctcaacaaacaatcagaagtacgttgttgatcttgaagaagccatagcgctcgagctgtttttgtaccagcattcgctgcacaattgagttgcaacaagccctgctaaagtgtttattgagctgagctcaacacaacacaaccgagaatgcccgacctccagctctccaacgcggaactcgccgacgaaattgaagctataaacgcaatatatgacccggagaccataacaatatcaaaaacatctacgtcttgcggcacctcaacgttagacttaggggcctcaagctcgagcgctccgacgacaggagagacagtcatcaaactccaagtaccaaaccacacgcatttgtccttccttcttgcctttgaatccgactatccggacacaccgccgaagattttggggaccgcatctacggccgctcgtggggaagggaaaattgccgtcgatgttctcaaggatatactaggacggatgtaccagcctggtgctgtgtgtcttttcgacgttattaatgaggcaatagaggcatttgaagaaccgaggattggaggaggtacaaatgacacgagtgcaagcacgacggacgcaaaaaccatcacggaggacccatctttcgacgctttggaaaatataaacgcaaacatgagctccctcgctctccacgagacctttggactttctgaacctccgccctgggttatgtcggaggtgattactgagaagaaatccgtgttcgtgggacgcgcagcgcacgttacgagtttggatcaggcaaaggcgtatttagattatctacttgcgagtgataaaaaggttgcgtctgcgacgcataatatcagtgcgtggcggatcaagcagcagagcaagccgcctgggaactccaactctaaagaaggaggaaaaggatcatcaaccgagatgataatgcaagacagcgaacgatgacggagaaaaagcccccccgggcgactgctccatctcatgcttatttggatgtgaggacgaagatgtcgttgtgaaaaaactg

SEQ ID NO: 15198 - DNA, 882 bp, Emericella nidulans
ttccacctaatgtggccctggctcggacatggttgagcacggcgctaccccttccatcactgtcgtcaggcccgtgagcttggatttcgaaggatgagtcttcccattcgctgcgctgggccccgcgtgcaaagctatccaggaaggcatggaaaaactcaagcgcgatggtattccaggattggacaaggagatgacgccgcagatgttgttccgggtgtgcgggttagatgagagcatcaaggtagatgcggcagcgggcggagcagctttcagcagcggagttgaactcaagtaaccacatatagccggatttcaaggcagctgtatgataagaaagattagaatctatagttgctttcttgaattacatctcgcagcgcttggtttgctggccaagcatatagttcttattgaatttgatcagaaagaacgccagcctttcagacttaaatgagggtggccatagttcaattcgcaacaaagactgatttgagtataaccgccattttgtgactgtccgagtccacgataaggcccgcaaagtgagacatgcacgggaccacggattttgaaatctgccttggggcgtgcatttcaccaaacaggaaggccccgcctacaattgtggggcttgggactgggattcagattggcactgtaaacctccccaggaaaccgatggtttggagaaacttccctaaggtgggaccccaaaaaagcccggagagcaaccttggcgtggagacatcttaaacgggaaagaaaacctgttattaagagcccgcttttttgtggaaaatttaaaccccaacccgggctgaaccccccgacggttttttccaccaaattgcctcttcccgggtctaaaattctttttaa

SEQ ID NO: 15199 - DNA, 2491 bp, Emericella nidulans
agaccaaccctgcgtatggcaaccctggcgtcgggtaccaggtcttctggcgacgtctcctcctcgtgctgataggagttgcagcagcgatcatcgtccagatactgcctcgtcccccatcagcagcacggcacgtttgcagctcgctttcacgttctcttcgcactctatcagatcactacgccctcctcctctcctgctggggtcgtgtcggcgacgagggcagagctattaccgagcctatctggctcgaactcaccgagtcactggtgctgctcgaagggccaatattcaatctccgttttgagttttccagttctcgcttcgactctgagagcctcggccaagtcaaacaaatctgccacactatcaacggtctcctcgctcgactgcttgttgcatcggcgtccctcccacaagcctacaaagaccgtctctccaaccacatgggtatgctcgaccatcgccgtatcggcgaaatcatggctgtgctcggcgtagccgagcagtcacttcgcaccggtgacgcgccccccgagatcctcccaacaccactggtccgacgcgcgctggagcactggcagacgcagacacttctggatgagtacgctgtattggatgcggagatgatccgtgatgagaactaccggagctactgcgttgcattggcggcgtacatttcgttcttaggcaaaatcgatgagttggtcttggtggttaagggagtgctgggggaggcccatttagtgagtcaggagctggtggatttagtataggtttagaatatacgtatattttattttaatggattattgataggcaaaatatacgcctattttaagtctcgaatgaggtatcttcatcgatttctagtgttgttcggaatggcagggcttgtctttcgggcatatgactacttaggagtctacagatttatgtccatcatataattataatgaatgtataacccattaatcaagccttcacagcttcgtccaggactcgcagtaatcaggcctcaacagtgctcaccctgagccaactgcccacattccacggtccgtgggacgttcatggttgacctacagttgcctaatagtctcattttcattttagggactacattataagtgcaatctcagttacagatttatatcgtatatcgtcagcaggcattgagatcaatttttgaagactaaatcaccagactttccttcaacttgtacttgagcggcttcccattactgcttttggggaactcctctacaaaccggatgttcttgcgcagccagtgcggctcactgagggtggcctctacatggcggttgagatcggccttcagcgcctcctcgtccagatcggccatagttctgggagagcgcacgatgaaagcatacggtcgctcgccagcgtcctcgtcgcggactccaacaacagctacttcagccacggccggatgcgccgccagatgtgattcgatctctaccggtgctacctggagtcccttgaccttcatgatatccttcttgcggtcaacaatatccaagtgaggagtaaccttgccgtcttggcctgtcagccggaagacagcgatatcgccagtgcggagccagccctgctcgtcaaagacttctcgggtggctgtctcctgtccgaggtaccccttcatgatgctgggcgatttcaggagcagctcgccgggttcattgtacgcctccacctcgttgccgtttgagttgatgagtcgcgcttcgacgcctggaacgagacagccgtctgcaccaggataggtgatgttagggtcggtgatggagataattacggcagtttcagtgagtcctttcacaacggtcagatatcgcacattcgttacctattatcataagcttaccgtatcctgggagcacttgccacgatggccgcacgcggctcagcgcctctgccaaccggggcccgaagggccctgagccggtcacgacggaagtgaccgaggaagtgtcgcagagatcgaggagaaagggattgttgacgagagcagagataatcggaggaactagatataggcgctcgattcggtacttttcgatcgacgccagagcggcttgcatatcgaagcgtgcatgcaggatataggtatccccccgccaggccgtcaagtgtgccaggatcagcccgtagctgtgactgagaggcagaaacccgagggcgacctcggtgcgccccttcttcgggccagcttcaaacgtggtcgcctgaatgatattggcaatgatgttgtaatgcgtgatcatggcgagtttcttcacagtcagcgcggattcatcgagccgcagttccaactaagcattacccgcagaccagatgtccagctagttggcaatacatatgccacttgctcctttccttgtccctccgcccaatctagtgcttcaattagcggtaaagtcgcgcctgcgctgatcaactgctccaatgtctgctggcactgatc

SEQ ID NO: 15200 - DNA, 1023 bp, Emericella nidulans
caggggggtcggcactaccaaacctctccccaacacctgcttcatccaccctgcatcactcaaaaccatccatctacccgtttatcttctcttgaaccacttgtctgtctgcaacaaaatgtcccccgctcacggatctccctccgagcggccttgacaacctccaggaagcctctcgctttcgacaggcgcggccccgcctgtgtcgccctcgaatctctcggcgacttgttacgcgcctgcggccaaaacccgacgcttgcggagattgcggacctggagaagaatgtcggcggcgacttcgactttgagtcctttttgaaagtcctgaaccgccctgggggctttagggagcccggtgagccggaggagtactgccgtggctttcaggtgttcgataaagatatgacgggggttatcggtgtggggcagttgcgttatagtacgttcttcctttttccccttcatggactgggagctcgggttgattcattgagttgggttggttgtatgttgctgacggtgtattcgacagtcttgacgaacttgggcgagaagatgaccgatgaagaggttgatgagcttctcaaggcggttgatactagctctggcgagatcaactataccggtatgttgtgttatgtccatgttgagaggatgtagtggtgctaatggtgtagatcttgttcgtaccatcctggccaactaaacgacacgatacccttacgtcctcatgatttgttatgatgttccactttcataatctattcgattatcgctccatgtatccacaaactgcttagcctagccatcgatcaatgcatacaccttcatcctaaatacgccgcccaagagaggtcatttgaaccagtgtccccactctcgatcaatcgctttcatcttctcctcatcactcatgatctccgtctccattagtgccccaggaagcaaataaacagctcggtccaccccttccccaccaagcgcgccggcgctatctaatccaggcccagccgccgcacc

SEQ ID NO: 15201 - DNA, 964 bp, Emericella nidulans
cgctctgacttgtgtcgccagcacacaggagaacactggggcatatgcgcccgtcgaccaagaaatgctaagaccaactgcgtgccggcacgggcgctaacacgacccgggccatagaagaccctcgaaccctatatagacacgatcataaatctatgctcggcgcagacccagcaaaatgctccgaccataatcagatggcggttcaaggctgaacccagcagggacagatgccacaggatgtgcgccttgccggctagcggaggagggcgtggtaacaacagaggcccagcaatcgaaagctccgggcgacctactgagaggacgctgctcaatgccaactgaaatcacacggaacttcttctgacacacggaaaccggtgtaccagcttgaacgtagatccgcctcgcccaaaattttctgaacaaataaccctacctttttattgcacccccctactatggcaaagaaatcctcctgggcgttactaactctgaccattggtcctaaacgcttacccagccggtgaccaagacggcctctgcccccccttaacccctcccataggcttgcaccactatccctcttcctaataagggtttgctttttattattaaaaaccccacatttcccaagaaaaagccatcccctctaaaggtctcatcgcacccgaccctaaaaataatttcccaaaacccccggcccccaggggcccccctttccagggttactttcccttcaacacccctctgcgccccccccccctaattaataaaatttaaacgctcctccccgcaataaacaccccaatcaaaatctttttcccccccttcagctggggtctccattgacccattggcacattccccaccccatatgtgtaacccccaagacccttttgcctcttcccacgtttttaaaaataaaaatttttctagaaaaaacaatcacccattccctccc

SEQ ID NO: 15202 - DNA, 3185 bp, Emericella nidulans
  unsure (1)..(3185): unsure at all n locations
caacgatgtaaggacgcaatatgcagaaagaaatacaggagaagataagcgtgaataaggagatggagaaacatagagggaagtagttctcgtgcacgcataggatatgactaggaacagcacaagaagaagaacagacctgaggcaaaaagatttgaaagcatagcaaaaggatattaaaaacccgcccaaaaaaaatgggggtgcaagagcatgccccccataccagatgcgattccaggtaacaagacaaaaaaatcccctaattccttccaacaaagcccggtttcttcccattcaaaatacccaactagtctgtcgcaccctttaactggtcaggatcatcagcccatggactaacgccccatagccatcaacaacttcgccattatatcagcaccgccgatcgggatcgaatatacgtcgtcgtcgatagagtggtctacgcaattcacatttcatcgcgaaagcgggagaccattgctgttatcccattcgagccgaagtgcctcgctgctggatatggctggatcggtatcggaggaaccaataatggcgagtgcgcttttgtgaagctttccgatcgcaatgtgcgtgcgtctcgagagacaccgggcagccaatcggtggatgtggacagcgccttgccaattgatctcgagccttctcagacgacctccccacgagcatcagcaggagctgaacagacaaactcggggtctggtgtcagccaactaccggaggttcaattgcataaatttggcggcagcattgtgaactctgtgnatcattcaccgtttaccagccgaggagaaagggtttttagacgaggacgttgcggtgctaaggtattgcggtcaatgtcaagctctaatgaatctcactaatatgtttgcagcaacaatgataagtccgtgacagtctattcattgacgcgctcaaaggttctgaaaaagctcagccacccggcatgtatgaattatgcaatcatttcaccggattcaagcatcttggctgctgttggtgacgaagctaacgcatatttttatggcctttctcgggatttctccaccgtggtttcgactgagaccggggagaagctgagtggctggacactggaccttcttctctgcattgagatggagattgggccgagaattgaagaccgttgttgtttcaccattgctttctcgcagtccaacagactttgtgccatcggctctcaatctggcgtgatcactattttcgacgttagaagcattcaagaacgtgccctagggccatctgaggagagtccaattgtctgttatttcaattcctcgcggccttgctgtaacggtggagctgtgcgctgtatgagtttttcgcctgaaccttgggacctccttgtgtggcttgaagataaagggcgtgctggaattgcagacgtgcgccaggcctttgtccgcagacagattattcagctagatatgaatgatcctgccgttgaggaagtcgatacagagccgattattgatgaatctacgagcttagggtttgacctcgattttcaaccttctcccgaaccacggcatgaccttgatgcacggggtcttcttgactccattgaagggtactcgggcgatcgggcgagtgacttcagtacctcgccattgcgagagagaatgatacatgatttaactgaaagggagaggttggtattggaattcctgaatacggcgcgctggtcgtcaagattcgaagatggcccgcctgaccggctggccagcggcagtgctaattcgcattcacattctggctctcgcgctagacatcaaggtcctacaagcggagctaatcgagcaccccgtcctacttcccctcgacctgtcatactctcgcacatcaatcatgacgcaagaaaccaagatgcaaatctggacgattcgacgcccgatccgcagccaagtatcacactgagctggaccgcttcgccaggagagctagagtccgccgcattggctaatcagacccatactacggattccagctcaagtgaccaaggtggctcaggtaatgagggaggaagtaccagtcggcatcgtgggaccctaacccgaccgtcggcaaattttaactattccagtatcccgttgttgtcggggagaaaccaccaacggtctcgctctgtccatagacgctccgagaggcaagataatagtatggacgttccccacaatctgagagccaacatcgtggccgtagagcggcttcgacgacagcggcagctcgattaacgaagcagagacgctaagccgaaacaacctacgtgagcagcgttatactcaacaatcctcgttcggctttgaccatagccgctccccacggtggattcgaaccgtcatcaacgatcttccagagcgcagttacgggattggacgccgagaccaggatcctagtagttctgctggacttggatttggggctgatgggagatcgctgtaagtagtggctgaccgatattttcacactggcgcggatgcactaacccgatatttagctatattgcaactgtgactggcatcttcgaataccagattaacataatggaccggaagacattcccagtgatcacgtataggtgatcagaaagaaaaagaaattgtggacccttgcggtccgacctattgcaggacacagccattctcaaaaggtgcaatggcatcaataaaagcagtttcacaaataatgacctattatcattgtcaggattgtccagttttgatgctatggcgaggaatcaaaaaccctccccgtcaacgagcaagcagttggtgctttggctactaatcataattattctaactgtccatatttctgtgcgtcattgaccataggcacattctggatcttctggagtctcatgtatagttgttagtttccaacctttaagtgcactcattggtggcgttagggatttatgttttgatttcataatctaatttactaccctctacacggtttctggaatgttataggaaccaattatagaacagtggataattgttcgctaccttgtagttaatcactctgccgtatagatcctgcggctgccgcagatggggctccacggccatggccaacgtcactttctgccggaaagctcttgtttctccccgccatgtcctcatccaaccttaacatgt

SEQ ID NO: 15203 - DNA, 482 bp, Emericella nidulans
gaccacggacgatcatgacccctaatggcatccatactatcaggagtttggattgctctcctgacttatggtatccgcggctcgtgggagggtgatcttttactgcgccataaacgttacatacctacttgtgctgtaacatatcccgctgaggatacataagcggggatccatattggctcagcgcctacatacggtactctatcttttatgccacctatggaccaccccggtggaatcagctaggggggatgtttatcgatcgccgctcgcctacatgcatactacggccaacttgtaaagagattatagcctcataccgaacggaattgagaatcggtattgaacaaaatgatactatggggtgggtaacggtggcgcactgttttccagatggggaccaattataaaggctaaccccacatcaacccaaggagcatgtcaaaaacgttatggcacggaacactggggggaagcccccc

SEQ ID NO: 15204 - DNA, 457 bp, Emericella nidulans
taaacaagcctgggccgatagacatcggttatgtttattttacgcacgctctaagggaggtctgttagttatctacctcttggattacgccctttctattatatgtggctcaaattaacaggatgtcagttaggaacgcaaatcttactgagctttgttatgatcctataccgtgtgcagaggacatgatgacaactactgcctgaggtgcccgctttcaccctttactacgtccctactaaaggggccatccttcaaccgcaatgggtgccgttcattggaagcctcatggaatactggtggcgacgccccattacggtgagccagctctgcagctgtccactgcaaaagaaagtctcttcaggcgccatttcactcactaattcccgaacctgccctatgggccatctcaaccggcctccgaatagaagaggccgtttcccttgaatctccatgc

SEQ ID NO: 15205 - DNA, 511 bp, Emericella nidulans
gagggtacccaccctttgacgaactaacacttaacacccgattattatcaatcctggcctggtgaaccatgaggcggccgttgggtcggaaccgtgtcttcaaatccaccgctgtggcaagctttatgacgaacgaggctacttctacaagcagggatataagacccttgataggatagagactgctgcaatccgtgcaacgaagcacgccgcgcatacgcgtcacaccaaatgctaagaaagacccaatgatgctctgctccggagatgagacgacacaagaggctacttagatgaaccaaatacctcatctaggttcgatacaggagctagataaccgagaccaagcgtgaattgcctgctgacgtaaaaatgcgagagtcacagcacgatatgtcgaataaagccgaccttcagcaagtccattatcgaactgttgaagaagaactagcctgggacggacagacatgaactgctgtagccaagagcgatcacacagacatatctatcg

SEQ ID NO: 15206 - DNA, 1890 bp, Emericella nidulans
agatgggccaaagtgccagcgtctagtgattctagcgataacaacatcatatggaggtgtgactacgacagtgtgaattggaacctgaaacctacaagaattcagtcgcaggatctgtcaagtcttcaacagcttcccgtcaggcatagtctgggtcggccgccccgagtggcccgcgactccgcaggctgtttcaccctttcagccacagtccactcgactcgtctcccttgttggcccagattccgatcgcggccatgatttgtttctagccggtactccagagttgatctggacggatttccctaccaaccagatggctctggtattcgaagtattctagagtagattgctgggaagtcgcaccatgtcgtgggtctccgcgactggcgcctggaccagtggatcgagtggtcaaacagggcccagtactctgtatggagagacgttgccgctgagacgtcgctcggtcactttattatatgcaatctatcactggcagcttgcagcttggcttcttcgacctccttctctttttctttttttcacctcagcgcctggttgtcaagttcaattctccagctttgagtgactggttcactgctgcccctttgcccacattctttttgttgcccgtcaacgccgacgatcgctactcgggagattcaatagagaaaaccttagaaagaagagatcgaccagaaagaagaaaggagacaacccttcaggtctacaactactttcgctcttttagacaatcattaggtcgctggattctggggattttggtcaatgatctgggtttctttgtgaacaacacattcagcccactcacaacccactcacaaccccattgtcatccctttctagcatctcccggtcgttcgctctttcaagatcgttgtgacagctacggtgacagcgaaacaattctgttgggtttgatacgctcattgaggatattccattgttcagagctggtctcgtcctccatatcctcgttctttgtcggtctttcggtatacaagctcgctttctctatctcgatttacaaccatggcttctacacttcttttcatgtccctggttggacactctttagcagcagatcttgagcggcgtcatggcgatgagaacccattctgggccgctctcaacgacgacctcgcccggtactctttgctggctcttggctgtttcgcagcatgcatgtatatgtggaagatgtggttccgcatcgccgcccatatgcggcggctggcaagtttcagcaatgaacgccagaactactttgtaccggcacacccaactctcgccaaaatcaagaagcatattgtctatgctccgctcttccgtaaccggcacaacagggagttccagctctcccgggctgtcaatatgggtactctgcccagccggttccacactttcatcattgtcggcattatcgccatgaatatcaccctctgctgcgtcactgtgccctacaagtcggagccggactctgtggcgggcgtcattctcagccgaacgggtgtgatggcgactgtcaatcttatcccgctcgttcttctggccggcagaaacaatccgctcatcacgctgctccaggtgccttacgacacctacaacctgatccaccgctggctggctaggatcgtagtttgtgaggctcttgcccatacttttgcctggctgatccccaaggctcaatcaagtatgtcttagctccagtgattctctcagtacattgctgatacctgatagtgggctgggaggcgatctcacagtcctttgcccatagtacattcatccagagcgggttgattgtaagctgaccctctttgtctctggagccttattgacattctcagggaacctgtgcctttg

SEQ ID NO: 15207 - DNA, 597 bp, Emericella nidulans
aacaaatcggtggggctgagacacccatgttataccactttctcacaaaggtgccatccatgggctgatgggtcctaatatactacctataactctttgagcatggcctaaggcaattgaagaactccagcttcttcgaacggtgtgctgtacttaacggcttgtaagataccaccctttacattgagctaagactgacggatactcccgagttcacacaaggggtaaggccattttgggaatgaaagctttgaatggcctggaagaacctgcgagcgtcttcttctgaggccacaactgacaccgctgtacaaacgcaatcctgaaatgttattattactatgcaagacatgatataagcggtctcttaatcagacgtgacaaattccttgctgggcctggccatgtggaaaggcgtacactcgtggatgtcaagatttctcttcaagaagtgattaggggttttctgctacttggagcgaaatgatgtccggacctccagggaggtccccacccttccaacgagggtgtggaagggtcttcaactaatctaattcttgatttactctgttccttgacaaagaccacttaaccgtt

SEQ ID NO: 15208 - DNA, 1412 bp, Emericella nidulans
tggcaacggagactgaggtggttgtgattgggacgacgaaggtgttgttccattttgtttgccttgctccgatgcttctctcccagcggaatctgcgtccttccgaccagctgtaaaattctgaccgtcattacttggtgctcgtcctgcattgtgtctaccaccacgacttggctgccttcgcagcctcccacgcccgtcagaaaattcccgagactgaggagactgcgagctgtgcatctgttgcgccatgttgagattcccggggcgatggggtgaaggccgctgaccgtcgttggtagagtcagtggaccatgacctgtcgactttcttcctcttgcctccggtacctggagccatggcagcttcttacaaagccaatgctcaggtacagaaccggtgtgctcccgacaggttgcgagtcattgggcgaacctagacgtgaggaaggttagctctcttgagcagcagccgagaggtcaaacgctcgagtccggtttgagattgcgactgcggaagggagacaacctgcagtagtataactaccttggtaggtataatgcgggatgaaaaagcgcgacgtctgggtgtcgggaattggctggccggggctcttccgacgtaataaaacagacaacatgaaggacgcgctaacaaggaatctagcgcttggcgcgattatctcgctaagcgcgtttgttagtgacctagtaggaactccattcccctgcatttatctatggtggtcgcatcatcataattcattcactatgcttcttatatcgatttagtacaaaaagaagctagctacctgtgtgcaaaaagcttcaggccaacccctgcgctttggcttcaatatcaacaatggatggaataagctccagcaagctaggtttgttcggtgaccaacccaagagctttttcccgcggtaagaccagccccttgaactgctaccccaggcatagagcccaaattcattaagcttctttacctcatcatcacttatgggttcgacgtctggcgaagggataagttttttctcataggcagccttcgcaatcgctctttggacatctccccagacgaaggggccgttttccgcaagatagtaccccttgtcattccaagtagccttaccacccccggctgctgccgcgtctcccaagcggcggtagaggtcgctcaaatcctgcacatgaatctggtgccagacattcttgccttctccaactaggaatcccttctttctcttaaggacggcggcggcaaaccagtacgcttggacgctcttctggtttccgggaccccggccaggaccgtagatcgtaggagggcagacaatggccactttgacagcgtccggggcgcgtcgtcccgcttcaataatgatcttatcgacatttcggtgcag

SEQ ID NO: 15209 - DNA, 4044 bp, Emericella nidulans
cagagttcgccgaaatattaggggtatacccagcttttttggccaaggcgagctccgaggcgtaccaagcatttcgactttttagtgcctctaattctttaaacaaggcctcctggtgggcagtcaaccgtggtgagcgaggttcgtctcctgtcctagagttcctatgggttcgcgagtcaactgatccgtcgatactcgcatgtctgccaagaatagactcatcggcgctatccattgaactacgctgtcgctggcgcagtgagcgttgccgagccggtgccacaagaggggcggcctctccggcctccatggcccttgccgacatcctctgggactgctgagtgggagtccgctgaccagtcgactcttgcgcaaacctagggtctttgggtgagtcccttggcgctggctccctctccctgtcaccggctatggcgcgagtcgtgtcaatggggggtccaccatatccacgctcctgttttgtcggcgtcttgcttcggaaattgttgccatctcgcggtgggttccctctcgggccaggggttggagcctgtcccggcggaggaggcccagcgggagcattagcaatggatgcccgtggcaatcgagatcctggtcccggacctagctccgtgggccggccagtaggactgaccacactttctcgaggtccctgggcgcgcctgaattgatctgacggctggttttgtgcttcacgggatactcgacctgatggcggcttttctccagctccggttttggtgggcccaggaaacattgctttctcaccatttggattttcggttgggtaccgaatcttcgatgtgtcaagcatatatgccatactgagctccactgggtctcttggggcagagctcggctcacccgccaggacaattatttgccttccaaaggcagtcatgctatgacctgatcgcggagagggtgctggtcccatgttctggaaagagtaccatcgtcgagtgctgatacggaaagcggcgagatcgccgaggtcgataccttcgtcggtccgtccaccaaagacgtacattacgtcgttgacgagagcagccgcgtgtccttctcgaggtgtcgggataaatccaacgcagtcaagctgagtccagctgttggtccgaggatcatatgaccaaacgtcgttgaaccattgtagaccgtttgtgcctccgaacctaccagtatgagcactgagacaagaagagacaagaagagaaagggatggctcaacttacaagtacaatttgtcattaaaactgacgatcgtgtgatttgttcttgcagggggaatttgaccaggtggaggtccgccttcatggctgttctgaataagaaactcccatttattacctggattctgcaactggttcagatcaaaggcaactaaatcattgaagaagtatccttcgacctgccctccaaaaacgtagagtctggagccaagaatgttcagagtgtgtccgtatcgtccagtgggcctagggccgggaggtattgagcgcgaccattgtcgggaggctatgatagtgacagttagcaactgctatgtagagcagagctgggagatatggcatacaagtatttagcaggtagagcgtgtcatccaacgtgtcattctcatccaccttggtatcaccgccaaagacgataaaagcatttccgactagcaagctcgcatgaccgacacgaggtcctggcccttccgaaacagttgcgatggggaagcacgacagatttccgctgctgctttccaacatccacagatctcccttgacagtcgaaccatctattaaccctcccatcatgtagatatcaccctctttcgaagccactgcgttgattgctgcgccatatcgcgggaaagggtttgcttgcggcgacgaaaagtttagccgacgttgcgaccacgggtacagggatgaaccgggactggagactggagacgtggattgttggggacgttgagcctataaatgttaatatacgtaaacaaatgccaatgcgcacggtcgtccagaggtggacaccgggtttataataatgtagggtacaaacctgagactcagactcggctcgttgccgcattcgctgctgttccgggctgttggtgctagttaccgagttcaaagaattattatagctaccgctaggcgtcggcgtctgcgatgtgaccaccccatccttcgacccgttcagcgtggctccagagcccgctggtgctccttcagaagtatggacgtttctcgtcgcgggtggcagaccagaagtctgctggttcttctttgatttaaagaggaacgccatcgtgaaatcttatatcgtatacggttcgtgtacagggcagagctggaatcgtaacagtgaagactgcaaaaatcccccttcaacgtctatcgtcaaggtctccgcaaattgcaatcccaatgggttgagattgagcgaaacaggggacacaaaaggagcgaagaatatgtgcgccaggcttgaaaatggtaaggaacggggtacgcagctaacgcgcgagttggaattaaaagttactattaacgagccgggcgggtgttgttgacgggcactcgggcaacggtgatgattcggccagttgatactcgagcgtgttcatccaagtactgacaattcaaagccgctcagcgtcaggcaaagactggctgtgggaactcctcgtcttgtgggagctaaattgtgtagcttcaattccagcgttcaaggggcatgggcggccgataatagcaaaaaaaataaaagagtagagaagcggaggaaaagaacgaaacgccccaggagcatagaaaggaaaacaggaaaggagacgacaagcagatccaatctctatcgcaaagggacgagggaggtcaagaaggacggacagatagttagggagctgagaaccagagcggaagaaggggcaggggaggacgtagcgaccccggcgtttcaaccacccagaagcggcttagataattctccctggctgtccgttaggggcaccgacaccgccaggatacccaatgagtatacacaaaatggctgcatttttcagtctcacttgagaaacgcgaaaaagcaaatagagtttcctttgctcaatcatgctaacatctagctttaaaggggtgaggcttccctctctattacggtctcctacatgctgccgaccaccatgcgctcaagaatctggaatcttggaacccagtatctattgcatatttgggtggaaacgttttccgcacggcagcgaacatcctctgccgttgtccatgtgtggaataattggggttacagcttggcttgattgttggtatctggactgtgaacatggctacctgataagttaaggtaggcgaggatcttgaactctccccagccactcctgggttttctccagacagtctcctaccgttttctcatggcattttgccgtgcctgacctggctaactctgtaccgcaccgatcttcatggcctcatcttattgttggtgccggcgccgttaagtgggcctgatggaatcagggaacaggttcggtataccacgtgatgctgatcttaacgcctcgaaccgccctgttaatcccaccagcactggatcttgtactctggagaataccttgtaccaattcattagatttgcgaatctacgaagtcagcaaaatcagcgcagattaatgatctttgatcagattgcactcgaatgcctaaaatagcattgatgaagtcatgccactggttcgtccgcttgtcccgatcaagctagtccattggggccgccaatctaacctcaaaggcatcaatttcgagggccaggaactcaagttactcaactctcgagtatccagatcacctgttggcctttgtaccaagatggtgcgaaaaataaaaatcaatgagacgtcatctcaccttgctggacgaccaagagactactagtcgccccctatcagcaaatgcacggtcccttttcaaggcttctccgacccgacgccttctctgatacgcgggg

SEQ ID NO: 15210 - DNA, 1604 bp, Emericella nidulans
ctagtcgtatgaaacacagtgagccggccagtgttgctgagacgatttcgaagtgtcccaaaggaacagtctgggcaggcgtcaggtttcgcctatgttctttcctgtgcggtgtatccgatttgattggacactttgatcgaagcagtacatcttcgtcattcttctttctgtctttgccgaatcccgcaaaagaatggcgtgctaacagcggcggtcgtgcctcggagctggctggttttgggggtccattcgcgaattccggcacggcggacacctccttttctttgtgtgtttgtttgaggatgttccgatctaactcctcagttgcatttgcgtcattcaatgagccatacggtaggtctgtttcaggaatattttcattaaaaaccgccttctggccccatggaacgttctccaggtccgtcgagtcccccggtacagcgagtgacgcccgctccattccataatgagtccgcagaatatggacagtattggcccaccaggcctcaaggcctggatcggcattaagttgtagcgtgagctcgtagaggttcggacttgggtaggccgggtcttccgccacaggcttgtggtctggcggcacaaaggcgctgttggaagcggaaggtatccctgggccagtctgcccttcgatcgggacatgcggcgatgcgacagcgccctttaatttatcggcgggcaaagtcagcttgaaggaaccattgtttagctgggagaagaacttctgtttcgtggtttgcgatggcatctctggaaacgggtaagacggtgttctatctggacaggcttcaggagttgtctgcgaatccgtgcctctaattgtgccgctgaaaccggttgaatcgggcgctcctgtaagggatggtacgacttgcggcgacaatacatttgagattcgtctcttcttggtcgactcctgggaaacggatggaacggaaccctgcgacggagcgttttcttgaggtactgaagcgccttggttctcggaatttcgcatctgctggtatgcaagcaaatcttccatctgccggcggagttctttcagggtcggctggctgcgaaccaggtcctcctcagatctgttccttgcatccaaattctctttcttggttgaggcaggtattcggcgatgattcgcggcctgttcgaacggggcagaataatgcggagcgttagctttccaactgtcatcttccaatccgtaaaagccaccagttgagtatgcgctttcatcgtgggcaaaactggagagtgtctgggaaaagaaacggtggtgggactgaggagcggcaacaggcgagggagcctgagccggagatggaagcggaggtgttctcatgctgtgaatatcgcccatgatgcacttcctcctaccgccgggcagtaattcaatgatcctgggcgaaaatccaagtccacaaaggtgaataacggactcatcgctcggacggaaaaggcccgcgatcagtgaggtaaggtcgggggaacgtcaaatcagaaaaggcagggtgacgcgattgggagatgaggaataggaagatatatcgtcctcctaagatgagatatgtgtatatataaat

SEQ ID NO: 15211 - DNA, 527 bp, Emericella nidulans
acaaccacccggtatgctgttatccatcgggccattgcagtgcgttatggtggattgagcccgaactacggcaaccggagggggagacctccctcaacggtctttacaccctgtacactttattactagcttaactcaatggagtcagtgtgactacgcatagctgacacttacttcttccgactaaggcttacatactgacaaaccgggagggtctaaacatgactataggacacgagctccaacccgcctatgtgccactgaggctcatacttgatattaatccttttacgttgcgaccacattaacgccctatatacctgggtgagaacgaatcaaacagcataaaacatgatcgagtcacggtaccctcagctgaagcgcagggcaacagagcgagtggttagaccaagcatgctagagaagtgcaagagcaataagcgttcgctagttgtactgaatgaaatcgggactaactacgcgccgaggatggaggccctaccaaaaagagtatgtgtcctcaatga

SEQ ID NO: 15212 - DNA, 444 bp, Emericella nidulans
acacgctcatcaaggtactgtaccactgtttactgcttgaatggggcatttaccggaccgggcaacgatgaacactcgcaaccttcgaataaaccccttttgggtctattgtaccttgcttcacaatgtatccagatgcaaaactgaagacaccaatcaagaagggcgtgctgggggcaaatgctgtcgcacttctttcccagtggggatgacgtaccggactccatgagctttgctatttacagctttaactcgaactctttgggaaagacgtatcctgtgcctgaactgcacttgaaactgccctaggtgcagagtagagcctgcctgacatatcggatcctgtgtggcgaaaaggacaaaacgttcgctgctgatgcgcacgggtcgccaatgccgtcttgcaagagggaccaacgacgcaagccacatgaggcgtcactg

SEQ ID NO: 15213 - DNA, 491 bp, Emericella nidulans
ccaccggattttactttgcgagaacgagtgaaggcgaacgaaaaagcgcccggagctgacgattttagggcgaggccggcccggaccaaccaaaaagacgcgacggagcccacaacgagagggcagagaaaccaccagcacacaggcccaagcacagcaggggcgaggacgccagaaggaaacacaacagcaacagacaccgaggacgggagccaccacgaacacgaagagaaaggagccgccgcggccgcaggcgacacacaccccagcaggaacgagcgcggaagacggaacgacggccgaggaacagcggaaagcagaagagggggggaccaacaacagagcgagagcacccggaggaggacaagcagctgccggaggggccgaggggcacaacaaaaacggcggaccaaccgcgccaggccaagcaggagccggagccggccccagggccaacgacaaagcaaaaggcagggccgaacacaaaccca

SEQ ID NO: 15214 - DNA, 732 bp, Emericella nidulans
gtaattcaacaacaaacaaaccaaactcctcaagtgccactgtcgcctcctgcccttgagaccgatcagcatcacccgctggctcggggaggcatccaatggtatatgcagccttttgatcctatgggaaccaccattcatgaggaacgatggacgggtcgggaggttatgcgtggcctaagtgaggaactcagcgaattggatgaggaggaactgaatgaccttgttgacgaggatgagttggaagaaaatgctactgggactggcgtgttcgccaaccgcgcgccagacagctcgcgcggagagcaaggggtgaaggtccatcggacgcggcgtagatggcgtggcttcaaatgatgtttgcttactagcagtgtttaatggcctcattatagcctctacatgttgagttgatttcgcttgaattacaacaggcaggcgttcaaggaagctttgcatttctagctctgataatatctattcaaggttatcccatgggatgaaagcaatagccaatctctttcctcggcctatctcaaatttttgacaatccttttacagccgtagctgacttggtagcctcgcttttctggcatccaatagcaataagagccgcgtgattctggaattcgctcaccgctttccagcctgaagtgccattcgtgctgctcccggctgctgattattgcctcctttcagcttatagatcagtttctccatcccttccttcat

SEQ ID NO: 15215 - DNA, 430 bp, Emericella nidulans
  unsure (1)..(430): unsure at all n locations
cggcaactatacccacccagtttggacttgagngaatggctagggtgatggaaatattatagcaaatccatcacataaatgtggatcaagagcgtatacacttcataacataatgaagctattttaaattatggcattctaatctaaccagtcctgaagaccgctcggcggcgtgggtaaacactgtgcgttcggctgtgaatcccagcctggctccttgccatattgggaatatcaagaccctgtgataccatctcgtattggagcgtattattggatgaccctggtgggcattgtaaagccaagcagcaaaaccggcgggcctctgtgggatttggtggatgtgagaatgggttcctgaccttctttacgggctactatgcattataaacaaacacgatcaggtctgttttatcccttgctaaacccc

SEQ ID NO: 15216 - DNA, 906 bp, Emericella nidulans
  unsure (1)..(906): unsure at all n locations
ggggaaaaaacaccggggaaaattaaaatggaaacgccaaaatagaaaccgacagcaaaagccaacaacgggcgaattgaaggggagaaccgggcaaaaaccaanaaaaggaaagaaaagacaacaccaggaacggaaccaaaagaaaccggaaactgaaaacccaaacaaaccacagggggacaaagagaaccccaagcactagcggagcgaagaacagggcaagctgacacagaaaagcgaagacgacagcaagggcgaagggcaccaatagcagagcaaaaacggcaaacaagaggaacatgccgagcaacagacaagcgcaagaagacggagagaagaaagcgccagagaacgagggaaaagaacaggcgagggaacgcacggagaagcaaggaagaagagagggcgtatagcaaggagaggaagagggggaacgaagaagacggaccaacaagggatgataagaaccccaaccacagaaaaacaaaagcgggagacatcaagacaaaaaagaagggaagaaagccaagaacgaggaagaagaggaaaaaaccaaagccacaacaaagaaggaagaggagccagaacaggacaaaacaccaaaaggggggaacggcaaaaggagacaacgaaagaaaaaaaggaaacaagacaagggccaaaaaaacgggggaaaaagaaaaagaaaaacaagggaaaaaccacacaaaaaaaccaaagaaaaccccggcccaaaaacgggaaaccccaagaacaaacaaaaaaaaggaggagaacacaaaaacacacgcgagggacaaaaaagaaaaaacccacgaagcaaaggaccacaaaacaaaaccgaggaagaacaaaaacgaaaaacaacaccgcaaacaaacaagggaaaaaaaaaacaaaaaa

SEQ ID NO: 15217 - DNA, 1195 bp, Emericella nidulans
ttaagaagttcgaaaaggagaaccttttccaactcacttgcgcggatgtggtggagcggtttcaactatggctcatgcttacgataattgcgtcgcgaaatatagtcgaaactggtgcgttcagttttgggggcaatttgatcagtacaagcgtgagtggcacgtcttctgcaacaaacagcacgctgctgtcgacacccccaaggtcgtcgacctcaatccttccgcaggcgttcactttcgttccatcgtctcttatggcctcctttagccacgtcaattcttttctgccggcgctggcccaggtacttggtccgttcctgatagttctgggttcggaaatgtttgtcgactggctcaaacatgcatacatcagcaaattcaacaacacccgacccgcgatctacggtcggttcctagacatcctcgccaaggactattataccaacgcctttggtgaccagaacttgatgcgccgtataggccttcctattatcccactctcatgccttttcttccgcgtctctgtacagacatatcagatgttcttggctgcactgctccctcaacctccccccctgtcgccttcctcatccattgctgttgagaccacatctctcgcagccattcatagtcagtatgtgccggctggcccggtaccctcgccgcctccaattaccttaagaacggttttcccagcaacagcagctcatgccgaagcatggtttcgacgagtgctagccaacacaatgccatcagctgatcactccgtttacatcttcacagttgttctggttcttaccggtttcgtccttctgctgattctcaagctccttcttggcatgcttcttctgacctgtgcgcgatcccgctacaagtcgatgaagcagcgggaggcagaacacgcagccgcagcttcatcttctgccattcccactgcctcagaccaccatggacccccgcgtgcacgagactacacggtagacggcgctcgacgtgttggtggctggggtacagttgaagtcaacgaagacagccggcggtggatctaccttgacgacccagaaagtctacgcaagctgaaagagaaggaaaaggcgagtcaaaagggtaagggtgtgtacggggatgatttgcatctagatcatgtccaacgatatgagatggtcgcaaagaggatttggtaacctggcgt

SEQ ID NO: 15218 - DNA, 928 bp, Emericella nidulans
  unsure (1)..(928): unsure at all n locations
gcggggaaagagcacaggaaatggcaaataggcgcaaacagtgaaaacgccccggaaagccacaaacgagcgcgnactaggagagaaccaccgggagagcacgcacacaaaagaaccccagaagaccaaaaacagcacaaagagcccgcagcaacaacgaagagcaaaaaacccgaccgacaaccggcgcaggggagacgcaacgaacaagccagccaaggcacggaaagacggagaccgcagaccgaacccggcaaaacgagcggaagaacgagaagaaagagcgccagccacgaggcaaggacacagaacgcaacgacgccaagaccgacgaaaagacagcggcccgacccacgaacgaaggacaaccccggcggcaaaaacacagggagcaaaaaccaaacgcgggcgacagaaccaacacccggagcaagcggaccggaggcaacagggacacacggggcaggagaaggcgacaagacggaacaaccccaaaggacggcgggacggcggaacacccaaagacaagcccaaaagcccacagacgccaagcgaaaaaaggacgcgaagagacagaacaagggaaagaaagaacaaaacagccaccagaaaagagaaaggcgcccggcgggaagaacaaaacgcaagcgacacacccccaaaagaaccacgggaaccggccaaggggaagcgcaaggacgaaacaagcaagaagaaacaagagaaaagagagagagaacacagagccacagcgcaaaaagaggaagaaggaccaaacagaaacgaccaaaaacaaaccggaaaacaagaaggggcgcgcaacgacacggaaaaacaagaggaacagccacccaagaccgcgcccacccacgggaaaccaacagaaagcaccacacaaaaacaccaagacaaccaagacgcaaccgga

SEQ ID NO: 15219 - DNA, 2999 bp, Emericella nidulans
cttgccgccagaagtgttcactttcactccgcccgaatctccaaattacggtacagcaagcaagcctgccagcccgcgatctctcacgccgagctccgaagacgagatgctacctttgtcatcatccaaacgaccactggaaaacattcttgagcattcgggcctcccccttctcactgatgccggcacatgctctttctcctctgtttcaagttcaagcagccatgcactatcttctccgcacaccgcgcctaccctaagcgacccttcgcaaccatccgatctcgatatcttcatcaacagtgaaccttcctctgcctttggcaaacaagatttcggcttgggtgattcggacatggctgcattcccagactacgtcaacggctctgcgtttgacagcagcttggatttgctccaagggaagaatttctccacagggccctctatgggcgatgacttcttttccttccagttccaagtcgacgaacaagcgtcggacgtcatgtcaagggagtttttcctcgactaaactgaataatcgacggaaatgactttatagagacttcacgacgcgacgtacctcgggataattaatggctaatgtgcaacgccccttcaccacttcacgactcaagattatcaacgactggaacccttgcttaacgcaacgatctgaccttcaacctcacgatatgagatcatgtacaattctagcaatcgcgatttataacgacaaatatgttttgacacaaatgacttaaagaatgacttttttttactcccggggcatttcgttctttctccgttcgttccttgccttgcttgcatggcctgattcatggcatatgtacgaccatccatccacttcttcagctgggacctctgcttctgatcctactgcgactgcaactgcaaaatagatcggcgttttcttacacttgctttgtcatccattttcttctgtattacaggccgtcccttcttttccttcgtgctttatgcttaagtgtcaacgaatcagattcgactccaaatctgaatcttctgcctatgcctgtcacatctcacccaacctgacaaccgatgtatgatgtttacgtttttgctgtgtttttgctatgtttccaagatgattttcgtgcttacccatggaattgaggcgtcggactgactcggctggatgctttcaatatctggcgtttctctcttggtcttgctctcaatccttgtgatctgttgacttaaagtgatattcaaaatcgtttgattattttgctggcctgtactttactgtctatctagtcaatgaaagatctgaatgatgacgtattttattagtctgttatgtggatatatgtattggttagttttggccttggccaattctcaagtctaagctaagcaccaaatagataatagcttttcatacccaaacgcttaggaaagcagatatatactcatctaacaataatctattatgatactcatcctctccatgcgatagacagctcaatgggatggtccgcctccgagacgaagatgtcactctgcactttaccctttggcgctttatctgcgaagaaggtcgtgtttccgtggtaggagagcttgccatcctcggcctaaatagtcatgttagttgcctaatgatgttgctgccgtaaggggctagagattaatcttacgctgaactccgcagggcttgagatataagaaccgcaggtgaaaatatcgtccttgaatgcacagggtcctttgcgagatgagagcgtaaatgtgtctcctgaaaatggatgaggtgcattagtgtcacgtcttccctctcggcggggagggggagggaaacaaaccagacgccctcttcgctctgaaatcagcacacgtgccggacgaataccacgttccgcgaccgattatgcagccgcgctgctgacccatggtagaaacaaccaggttcccttttccaataaagggggcacctgtcggcccatgggggtgccgggttttggtgggttcatggccgtgtccggggtccttgttaggggtctttggctggtatattatgcctttggctgggcagttggatgtctggccatctgtttcattatcagcagggtgagatagacgacgtgagaaactgaagtcgggtgtgaatgaacgaacctggttcagatggcacgaatttccctgtttggaggggtccctctacgttgaagaagtaccagacttcttgcagccgttgagatcgacaccgcactgtgactgttgcaccgtgcgctttagagagggcatcctcgacttcatgccgggtgtaggtctgagtgtacgacgggacgatgccagcattggcgagagtctaacgttttagtaaagttgtgattactcggttcgtatgatggaggaacgaaccatgtaagtaggaaggtcatgaaacaactcaacggtcttgtcaaagtaatcaacaacttcttgttgtgggtagtactcggagtagcagtgcgtctctaaggtactaacgcaagtgccgtgcttgttccactcgtgctcccagaggttcgggtcgtcgcctctgtagtctttccagtatgtactcatctcgtctagcaggtcccttcgacccgcatcgattagtatcaaggagatgttgctgtacttcctatgagagtcacaaaactggtcgaagccgccgttgcaatgatctggcctttgtcataatcagtttggcaagttcactggcatgttaccctccagaaagcctggctcaccatagcccatggattgtccaagaattctcaggtccaactgctggatccgcatcccagaattgtgtctgcagcatctgcccaccgctggtagttgaaacaacaggtatcttgaccgtggtaactagtctggcagctcagctcgagtttgccacattgttggaatgtgcttcctgaagacgcaatttctggatgtgaaagcggcgaaggcctagtgagccggcatggtttggagga

SEQ ID NO: 15220 - DNA, 1991 bp, Emericella nidulans
aaggtccttcttggtaatcgctctcagtgctttaccggcttttgctgcaagtaaactccaacatgttcgaagaaaggtaagaatttggctgctgtgacggctaacctaacagcttctcaagaatagctgggctcgttgttacattttgtctatgttgaaagtagtatatatacctattagccatcgcccctccaaacatgcacacgttaatagtgcacgaaatctcaaaaaccatccttatctacgtaccaacacagtctgcgttgcgcttagcaatatggaactgatattttttccccctcggggactagaattgagagcaagctgcttattgccattgcgtcctatatgccggaacgtttttttccagcctcctgcagcgccaggtgattccaaataacgcgggaagctacactgcgtaccatgcagctcatctccgcggtctggcaatgggtactcctattcctttcaccctcgctagaggaataaatacagcccacggccagggagccatctcattcacctcggactacatctgcagtagccgctcagtggcccttatagagtctgccacatcttcctcgtgacctcttagattgatgcctatagcagggtccagtgccatacaggtactcgtactagtactcaatgcttaagcctgcacagacgcaaaacattgcgagattagcgtcgtagaaaaacagcagacttgagaaaagtgaccgtaatatgtagccgcaaactgtgcatttccttccgcacctaaaatgagagtttggtagcggctagttcgttcaggatggcatagagtccctaatttggcgcctgtagtgataccgctagtaggagagaaaccgggtgatttggatcctagagggatgagggagcggaactgtagactgggatatctggtttaagtggtagcgttgcgtgaagggttcttttgtggaatatagaaaaagaaacgtttttgcttagggctacagaagagaagtgagaagatgagcattatatatattgtcgattagtgcaggtattattaggcagtatcagtctgtcgagaatcttgaatgctcgtccgtaggctcaaaaagcctgtacaaaccccccagtggctgtacctacgtccggcgactttggtatagttcctggagaaaccaaggggcaatctattatcattcttttggtaatgatgtgataggaactatgaatccctgacgatgagcttgtgggcctattgatgacgcaatgtagagattagatgagtatgccccaagctaggcaatacgaaattaaggctagtgtgtgctgcaggtacgtagaattgagccattggatgcgctgacaccggcgccggttcaagatatcgtagcgggttactttgatcgctgtatatccgactacaactgtcaaatatattattgagagatgatatagtgaagctccttaattggcatgggattcattcatgtataggatatggtcttttgtaaattgatgctggcgcctgacccgaactcacgccatgcttcgctgcagaaaagcagccacaggcgctggatcaaccagccacggcgaatgaccggtggcgatgctctccgtggtaatctgagcgcccctttcacgggctttttctatcatcagctgctggacgcagaggggaatggcacggtcgttctcgcacatgagataggcgcccgggatgcgggtgtaggcggcgctggtggctggcgagaccttggtcgcccaagcgtgcggacgaagggcctcggcccattgttccccatcagggacgtcgtggaagaagagggtataggggttgacggcgctgacggtgcgtttggcttcctggggttgagtgagatggcgatcacaggagggaggagaaataactttagagaacttacatcgcggtcataccagtcgggaggaaccccgccaaaggccccgatcaggctctcgcagacgtcgggtataaaggctgagatgaa

SEQ ID NO: 15221 - DNA, 3034 bp, Emericella nidulans
tttttgatatggtggtgggttccgcttcggaaacgaaagtaagatatggctcaggtgtttgacccaaggccggttctcaaacaatgggaaagggggtgcaataaacacgtgcaaaaattcacttttcacaataatggaaaggtattattccgccgtgctatacgccgtattgtctaaaacgtcctctttgagtggacttgttctctagtctccagtaagtttcgcagacgttagttaaagggagttggttgtctcgaaaatgtccttgtcggttgtcaaacaattggatcgtccgttcgttttcgttattagtactggcgtgctaggtttgagaaatgtctatatggtcaggtgcaagttaatcaaagagctcatggcaaacccggtccattcgccataaggatagtactttattgcgactccacatcacaagccattcaggcgaacgtggttgttagatgatgccgatgtgttggcctttttttttttattattattattaaaatgccttgtcgcttggaagcagtcttggctgttacccagagccatgaacccagcgtggccgagactatcagttcgagtgctgactttgttattctctcaactaaaataggatctaggctgctatttagtaggcttgccttgagtaaatggggtaccagagccaggtttggtcggaatgccctacggaaatagttttcagtcgtaactgcaggctcagccagtataatggaggtaagtcccgtgatttttgattctccataatacgtcggtggccttgggcaattgttaggcttgggacgaagacagggtgaatgaagatggtaaggcaacgaatctgcgttggcccagatagccaggaccaccttggctacccagtgtccacctagggcttccggggtttggggtcaagcagaaggccgccaggcccagcaggatcgattaaagtgccacagcacgtggaacccaagcagatcgtcgaatcctggcccgcgtggtcggagacacaagcgaatcaagatgagtcaattcagaatcaggagtcaataggactcacgaagctaccaaagcggctgaatccccttcgttgatggcggcgagacgctctaaaaagtcgttccttgtcatcgccaataaattcgatgatcaaatacgcgcgccttctggcgacattcgtgtatgttatgtccagtatttgtcgtaattgaaataacagtattggatcaatcagattgatccgaaagcgaggatggaccacggtcataggtccgttcggaaacgcagcgccgagaaacggcccccatcattagcccactgacctatggagtatagactggcgaagccgcggccgccataagactgggggcggttgggcggcttctccagtggagaagagtatgagacccaaaaaaataatcaatcaaggcactaatcgggtccagacaaaagagccgataagctcgattagtgggccacgtaacgaatttccagtgatatctccagttgtctacgacgtgctagtcacctgtcactgtcagcacaagaaacccgtacaacacttgccgtcagtcaatctaattgactttcattgacttcgtttcattaagtggttatccatagtgccttgtaggtagaactcttgtcaagaatggagttagttagtatcgcaatgaatcctgagccagaattcgagtggaagcttcatggagatggactcttcaagtcctattcgtccagtcattgattctagttgatctttaccctagcgatccaagtcattcgcctagtcctgaactccggtaagttgtcgcgctttggatattcagcccacgctgaaaattgaaaaaggggtgaaaactaagtgtgtgtggaaaaacctcgtctgacagcctccgccccgggcgcttccacgagaaatccctggccaatatgctggcgttgaaacatgcgaaccggccatgtgatatcgtattcgtgcacgagagatattttaaacctcaaaactcaaggcgttcaagctgtcagaaaagcttttaggcggggtgcatcactatgatgaggcctgtgcattatttgactcttggggaactctccagaaagctgtcggctttttctgtttggttaccgtctcgcttcgcgtcacgagcgaaaaaggagaaatgataaccaaagcggctgccgagtcagcgttaaactagccagtgtggctggctagcgctaagtttgggggccaaacgccgcagccaaaagttctgatgcggcctgcagctaggggaaaaccaaagccagttttatgactgccaggcgacaagtgtcggcgccttacgactcttcccaccagtatcccaggcacttaccagcagtggagagccagtccaatcacctcagccaagtttcagccaaccgattccttgttccgagcacaggtctcgttaattcaactgtcgggttgcttatcgccatgtggccagatcgcgcaccgcattttccgtcacacggcgatcttgtacaactccgcgagccccgttgtaatcaggcatcatcagtcaggcgctttgcatatgtggtagacctcgggaagctctttcctttcacaaacagaggactgacatggttagtccacttgccaagccttgcatagagtaggaaaactagagaaagacatggagcaaaccaagggagaggaagtgggagtacctttagagctaaaagcaaaaagcaaaataaaaagtaaaaaagcaaacgaaaaaaaagaaaaaagaaaaaagaaaaaaggaagaacagcatcggtaaacggctatcggtgtacggcggagagaacatggaaggaaaagggttagatccagcgaccagtgggtctagatacttgttctggggctgaaaagacatagtgagatcatgttcttcgtaggaaatttcgtctgttccatgatataggcactgggccggggattcggggagctctaaaagcctagcaggggagctcacttccccgggtctcccaagctctagggatcagattcatagccttgtc

SEQ ID NO: 15222 - DNA, 1070 bp, Emericella nidulans
  unsure (1)..(1070): unsure at all n locations
cgaaaagctggctgtacaaagatcccgaatagaattatagagcaatattatctcattcaatgaatatcatccatgtagcaatgatgatcgacacgcagtatgcacctcaataccgagcgacggctacttgcgcggacatagcaggtaagtgagctgaaggctaacctcggctgcggttggaagcgggacaattgaatagtctgccgtacatcataggtggtcggcgtcggcaggtcgcagggcggagagcgctgactgttttctgccccggtcaccgtccgatcgactgtcctcctccctcaagaccttcagtccccgcagtcttgaagtcgattgtcctttccccccgtgcgaaacacgtcttaactcacataatcatcatggccagtggactacggatcctcgtccccgtcaagagggtgattgactacgcggtgagttttgctctacatgatttggattggattatgagctccgttctcggctcggcgcaagttcagcacatgtctttccaaacagtcgtttgattgctgaaactcggctatcttcattctaccacccattttcctagtataatgtgctgacttgtaacttaagataaaaccccgcatcaacaaaacacgcacgggcgtcgaaacagccggcgtcaagcattcgctcaaccccttcgacgagctttccattgaagaagccatccgcctgcgcgacgcaaaggccctctgaaagttgacaacatccttgccctctccgctggtggccccaaatgcgttgatactctgcgcaccgccatggctatgggcgccgaccgcgcattccacattgacgtccctgacagcaatgacggcgggctggagctctcaccgtcgcaaagacactcaaggctgttgtggagaaggagaatattaaccttgtcatcctgggaaagcaggcgatcgacggagatcagggacagacggggcagatgcttgctggattgttggggtggcgcacgacngcaggcgagtcgagttgaggtaaaggatgagcaggggactgttgaggtggaacatgaagtcgacggtggtgttgag

SEQ ID NO: 15223 - DNA, 2377 bp, Emericella nidulans
gtgttgcctgaagcctgacgagcgactagacgtgtctgccttgactgccttgactccacctgtagagtatagagacgcgtgcaatgccttctgagtgcagatgaggcgaccagtctcagggacatgaaggcttgggaagtggtctgtgcctgagcgaaaactgctgatatggcatactggaatttggcagcagtctgggacggagtgaaaaaccgggcctgtcagagactgcgaaggtcagagctcaaagtactccgcaaggttgaaaggagataacgcaagcgcacctgaccagaccagacgagcagatctatggggaaaggctcaccgccttcccaaacaccgtctggatcatggtctcaccaccaaccagtctgatcgcgaatttgctgggaatcgaggagagagactgacggatttcaacctagatgatcctgttgttgatttgggaatttcaaacattggttgtggttggtttagactagcccgactctagcaggagtagagacaagagcatggcggaaggctgcacttgaccagggccccatcgagtcaagtcaccagtgtgcgtcacagacccttccgcaggcctggacttactcacctctctcttcctctctttgccgctctttcacacctctttatttcctccctttcatttcttccttactcggtctccctctctcctcattctgtcagcgacatctcagacgccgccgtgctgatcatgactccttgaattgctgatctctccggacctgatccccgtccgttatctggagccgctgtcagtgcggagaagctcccaagggttgtctagaccaacctcaccaacaccttgttgcctggacacagcaaacaatgatatcgctgcctgctatctagagcctcaaacgtgatccagctcgtgctttttgcttgactcatcattgagttctttatctgggggttccactgcatatcgacctatcttgtgcctctattgcgtccgtgagcatggccatccacaacggctacgtcgttcccccgtttccttcctgattcagatacgccctacgaccccgccgttctatttggatcgtactgccggatatcaccagcctagattcttgatatctctccttaagccatgcatcaacaaccgcggtcgcccgctccggcggcgtctacctcatcggctcggcggtcccaggattacgatcgccgttctgattcaccagccttcgaccttcggacgcatacaaatagagggttgggaattgaaactgagaatgatactgccgaacccgaacaaagctcacagcccggaccggaagctatcagcaaggtgaaccagattgtcacggtatggcccatatctcttgttgccggagcggttaagaggttccaaaaaacatgggatctatcttctaacgttattgcagaactatcatacgaaggctgctctcatcatcctccattcccgtgtcgaacttcccccgtcttatgctaagaactccaacgtacctcgagtgaatcgctgggtatatttcgccgccttgtactgctgctttagaatgattctggctgacatgacctgtgcatagtttaatgtcgagctggaagagacggatgcgttaaaggatcaactcaagacctggagaacatgcgatgccacagacaaccgaccgccgccaatgatcatcgagacgtacttggatacggcagggctcacaaataatcagacacttgtggctttggatgataatgggaaacgttgggatgtgacggaatcgcttgctgcgtcccagagctcgcgaccggctaaagcttcttcatccagagcggtagatgtgatattggagcgatggcgagtagaattgggcgatatgcctggtaaattgcccagtgatcttggcgctatcctgccgacggtatacaagaagagtatcatcctcttccggtctctctttacatattcaaagtttcttccggcttggaagtttattaaacgcaacggtcgatcacgagcacaccctgcgctcagggtcaaatatcggatattcagcggtcatgcccgggatctgtctaaacaggatcacttaactatgcccttgttcgagggcgatacgaaagtggttgacacttacagctttggcgtcacggattctcctgctggcccgttctctgtgcaagtgacgtataggacatgctgcgacttccgcgtcgacgactctgaggctcttctaagctcccagttcatgggagctgacgatgagatcttccaaccgtcgttaccatccgggggtctggacgctagagtaacgccggaagttggatcggcaccgctcacaagaagaactgtggaagatccagaccttagtcgggcatacggcag

SEQ ID NO: 15224 - DNA, 4078 bp, Emericella nidulans
  unsure (1)..(4078): unsure at all n locations
agaaaagacctgggggtgatcgattaatagccgtcgctttgcagccgagcacttgtcacgttcagcggaccgtgcaactgctctggctgctcgggatagccccaaatctcgtctcgatggcttgcgctctgctcgtttgaacggcttcatggaaggctttggtatcatctctcttcgcctgaaggagatgtatcagatgatcaccatgggaggaaatgccgagctagagctagtggactctcttgacccgttctcggagggtatcttgttctcagttatgccacccaagaagagctggaagaacattggtaacctgtctggtggcgagaagacactctccagtctggcactggtctttgctttacatcactacaagcccacgccgctgtacgttatggacgagatcgatgccgcgctagatttccggaacgtgagtacttacgatagttgtcttttctggtctcgactgactcccacatcaggtttctattgtggcgtcctacatcaaggagagaaccaagaatgcgcagttcgtggttatttcgctgcgaaacaacatggtaagtcccagccaggccattaccgtctgtccacggcctttgttgacttagtgcacttagttcgaacttgcatctcgcctcgttggtgtctacaaggtcaaccacatgaccaagagcgtgacaatcgaaaacaaagattatatcacggaccggtaatcgtcaatgatttgtagatgctgcatctttttatcctccctatactacgtcacggacgggtacggacggtgcttcttggtttggttagagtcatgctttttatctctttctttgcgtgtcaatcttcggtagcaggtattgggaatggtatgatgaccttcttggagaacttctttgatttttcacttctcggtatatactacatagcttctgactgttggcgttcatgatatgacttggcttctgcgattcaaaactttcaaggtcacatggcgaaaccacgtatacctagctaatcattgtaaaagccttataagattgtccaattcgacttttagcagctgagcagacaaggttatctgttcagtggagctccgaacgtactcactaaccttatcatccacaccggctgataaaggaggcgccaaggtacccatttcgtggatcctcactttagcaagggtacttagggctgggctgggctattatatgcaagataagctttgggctatcgattaggctatagaactagaccaaggaccctcgactatagctgagcgtcgaggctccaatggtacaggttcgccaggtatgaagttccaagctgggcccataaatactgtacataatctagtgcatgatttattatgtagtctagtattatgttagtcgtgagctggggtgttatcatagattagagtatatacggagtctagatatgcattctgtatacctagttctagaaaaatgttgtacgcaaaactacatttatcgagcttaggatgacggagttacagagaccacagcaggtgagggaagcatttaaggagtcgaagcaactgattaaactgagcatgaaaacccgcaaaaacccgtaggtaaacatgaatgaaaccctgggtatccctagaaatacacgtatccatacaaagacataaacagaacaagatagcctttgaacaagataaagcgtcgcaatagcgcggttttcatcgcgtcgtaacgacattggcaggagtcaaatggcaggcgacccatcttagctgttatgctcgtcctcgaaattcattaaaaagaagttaggtcgggtctcctgtcttaggatagcaacaaagactaaggagatgcagtcccagcgcttgcccactcagatgcgaaagagtaaagaaatagaagaaaccggaaaagcgcttgctataatacatccgaactccgttccaggtctttagagacgccgtagtctatgttgatatcatgcgtaacagcaggaaaacagaataaacgcgcaaatatcctccaagagtgctgaaagtacaagattgcgtataatagatgaaatgggtcgtaaactcgcgatagttcaggtcgcggcttttgggagttgtggtaggcggtatcgtggattcgacaaaagctcgttaggcaatgacagaccgtcgtggtgcgatgggaatgggcttcggaccggatgatatctcaagtttcgacagaccgagatcgccaccatcgcgtttctgcacgctctctttttgttttccaacggacgtcgatgacacagagcgacgacggcccatgtcttcctcttcattaactgtgctacagatgaagcgttcttcagaaactggtggagctccgaacatggaaccaagttgctgcagcaaagctacaaagcttccatgaatttctgcaaagagatatgtattgcccacgatttccgtcaggtttctggctctgacctggccagggcggcgaacgtgcccgtccggatcgacggcgcgtccggtgagaaatgatgagacaggggtatactgccggttaccaggccggttagccacgttgttctgctcatcccgtcgcttctcgtcctcttgaaacttctctgcggcattgtaaattgaagtagcgatgcgatcgaaagcgcgccagattattgggcaagcacggaacgctctgcgcgcatccttgccagctagggctacgagcgcatagctgcgtcgtttgccgcgtgccattgggtcggggagtcgaaagatgtaggcaattgtgtaaccggcattggagtcaccaaagcacaagggaccagaggaaagcccgcgcgggagaagctcacagctaagggttctgatggaggagcgccggagaagggcatagtcggcggggtttggtgggcccctgagagagaggtaggtgaggatgtggtggtggcaggaaatatccgaagccacagacgatgagtgaagagagtcggggagagaaccatgtatgtgagcatcgtgcgcactgtcgtccaaatcggaatgatttgtgccgcacgagtagacgacttccctggagcgcagaacaggactaccatttttgcctttcccgtcgccgcgcgcggtccccggtgccccaggaggtagctgtttgcttacatcctcgggcaaggtcaagctacagcttgcgcaggtgtcaccgtctgcgccgcctaagatgttgagtttctgagtctcagtcgcattggacggacttttcacaaagcaaggatagtcttcgatcctgtgcggagtgtcggcattgtcgacttgcttcgctggtgatttgacggacggcgattgtttaccgctggcattcgtgctgcgaaggccatgagaggagacggtgtcgtgggatgtcgcgggggtgtcttcagaggaggatgttgtgttctcgggatagcattgcgagcaggaaaaagggaggacctgcgagcatatgatcgacgtaggaccatgtacctcgcagaaatgcgtcaaagaaagctatgggtagggaaaatcggttagcccatcaagccgtaacacatgcccggagtcttggaaagcaggtctcggggagtacaagagcatgctccggtggtacgcagccatcctggggctgtatctctgcaccgggatcactgaaccatgatggccgaaccggctgtaaagcaggatcccgcagaaaccacagaaactgcagaaaccgcagatccgcaaaaagggaggcagagaaatgcgcaacgttgacgcaagggtatggtatagcggtatggcaacccaggaaaacaatacagaccgagggggcaaccaaaacaacaaagaaaagaagagaacactcacaatgaaatccatatcaactgcagattaacgtctaacacagtccagcaacaagattataccatagtcgtgatgcatgctttctaagacgtcgttggagagctgggttgcgccggtggctcgtggttctgggcgaaggttcaagaagtggcaatgacgcagtgttgaggatagcgcgagaacaggacgagaacggagcgaacaaaagcgagcagcgcntggaaggttcagaggaagaggaagaat

SEQ ID NO: 15225 - DNA, 4924 bp, Emericella nidulans
catccattctgaccaggccatgctcagggccacaactccgtctctttccactcacccttctctgcatcaacaagcgcccaattcgtcctccgcacatcatccgggttcgaaaagtccagcctctctatctcctgtggacaaatgagcagaacccgaaagttcgccctcgcaacttcgtccttcaggtcctcaacctgctggttcagcttcagtcgcgggtcagatggggcctccgatcgcggcgttccaggaggggggctcttgaatgtccctaagcaggttaacctttagtaacaatgtccataactaaaaacgatgaagccagacctctcataacttgactatggtttgcaaagtacgtcgcgacctgcctatcccaatcccaatctttgatgtcgccctccccctcctgcttgaccctcagcgccatcctaaccgtctccctcgcctccttctcctcagcaccgtttccaggattgccgatcgcgattgccttcccgcgaacccgccactgcgtagacacctcctcgagccagaacacgccttcaacatcatctgagtccgcgatctgtcccatcttcttcattcgggcgtctgttgtgatagagaaaaggtcgctttcgtacacatctggattgagaccaattccctgggtcttgagtgcttcgatgccagattggtgcagtgttgacgcgggcttggggaagaagcctcggaattcgacagtgcgcgagcgagggacgggcttattggccgtcgtatgtgcgatcgacgccagggagaaggaggatgacttgctcttttcgaggctcgcgaggaaaagagcgcgccatggggctacggcaggggccatattgtctggcgttgaggtgcgctgagtgcggggttgggggtttggacaaagatttcctggtaagatgtgcttttatctatatgagtgcaatgaatgagtaattggtctttgggcaaagagtggggagaagacgaatggtttccggtttcctttttccagaagttcaagcgattcactctggttgacttcgaggttgcgcgtttctttaaatttggagatgacgtcgggcttatcttatctgataccgcacgagacagtatgcgtaccgcttgcgaagtacatttgatttatcgataatccatgaatatcggtacctgccttccattcatgatgttcatgatcaacgtcaaaaagcagtcaggagtggtttcaagaaaaactcctaaacattcgagtgtcggtggatctgtacctggagaaagtgggacctgttgggcgatatgctagacatatttttgcgacgcttcgtacgccagagaatatatagtcgggggaagatccaaaaacaagggttgcttaaccaagaaagtagatggttgatagtcaagtaataagatgaacatcgggcttggtcatggtatacccactgcaggatcgagagcacaagggaaccataattgcaaatagtaagttctaaccgatatcatgccagatcagtcaacgccgtaaagaagcaaagatagtacaacatccgaaacccaggattatgccacatagcaaaacaaggtatcatattacccaagatcaccatatcaagcacccagcatcaacacagcaaacacatcatagctgcatctgatccccatcgtttcccgccccatcaagcgcaccccctggtatccgcccttcatttagttccctctccaaccgcgtaatctcttgcaagctcttcgcctcccgaatcatcttctcaatccgcttcctctcgctatccgtcagcttcacccgcaggcgcttctcgggcggcggttggtctgccgcgccgccagacggaatatcaaaggtgcgtgatttcacgcctagaattttcgatgcaagcgcagtcggctccgtagccgtgccgaagagctctgctgccttagctctttccgcatctttcactttctggtagtcgaggaagcggacgctgggaatccgccagattatccaaagccggtaatactatcgaccagacaaatccgtcagctctaacacatatcttgcgcgtgcacgtatgaatcagagaaataaacaccgcgaccactcacctccttcctcgtaactggattctccaacagcaccaaatgcgtcaacttcgtcagattccgcagcggatctaggtccgccaactcagctatgttgtttgctgtcaggacaagtgtcgtcaagcccgggattgaattcgcaaggcttggctggatctgccgcacccggtttctggcaaggagaagcatgcgcagccgcgggaagaacgggaagttgcctagcgaggagatgtcgttgtctgtgaagtcgattgcatcttggtcctggggcagactgcgtcagaacctgatcttttttgaattgggccttacaaatgagggaagaggtggagagaggtaagtaccttcgcaatacctaaattttcaatcgcgggaatcttgtgccctatacaacgccgacgacaaaggtccatatcaatccagctctcaaagtgtagtacctgtccttttcaggtactttgtgtggaacgcacctcgaagatctagctcgcgatccttgagcgggttgatgtaggatagagagttctgaatcaactcaaccgtgaggcgcatagtgacggaattatgagcggttcataaacggagcaaggcggttgaattgaaaagagtgaatctcgagggatgataaagaattataaagtgcaatcgtggtaatgtgaacggcagaatgaacttcgcgtcgatttctggagagctcagagagaattctgcccggcggtgagacatcaggtcctgtagctaccacgtgacttgataccctaaccgccataatatgataaccagtgcagctataggagacggtatttaaaacgtttaaggactctcagagcgtgctttaccatagctatctgtggatactgatagctacctagtcttttttctatcatatcaaagagacaactatgccgttgcgtccaggccgccacaactgggagaaactctggacttagtgggcagactagaaattagccgaatcgttctcatacaggaatatactccaaatggtggagtacggctaagcaggtaaaagctaagggatattcgatatatacagacacttgacttatgatgagatactgaatggatacaggctcggaatgagagagcgctgcccgtcggataatatattagcaatagatacatatggtttatagaaacagtcagccgaggagagaaaggcacgatggtggttagaggggtgagagattggttgtggcgattaaagtgtgctgaatcggaagagaaggaaagagaggctataggatttctaccgtcaaaagaaagtcttaaagagtagttgcaagcaaatgtggacatttaaaataaagtcataagtatttggttattttgtatttatttgacaatgatttggccaggatcatgacgcgcctacctagctaaaagaagtcacataacctacaatcaactccaagtgtccaagagacagaaatgagcaatattgcgccgataaaaatgtatgcctgagtacatgtggagtgaaacagatgaacgccggccacactaatgcctgtgtggtactaaatgatcagcaatgccggaaacgccatatggtatgctataatgctcaatatcagacattaacattaatcatgtaatggtgtcgcgctaggcgacttatgagaatgcgagcgtgacggactgggtgccctggaccggcgcccgtttgtcgtcggggcctaatgcaatcggagctaggtggtccctgctttccgtccttacgacaaggccattacggtcaatggaggaaagcccgggtgcggcactgatacccagaccgacggtcgccgaagaggagttatcgtggttgaagtgagggcgtgcgggactgctctgtccccagctagatgttcgtttcggtggcaaaaatgctgtagagtcggtatctgaaacgtgatcgtatgaggaacggcttgattcagagcccccaagctcgatgtcttgagctccttcttccaagatacgctcataagacggcgcccgttgaccaaagaatgacggcttgatgggggcggatgccttgcgctttctttgctggatcaagcgcggaccgcgtccgcaactgaacaggttgttgaccttgtggtaaacctttagtcgccgggtccgaccacagagcaagaacaaggctagaatgataattaggacaaagaggatgattcctggtatcctacgcgatgagttgccctccagaagcgcatcctgccatgactcgccatgaagggtctccggattaggcagcaattctgcactagggtattggaaatcactaggaacgccggcaacgttgctgccgaaaccgacaggaagggattctgctgtctccacaggaacctgcgatgcagcatacaaaaccatcttgccaagagtccagctgacttcggtagaatcaattttgttaaccgcttggaaaggatctaggaagcctttgtgcatcccattctccagaacttctttggttccgttgacagaagacgctgatgttgattccaagccaacacggggaaccccgatgccatcgtgcaaaacgttgatgatccacgatgccttgaagcatacttcatatgctagttcgcgatccaacttctttccccacttgtgttcggcaataccttgctcgatagactcccagtcctgcgagcaaaactcctcgacgcggtgttgatatgtattgaagtcgtatgctttatccgtatgacccatttcgaatacctcatgtgctagtatgccagtactcactgatgccaacaaaatggttgacgtcaaagtcaattgctggaacgtgaacgccgttaagtagacaaggttg

SEQ ID NO: 15226 - DNA, 2919 bp, Emericella nidulans
ttgatggcagagaagcgcaaacagctgaagatgctcctgttgcagtcaccgacttctacgaagaggaaaacgaggccgtacagcatagcgtgtccccggcggcaagtcttcctgatcaagcctcccataacagcatgtatggcctccaaaacatgatatcccacgaggatgaagccgactacgtgccaagcaatgttctggagcagagactcgcccaggaagatctgcaagcacaaatatcagaattgtctgagaagttattagccacagatttggacaaaactaacctttcgctcaaaaaaatgggtaaggccaagcaaaagcgtgctaagaaggccaaagtggcaacccaaagctctcaattgcacgagtgcactatctgcaacgcttcctttgcatcccgaaataagctcttctcccatataaaatcgcattcacagcgataacgccattttctggtagatacaggcaagacagtcctgcatctaccagagaacggcgtaatgataccggtattatggttatctctatacttcccaatcgcaaaggatgtcttcaaaggctgtcgctacacgcgatcgcctcccaggccagcttttgagttcttcaccacatgtgcaaccggcaaaagaatgcctttgttgttggcagcgccaagtgccgtgcccgtactccaccccattttctctagcattgccctgcctttgttctcagcgcctatttccggtgctgaagcgccaactacatcgccgtccatgtaggaaacattgcctttgccgcgcttatttttgcctgatcgaccgcttgctttgtcccatgccttcaatgcgcgagaactgaacctctcctttgagaatacccggtctaactgtgagattgtcttgttagtatactttggtgtccgtgatgtctttgacaagacagggaagcgagaagagccctttccccgcgattgggaggacagatgcaaagcatgtgccatgtcgtggacaagtattctgcggtgctttgtcatcgggggaagtgataagctgtaccctatttagatccagaatcgtccataagcaggtgagagtacctacctattcttcggggacagcaggaacaaacgtatctcagattttagctcttcaatatttataccatccgcatacttgattttcagatccgggtcattcctgcggcgacccagtagtccttggacacgaagctcttctcgttctcttttcttcatttttttctttagccggtcattgttccaggtatttatcaacccatcttccagctcggagtccaggccatcaaaaacaggatggtcgataaagttcttgttcttgttcttgttcttgttcctttttaaactcgatcgactgaaatccataacatcgagcccgtaatatggatcctgttccaacgcatccgcgaaagcagtggccgaggcgaatatcgtcttctctggttttctgcgagcagactgcgacggatttgcgagaacatatatcgtatcatcctctagctcctctgatgacgactcattagaatcaacctcctctgagtcacacgttgaaccctgcgaatgatttgctgttggctcatcctcctccgtagtgccatcatcgtcagagtcgtcagccatgtgagcaatatagtcggccagaatctcatcctcatcagatggttcagggtgagctttagcagcagtgccaccaacccgtatccaacttgtaagttcccgttcctcgtagatagtagacgcactgctacaacgcatcgtataagcctcctcccgctcccccagagggattttctcgtcaagtgtgttgagggggttgttacaggaatccaaaactggcttcctcctcctgcctttaaaaacgatttcgtcttcacttgaatctccggttgtacagggccgtagcaaaataggggcatttgcactagtcgttttaatggtttgactggctgggtttgagtccaatctatcatcataaactttgcttgtgacagacccggacaccatctcatccgtcgattcttccttcgctggaatggcttcgactaacgagtcaagcctgggttcagagaccggttcaagactacctgcgctcacaaaatgaaccatttgatggcgaagttggacattcgagcgccatagatttcgaccttccgtgtttcgtgcttcttgctgcattgaaagctggctctgtcctggaatctcgcccaattagtatactcggtagtgattatttctggaatagtgaatgcaaacctctcgtttggtttttactagcccttcttgctcttgctttattcgagcgagccattgccgcggttcactaggcaagtccagcttgagccccaagatgtcagaatggcgagataacagtcacggaagaagctagtccacggtgatcgtcaaactgatgaattgctgcaccacttcaagtcacggtgcaggggagaaacgctcagtatcagtagctatagtgttgagacacttatgttattcctcggtatgcggttttaaggttgtttatttgaaagccaatgtgcaccgtcggttgatgcccggaggtggcaatatctcatactctgtgcaagaggtctcaccgccttacgaaccgcttgctatccaaatcatgctcttatgttttggctttctccagaactgacctaatatcaaggcagtcgttcacccatagtcatttgtccctgatgttcacattgctccactcataacgatctcatataccttactaggtgatacttaaaaaaattattaagaaatcactaatccaatatgatcttagttaaacaagaggttatggaatcatgtacacctattttgcagtcactttggttcatataaataggatagtggccagtcagttaccatcaccacatatatataatcatagc

SEQ ID NO: 15227 - DNA, 4868 bp, Emericella nidulans
tataaaaaaaaaaaaaaaataatttttgtttttacggtcccacccgctttaggggggccgtgttttgaaaaacctttgggcgcccctaacttaaaaccgggttgggaaagttaaaaaagaaccaggttggggataaaagggatggctaaattcagtcggccgaacccaaagatcgtcaaaaaggtctaacggctcaatcggggctttttataaattaactggggccggatagaacaccggggttatgggctgatcaaccggtcaagtcgtcttcaaagtcgcaacatcttgttgatgtttatgctaacttttctgtgagttaagcgtcccttttcatttataatggttgtgctaagattgaacaggatgttcaaggtttcaggaaatcgtcaaaatctataactgcaggttttttgtttagtgtatcctagtaccgttgtgcaagaggacatgattgaacgaagctcagctgcctgtagggctagtcgccgtcttctcccacccttctactactgtgccctactggaaatggtgggccatcctctcaaaccgcaaatgtgtgttgtcagttttcaattgtgaagccctcaatggagattacttggctggccgacagcccccaatcacggcgtcgagcacgagctctgcaagcatgtcccacttgcagaagaagaaaggtacatcattccaggggcgcacgatctcgcagccaaactaaattaccacagaaacgctgtcgccatattgtggccgatacatcaaacgcggacattccggaaactaggagagcgaggccacagattcgcacctcgggagactcctccgcaattgccggcgctgagaagccgagacactttctcgcattgtccaccggaatctcgcgggtagaacggtttgtgggagacctcaaccctgaagctgccattcgagagaaagtagatgcaccaaatggagcctttcaccgagatcgagttggcctctggatcagcaaccatggagaaaacccgaaccgaagttcccatgcaaccagtgtcggagcaactatttctgagcgcagccggtcgcctccctgttacaccgacggtatacatctgcgttgaaggcctgtgatcgcctccctcgctcgacttctgaacccctcgcctcaatctatttctccagagtcaatcacatcttgcctattgttgatcacgaactgttcgccggcgaatacttgaacggagcagcatctgtattcctcgaaagggcgatatgcctggtggctgcgaaagacaaaaccgctagccctcatctacgtttgacagctggaggtgctctcaatactgcacggaaattctgctctgaagtatatggtggacttgtctgcgctatggaagctgggcttgaacaagacagggttactagaatccgtatcctcgccttaatgtccctacatttcgaagggtacgaaggtgctgaggcagcgtcgatgcatctttgtcaggctatacatcaagctcaaacgttaggtttgcacctcgaaagacctaagcttgcaccagatgattctttgacaactctcttttggtgtttgtggtcgttagacaagatgcatgcctccataggtgcccggcccgtccttctggctgacagagatatcggcatcaggaggcatgacagtgctgcacgtcaatcaaaatctgctttcgacgcttggttcgcgctttctgaattgttatcgaaagtgatttcattctatagaccaaccgctgatgatacaactgggtgggaaacagagtatccgagcttcgaagagataatcggtaattctatccaaggacagatagatttcgcgacacttggtgcgtccgcgaatgttcctggcgcatggcattgcggcgagcttactgcgtattaggaatactggaactttattaccatgtgatcagtattctatcatgcagatgcagatcatctcaacatctcagcggctcccgaccatcacgaacccgtcagggtctagccgctgtacggataaattctttggtggcgtctgaatgtgctcaaggcttgcctccccttccggttattccgtacgcagtgtccctatcgatgagcgtctcttaccaagagctccgttccagcacgcttattacccagttcaaccgtgccaaagctagtcttgaagcttgctgcaatatgctcgaggagttggtgtcttggtgctcagcggaagcaatggcacggctcggcagaaaagcactgcgtcaaatcgacggaataagttttgcaaccgatatgttatcagtgtcggacaatggcggaggtaagaaccccaacaggactactgcaagcgcagcagaccttggaatatcaaaggccagtatgccgtcgtcatcctcgttcgacacccatcaaccctcaaacgacaacttgctagccgtgacagacccggaacaacatgtaatcccactagtcgacgaacaacaagcctatttacagggtccgactagcggcgacgggtttgccgatattgatatgctgtttgacgattttttagatctgtccttaccgacaaacttctgggatcccattttcgtttcatcggaatacagcaatgatgtttgatagatgaatattcaatccagaattgcgagcaatttttgtgagaaatcatggaccatctggttacgattctgttttcgagcccaggttccaactccaaagtcatgcttaaaaaccttatttacactgcaaagaactgacaaatttgaagttggtcttttgcaaacaatggcagcatgagcctgtgctgctgatgattttcttgggttttctttcatccattaccgcttcaaagctacaagggatccacaatcattccacaaccgttccgttgccataatgctcattttaaacagtagtggtccaaagcacaaagaaaggggctcctgaaggtctttatgaaggctcattgaaggaattggtcccactcaaggtctagattcaatgaagttcaacctccgtcgccgcttaccaacactttgatacagggcggccgaagcatggaaacttctcaaatcactgggtactttattatgattttgtgcttgacgtagaacagcagaataacctaagaatatctcggcagataatatattgccataatctacggggtatagttgtattaggggttgacatcttcccgaggataatcaaaagtcattttcccggtcccggtagactagaattgatagtccacattccaggttagcaggcgatcaagccttgctctcgatgctgattggccagggtcaatgtttattgcatttggcgtgcacatggcttcttagtattatttgactccccactcttctgacttcaactctcgtaaataagtttcggttcaggccccaaaccaaatattcctcctaatcatttttaatttccttcttatccagctttcttattattcttcgatcttggtctccagagacaatccttatacattctacttcggttctgcaaggttcacgaagaaacgcgctgagtccttaacacgactcctttttagtttgatttcttgggcgttctgcatttccagcgcgtcgctatacttgggcagggctttgatccttgtcgcctagcggtgaattatgtccctacaagccacaaaccctgatggagtttaaaatcacgcagttttattggcatttcgcctatgcaatagtagctagctgagctgcttgtttgttggctgtcgttagtttacccggtgttacacagtatatgcagattggtttgcaacgcaaggcacgctgcagcactcttgttgccgttctatttacatcctgaattcttgatggagaatacatgtgacagcccaggactatcctccacttccgccaacacggaggtagagctgcagtccgagtctagtgacggaacccagggtcacggccatccgctgccagagcacccaattcagcaactgcaaggtgcattcatagaatcgatccatgaggctctccatggagaaacaaaagactgggttgttgatctggacgcacaatcgcggcgcagagaactactcgagaacgctgagtatgagcgtctctgtggcagaaagtggcggcagaggactgatgaaaggtagctactccatactcccactctagatcattgccaatctaacgtcaaaagataccatccattctggaaactaatcgcacagatgtcatttggtctacatctgttggtacaagggacagctaaatcaaatgcagcagttgtgaatatccttcaagttcatgtggacgagatggatggatttatctcgagaacgagggaggattttcttatcatacaactcgacctacgcactcgtatccagtacctcagcttacctctcgagagcctggaccatttcgacgaaatgctagcagatcgcagctttcgcttcgctatgatcgattacaatgcgaagatagagctcgcaattgaaaggttcaccttagcgattggcgattctctccgtgacttacagaaaggcagggaagcagtgggggcgctatggcagtatcttggacaatccgccaaggacaatgccccgttatcgggcagtttgaccactatatacaattctatgctggcgaatactgaaggctggaactcggccttttgtaggctccgcagaacggggcatgctctccaatatgctatcactcagctcggccgagccgtgactgagctgcagcgacgcgtgggcgtagcgagcagaagggaagcggtcagtatatatgtccgctctttacattatccttttcgaatgttcttcttgattttgacctcaatacaggcgtcatttgtgcagccacatcgacccattt

SEQ ID NO: 15228 - DNA, 1510 bp, Emericella nidulans
aaaagtagataaagccactgcctgtcccttgatattcttgtttcagacacttgagcgtcctctgtattttcaagtactcttatctgacaatcccttcgttttccaatcaagccgaattccctacatgccattctcgaagcattggcactgacaaagaaagcaccgtatttgaacctccattgtttagataacttctctataattgattaagagcgcgctaaaagaagccatacaaaataataaacctccgtctccaagtcagaacttctgctctagttctgttctagttctgtcctagttctcatacctttgcccgtggttttctactagataacttggctgctacgtgtttgcaaaacatagaagacttccgctgtggagggaaagtttatggatatccggaatgtgagattaatactatttccttaatactttcacaaaaaagatcatgctactacttggcatgttttattggtcctagcatcccacactatcccattctgtcgacactccctagtcccaaccatgaccagctcccagcttcttattacgagcacagaggggagccaaaatcagtaggtttatgaccagtactttgaggatcatgtacatgatgacgatgaaggttttctgtcattttctacatactctgatgctaccgaccatctaaaccgggaacctcaccgtagatgaaggagatgcaggccccttgacttggtttgcattattactagacgaaacatgggcaattcgcctgagtcagaaaggccgccactgaaaacatagtcataaaggatatctcgtttatgcacgtggcaagcaaaagggttttccaaattggcggaggaccgcatttgactaccttgctccttaactgacggccactctagctcttgttagacccgattctaccacggcatatccttaattcagctaaggctcggtactaaaagcaatttaacagccaggttagagcccctgagcccaaaatgctcagtggaaccgaagttctttgcagtcggaaggtcacgctcggtctggttctgtaactgaccgccaggcctctaatgacggtactcgcgtgagttatgcaatttctacagcagcgtgggcacgatggtagcaatatccagcccaatggtcacataacaaagcctacgctgtgtcatcgatctattgttctgcatatctgaagatatacgtcccacaccctaccaaatccgggcttaaagatgattgagtccatcacatcgattataggatgacacgaattgggcattttacattacatgtcaatccccggataacatgacaacgtggcttactctatatcaaatggatggatacggccaaagacggtcgagttgtcgagcgggtgaatgagccaatgggccaatggatggtatgcagttggccgccgtcaggattatgctgccgctgattctgataaaactggggagaatactgaaaagagggattagaactatgactggtagacatagttatctgg

SEQ ID NO: 15229 - DNA, 940 bp, Emericella nidulans
  unsure (1)..(940): unsure at all n locations
ggacccnggcccaagagcgagatttcgncttacaggcagaaagtgatcagccnaccgaacggaccccgccgtgggcggttggaggaggcagcccgcagcgaccccgagacgcaacacgcagaaaccaacaccagcccagcgccaagacacgaggcaccncgcagggaagagaacgcggcaaacaagagagcaaagcaaggagaggcccggcagaaaaaccacccggccaaacgcacagggagagcagaagccacggagaggcgcagacaggaaggccaaagngcccnaaacacgagccaggacggcagagggaggacccacaacaaccgaccggaagaaaagacacccacgcggggaagaacacanggagcgagccccccacaancaaccanaancnccggcagcacgacccgcnccagaaacaaaaccggccggcgagaaacgcggcgagaaaagcggggagagacacagcnacgaacggcggcaaggcgggcccgcanccaccgaggcccaaccgagccaggaaccggaaagaagaaccccaaggaggcagaggaaagggcccagcgaccggaggggaaaaccccgccgaacccccaaagggcccaaaccccacgcngcacaagggaaacaaagccccaacggccagaagccagaaacgcccgccgcgaaaggcccaaaaagcaagnacaccggggcgacccaccacagaaaacgaccgcccccggccgggcaaacaccggggaaaaaagggaaggggaacaggncacgaaagaacangaaaaaaganggcccggcaaccaccgcaagaaanaaaaagaaaaaccgaaaaaaccgcccccccgaacaaaaacacaaaagaaccggggagacaacagcgaggggaccaacaagagaccacacacaacgagcccaacgcaccaaacggggcaacagaaca

SEQ ID NO: 15230 - DNA, 593 bp, Emericella nidulans
gcgggaaaaggggaaacggccaaaacaaaccacttgtaattccgcaaaacaaagaaccacaaaagcccgtgttacgtttttaccgcaacaccttttatcactaattaagtttgaggaaatttctattatatgtctttgacctagccaaggtaataactaacaaatttataaacatatctcaaatcaggttatagatccacaattattgcctgaaaataatgggacctcaaatttaatttaattataccaaataaacattctcagctctcttttcgataagacatgcttatttctttcaagcacattacaaatatttctcatgctacattctctttttctacaattgacttacgttaaatataaaaactattatctataacatttttaaacttccccgtaatcaaattgatattaaagttttagatttaaagaaactttaccaattatggtttctgatcaattcttattaataattgcaatttttttttacaccattttttaaccttttacgttttaatatataaaattactattttttaactttttaaaaaattatttcctaacattgctaaagtttccctcattattaataa

SEQ ID NO: 15231 - DNA, 641 bp, Emericella nidulans
acgcatataagacacatccaactgtcacaaagaattattgctttttgaggacccacctaccaataccgggagctgggagaacttcactcttgccaccaccatacacccgaataaacctaaaccaccacacgcctcttcatttcaacacgttagcatcaaactgactggcaccactactcaaccacacattctattccaatgtcataacacgaaccacaaaccacatctacaacatcaactaccaataccactccgacccgtgccgaatacataccataactactgacgtcacatacatagctatcaccctcaaacacatatatgactagatttatcaggctttacagcaacagataaagaccaagccaatgatctcacaaccctattaaaaacccatcatcagttacagtcataaaagaaaaaaccgccggctcctaatcctgtattttctgacccggaacgtcggattttctaaagcaaaatacaacgactgcctacacttagtatgctctaatgagcataaacaattaatgaggagaagcttttacaaagtttgcttactaaattaccaacgagccgtccgcccagcatattccaaagaacaacttattaattaatcccacttccaaatctgaaaataa

SEQ ID NO: 15232 - DNA, 2667 bp, Emericella nidulans
ctaagacttccacctaactgatcatcgctgaaagactgctctggctttaggttttttttgacctcatcggatggtcatcagtagctgaatgaaagatctattttaatcatcctcaagaaagcccgtggacgagtcaaaagaacccgcagcgtcggctacagtgctgaactcaaatatctgcaaatccgacgctcggttgcgattggctgtgatagggagtatcctgcttgacatcgccgatttgctagcaaaattgttgagattataatggatgccgctaccagatttgcgaagtttacggagcagtattccaacttgggatcgtcgagcaaatcgctagcgatcccagccacgtaattgactttcattggactcgattccactttccgattgcaccaacatgctaacaactagcatgggctgaaacttcgtatgtacagtgcatatctctcccgctttcagaaccaggcttagaccagtcgtaaaacggatagattttctccaagccattcaagctcagctctcagctataggccacagctaatgtgattaagtgcctaaatatcttggcacatagccgataacgctgctggtggtgatggtcagaatattgagtttcagatatcacatgcggagcctccatgcatatcttaacgccggctgcccctgaagttacgggcacagtctggcttccaatgcaaacaataacgctgttcacatatgttccatcgctattcccaagcattcgtttctaacttcgccaaatcgctaggtaatgcatgatggagtatcgaccagacaactatccaaccctcagtcactccccttatcagatgaaacctgagtacgatgttgtcgttgtgggatcagggtacggtgctggtgttgcagcaagccgaatggctagggctggaaagagcgtcgcagtcctggagctgggcgcagaatggagaggtaggttctcaagacatacccatccaatgaaagtctgtactcatatggtcattgattaactctacagcgggctcttttcctagtacgcttgtgcaatgcttgcgggagcttcatatttcgggttcgagatcaatacctagccgcgtggcgaggaggtcggcgttgcgtaagggaaaggtaaagctatttcaattgaggttgggacagggacagcatgccttttgtgctcatggtgagaccatcggcaattcttgcagctctgaatcgaatgcagcattctcaaagaccaggcaggctgacaatttgacttagggcttggcggaggctcactgcttaacgctggtgtgttccttgaagcaacgcctgagacaatgcggttgagtgcatggccggcggagatcagggacaattcggatgccctcgcggagtgtgagcacatatactcgatctacaggagcaatgtagtctcgctgacgttaatatttggtagactacgcccgcgccgcggcgatgctacaaccctccacattccctacaaacctgccaacacccaggaagatggcgcacctcgaggagacagccaagaaactagattggagattctcgcgtgtccctctaactacgttcttcgaacctggccgcaacagcactggcgtgtccatgtgtgcaaatcaggggtcaggccacgaatcgacggggttaaatgacgggtcgaagaactctatcccagtcacttatttggttgatgcctgggcctggggtgctgagatcttctgcggttgtgaagtccggtatgtcgagagagatggagactcgtatcttgtacattttgcctggcatcagaaaggcaggcggagcttcgcagaggacggtatggcgcagctgttctgggtcagagcggtacgtcaagtgcatagtgacctatgctgacaagttattaattgttagcagaaggagttctgtttcctcggtgcaggagcgcttgggacaacagagattctcctccgctcaaagaagcacggcctatcgtgttcaccgctagtgggaaggaacatgtctggaaacggtaacctcttagtctttggtatttctatgtcctaacattacggggggcagactaacgcaaggtaaaagaggatatactgatcttcattagggtacaacggtagcaaagagatcaacggggttgcaggtagtaccaagcctggcccaaccatcactagcatgatcgattgctaccaaaagaccccgaacggcgtctgcggctctgagaacaataacaaagtcggtgcatttgtcatcgaggacgggtgcgttcctgagcctttcgcgcctgtgatcgaatggatgttcatcatgcagacaataaatataaagcacttcttctcttcgtttttcggctgcccacttaggcaaaccaaaagaacactcgcagcaattatgtccatcgtccggggcccatatatccccggtggcgcgattcagcgcacagcaacatacctggccatgtcccacgacaacaacgaggttacactaacgctggaaaatgacaatccgcaactccaaggtgttggagaagggcgtggtgcaaacattcattctattaaagatgccttgcgccgcgtgcttggggtcgatggggcgagtatgggatattcttatttctatggtaggtggtgcccatttccaaagccaacagtatcgtgttgtgta

SEQ ID NO: 15233 - DNA, 2788 bp, Emericella nidulans
gctctcaccaactaccgccactcaaagttagcaacgtcgcaccttcagcttgattttgttcctccgcaaagccaattatctatgtaactgagcgttaattcacgagcttctatagcaaatctaaatacaaaatacatggtggggaaaaagtcatcaggtatgcggcgggggggtggtaattttcacatgcatggggggtatctgccccgtctcatgtgagccatctcagctcgtctaggaccacaccacaccggaacgaaaggtcttttttgatcaaagccgttggcgcaaccacagccgcaaagcctgtcttgcctgctcctctacaccatcttcgcgccaaaaatggccagccccattaacttctgctgattgaaattggcttgggggcacactactaagctcgtctgaccacttgcgtagcttgcttattgatgtaaaggtgtcttcgtcaccgtagatcgccagagttctatgcgcacatagctggtctttcggcttagggcaaggaatttgtctccgtttccccgatgcttgagtagctacctcaagtgacagatcggtgaatagtgtcaaaaataggttgacgggagggaggagcggcgacactagaagatatgaaatcgtggtaccacttgactgtagcagctgtctggcttcgtggccgggatcattcgcatctgggataggagactgagttaactgcggtatctcatctctcgacagcgcgcagactgtcttaactatgaggagcattccatgagcaggggtgctttggtgtgcatttatgaagaggtcggcaaccagctggctttctgggagatgagaagcgatcaatgacccgtacgagtaaccaccgagtatgaggtggatcatttctgaagtctttccgagttgtcgcgtcaagcagctcaaataaagcatcatgaacccatagaaagagacgtaatccgctagttcgggttttgccgtccagctcgtccggccatgggagccaccagcaccgcttaaacagcgtcagttatatgcagggtcggttgatgaggggataataccgaaaattgaaggtgccaaccacatagcccgcttcaagaagctctcctccgattgagctcacaaccggatcgtcatagcaaccaccgagcgaagcatatgggtgcgcgacgatggctccccgtacgcgccattgagacgtatcattccgggttaatacgttctgtgggaggtagatccgacatgcaagctggatgctgtcgtagatggatgggatgctaaaggagtgggtgggagaagagagatattttggcatccttctcgactttagacaatcttggaaaagtgggaggagatattgaagcacagggcttttctaggaagccggcaatacgcgttttacttattggtgccgtgggttgtaatccacaaggcgctttcaaacgacgaaggtatagtaaatgatggcggggtggcagccactaaggctttcgcccaacaagcgggtagaacgtatatttcagacactaagtacctcgtccgctgaaacccaacttgtcttctctagaaacgcatagacatgagaaagattatactactccatctacaaatgggtcaaactcaaatttgaccaacttctcatagtaatatgtgtggggctggaattgccgcttttgattcatactatgtacgttcaatcttgcatgttgtcgtcaatttcgaggtcatcaaagtcgtccagtaactcgtccatactgatcttgggaacttcatcgtcgtcgtcgttcatcatgtcggtgtccgccacactcatcgtgtcgtccttcttcttgttcttatataacgccaacgtcgcccgtagctcctggtcctcttcaacatcgcgcaagaacatctcaaagtcattctccactgattctttattgttgggtagaaggtaggggtcgtgttctgtggccatgcgcttgagcttccagttgcgcttggtgtgcttcgagcgtctagggtagaatttcttgacgagaatgacgtccggaatggtcgaactgtacgtattggacgactcgatttcatcaaactgggcgttgttgaaattcgttccagtcaacatgtaacctagcacggaatcgcccgggtggatgatgctgccgagatgcgtcctcgtaaagtattgtttgtcgccactgaagtcggacgctcgggcgaccgttacctcagattggaaccatttccccctggaatgccctgttggctctacatccaagacaataaattcaacaagatctttcgcttctgctagagatgtgaacggtgatcgccagtatatccgggaatttaggtcggcgctctgaagtgtgttgggatccaggaaactaattgaggtaccaattcggttgcagagaagcagcggtgatatgttgccaagctgctttgcgagtttaatcggtagggcaactagatcgtccttgcagataggcacaatcttggcagagtaggtgaatttgtatgatttggtcgaggtgtggatatcttcggaaatgatttgctgtgactttgtgacctccacgggcaccgcagaatgaagaatatcgatgaacgcttccgcatgatttcgctgggcgaagaaaaaatcaattccgttcttggcctacttgatggtgatggtatttttggtgtgccttgtgcttggggatgagcctgtccaggtaaaggaggttcgcttgtgaggacctgctgtcgaacctgacggaagccgccacgtgtgggggatatgatttgcgcctcgggacatgct

SEQ ID NO: 15234 - DNA, 553 bp, Emericella nidulans
  unsure (1)..(553): unsure at all n locations
aaacccaaaaacaccccacacaganaatgttaaatttaaataccaaaccccccacacccttnaaataatctaaattaataaaaaaacttatatataacataattaacaatatattaactaatatcatacactcaccacacacaatatcttaataaaataaaacctccaacacatactaaatccttcaacaaatccataaaaaacacccccttatcacacatattatactatactaaccttcacatatttcaacaaaaaaaaacagcttccacataagcaataatacaacctcaaaaaataaaaaaatatccttctacaaaaaaatcactaacccaaaaaatatatataacacacatttaaaccactaacaaaataaaaaaaaatcacctaaaaacaacatataattaaaacctaccaaaaccaaaaaaaaacctaattctcactaaaatcataaccatattaactttgcaaatacaaaaaatatcatacaaaaataatccttacaccaactaaaaattcaataaactactctatatacaaatacaaaactacc

SEQ ID NO: 15235 - DNA, 2235 bp, Emericella nidulans
gataccatgatgttgcagcttggaccatggcaatcggagggtttgccagatagcggtgcaggccaaagcggcggaatagccaccaatgacgagccggcccagctagacttatccacatgcaagattgtataggccatccttcaggtacattggcgatcatatctaagcgaagctgcgaaagtgactagtagtctagatcgtggcttacctaggccacttttaacgcactcatgacgctgagcactccgcttctggggacaagacagagaaaaggtcggtagtaatgtgcgacagggaaatgatatggcttagagcatctgtattcgcacgtccagggccatttggtatcatagctagtaaagctgagttaccctatattagacttcattgaccagaggcactcttccgaccagtaagaaaatagaaccaacgaggaagcctccttgctggctccaacattcgtcattatcaggtagcagtattccacatgtacaagcatcttttatgatatatttacacattcacgctatatcctaccccaactgcccgccgtcgctgcagcgattggtagtacttcctcccctcgtcaacccaaaacaccgtgctggcaatgcacaccagcttgaacaggtgcgctgcgtttagtggttccgtttggaacacccgctgcaagaacggtaggtaaatgacacaagcctggccggcaagcgagcccagcacggcatagttgaacatcttgttcccaaaaagagagatctcgccccgaagaacggatttgccttcgctgcgacatgtcaatgcgttgaacatgtcgaacaggacgaagcacgtgaatgtcatggtggtgtcgtgggccgtcactactcgggagcgctttcccgtcagtacgtcgtcatcatcgcccatctcatagatgtatatggccaaagtgcccatcataatcataaacgctgaggtgaggacccgttggataagcggtttcgtgagcactcgagcgctcttgggtcggggaggccggcccatgatcgaagggtctactggctctactccgagggactgcgccggcggaccatccatgaggatatctagtcaaatattagcaaaagaacaccggcgcagttatagggcagtcatactaatccacagaatctgcatcgcgtttagcgggttcttgaatccgaacatggtgctcagcaaaactagactcagagcggcaacactggtactgagttggaacgtgataaagttctggatgttgtagaagattcctttgccctgctcgatggctcgcaggatggtcgaaaaatcgtcgtccgtgagaatcatgtcggctgcttctttggcaacgtccgtgccaagcttgcccattgcgattccaatgtcggccttcttcaatgcgggtgcatcgttcacgccgtctcctgtcatcgcgacgacatcaccgcgggactgcaaggcacgcacaatcttcattttatggtcgggacttgtgcgagcaaatatcgagactgacgataacgcctgagataattcagatgtgcccatgcggtcaatttcctgcccgcagaggacatttcgtactccaggagtctccacgataggcatcccgagcttcttcgcaatggcaacagccgtggtttcggcatcgcccgtaatcatgataacccgtacgccgccggccatcaggcggcggattgccttgtgcacgtccttgcgaggagggtcgttcatgcctaccaaccctgcaaagaccaagccgctgtagcgatcgtcctcatcgccggagctaaccttcgaagaaggcgtaccggatctactaccgagtgcccttcctctagactctcttactgcaccactagcaaaagacaggaccctaagtccttctgatgccatttgttccgcagcctgtcgcacgacctgccgccgacgctcgtccaatataacctcctggccatccttggtaaggtaagtatcacaacgcgccagcacctgttccaaggcgcctttgatgtaggccatgctaggtccacctattggagcagttgaatcgccaggaacaccactgccaataactacgcccatccatttgcgctcagaactgaagggagtttctgcaacccgggcacttatgcggtcccgcacgtcgtcctccccaaaagcatcaagcagatctaagatggcgacgtcagtgggctgaccgacccatctgctcttcatcgaccctgacgcgtcatc

SEQ ID NO: 15236 - DNA, 3586 bp, Emericella nidulans
agaagttcggggggaaagtaggaaagtcggcggaaacagcccgaagtccagagagaaggggagaatacgggcttcgttcaattcgtgaaacgacaagggtgtgagataagcccgggttggagaatcagaagagaagagccaggataagtcaattaggcaggagagagcattcgtgccggaaggaggatgaagagagaaagagctgggctgacagaacgcaacgttaacctgaagggtcccagaaaaatcgaaagctactgtactcgcctcagtcgcaaacggcggtacagcgcgccaggaacggaaggattcgcagtacttaccaccaccggtcaaagagagtcagaagaagaaatctgaaatgaacaagaggaaaaatgaatcctaatattcttcttcttttatccctagggggaaaagaatatgatacagaggcgaggagaacgtgagaaaaagaccgagctggatcaggaacgtaatctggatacgcggcagtaatgaatcttcttcggagtccgggtccaggattcccaccccattgactgcattgttgggccgcccgcactcttcccaccacttttttgccccgttttactgtgtatgcctgcctatgcaatttcagaatccttagtgtctcatatagcgtgccaactcccaatgacgtccatttggccccaaaatattaatactccgctccgaaagctggagttggcttttttggttttccagtcaggtggtgttcggtaattacgcagagtacagtatttttacggagtataaggctgcgtttgaaatatccgcatagacagattgaatctcagctgcgtcgaacgacctctaccacgcgtggatcgtatcaatggatcattcagctgggaatttatggcaacctttatatcgctacaggagtctcttcatcttatctgcttacctctccggagtataagctgactgcttgttggccggagtatgcggagtacagtaagatttcgatagtatttcataggccaagtttgtacggaacctgttccggagtaagtgtcggctcgggagttttattcctacaagtctgtcctcaaaggattccaagaagtccggttttgcaccgccgccggcaattcgttcaaaagtaacatctcaataactttcttgtcaagttcccaatggtatacatcaggaaagcaaccatggcctgttgatactcttaaaatcctccgtagtccagccatcgaggtttcaacctgtaagatcaatacgtacgataaccaataaacggtggtggtatcgagagcagaaatatactagccgccttcggacatgttggcaccggtcaagtatcccaccaatcacaatcttcggatatgaagctcacgttggggagttggtcctcgggagaggatcggcctcagcaaatcgcctggcaactaaccatatgtggtatggcgggtattctgaggtgcaagtcttgaaacccacgaggtcacgactataaactgtagtaagtaacaatcgggcgctggttcttgcttgatcagcagaaaatcaggatgtggcagcctctgccccacggtagggagccccctttgacttcaaatgagacggtagctttttccgccgtctctagtatcattgaacggatgtcttttgcacttagttgggcttgagtagcaggaaattcgattttttgcaatgccctagccccaaggctcgcggagacattctgcagagacgatcgatctctcttgaagcacgtagcgcccgttttccgtcggctagacagtctagaccgggggggaaggtcgagctagtcagtaccgaataaagtctgatttgacttacgcaccaatctgccaataagattgtcggctttaccgctgcaaatatatcttgaatgatgttcagtctctgccaagggtagaagccgttccctgaattccatattctgcaacttgctaaacaaaaaacgtcgagacgatatattgccactcggggatttgatgagcatcctgctttcaggctcatacggtatattcgacagtcaccaaactcaacctgattctggcgcaactcatggagccccatgattcaacggtgactggtttatagacagagtcggagcggtactggaatgccgtctctgttgtctgaaagcaaactgaattcattttttcttcttctgaaaaagggctggggtttcgagataagcaggccggatgcctgggctcccaggtactcattatgctatagccagagctgtgcgccgtacggttgtgtgtttgtgcctttgtggcttctcaactggttggggtcgacaatctcagaataaaggttgggaattcgttgtaatgccaggttggaatcgggactatagcacgggtcccaagagatatagggcgagcacgcactgcagtagttggagcgaaagtcgttcgattaataccatgtcgttggtatcgaatatggcagatactgcatcgtagtaccgattaaaaaaaaaaaaaaaatatggcggccgttatgtccaaaaaagtaatctacctgcagtagattgcaacattaatctagcggacacacctgcacagccgaaacgactccgaaatcgcctcgtatgtccaaaaatgctcagttcttgctctgctgcttaggtatgatctcgtcataccaccaaatggatcaaagcgtcagcaaggcactaaactgactgggtaaaaacagcaccacctcggcccgagccgtgggcaacaacaccctatagtcacttacttcataaatacctggaatctgcaggaatacgcaagggcgatagctaagtagattattgatttcaaagtcactgggtattataacgcctaatacctaatacaacgatacacaggaccaaatgtacaacccaaagaaataagcgctgagacacagcttggacgccgatgggctttcagctctaggagcatcgtccccggcagtaatcaaaaccatcacggtgatacaagtctccgactgtacagatatgtggtgagaggtatgacacgaaatccagtctataagcaaccgaggcaaacaacctttccaatgtactccgagaacgggatcttccaataacaccacggaccctctcaagagggaagccagcgttaagagaaagggttactgtccgtatcctgaacgaccaggtgtaatgattaagcaaaataccagccgtgaatttcaaagaagtgctcttgcgaacgcgcagccgttcagaatgtctcacctaagtcaccggccaccggcttcggtttcgttttgggcggccccatggtatttcctcgtcgcaaggttctaggtgctggaattcctgacatgccgctagttgaccgtttcttcaacccagtgggtgtagagaatgctggattggagaacgacggaagacgagtagggcgcgttgagctgatcgttgcacgcatattgaactgttcggcaaggtcttcatcctcgtctatgtacgtcatgccgttaattggggtcgattgcccgccgggttgctgagtgacgagcgtggtcgccgactttcagtggtaggattggtggaataatggcccagtggagt

SEQ ID NO: 15237 - DNA, 408 bp, Emericella nidulans
aactccctggtgcgaaaggcgaggatctagatccgatctactatgcaacctaagcggacgatgaatggtccatggcaatgggttactcggttagtctcgtggtaccagatgcacatatgcgctagtgaccaaaccgtgactctcaactggttactaacggccatatactggtcgccagcaaggcccgtacaaaaaatgacgctgactgcactatgctccatgtccaccgccggctttagcccaaccatctggctgaggtcatgcgtgcagagaaggctacagacaccctttacctgacccgtaacatacttcatgaccagccatgaatgctatctggaggactgttgtagctgcccacctactataacccatccattgacaggactagcattagagaccattacagac

SEQ ID NO: 15238 - DNA, 2010 bp, Emericella nidulans
gcgccgactggtgcccggtacgaatcctggggttgtcgatgtactcgtgcgagtaatccacgatcgctactctgtcattaagcaatggaagtgacccttgagggaagcaattctgcagagacacttccaccctggggtggcgtcatcggattacaccgtcgcgttacagggaacctggctgtatggttgggcaaccacttttttttttttattatcgtttgtttttacgccctaacttgctttgtataggtgactacgattatcgcttttcaagttccaaccggctctgagcacagctgtagtactctaacgtccgtccctgccgtgaagcgtacctcagggtcgctcctgctacaaatgtcaacaatggctacgaccaccgactcggagattctcttaagcgactgcatcatggaccgcgttcacagctacattcgcttcgatacctgcatggtatatctatcgctgttttattatcaccctgcctcatagtgcgatcaaacaggtaatgagagatcctagcccggccatccacgcttgtcgcgctctctcagtctgtcaacttgcctttgactgcatctgcggatcgcgcttagtgccattgggtagtaggagcctcaccagaggaaatggggttctggaaaggctgggcgctctggcagaagctgagcattgtaggttacacccctagtatcggtgcgtactgactgaaactgcaggctcttgcattcctccttgtaagaagacgtccatctgcaaatgccactactgacacaccaagctcctcgtcctcgtctattcattcagcgttctcacctacaataggcgaaagatccgaaagcaggctgctgaagaagcaaatcagcgagcagaagacgctgagatgggcgaggcagggtctgagtcaaatgagataccatttggcgccaaagcactggagaaaggatcgaagtggagggtatctggacgatgaagcgacattcccttgttaaaccagcgagcatatcggagaaaaggaagtcttcgatactgggttcgctactccggcataaatcaacggcaagcagtgtccagacgcctcacatcagtgagcctgaatcgatcaactcgtccgatcctcaacgcaaatctggaagcgtagaaagtcaggctgagagtgtacttgagagcattcacattgacactttccgatctagccggcccccaaagctcgacattggcggccgctacggacaaagatcttccgaaaatgaaaggccgcttagtcgatggtggtttacctcacgcagctcatggatgaaacccgttgtgggttataagcggtcttcagtgcgcgacggtaagttttgatcgtgttctggccgacggaagatataccgctgatattcacccaggacgccgtcgaggttcgtccgaggatttcagacgcagattcagcaagctctttgacgacactatcgcgccagtgccacatcaacctgagatgttccaacttacaccaatatatcaagcgtcatccgagagcagcattggccagagatcggcagatagaatcattaccccggttgccgcgaactaaaaggagggaattcagccatacaaacgttgatcgaacgggcgattgttgcgctatgcatgtatatctaggatattgttatcctctgatatgagttgtgacagtaacatccagcctggattcctgtacttataccgttgatgttggttggctagtgtatcttttatcccagcaaattatggagtataaacccggggccaaattgtgattcggtctctttgtttcccaagcgtaggcaagagcccgcgcatacatgcacgtgactttgtgttggtaaagacgcgttccatcccaactcgcatacaagggggatttccataaattattgagcgtattcactttatttaatataaactgaaaccgcagggtaataaatctaacggagcctttcaagaaattcttggtggcaaaagaaccctggaaagcccgttttg

SEQ ID NO: 15239 - DNA, 2131 bp, Emericella nidulans
tgggtaagacctggactcacctcccatcccacccgacatagctggccctcatctcttcaacatccccctggactcttttgaccccttgatctagattatccggccggataagaacgagattatactcctcaccttgccgaacgggatagaagatggtgtgtttgtctgggccgagccaactagtcacagctgtttggccgcagagatcgtctatctctggatcttcgagagcctcgagctgggtccgcttgagggttgcgcggaaggccaggtcgcctgtctcttgcggagtggtgggtatgcccaggaccgcgtcgcggactcgggagtgaaggcctatcgtttgaccatcagcaggtgagctttttggtggtgcttcatatcttctttgctattgggatgcactattaccatcagcgccgataatcacgtccccagtgactcttttaccaccagccaggacgacttcggtggtaccgaaagcgatatccgcgacttcagcgccgaggcgaatctcaacgcctaggcgagatgcttcgtcaaacaagagctggtagaagtcttgcctgtgaatgatcctaaacagcacatcagcgccttacccccaatcagaagagaaagccatacacccaaggcaccccaaactcctccatgataccatcgccaaacggcatagatctaaggatcctcccatcatcgtaacgccggaagtcaacatgttgcacgctactccctttctctagggtctgcggtagcagacccagctgcttgaggatggtggtgccattgggtgggatctggatccccgcgccgatctcgcgcgcttgagaagatcgctcaagaatgagcacatgggtgtctggattaaagtgccggcaggcgatcgcgcaggcgagaccaccgagtcctgctcctacaatgatgatgcgtttcatcttgatccaggacaaattgagttgaaactcgccagtttgttgttcattgttactgttactgttactgttactgttacaacagtacaacactagtctgtcatgtaatgaaattcttggcaaagaaatgcggggtttcttcaagacttccttcccacaaagtagtacagcgtaatgaacggccactgcacgttcttctctccgctgctaaaggtccaaccgtcaaggtctcgccctgaactcgcaaggagatcctgaatctctgctggggtgcgcgtgcgcagacacgagatgaacccgtccacccagagcgccaagggcgcgataggcaggaggaatgtgaagaacagatgcatgggagagtgccagtaccacagcaatgagacgtagaagccccagaagaagacgaggggtgagtagaggcacgtcgaggcctggcgggcggtgatttcgaagatactacagcaatcttgttagccaccttgttctcatgcagaagtgttctcaagaggacccggtccgtgccgtacatgaatgatccgcctcgtccaaggcactgcccaggatccccctcgcatccatatcgtcaaaatgatggaagcaaatattgaacactcgacactctctcttgtcgttcgccgccagccgtcccacatgccgtgcgtcgacgggcctctcgatgaattcgatgtttggctgcttcttggcaatcgcgctccacacgtccactggagggaacatgtctgtgagcacgaaccgcaccggttcttttccctgcgcttcagccttggagttcaattcggactcgataaatggggtcgggccgccggcgcccgcgcagatgtcaactatggtgtatgacgaaacatcgcgcagctgctcttcgatcacggcgcacgcctgcgtcgcgaggcttccacggctgcagaacggcacgcgcagattccaaagttggcttatcgaaaactgctcatgggggtgcaatccagcggggcaccaagaagtgtcgccgtagttcgggagttggtcgcgtggtcccaacatttgattgtgatgcccgtgatggtggcagtagtggcagagatgtgtaaattgatattaaatagaaaccggtcgttgacccaccctattttctaatggccgaacgggtttccaaacgccttgtcctcttgcgtggttaccattcccttttaacttct

SEQ ID NO: 15240 - DNA, 591 bp, Emericella nidulans
gtttctcgaattccgccttctcctgttggtgcatgttgggatgttctggctcaggggctgccgcgcgatcgatctcgtttggagcggcgccaagcttgagtgtgtcgtggtcgattgatgccggttgggagggtgccttttctacagacccagaaggaggtggtgggaggggagcagcgtttgcttcgccgatgcggaggagggtcagggtgagctgagcgttcgtggggacgcctttgagcagggtgctgtatgatgttagccgatacggatccgggtaagattgaggaaatacatacttttgcaactgcgacaactccttccagtgcggatactcgcggttgagatactgaatgcctcgttggataagcgggtcgccgaagaaggccaatcctacagaaaaggttgctatcttcatgaagacataactagacgtgagcaatgccaccaggagccccgatgccaaaaccccagcgagtctcaaacgaggcgtcatcatcgagaatggaggcgtagcgagacgcactacgaggtgaaattagcatgaatctccttagacctgatggagataatatagagcctactttgcaa

SEQ ID NO: 15241 - DNA, 365 bp, Emericella nidulans
ccccaccccacaaccccagggaccctgcacaataaaaaacccaccccccaaccaccaaaaacactcacccaaacaaaacaccaacacaataaaacacaactgcaaaaaacaccaaaagaaaaccaaaccaaccacctagaacaaaccacccacacaaacacaagcccaataaccaccaccggcggaataaaaacacccaacaaaccccccacaaaaccccaaaccgaccccaggaacccaagactgaaacggcccaatgcacaaaccacacataaaaaaccaactccaaccaaccccaaaccaccaacacaaacaccaccaaaaacaacaacacacaacaaaccaccacctaacccccaaccaca

SEQ ID NO: 15242 - DNA, 3082 bp, Emericella nidulans
gggaagccggggggaaaattcacagttaggggtttgtaggagagcacggaaaaggccaagacggcggggttgtggggaccataaaaaaaggaggtaaggatggggtgaggccaggaataatcgacagcccagaagatgagtaaagagagtggggaagcaaacccatggatggtagcaaggttcgcgctgtgaggcaaaaagggaaatgattaggtcaggcagaggtagacggcctccaatgaagggtaaatgcagggaaacaataaatggcctttcaagatggccggcagaaagttggcagagtgccccaagcagggtatgggacttctcacacaaagaggggtgggaacacgtaaatgcaggaagcttcgaggatcctatgccagtccccacgagaggtttcatccgcggtaacggctctggagataaaccgattggggtctgaaaccatctatagaggtagcagcaatcagaagctggtgtagattttagaccgctgcagcagactttgggtacctgctattgagatctggcctccagctagttgtgttgatgtttccatattggtgggctgaaaagagaacactaggcctttattctgcccgtagctcatctgctgatagtttgagacgcaagcaaactatacagctcgttataccacacaccgattgaagaaattgatcaattcttcgcaagcagaatgggcttccaggtatgggcggccccgctatccgtcgtgctgagagcaagccctgaatccaatcatctttcgcaagatacatcgtaaattatctatagatccaagatagaccacttgccatgattggcagcgtgaagtggttgtgttggtcccatagtgaaggagttgagatggatgcctgaagataactttgagcctgaggcataaagacttggattcttagcgctcacattcttctcatccttctctcaactgaataaactcgcagcaatttgactgtcgttaccactaagttcttacggtgaaggaacgccggtccttgtggagaagaaggtgaaaatttgacaacactgcctgactccaaacgatgatcttcgtgcactgccatccgccagactcgtgttcaaggtttcacagcctcggggcataatgtgttgacacgtctgtagaggctgaaagcttcgcttctcgtcacccagttttccgtctccttgttctgcgaccggtgcatttccatgtgaataagagcgcacactgtctgcagaaaataaatgatcagagaccgtcatacgccccagaatcctcggggtttgagccgcgtcgacgtttggtccctgggatcggctgatgtcgcccaaactgccaactgtactccacgccatgccaaaagcaaatacgaggctgaatcgcacggcgatagtgtccttggcaagctcaagaatccgagcctcgataggccagctatttccatcagcctatgaaagtcgctggtacctcgtattggtggcgttgaccctcgctagacgcttcctgagctatttcagattttcgcagatcgcaccatagatacgaaaaccggaccctttaagattgggacggatgccagaagggtttctttcgacattccaattccttgctttgttgacgtctgtctcttcctcgtcttcgcactccaacattcctgcgacctcgacttttgaatagtctcgcctcacgatgtcagaaaaagcaaactacggtatgtactcactcagcgcctgtcattgtgtacttgatagtcgacaagttttctaatatcagcgccagagcccaacgggacaaggacctcccagctacgacccccgggccctgcgcagccggcgcctgtcgtgccgggcacgcagcctccttaccatcccaccgagcccaaccccgagatccaggtccaggccatcggctacccagcaggacaacagcagccacaaaacgccgctccgcaaatggacccgccacagccctacgttcagggacagcctcagccaagtcaataccccacggctttccctctgcacgcgctgcaacggactccccaggtcgttgactgccctgcttgtcatcagcgagagatgactcggacagaagcagtgaatggaaactcaacacagtacgtctattgtttaaatctctcgtgcagaaccatttgactaatgatgcctttgcagtgcttgggcggcggtgctctgctgctgcgcgtgcgtcgggtgcattccctactttgtcgcttacttcaagaacgttgaccatcactgcgggagatgcggtcagcttctcgcaactttccacgggagcgggcatgtggtggtgcacccgcaaggaggacaagtgcagcaggctcccaaataatttgactgtattttttttgtaatttgatggttgtaatgttcaagattccctagtcgattggattatgtacttagtgttattgattagataatcctaatttgtgatggaatgcggtgtttatcattctatagcttcatcggccaagggccattgctatctaccttgtcggtcttggtgcaaagctctttcagcccgtgggaaacttttgccatatttgagcagtttctgcacttcctccttcagtttgagttgtttatatttctagggaaaaaaggtagcagcggaagtatggaatccaaaaatgaaattttgggtatatattgatagaagacgcttaaacgcttatacgtacatgactgcaatttcaagaatagggaatccgtaaccagcccatcgctaacaagcaccaatagcaaagcacaaaatcgttcacctctaccaagagagcgatacggagcgacatcctatagtcttcgtttctcagtcccatgcccttcaagctcctggatctggcgtgagacgctcatctcctgcacttggtgtgtgttgctgagctcaacttccggagtctgacccggcagctcaatcattcgggtcccgttcggtggctgaatgtagtctggcggcgagacgtgttggtcctccaccataggtggttttggtagctcggcgaccgtacccgaaactgccaaggtcgcgcttgagctcacatcatcagaa

SEQ ID NO: 15243 - DNA, 788 bp, Emericella nidulans
gggaaaaagaactgatactatccatatagcatcgggctcacgctttgagaaaaggcggccccgggggtactataagaagctgtggccaccatccctacaaaaagctatatgatagcgacggacagccacgtataaggaccatataggagcccatcaaatatcactctcttgcttaacctagtgaaaacgaaaaaaagaatatggtagtgacaagggttcatcctcacatgaagaaagagcaccttaagtacagtatgtttacctgaaaagacatatcttactgccatttgcagccgtggaccatcttgacctaagggactgcccattcaaggatagaccacatagtcaacctagatcaagtataatagtccaaacagaacaagtaaatgagcctgctgcttccgcgaccgtacgacccaataagtactttaccttctctatcttctacaaaccgagtatccttagagtaaagttaaatgggttggctgcagtgattgataggttacatatgagatcccaaccttttctgtaatgtatcaagactaatgatcggggcccggttctagaagcctttttatgcatagacgcccaaaacatccaggaacgcttgtttaaaatccgatcattttattgctagggaacctagaatctgtttgaatacggacgaagaaccgttggcattcccattaaaatcgctgcatgcaatttaaaaaataatgtaccctgggtggtttaccaaaccatccgttttttgtcctagaataagttaatttggatacaacgaaaat

SEQ ID NO: 15244 - DNA, 2718 bp, Emericella nidulans
actactccatcgtgctgaccaccctcaccgtgattgtggccatcattatcggcatcatccagctcctcacactcatcctgaatgtcgccgagccaaccggccgcttctgggacggtgtgcagacagcgggcgactactacgatgttattggcggtggaatctgtggtgctttcttggtgtttggaattctgagcgttttcgtttataagccgtggcgcagatggattggaaagaggtatgggaaagatgctgctagtgctggggatgaggagggggcgtataggggtgaggacactggcaccgatgccgggacgtctatcccaagggttgatacgccgttgaatgagggaggctcgagtgtcacgtatgggagtgtgcatgtgcagcctaagggaaatactaagtaagtgaggaccgggtaaactggatacggatatgtttgggtcattatggtccgagagataattacggtcgtgaatgaaggcccaagtgccgaactgggggaagaaagtatagggcgttggatatataggaaaatgcgccttaggcacaaaggcagaaacacttggtgatgacaaccgacgtcatctgcgttcttcgatccctaagtctccccgcaactgaacttctttcatcttcatgacaatcgattccggacatgctcgagatttataatgcgcaatgacggtaaaatagcaggacttattagcaatccatgagcgctaccgcagaggacataacccatcccgctgatattccccgccgcttccccgcatagagaatacgatgctgccgagtcttcaatcatggatgcataattgcgctgcacgagctacaaaaccttgtatgtacggtttatgaagcagagttacaatatatacatcgttcctacatcatcaaccatgattactaaattcaaccacaatgtcctccacatctacagcatctgttacgccctcagacccaggtcaagatctcgatatcgaagcagacctgttgacaacggagtccggcttcagtctcgcaaagtgcccaccaatatatgttcttcccacccatctagaccttgacgcgctccatcaaaccgaggagactttgatccagcacggcgcacgcctgacatacgatgttgcagaggctacattgattctcggcaaggtcaggcagaagaagcgcgcggcgctggagctgaggtcgagaggagtgtggacagaggaggtggagagcacctcctcacatacttcaggtccaccggcgaaacggcgacggctagagagcggaaggaatgggagtgcagtgagtgaaatatacttgagcacggaggatgagagtgaagaagatggtcgacggctcacggcgcatctcgagcatccacagctgtcggaatcgaaaaggagtgaaaggacgagcgtgtcaaaactgctaagcaaagacgaaggggtgattagagttgtgcgactggattggttggcgcaatgcgctgaggcgcagacgctcctaccactggcttcgtttgttgtgtatcatgcgcgcaagatcgagcgacctgcaacaaggggcgatgatgagaccgcaaactcacaggctatccttgaccgggccaagcaagacgccgcattcaaagccccgtttcctccgtctacggacaaacatgacagggtggccagccaccgcgcacctccaaagttgtaccggcaaacaacatccgaaaacgaagaggcagagcccttaccaccgccaccagaatgggtccgcgacggcgtcatgtacgcctgcatgcggtcctcattcctcaacacccccaacaatgccttcattaaccagctcgtcaagatccgcacgatccgcgagctgaacctcgacgagattggggttcgcgcgtacagcactgctatcgcagcaatagcagcatacccgtatgaaatcagacgcggatcccagatcctctccttgcccggatgcgacagcaagatcgctaacctctttgttgaattcaaagctagcgagagtggtacccttgctgcagccgaggcgctcgataaagacccggacctgcgcaccttgcacacgttctacaacatatggggtgtgggctcgaaaacagcacgagaattcttctacgccagacaatggcgcgatcttgatgatattgtcgagcacggttggcactcgctctcacgcgtgcagcaaatcggcgtcaagtactacgatgaattccttctcgacattcccagggaggaaaccgaggctattggcaagatcatatgccagcatgcgaactcggcctctgtccgtccgaccgcacagtacgacggccacggtgtggagtgtatcatcgtgggcagctaccgccgcggcaaacccgtctcccacgatgtcgatataatccttagccaccgcgacgaagcgataacgcacaacctggtcgttgacgtcgtcgcatccctagaatccgagggctggattacccacaccctagccctgcacctgacaacttcaaaacgtgaccagcagactcttccctaccgtggcgatgacgacgatcgtaatcattttgacagtttggataaggcgcttgttgtctggcagacccctaaagacaaacttggctccggtacacaggcgagcagtgcaaataccaacccgcaccgccgtgtcgacatcatcgtctccccatggcgcacggttggctgcgcgtgctcggctggtcgggcgata

SEQ ID NO: 15245 - DNA, 756 bp, Emericella nidulans
aggctctcaggcggttggtttaatcctccaacttcctcgctcgctcctctttatcaagagccagctggggtatggttgattcagcttgggatcgcaacattgactcttccctgaatgatgcttcaacctgatgaagttgggcgcgtaaactttccgtttccagaggattattttgcatttccagctccgccagccttcttctagtggcctcggaggtctcttctgccaattccctgccacgtttctcctgctcaagatccgtagaaagtgcttccagtttcgatttgagttcattctgggatgcaagcgccaaagccaatctgcggctaagatctgtggtgcggtcagatgctgccttgtcaagatcatgagattgtccatccagcgatggagtgctttgctggcttccgccgtgggcagcgagttttgcccgagcataagcagccttgttacagcaacgtctctttgctgtttgacctccggtacacgcttggatgcaatcgcggcttgttgatccacggtggcttgcatttttgcagcttttgttgatggcagaaaccttgatcaggggcgacctattgtggaggatccatgtccttatcaaaaaattcgccaatatagggtttccagtttttgccaggacttcagggtccagatttatttaatggctaatttaaaaagctccgggaataaccggaggaagtcctctccaatccatgttgggaaagaccgtactctttccaaaacttgcttctg

SEQ ID NO: 15246 - DNA, 2385 bp, Emericella nidulans
tgacttgcggttggcgacgaacggggttgccgcgatatcaggaagtccaggtcaaacgcgcatcggccgatgtctgcaaggattttgacagaagaaggtgtggaccgatcaccatcgccggcaccagattgctgatactcgccgtattcatcgagaactcgttgcaggattgagctgtacctctccgctactttccagtacttgcccatttgagaaagagtatcaacgataaacacgatatcgggactgactgtgtgcgcgattgtagatccgtggacgagcagcaaccgagcagaaacccaaagtgtaaatgcaaacggcggtccaagcttgtccaaaatgttattgttcacgacaaaacgggtgactgaaacaatgttatcgactgcgagcagacatcgctggctcgcactgtacgacggcgtgaagatcggagaccgtgtagtgggatatgctgctgaagaatgaagccgaattaccgccctgcagttggggtcagcgaacagcgaaaacgttttaggaaacattgactcacgtctggtaaacagaatgtaactgaacccaatcacagtggtgccccttgtgcttcgagccgctaaacgcccgagaggcgttttcgtaggtgtactctgtaggaagattgaactcccaggtagtcaactcgctatccaatttgcgatacgtggcttgccactcctcgacatcagatagaaccccaatgtcaacgggccgcttgaggaatacatgtattcgtgaaaggataccaagaatttccacgtagagtccgaatgaaccaacgttttttgaacgaatgagatgatctgggcggtcattcgacgactgaaaccacctagtctgaactggctgggtcttaatgaaaaactcgtctttacacggaagcttgcggtcgatgtctttgtcatccagagcaaagtcaaaagcggttgcgagagtagaataccggtcaagaaggtacaccatccagaaaagccgacgcctgccctcgtcttcaatccacgactccgcttcggggagagtgacggcccgcaatgtatatattgaaggatagaggggagttataagggttgacttggactcgacggccagacccaattgaaccactgaccttgttatcaaggcaaggagtttccaaccagggggcccgttagatgacccaacaaggtccagggcgagaatcaccagagcctgcagtgcctttacggacgagttttccaggccgtaaagcagaaccttttgcttggaggagtcgtgataccgcttgcgattttgttcggtgagtcggctgtcattagaaaagcgaagagtagtcgcgacgatagcgtagagaaccatgcggtcagcttcctctaaaggagtgggaccgaagaaagtgtcaagtgtcgttcgtcgatgcaggatcgggcaccaagtatttaggtgctcaaagtagaggtcaaccagcgcatacagtaaatcataagggggaagatcgagctcggggtcagagaacgactgttcttggttcgaaaacaaattgactggtacttttaaggatgactcgttatcgttgtagtcgttctgcggcgtggtgttcgttatatgtggcaagggcgttactgaggggagagcaccggtgatttggttctggatagagttttttaccgacatgtccgttggactagtagtgacaggctccggcggacgtggagctgagggcacagatgacggctcatggaaatagaacggatttcgcggactgggcccatgtgctgcagaaggctctgagggtgagctatacgataggggtccttgctggtgtagatcattcgacatcgagagccgcggctgcccttgaaggatatgcgtctcaatgagacgagcttgcgcctggatgatatcctccagtctgtctattaaatgtcaatgagaaggtgcataggtcgtaaccgggaatcccgtacctaggcgttgctctagctcttttccgtaccctgcacgaaggccgggcttctttctttccttgtactcacacacctgaccattccgtgtacaccatccacagcttggttgagctcgatctagacgccagtcagataccaggacaaggacaggataccacagaacataccgcatttaaccttgcgctgcttgcataattcacacctagacttgtcaatctagcgtctaaagagggaaccgagagggacgcggtaggtctatggttatgcaagaaggttgcaaggcattgcaagcactgcaagacactgtagggcaggaagaactggtcggatatgccggggacgggcggttgacttacgagactgtgagtggccgacaacgtaacaagccacgcgaggatccattttgagcaggaccggcatcaca

SEQ ID NO: 15247 - DNA, 4292 bp, Emericella nidulans
ttcacctgcaaaccggctcatccgcgtcttggtgctgttatttgcaagctatcaatctataaagagctttactaatggtctgatgttcgtttgagacagtttacgacattctcgcgtctcttggtttgctcaacaagcatgccaagctcttgttcctgggtcttgataatgctggaaagacgacccttctgcatatgttgaaggtatgttaacagtatttgtggcttggattgagagtattcggatgggaaatagagtttactccgcttgaagaatcggttagaagtgaaacaaaagctgacgaggtgaactcattcagaacgaccgagttgccatcctttcacccaccgctcacccaagtacgttatcacatcgactcaccgcatctcagattacgatagagagtgcggaggattggatcaataatggagactaactcagacacagcatctgaggaacttgtcattggaaacaaccggttcacaacctttgacttgggtggtcaccagcagggtgagtctagccgaatccatgcgttccaaactttgattctgaacaacaatactaatgctgttaacatcagcccgccgcctgtggaaagattatttcccagaagtcagcggaattgtcttcctcgtcgacgccaaggaccacgagcgcttccccgagtccaaggcggagctcgatgccctcctcgctatggaagagctctccaaagttcctttcctcgtccttggaaataagattgaccaccctgacgccgtcagcgaggacgaacttagacaccagcttggtttgtaccagacgacgggtaagggtaaggtgccgcttgaggggatccggcccatcgaggtgttcatgtgcagtgttgttatgaggcagggtgagttctacctcgcgattatttgtgcatttctcttttgtgggtggtgaaaaactaacttttatcctttgttaggatacggcgaaggtataaggtggctatctcaatatgtctagacaagctagctaccaacctgtgccgcaacgcgccttttcacgaaatcgtcaatctccgtgtaattgttattcgtatgaccggagacttatacccacttcatcaactgaaaaatctgcacaaccatagccgtcagttcccagtctacctcatcacccctcagaacggaccaagtacatttcagttatggaatcttgccccccttcttctacacttcccattctcaatgattactacttagccagccagcaaatcagtcaaccattcatccattgatctaattagctgctcacgcaaactctatgacaaatgtgtgcctactcttccttcgcctatgtcattttagaaagttgggaaatctatttttttccctcgtggattatggtcgttgctcgctacatcggactaattagaggctctaggctgtctgggtgtgtgacaagtcgctggaggagcccgttggatttggtcaatatgctaaggcgctctggatagtcatatatacttaaccatgaatttcaagggccatatttcaatgccatcacgagatcgggagcagaacactcattacctcgaatatgtcctagtagcacatctgtcacacccccttatcgcacctccccggatttctgttgcagctcagatttgcaatggtactcagtttaggcaaaacacatatgactcccaagatgcaagcagtaaaatctttgatctttcagcgatatcactcttggttgggtggcttggttattacaagatttgtcagaaccggactgacgaaattaactaagaatacttagtagagggtagagttaaatacagcaaagcaaccgtacgtacataactttgccgggtttcctgtttagctttgttttcaatcttggccgttgtggatgaacatacatcatgaggctaaataaagtattctacgagtccaaagcctcaaccctacaagataatattaagtcagttaaacaaacaaaacatgcagataccagcacctgaggggaatagtacttactagctttgtttaggacttcggcaaccaggccataatgattatcaagcgcgaaaaaaaaggtaaaaagatatgcccccacaccggattgaacgatggacctttgcatcgcggtacaagctaggctagtacaagtgcaacgctctaccactgagctataagggcaattgatgcatagggattataattagtaaaacttgtacaagcacatattcttgctcaattacattccccgcgaacatgttgcttaaccatcatgtaacctagaaagcctttttaagtttccaatcgagaccctgctacacgtcgttgtttgtaggtcgaatgctcaatgggcctccttatcatccttcattggatataataagcaataagtctcgtagggagcaatatggagatatccttcctagagcaaagctctccgagggctaaagtggtggatcacctggtcgtcctctatcagggccgaggcgaacggcatagtttcgcttgcaggtaaggcttcgactgcggtattaactttagcggtgatccaaggaggagctcctaggatcaaatcataacagggttgatggtgtctgttggcggcaatggtaacgattccagctatccttctagttcgagttaaacatatccgaaatcaataagttcatacaaacttatatataataggggccttgtttgtactaacacccttcagcaaatcacttgagttgagcgttagtggggtcccatggagaatcctatcatgtcctaaatacacttaagcgagatgcagtataacatggttgtttagacagatacacaggatacaactgccacagctcgaaggaccattgaagcacaattatggtcctaatataaagctgttgctgcgaacatgacatcattagcccttatagctcagtggtagagcgttgcacttgtactagcttagcttgtactgtgatgcaaaggtccatcgttcaatccggtgtgggggcatttgtttttccgccggcatatttttattcggttgccttttttttcccttcatctcctcgccatgaatgttgtttgctacttagaactaggcaagcacgcaacttgtcagtcaggagaccaaatttgacgctgtagccagttgattgatagtgtcgtccaggcagtatctactgcaagtgctattactgctagaaggatgagcgctcgtatctcagaccttggaaggtcacgcgagaagctcggggtccagggtaggagcgcatattcaaatagacagaggtcgcgcgacatattactcaaaccagacggaagtgcatgaagagaattaagcgcggtatagaatcttggtacacattccaaagacactcgaagagggtgtccgttgtttatctgctgggcgcacgcatctcacagacaagaggattttaaagcgggaaatagaaagacgcagaggaacgaggcgggagagcagtaaacacagggaggagcagcagcacagaaagaacatcgaatagaaacaccaaatgcagccgttgccttcccttcctctggtaaatgaattcacataaacgagaggtaaaatggatgcattgaggaaatgagaaaagaggtagacatgaacaaaaggcggcgaagatgaggaaaagaagtaggaaaagagaacaccaatccctattgtgagcacaaagtaccttccgtatagaaatagaacatgatcagcgtaaagagtcaagtcggagtcgctggaatttaggatgcggggaggaaattgtggcgattctctgcatgtcgtatagtcctctcgagaggttgagtcatgtcgttacttccgatcgtctcaatgcaaataatatcgatgtcgtgggatgctgaatctctcgtgtactcacgcggatatggcgtttctatctccgcccgaacctgctgaacatggaaaagctcgtatgcttacttcttttgctttcgcggaggagtgatgggtcggcctgagctcattgccccgtaaacgtacttttgttttttctctgctggtttcagaatctggtagaaatgaaagacctcatgttagcattaatcctttgcaccggcacgcataagaatcggagaaaagaaaacatacctggaaagagcacaataaactctcatccacactcatcattgcaccagcattatcgaactctccacagtagttcggagcgctgaatagtgtaaccagctgcctcttggaaaagaactagtaaccgtcctcaacgacttgatgtgcgcggcatatcaaatccagatggtgtttct

SEQ ID NO: 15248 - DNA, 812 bp, Emericella nidulans
tatcacgctcaatgagatctccctttctatacctcagctcttaataacggccgaaacggccaatgctaattgaagaaggcacgacatgtcctgcctccgtctccgcaactcttgcggcaacccttagtgaacgtcttaatccctcatgaagcgaggccgtctcttttgttttgacctcgctctgccgtgcttttccggttcgccattcgtggagcttcaagtcaggtgggtcgccgagagagtcgcttcagtaggatgagcggactgaatcatgccaggagggtctcgaattctaagcttatttagaggccaatatagtgggactctgaaacatcaggccttccatttccgactgctaaggaccgttctgagtgaacgctaaccaaaataaacgtgtctggtgggtacccgggtaggggaaattgaaccaacctgtcctggaccagttcgccctccttggttacccagttcacccccccccgggtttctgctaccgggaattgacctctctttacctgattatgtcatctcgacaaaaaatttttcaccggttttggtttcaaaaggcccccggtaaaataggaaaactcccggttatagggcctcaccaacacctttaattggtccgtttcttgctctccatctcccctacctgggagatcttcgtcggacgcctattattctccgggcatattaaactatatgttttcaacccatgctaacttctttttagccacccaacggttaaaccttttttgttatatttattgggacattctgtttttcttcttcaagagactacagcccccccc

SEQ ID NO: 15249 - DNA, 368 bp, Emericella nidulans
ttttactcaaggccgcgcagccacggcaagggcgactggggaccaaacacacccagaagagcccaaccacacagacggcgcccacaagcgctcaggaggagagtacccccattaaaggaagcaacaacacggacgcacccccacggctaaacgccgtcatacaccaaagccccgaaagccagcaagagcgcgcggacacgacgacgcgacattgagagaccgccaccaacccgacaacggagcaacagacacccacgccgacacacaagcaggaatggaacccgcacctccgcaaactacgaccacggcccccagcccgcccaagcgaaccacatgccaccaagacaaaccacgaagtcacgagaacc

SEQ ID NO: 15250 - DNA, 535 bp, Emericella nidulans
aaccgcaaacgacatgatgcaacccctgaaaaaagaatttgcttttacataccacactctataattatgtgtgaggtttatccacacatgatgccatcgaccaaaaatgagcgccataataacatacataggacaaaccatccaccgctgctaggcagacatcgatagcgtgaataaaactgctgtacatagtgtcaaacttcatcgacacacacgatgctgaaatatacacacctcacaaggtgcacaaccataccacacgtatgcttagcataagccttattatgccgaacgctatcctcgagccctttaaatgcgcattatgtggacttccgaaagcaatactaatacatatccagcaaaatgtactgggacatacaaaactcatggattagattgcactcgagactgtcagcgccagtaccacgcagaagatctagcccagacatagaccaatagtataagcaaatactggcataaagacacactctgtgctttaaagcaagcgggcctaaagtgagcatcttgtccgaat

SEQ ID NO: 15251 - DNA, 436 bp, Emericella nidulans
aacgcatccaaggagttcatgcgtcccccggggtggtccgggttcattgacactaattgcggccccgggatattattcgcttcagctcagtcgtcatgaacggggggtttatggaagaccggcgcgcataataactctgcagccggtcgattgttgctaagtctatcttatcacacaatcactacagctgggcgtctattaagcctctccgctggtagaatgagtgggcggtgttgattagctactagcaataagcagggctttgattcgaatctggctgcatggcgaccctagcaacctaattgctggggccagaatagccagcaatccattgagcagacacaggcctccatgcttacactacgacgggttctaagccgcgctacataattgataagcaagccctcgtcgctcttagagccaactggaaggaaac

SEQ ID NO: 15252 - DNA, 894 bp, Emericella nidulans
atcgccactttatcttgggatccatggatctacactttcttgaactctaggtatatcgtcctggggatgtttggacaaccctgctctgacaaccagggcggttatgtaccacctcatgagcaaagagatcacaatcaatacaaaaatgattttcgcacactgtgcattcgtaacgactgcttacactcattcccttggcgaggttctgagtggcctgccattgctctttcggggggattgtaggaaaggcaataccgcatgcgaaacatgtcgtgctgcggtgcgcacgttcccaagaaacttcaacccaattcattagagggaataaatgatgataagaccgagcaaggtgggttgataaaatcaaagtaagaccgcaggatggacactcagcaggaaggccgcagactttgctgttgcaccgcgagcataaatacccccccggcgtgggattagaatgacatgcgcagagagaaggaaaagactcgatggtacgggatgggaagcccatcataagaagtgagcttgcggattgtttctgagaatatgtggcaggagggaggtggtaccagccacattaactcttgaaatgctgttcgtaagggcacgcctaattaggtttatcgccccctttgtctaaacacactacggagattgttcctggcgcaggccacaattcacccaatttttatgataaggggtgtagcttaaaatcaccggcggaggaaactttgcaaacataattctccgtcctgctgggttgttgatgccacttacccttttgtggagtgtctttttataacccatgccctctctttatcttttttctagagtttgtcccttttatttacgcatttgccttctctaattcttgtgcttcttactccttctttt

SEQ ID NO: 15253 - DNA, 2490 bp, Emericella nidulans
ctacagatcctcacctctgatgaagaggacatagacgacctcatcttatgtttgcagcttgtccttttatcatcccgcccgctatcgagggaagagctctatttcgcaatttcgttcgccgattgcggactagccagacgggatatagacctgcaaaccgacacagccctcgatagattcatagtccatgtgtccaaggggctgattgaggttgtgcagtccagggcacagttcattcacgagtcgctgagagattttctcctacgaaggaacagcctcagtacactgcgggccgagctgagacagaacattatcgggagatctcacgagaaaatcgcccgggtgtgcttgaactatatatatgaagtcagtgaaaatagagcatactcggatgtagtgagagagttggccgaccttccgcggcatatgcggtccgaattcatcaggagacgtatcccattccttggttatgcttgctccgactttctgtatcattttaaggcagcccaggctgcaggtgtcctggaagctccttttctgaacctctcaaagatcttccagagcttgaggtcttccaaagcttgggtgtccgagccatagaggatgacggctctacgcttccgactgagcccaagacaacagaatggagagaatggaccttttactgaacactttgcctctggatattcatgatgagaccagagaagggcgaaaaactgaccatttagacgtcaggcgaagaatgaagctctttcaccgaccaatcttagcatctttggttcagcttgcggtgaagacgatcggaacctgagccaatgtgtttcttagcaatgattggagaatgagagcagagtcttatggctaaatcctaaaggaagcctcactattcagcgccagggacccctatattgggagtcttctcgcgcgattccccacagttgctgtcggtactgggactagactccaaagtaatgctcattattggacgtttccaaagccattatcgcgaaactcctactggtagtcgaccatccaggtactaacccaccccacatgttcgccgatgattccgtaggtggatctgacagtggcgttctaacgcgaggtcgggaatgtcaagaaatgatggatcccaaaacagcagcccggtaaagcaaatcacgtgtgaccggtcaacataagcccgttccgcggggccctacttaaagagagtgcaggacgacgccagccattttctttcgacaatgttgcgcagattaactacgcgcttacccctccgtccgctgcagactccggctcttcgctctcgttctcagttcctcgcaacctcatcatactgcacatactccgagatgcctgacccaagtgatcgcaaggcggtcacccgctaccttgagcagacccatgataaaatcttcgagagcaatcgtgcttgggttgcttcgaagaagggcgctgacccagagttcttcaacaagcttgctgctggacagtctcctgagtacctgtacgttttatgccgtctcttgccaaaagaggctcatctgacattttgcggcgactagctacatcggttgctctgacagccgtgtccccgcgaacgagatcatgggtctcgatgctggagaggtctttgtccaccgcaacatcgcgaacgttgttcctaccatcgatttgagctccatgtccgtcatcaactacgccgtcggccacctcaaggtcaagcatatcgtcgtctgcggacactacaactgcggcggcgtgcaggcagcccttactcctacagacctgggcatactcaacccgtggctgcgaaatattcgcgacgtctaccggctacacgagaaggagctcgatgcgatcgaggacgactgagagcgattcaaccgcctggttgagttgaacgttatcgagtcgtgccgcagtgtcatcaagactgccggggtgtagcaaggttacaaggagaacggttttcccatggccaacggttgggggttcaccttgaaggacggtctgcttagggatcttaatcttagactttcctgggaatatggcggatatccaaaagatctacatcctcccggggggttttattaaatattgtaagagtgcaaggggtttctcgccagggattaagggctaactactgggatccctcgcatagggtttttttttcgccaggtaaattacgttaaataattctagttgctttccaacatccctggggaggtaacattggtgggggtaaaaaacgcttctgccttgaatgaagggacttaaatccaaaggcttcctggctgattttcctggactgtttagctggattttggcagctatattagttgtattggctaagatcctttccacttgatgaaaattccctaaaaagggccaatttcataaggttttaaatataaaagaatccttgtcaacatccctcccactattagttttccggtctttatgcgataacttttttatggcttttta

SEQ ID NO: 15254 - DNA, 686 bp, Emericella nidulans
ttcttcgacgtcgtgtgggttctgcacggctagcccagacttttcgcccccggatagaaatcctggttctcatcgtcgtcatcatgggagctatcggccgctccagatgcaaggtcgcccagcgttgcgaacttctttggaggttgtttacgagacgaggaagattctctaggtgtagaagatgaggactttcccatttttttagtacttccctactctttaacacctctcctcttctccttgtctttcctcctttctattactaccaatcacttccttatttctacttccatttctaatcttcactttaaaccatcccattttcctgcttaatccaatctctttttttcccatacattactctctctctttttccatcttaccctctctacacttcctcactctcttcacccacatctcacttacctctctttatcctattccctttatttcttctctcgattcctcctcgacctcttctctccctctcaactcccctcttttcccatctgggccattccatctgatctaatttacccttttcttctcctccatctcccccacttccacaccccctcccctctcctctcttctgtccttactttcctctctctttctttaacttccccactcctattcatttcccctccaatttcatccctctatcctcacactctattatttaa

SEQ ID NO: 15255 - DNA, 775 bp, Emericella nidulans
tcacggcaccatggactgttgtagcgtctccattaatgaacttcaaagtagtctgagacgtagatctcattagtttttgcttggataacgggcaatattaacatactgcacccgtatatagaccccatttagatgtctcctcgctcaggctccgccgcttcacatgccaggatagagggacgacccgttccgtcacgatataaatcgaagcctcggtctaacatctatgagtattcgttcttgagagacagccttctaggtgtcatgacagcgacatactctaatagtatccaattcctttatcacccccggatgccgtagcgtccgtgatttctcgaccggtgctctcgcacgcggctgccgtgtcttgtccttggcgattcatatggtgcattccactgccggctgcacccgttttctcacacaccgattcccctgcctttcactccccttgttacattccgaccctcgctatttagaagtctttctctcttcctcccgttatcaccgcccccatccccctccgattgtctccctccttccctcccctcttgcgaccccgcttccttcgcccctctcttatcccccgcctatctatgtcccctcccccccctctcaccccccctagccgtcccactctcctttccctcttctgtcctcctactcctatctctccttactttcctcgttttttgcataccccctctccctcctcttcctccctatcctctctcttactccccccactccttctccatacccatctttccccccc

SEQ ID NO: 15256 - DNA, 410 bp, Emericella nidulans
catttattcatcaaccggccggagggggagttgatcataatagaccgcctaatgtcactgctactttcttgtcccagtatttgaaattcttaccttttttcgaaggtcctaccttaaaaccctccttcaggatgccctctgctccccaccgcttgccattgaacattatggggtcccctgtatgagctcgcttgcttttcatctttgccggctctaatcacctctccatgcggggaaagagtcaatgacgcccgccaacctttctattttcttgcccgatttctctaggccacggccgcgagaaatggtaactcttcagctgatcatctccgcgggctttcaattcttgaggtatgacgggttgctctgacatccagcaggccgctgctttgaatttaacagcactgaat

SEQ ID NO: 15257 - DNA, 477 bp, Emericella nidulans
agggagatgggaggcgactagcgccctaagatctgatttcttttaaccgagcagcgtactcgatacgcggggaaggtataggatagagcatggtcatccactctatagccacgccgaccctttggtcctcttacaacacaataattgtggccagtcttgcctctgtctggaatcgagcgcccacgaatgcagcgtccacgaaggacacagcgtacaactggacaacagcggcagtgcctggtgatcgacgaacataaacgcctggccatgtgcctaggctaacatgctcaaatccctgactgaaaaacataaaagcggcgcgcgggaatatcgaaaagccaatggctactgccgtcgatataccgacctgcggcgtatgaccaagacagtaccaattataacgcggatggaaacggtcaccgttgatggactcatgcaagaacacgagaaaggctacagtcagaagtgcgaacgaat

SEQ ID NO: 15258 - DNA, 391 bp, Emericella nidulans
gcctaccacccactcgcacacgctctgggctctgaaccttggtgcgatgctctacgaggatgggtttgggctcggtaactttcttcactcgctttacaatgcgcgtgatcgtgaattctacgagctcttgcttgagtgggcccccatgggttacaaacatagctacggcccggacgtacgcattcatatttccatagaaatggatcttgaccaatctgtcgacactcgactatgacggagtttaccccaaggcgaagtggggggatatacacgggtcagacaccatattctgctcaagaggcctggaatattgcgccatccgacgtccacgtgaccaatgaccatttcatgcgctcctgtgctcttggaatctggctgaccattcttcgcc

SEQ ID NO: 15259 - DNA, 1505 bp, Emericella nidulans
ttcagcatcaaaatcgtagccgtacacttcacccgcttttttataactattgatggtgcggtaatttgggttgttgcgagatccacccgacctagcttgtctataactactcccaacaaaatgtcgagtagatttgtgtccctgtgattgagggaacggcgactcgttgtcaaacaaggacgggtacatgttttgtcgcccgtgacgcccaatgtggtgccggggagtgtgcgtaccattgccatcaatcctcgagtgagaacgcggaacttcgtcgacatccccgtccacactgcttgtatacgtgttgtttgtgaatttcatgctgcgcttgcctgtaacactgtgattaccttccctgatcgctgcgcgactacggccagccagctgatccacctgacttgccattgacgttgcacttggtgttctagaatggtacctgctctggcggaccgggtattggtcttgtggattggactcataaacaaaagtctcatccgagtctgaaacgtcggcttcatcaacagcgctggctaccttggcttcgaatatatcggccttggaagacgcagccccactcgtaagggcagccggcttgcgagagcgtcttttttcttttttgggccggatggtttcggtgctgggtttcatccgcaaagttcccgcgtctaccctactggggccgcctcgttcgccggtgtttacgcccaggccaacttgaggtatagaactcacagtctccgtttcgacgatcatatttcgaacagagccgtctgcaggcttggaacgagaaccgccgctcagtgatgtcgtagaccgttttgggaggatggtgttggggccctttgacgcaaacggcggacgccgacggttttcttccatttgctctgaacttttatttcccccgctgtcgctgccgctttctgtatgaattcttgaggctttcggggtcgcgtcttcgtcgattttttccagcttagcatcttcctgggcgggctgaagaagtatagtgtcggttgaaggtgtagattgatcgctagcctcctgaactgtttcaagagcagtgcctgaccctctatttacggaacgaggcgcgctcctctctgatttggcagcaaattcatcacctgaaacctgagtccgcttgctagatgtattcggcagatgaggctcctgctccgaccgccgggaaccggcccacaacggcatactggacttgtccggactaggcggatcggaggacggctcgacatttgtgggaggactaaggacaagaggtttgatggtctgggaggggagttttcccgggccagggttcggacttgttgtagcagatcggtctgggctgcgatcaagcgctcgctttcgagatcgggacgatacacgagaattcgaagtagaggtggaattacgcaggcgctgagaggaggaggaaagataaaggttcgcgggaggatatagtagagttcgtggtcgacgaaggtccggaaacgccataacagtat

SEQ ID NO: 15260 - DNA, 892 bp, Emericella nidulans
gaggtatgataacggtcaggtaaagtaacagcagctttaccggcccggggctgctggtacataagttttctctggggtactggctgaccatggtccatgactctgaaacgaagaatggtgggctgcatgatgatggtgatgatgatgactcttgcaattgccagccgccgcccgcatgattgagcacaccacgcgctccagggagtgcaaagattgaagctatccatgggtggtggaggctgatggagggtggtgtcattcttatcttttacaattccctttaactacttatgaccggtttaatcacttttggtcccgatttggtttgtcccctgtactcctttcatggcccactgcccctagccacccattgtgccactcaagtgcctctgtcggctttcaatattttttatcaaatagtttgttctgttcttcaaaagaactcattctttttcctttttacctctcttttctatcttccctttcttctttttttatatctctcaaatattctatacttctttcacattctctaactatttcattttaatcctcttcctatgttactcccatttatatttctattatacctatttttttttttcatctcagcgtatttgtgttttacttttattttcttatttgttcttttattttttactttcttctttatttactagttagcatacatctaaccgttctcttatttcattctctccattattcttttttctatttttctacgtttctccccttttttctttctttattctattgattccttatcttacttttatgatattttatatttgcctcattatttcctctctcttctttacttcttttccctctcttcttatctattcttttttttattttacctctcttttta

SEQ ID NO: 15261 - DNA, 4022 bp, Emericella nidulans
cgccctttggtcttctcgttctgcacgtccctttcctgggattgactctttattttaccttgcaacttacaaacgctgccactgatggaagctttactggctcattcgttcgactacctttcttcatacgagccaacgaaagtgccaaaggattgcgccaggtggaagggcttttagcacagatctgcctctccagggcgaaacggccggtgtctgataaacgaggctcaccactgttatgcggcgctccacaatcaggctgtaaagcactgtccgagcttagagatgaccctgcgttcagagaatttttcaaacttcaagatgggttccaatggaatggtacgtagcctcgttagtaggctgttcttgagtccgtgctgatcaaaatttagtggcaatgcgcttggtgacttgtttagagcacctgcttggtcgcgagaatagcggtaccaacgatcttctcattctgtcaacacttgatttaatacaaggcgtgctccttctccatccgccctcgagaattctgttcgcccgtgaaatttacatgaaccttcttctggatcttttagatccgatcaattgccctgccattcaatccgcaacgcttctcacccttgtcacggctctgctagaccaccctgccaatacgcggacctttgaagagctggatggattgctcacagtgacatccctcttcaagcagcgctcaacagcgcgtgaagtcaagctgaaacttgttgaatttctttacttctatctgatgccagaaaccgccatggtctccaccagtgctccaaatacagccctacaacgcagccccagtaagctggggggtgggcctgtatcaaggagtgtcaatgtttcggggtctcatagcaatggcaggggcagccgcgacactcgaacaacagaggagaaacaatctcttctgggaagatatttgcacaatgtggaagatcttgtggaagatctcaaggaaacggcaccttttggagctacggtctattaatacgaatgatgagcaagatacgcaactacgattcattgagcgatgaaatgtgtgtgggttacgagtttactgctcgttcttgcattacttgctgatgcttctcttctttctcattttctttccgtcttctccctctccggctggcacggcaataaagcgactttctcttatcccttatattcttttacaatccccttgtctgtatttttttttttttttccaaaactttcttcttttccttttctctttctctttccattctttgttcttttgtttttgaattcgaattttagccgaaccgccagcgcgttctaaacattttttttccctagtgatgcctcatgtgccggccatgatgctctacctgcaatttcctatatcaaccaaactactcagccacatgataatgtccacaagagaatattatgatcccattcatagggtcattcctgaactgaaagaatacgatttccagacgtgtactgtagaacctcggaacatgagtcaatcagtgactcatctatatggtgcctcgtaaaaagcatacgcgagaataaattcttacagacgaagtcaaagggtttattcacctcacctcacatttgactccgtgcaagatagagtagccagctttatcgccgaagcctaacgttcaatttggtcaaggttgcctggccactgaatcacgaagtgaaatataccgaacacaacaaacctcggcaaagcacctgtatacgtccttataatccaacccagctgaaacttccatgacaaatcaaacaatccaggaagccctcggccacgggcagggaaatgatctcggaaattcagacggccaccgaatcgagtacgtggaaaccattgaggcttataacaaatgggcagaagtatgttcccaaccatgtatcgctggcacaaagaaagatatgaaccatattcgtggataggtctatgatacagacggaaacttcctgcaagcactcgacaccttcgagatgaaggatttgctcccgcgctttctgtgccttgtgcagacacagacaaatgggaagtctaatatgacaccaggcgagcaggtactcaaacttgtggatctaggctgcggtacgggtcggaataccctgcagctggccaagtccgcgccgaaagaagcccagataattgggctggatgcgtcaccgggcatgctggaggttgctgaagggaatctcaaagctcagggtgtaatgggcaccgtggatgaacgtagggttgtgctaggtgtgtatgatttactgtcgcctcggccagaatctctacctgtgtctttgcgtggcgaagccagggcatcaggtgcgatttcgacattggtcttggagcatattccgttagacaaatttttcgaaggcgcggcgcgattaattagacctggagggtaccttcttgtgacgaatatgcatgcggagatgggagccattagtcaggctgggttcgtggatgtgactagtgggaagaagatccgcccgacgagctatgcgcatgaggttgggaacgtcattgctgctgcggagagggctgggtttgaaattgtgccattaaatggagctgagaaagtaagggagagaagggtgaatgaagagatggtggcactgttagggagcagggcgaggaagtgggtgaacgttgtggtgtggtttggggtatgtttcagattgaggtctaactaatggtacattatgctgctctctatggatagctgagttagtttgtacacgggtataaacattcttcgttcttcaacgccccgactgaattcgcctagaagaattccaatagccgcgctcgatgttgaacaagatttttatactgtgataatagctgctgcagccggttatacttccagcccatcttttggtccagtatcagatgcgtatatgcaaacacactggcgtcgaacagtcccggattaggccgctcgaaaaagtaatccttatcgccgagtaccgtagagagcgcttcaaaagcttcagccgcttcggcctctaaagcaccggcatcgatatatggtgatgacttaaggagttcatcccgcgcagcctgctgcaattgtgctgctaacgcgaagcggacggcggtattagtagtcgagggatcaacataaagacgtcgcgcaacagcctcaaaattctcgtgatttaggtagagatggtagagctaccaagctgtcagcagccatgttcatccaattcaagtacagctcatacatacccaagcatttcgtatcctggtatccagtaaggacgaatatacttcgaagcgcacattcaattgctgttcttcttcgcagtgaacttcctcaatggcccaattttgtaatttattggaaggaatcggcgcgtcagtaccgactgggagtgccggaaggaggaaaggaaggaagccggatggggacgcatggttgttcgaagggacgagctcgaaatcgatgcccatgaatctgaggtaagcctgcgcatcaaataatgtcaatcacgagtagaacccgacgtatgatatttctattcatacctgccacttcaggcattgggggttgaaagacggccgcccccgtcgagctcccgcggcatcgatgaagacaaataattgatttccgcttcgccccgacccggcgtgatgtgggagatcatttgcagggtatgtgagcaagggaaagcggtcgaacacgcgctttacaggagcaggcactgagaaaaagtcacggacccggcgtggcgccctcctgctgtcaggtcgctgttgggggaggtcgtggtcgtcgtaattggaggtcattggttgcggaacggcgaattgagagaggtcagagaactgcaacacgggtggaggcagcgaggaataggtttcaatcggcgaaactgtaggggagcgactccgggtgacgctatccgcggtttgagaagagtgcgatgagttccggagacagcctcgaacctcacatgccaataatttctgggtgtaatttattgcctgagat

SEQ ID NO: 15262 - DNA, 2009 bp, Emericella nidulans
tgcggaactctcaggagagagaaagcttggatccagatgtcatatcgattttaatccagcaggctgttcccggggttcctgtagaaacgtccaatgaacgcatcttgaacaggggataggcattcgtgaaaagcccgttacagacacgatggggccatggcaatccccgtctcacttcattcgttaggcataaccccggatccggaaacgtcggccagcacgcaacttgtccatggttcacgcatctgtgacgggtcccgtgaggggtccctcaatgtttctaagcgtgtttcagcttgccaacatcttgcataactagggccgccacgagcacatggcctacttctaagcccagggttcgttccagtgtttcgtttttcgagtcctgctctatacacaaaatcatgtctagcaatttgacgtcgcaaagggaccacgaaaaacaagcaggctagacaacgacaagcgtcgaatagcgctggcctatcctgatgaggtgatatggggacacatattcaggtaggttgaatcgtcccgatgcgcctccgctagttgaagtttgttctccagccgaccttcggccagaatcacgacagcgtcgtattccaaatcgttcaaatagcctaccactttctcaattcgtattggccttgatttattctggccgtcactgactcgcatcactcgatgacagattccagtgctgaaggctttgcctgtgcgctattcaatgtggctgatcttgattattgacccaacgcgaagtcgggaatctggttgtgctgttctccagttccccacttatcgacctcgcttatgatcgcttcggtgtgaacccacgaggcttgccatggcggcgccgccggcgaatggcgcagatagtaccagaccgccgagactctgggaatacagtaaacatatacccagatgggaatggtagggaactctcctgctagttagtactcgagactctgccatggcgctcaaggaccaaggtagacaacggaatgaccgaagcttgagacggcaattcagccgttatcagacatcagtagatcagatgggtacgcggaaagcgggacggtcgaaataatatcaacatcccacaaggggcgatcacgggagccgacaatctccgacaaccggcgaaactcaattataaggtagaacacggccaaggtattttatgcagcgaatatgtctgaatcaatcgatgcagcagtcattattgctgaagaggcggccgactcgctgaggaaccgacaacttcccagcccccaccgtcgcacggttccccgacccaccatctcccgtaatcggttcgcggatggaggagttggcttgggcttgattccttccgagtcaagctggaaaggatctaccgatttatctccaggcccattgtagacaaggagtgcggacacttagaacgctcagagttggaggggttgatcgaccgggtgcaaaagggtagtttgcattcaggcacaagtggattgtgcagaacgacccaaggtcacatgcttctgcttggcacacgtgcactgaatagtattgactactgagtcaatgccacctagaagcttcgctgtgcttggctgtcgagaacgcgaccaataatcagggaacaggaaatgatactactgcacaaaactgctagtacgatctctgatccagcgatctttttcaggagttttgttccagaaaaaggattaggactcctagttaatcgtgcagtttcgtattgtgatacgtatcagattcttggtacacatggagactgcaactatcgctttttacctcgcagcagcatcactattgaactctcgagtgctccttgtaccgtatggaagggccggcgggatacaatttccgtggcgtactccgttttcctgaaaaggcggggcctgcttaagtagtcttgccgtaaatgcaaaacaatagcggagatgggaaaaaacagtcctctgagcgcacgatcttcatctgtcccggtgctatgagtgcat

SEQ ID NO: 15263 - DNA, 1619 bp, Emericella nidulans
aaacatcttggttcgcaccgaaacaccaacgttcacgtttgtctcgccattgctaaatttcccaagttctactttggccgtgaagtaccgagcctctcgcagaccgtctcggtgagaagcggatgcgagttgcctgagaatatctgaacacccctcattcttgaatcgagcggatcaaagaatcatagacatcaagctgaaaaggaatgagccggtcaagaaatgagtgtcatctcaagggaagtctggaaaagaaaaaaaaaaatccaaggacgaagggatgagaagaagctaagtgcgccccaccgacattttctcgtcggaagctggcgtttttggtctccgtggttccccgtattgatgccctcaccaacgatctcccccaccacgatcgttgccataaagttaacatacgaacctcatcgaaaatggcgtcgaaatttccagaagtccagggagggggctcattaattgttgcatggcaagtaaaagaaaaaaatattctagtagtaggtggtggtgaagtcagtttgttccctattctgccaagctatatatatgttgcagctctcttacaatatccgcaggtagctgctggacgtatccttcatgctcttaatgcagacgccaaagtcactgtcgtatgtccggcatcaggattaaacgacgaggtggcctaccgtgtgctggaaggccaagtcacacatattgaccggaacttcgagccctccgatctggatggcgccgacatggtactctgtgccattgacgatcctgaagcttcaacaaaaatctggaaactctgcaaggagaagcggataccagctaacatagccgatgtcccttctgagtgtgacttttactttggcagcgttcaccgggatgggccgttgcaggttatggtcagtacgaacgggaacggaccgaagcttgcaagtatggttcgaaagaagatcgcagacacccttcccaccaacatgggggccgcaatcgagaatgttggaaagctgagacaaaagttgcgggaggtggcgccaagtccccaggaaggtcgtaaacgtatgaaatggtgcgtataatgtcttgtgatttctgctcatggactgataggtagtctaggatgtccgccatttgcgaatcatggcgactggaagatctggttcatatgactgaggaggatatggaaactctattgacacattaccagcacggcgggattcctactcttggtgaaattcgatccagccttccgccgccgtcgactgattgagactcagcatgctgcatagctctgaagattgtgtatttaagctattttatagaagctcattgctggagattccaggagctaaagaagggcaataaacagacaacattcaggtatggctaatttacactcaacactctcataaaaccagcaaacctctcacggagagggaacaaggatatccaaaagggaagcgatgtagagcaagaatggaaactgaatataggagccgtctaaagcggatataagagaagaaaaccagtcagcgccggccgacgctatgcttgcgagatggatgctccgatacagaatgtcggggactaacgggtgtgggcgtgggcggactggtaga

SEQ ID NO: 15264 - DNA, 4734 bp, Emericella nidulans
gaatgcatttgatatgagtataaagatacgagagactacactagtgaaggactgtctggtcataatttaaatcacaagcatgcgggtgctgcaggcaatacttcggaacgacagtagcagccataacgccgttggcaagaagatactcgcggaagttgaggattcgttgggtgaagagagtggtgcgtttgttcccctttgcatcgcggttgcctgaccacacgagttcagcgagagctgcagcccgaggccaaaacaggttggagatgttgacatcgtcaacctgctcggaccagagcggtgctgttgcgccgatgacgtgctttgcttgggcatttgtgaggttgagggtaaaatcgtagttgtagatgcgttgccatgtcttgtacgggccgcaccaggagccgtcaatgccgccatagttgaaactcggggtgtcagggtctgggttggtctgctcgttgtatctgtcgtcgttggtgacggaaccttcgcggtcgcagtcgaggtacatgaagtccgcggaggagacgatcacatcatagccgcgttcggtgagcttgttgatgttttcgaggccgttgttccagctttgcatgacgatgtctgtcgggacgtcgtcagcatgctcggtattgaggacgacgtcttcccacataactaggcggcgggagtcgctgacgctgcggaagataggcacggccttgtcgacccagtgctgcatgaggtcgttgtaagtgcgcgaggggtcctcttggaaccattcagtcacgtaggtgctgaagttgtagcagttgggctgaatctcgtcgccaccaacatggaaccagtcatcggtgaagatgcttgatagctcttcgtacacgtcttgaacgacttcgtacgtcttgggattgatgatatcgagctgtcctgggttcggctggactgcagtatgcaacggccagttgtcgttggaccaccaggaattggcgcaggctacaatatcggggtcagacctgttgcacaaccagaggcagagtgggcgggcatatcaatttccgggatcacacggattccacgggcgcgcgcgtacgccacaacattgcgcaggtcatcatgggagtaagtctcgcgcgcggagtatgcgtccttggtcatctccgggtaagcatcaatgtgcaccggccatgattgggtatcgtccagatgccagtgaaggacattgagcttcgacagtgccatgccatcgagctgctcgtgtagcttgcggacagagatgaagttcctcccagtatcaaccataagtccgcgatatgggtagagaggcgcatctttgatgtggacgggctgctcaagaatcagacccccgtttccgtctgagatgaccaattgttggagcgtagtgaaagcgtgaagggcgccccagaccgtcttcgcagtgatatcaatcgcgtccgaaccagccttggcgtctagagtgtaagattcgtccaccccgtgctgtagatcggcgtcccaatcttccacatcaacatcgacgaactgaataggcacattggcgcgcttgcttctagtagcagcggcactggcagatggggttgaagttgggaactcatcgaattctggaatgggtgcttcaattccggcagggacccattctagagaaacaatagtttcccaagcgcgattccacgcattcgtaaggatactatcgtcagtatctcgttcagtgcgcaaactgacatccgatagcggttttgggcctgaatgaccccaggaaatgtggcgtggagctggtagaggattgaccttgacggcggcgaccgaggacgccacggcaagcaacacggcgtagaggcggaagtaggccatagtgttctaatgataagaagacataggaagttgtaggattgattcaaaaagagagaatgattgttggaaaggagagcaatgagagatgagatgcaggttaagagccccgtgctgcagatcgaccgatctgccgcctttatatatgagacaaacactcactcctgcttttcttctttccttcgcgacacattccttgtcacgcgagaaaatgctccctccacttcttcagtcatagaacaaggcactcatccgactgaaggctcagtgcttcacatctccaagtctctatcctaacacatgtgaggccataggatcagtgtgatcagcatcgaccggagctaacactctacctgccagctccaactggttgacgcttcttcttagctcagggcttgcaagccagcaatgcttctgtttcatcgccgacgcaattatgttacatcgcattgctggctgctgactccaggtcaaagaccttgtctctaatccagatcggtctcgtatttcgagcttggctgctacaccatcttttatcaccgagaccttcggggtggctttgagcttgctacagtgacattcagactggtatcggtcaagtttggcccgttctatggtgcttcagcttttaccgtctcgattatgtccattagcaaagcccaagcagcttcaggcagtcgatcgcctgacgtcagttgacttcgcgcaggtaccatttcgtcgcaacgaagattctccacttacaaacaacaataaacatccatgagctcgcaccatggaacattccgctctggtaccatggcttgttgccgagaatggcatgctccccagctccattgacattccgacatcttcggggcttcgcgatctagccttcctttttgacgtttatccgtctaatcagccgaggatgcattccacaaagaaccaatccaagagctctggccaacttctccgcgcagggttgtaaaattccttgaagctcgtgcgtccacgcgacacagcttcatgcaagatgaaaacaatctgggagatcgagtcattccttgaccgcggtgtatctcttgatcagaaatgttgcgacgaaaactaccgacggcagccctcaaattatccttatgctaaagcgggatggtcgaccccatcgctctttcgctgaaccagacgtggagtagttcttgtccgcattaccttactccgcagctactgcagagcaccgacattattacacaatagtatttctcttcttgcgagccatctgagctgtttagagaaagcgcacttactgccgtgccctcaccacttgtatttacgtatactaagaccttgttgatgaccggggcaagcctcgtgacttgctattactcacctacgcattggcggcagttagtcaacaattgtaaaagtgcaatgcatggttcagaacggtttggtatctttgcggccgttaactatttcatgtacattgtataaggttttattgcgattccagctgcctctccagctcgatactctcgctgaaagcttccttcaatgccgctgcttcctccgatgaaggcgcaacgcacggccgccgcggctgctgtccatatccgcgataggattgcagtgcactcttaacagccacaaacccgcccttaattgcgagccagtccgcacgggccactatagcctgcactttttgcgcctcttcgacacggccggcacggtagagttccatgatccggacacaggcacgagggatgatattggcagtaccggcaataacccctgcgccgcccccgataagagtctgaagagtgaaatcgcacgagcccccgaaggtgaggaacgagggtccagcctgcgcaacgatacgggtcagcttgcccgtattgccgcaggtgagctttgtgccgatgatattagggtgagaagaaagcgcgaggatgtcgtcggaagagaggtcgagccccgcagacgcgccggggaaattgtagatgaggacggggatcggagaagcgtctgcgacggcgcggaagtggtcgagtaaggcagcggatgacacaagactcttgtaatagctcggcgggaggacgaggacatagtcaccgccggcggccgcaggcgtctttgcagaggttgatggtttcgcgagtggagggggcaccggtgcccacgattacgggcatggaggtggcccgacagagtcgagagcatgccgagtcgcagaggtaatgagattgcgctcttcacggtcaaggtgaacggcctcgccgttacttccttgcacaacaaatgccggcaaccccggactttgcgaggtaggcggcatgtttctccacagtggcaacatcgacatcttcgttctcagcgaagaacgcaacggtagggacgtagacgcccgggacgagcggacgattggccatgacctagtgacgctcttagacaatgctgtttgctagtgaacgaggcgtgtttggtaacgacttactgcggtgatataagctctgaggagaaccgagaaatgcgaggatgcgacggattagaaaatggacagctggagggaaatccccggggaggaggagggtttaaaagtggaggaagtcatggagtctgcttggaatgtgagtttggagaggggcgagcagaagaccggatacggcaggctggaagctacctggttgcaggtccgcagctcgctggtaatccatagtatccaactgctctatctcacccccacgcaaccccacacaatgagggtcttctccatcctaaccactgctgcttcatacttcgtcagaaaccagaagggaaacgtgactgccgctcggaatactacgcaccgttgccccacgttttcttatctgcaacacccatctccaatgaagacacgccaagttg

SEQ ID NO: 15265 - DNA, 2987 bp, Emericella nidulans
ttatagaagctcattttgaggtttgacttttggcacatgccttgcccaaggctgtcaggcggcgccattccttcggcacttggccggctggcgattgtcctatcgatgccgttgagcttcagctttgacgttacacaatgcaggatctagtcgcgaactgctgttcctttgtcgggacaggggcgagttgagttcggctggttgggtttaatctgagctgagtacgtcttgatttagcaatttgagcaaaagcacatgtaatatcatcagagcaatatacaccgtaaatgcgctgcccaatacgccctagatagatgcattcccaactacagacggaacgcttcgtttcgcattacctggctgtgcctcgcctcgtgttttccagcccctatgtaaacccaaccatcattatcagaaatccaacagtacctacataatggaaatggcgcgattgatgccatagactcaacgaaataaaaccgaaacaaaatccgctgactggctgaagtgtatcatgcaaattcgtttcactttcaatggtacggtgtaaatggttgtggttgcaggaacaaagcaaaaaagcgcaaaaagaccatattttttattcgccaaactttcttttctccttgcctcgtgtcatttctgaatgcaatagcgagaaggaaagaaaacaaaagaagggtgctcgcggaccaggaaaacagaggaaaataactttttgggtttacgacaaagcaaggcaagaaagtcgagtaggtactgtttatgctttattagagttccaacgcctcaatccccttctcaggctcttggctctcggcctccagggcgtccatggcgcggtgaagttcatgctcgccaacaatgatagttcctgcgcgtgcagtgctgaggaaactgatctcgacggcgtcaaaggacgaatccagatccggctgaagacgatgcgtgggtgggctggttttccggccgggactgtgacttttgttcggttttgatgcacgccgagagccgttggacaccgggatgtcgacatattgagctgaccgttcgtaggtagggctggagctgtcgatggacagagtagcggaggccgcgaggctgtcttcggagcggtcgtgtgtagcatcggctagtcggcttgcaacaccacaaacgattccagtagcttcgagtggaagcttgcggagatctagcataatcgggaagagtatatcttctttagagccaaggaggaggctggaatcatcgtcgtctgcggggaaggttgggtcgctagagaaccggggtagaaggcgctgctctaggagaagagacgctgcagggtctgcggcggtaagggtgagagagagaaatcgaggcctgtcaacgacaagcgctgttgtaagagcatcgcgtagaatggcgatggagctgtcgtcgttggtgaagcggtggtgcgccgcacattgtactaaacgtagggaagtgtcgacatagggaattatattgtttcggcgcaatgatgagaaagtgcgcttttgcagttcattgagagaggatggtggaggtgtggccggtggggagctcaaggtgctggtggagagcggggagatagggctgaagggactgttcagtgatggctggttgttgttgataaaagcttctgtcgaaatctcgaactgaaacccacggttttccaaggcttcaataacctgtgctttgctctttaagggcacgataatgtagtcggcaaaatacgtcgatatgaaaaatattgaactatacttggtcagtctgtttatctatgctgaggcaagaaaaactgcacgtacattcctgccatagccaacggcgtagtcagctcaagaacccgttgcccagcttctagcccttccccatacacttgcattgcgatgaagtcgtcgttgcttatagataggcggctctgagaagacgaaccgagctgagagaaccgttcgagcaaaggagcaaagtactcgtcagcgagctgccgaggacacataatcgagcattccaccggtgtaatggaaatattcaaaaaagcaggctgcacatgccgagagacttcaacagggctgtcacaaccacgagtctcggtccgaatctcattgataggagcaacttcatgaaataggacctgcaagatggggtttaagaaaaacgggtatagatccagcggaatgtgcaccagggccagtcggtcttcctgcagctcgtcaatagtagttagcaaaatcaatcgagttcgagactcctcattgaggtatcttgctagggatcatgcaagcaacgcataaagaggctaggacactgaatttctatcaagatacgacgaacgtaccataaactggacctgggctgatatcagggacagcgagttctccatcttgtcaggtggtaccgtaaacttgtgttgcctagcagacgaagaggtatgaacgctccggagcaaggcaatgaccacgggtccgacgaaaggctgtgacaaagttaggttgagtaacgaagaggataggcaacaactcacaatctcacgtggaagaggccaacaatagagaataggagtagttcttagaagaggatagtatgaggaatggtagaggcaagcctagccaggctcgtaaatggttttgagcagatttgagctaaagtaagacaagaccaaatgtccgtctagctgtggctggaagcaattccttgttcctttcctttcttttttcgccggaatcttttgtagagcacagaggctcgcgtcgtcattgtcctcgaactctgagattgcagttacgccattcccgacgagatggtacaagaattggcggacgagagctcggaatgcaagaggcagctggcggttactcgattatggtgctattcaaggccgatattatgacagcggatgtcaacgcaggggatgctggagaaaggaaagtgggtgttgggaagaagcgcttttgcgctgttcaatggtgagcaggtgactc

SEQ ID NO: 15266 - DNA, 780 bp, Emericella nidulans
aacatgagatggctgtgccagcaatcatcatcctttttcagatctagtggcattagaggataatgtttgcattgtatataaccatacctgtatatatcccttatccaggccctccgcacgcattacacgcttacactaaaaagtggactcagaagtctgaatgctgctctcctcttcagaagttggaacaaatatagagcttatggttttccacacagattcagctaatgggctaaagagtcgcttcacgcaataggcacagctttccaagtacttaaagtctttgaaaaatgtatataaagacagaaccagcccattaaagctttccagtcaactctatatggcccttctttctctattggtgaatccagcaaaagcctggccacccaggatcaacccacaggcagttttgggtgttggttctggatcttccctggtccatcagtctggtgagtattaaactggatttagaattattctccttcttaattcacattctggggcatttatggtttcctttattttcttattttctccaggatgtgttttatatatctttttcatttttatattccattatatgttacttttatcttcttctcatttcctttttgtaatttttttataatgtgtctgtcttctttcgtcctctctttatacgttatgtctcactaaggttttttctccgtccttacttttctgtttgaggtttctatttatttctatactattccttatattcaactatttcttctttccttccctcttacttatctaccc

SEQ ID NO: 15267 - DNA, 2864 bp, Emericella nidulans
gcccagaagactacgagcaaataagaagccgtatctgcttcgctcatcccgcggcgtctcatctccgctactgcggcttcgatcgcccagctctggtcactcttttcggactcgggcaagcgcaagaattcttgcaggcagcgttgtaccctagttctcgcggtgtaaacgtctctcgcaaatggctccgggaccttaaacaggagcttccagaggtcatggtccacctggacatgatcatcaatgagacttgcggaattccctaagatggcatttccaaaccaggctgtcgtgattgcccggatactagctacttgggcccatctccataacgagatggtcacttcccggccatcctcagacgtctctaaaagtgccgaagcatcaattccatcccagcgtacctgagtctcgagaacttccaaagttctagctaagaggtcgtttccaagactccgatcaaggagttgcttcgacaagagcccttcggccaccttaaaaagtggcggacggttcgtgagtgcagctttgctgtctggtacggaaatgttgccacgctgatggctgtcaatctccaaaatcccaggtttggagcagccgagaccatgaaggaggtctttgatatgctctgtgtttattacttcgggacggtctctcaggacctctagcgcgtcctgctcggagaaaagaaagataattgcttggccaaatatggtgagggtcaccggttccccgctgccattgcagtattctctaattgaccgtaagccatgtagaccggaatgggatctttactcacatggtagacgatattaaaccgtgcgggttccgtagcagggaaattgcatggccttagactgtcagtgctctgaatggtttgagacgaccgcaggtccttaccgatgactgttctagagttagaggcaaattttatgctcattctcacatggaagacttacatgggatcgtatatggaagttcccttggcaagtttggctggagcaaagggtggacggtgaaacgccagaggcgccagagcacatatccgacaagaccgcataccagcctgatgagcaggagctcagagacaataacatatggtggcatgccttaatgaaattgactgaatcgggcttacttgagaaaatgtggaatgacggctgtaacagtaaccaagcatcgaatttatccaactccaccaccggaaccttataccctggatcctcttatcagccagagccatcaagccacggttctcatagcaagccgtataattggcaaaatgaagaggggtattgggtcgggcaccagagaatctcatccccgctctatcgctggctgacgcggcatccagccgtctgcaagcctgcagttacagggtctttttcctaacttgtcaaacccctgtatgtcatcagcggctgcctgacttatgacgccctaatatcgcgcagccttgtcattgcatctattagcgtactctcggtgtttgtctttgggggtcacttgggggagaattcaacagccccctaaagtctgagatgtcagctccagcaaagttcagggttcagatgcacctcatcttttccgtaggaagccttacggtctttgcctttcatgtttcgtcgacagctggaatttatagtgcataatagaattagatttcttgctccccgggcgccctaggctggtgtcgtcctccgtgggactcttatcctgctttccagagttctttctttcaacatggaaatcactgcttacttttgtggcgcgctgctgctgctactctggtatcgggtatgtgctcgacagagtgtcgacaagactcaagtacagctaaggcagaacatcattcttgtcgagccctcaatctatatcctcaaactcatccgcagacttgagtacatttggcatggccctgaaatactgcgccaggcacaggtaggtctctgctttaccccggaccagcagcgtagaggctaagcgcatgtttaggtaaaaaatacgccatatgccatacctacaccggaagcgtatcaagtgcacttctcgtctgcaacgcacatcaagcagctgatccaggcaccagatacgcatttatcactccatgctctagcaaaggatgtatgtttcaaccttacctatcagattataacacccacattacatccactaacagcagccagatgtttcagcccacacacaccatggacggactcgcagttgacgattgcatgagcgccaacggcaccattcaccagcgcgccctttaagctgagctacgcttccaccttccaactctaacttaacctctgagcgagtgcattgtgagaaccctcaccaaggaggtatcacaagcattgggcagtctagccgcaagttgagaccggttggccccactacaggttttcccctagcccaaccacttggtgttaagggcgaacgctttactttttttgctcggggggtttcacaacccaattttcttaaggctgccctggatatccaaacatttatgcaaactgttagatttccccctcctcctcttgcttggacctttgtgctccccctttggagggtttaagctcgcggctcctgaattttattccatttagcgccctttttagccattgtacaaaagtcaacccggcctggatcttctttttttcacataaccaaaacatttatgggccccacctggctgctttaatttctcttccacccctttttttattttccttcccctgtagtttctctacattacttgctattttcttttaaccctcaatcatccatttattttttttttattaatataaactctataattacaattcctttgtcttcatccttatgtgctcttt

SEQ ID NO: 15268 - DNA, 800 bp, Emericella nidulans
aaagttataaacagacagacgatgagtccttgtagattttgaatctccatcgtccctttaatccctcggttttggtggttgttaagcagttcaggaagtgccaaaactggcgacgttcccatgacgtacccaaaacatttatctatgacaagcaattgatttcgccagcgtcgtacctcaaggaccgtcttccaacaccaagatttagatactaattgctgattgacagaaaatgtggttcatctgaccaggtaacgtcagtcaaagctagctccagctttgtgcttgcgccgcgcttggtttgtgggggcccccgggctgggctctattcccatctcattgtggaattttatcgtccaagtatcaattacccccatacactattattgggacttactgtttgcccaataaatgacatgtatatttccctgtctgtctacgcgttttgcattattctagtgttctcttattaacctatcattctttctattgtttcattttcttgtttcctcttgtattttataccatttctttctatcctcttttgtatttccccttatttctctcttactgctatttccttattttttttattgtgttctcatctaatcttttatactatctttagttattatttactctctcttttcttctctcccttttttgtttctcctcaattttttttcccatctattcttcgtatcttttttacttatacatttcctctttcctcctattatttatattctactttactacttttctttctcttataattttttctttttctcttactctgc

SEQ ID NO: 15269 - DNA, 451 bp, Emericella nidulans
gcgcaggaccgggttggtgctccacggacagggctttatttttctgtgcaacgaatatcgggggacggacgggggcctttataaactcctacgaatgaacacatcaagcacctgtatgagacacacatatccgttagaaaccggggcctcctgatgagatactgggaccgtaagcaacccggctgcggcaaaacgtgaactcccagaagggctaggttaggaccggctagatgcaactgcggatggtggacgttgaccaccaatctatggagctactgacatactagtcagaaatatgtactgatgtatcaacacatgcatacccagacatgtacgtggacatagtctgcagcatgtctgcactctgcattgatgacaattcaacttgtgactgaaacatgaacagacacacccgtttacacaccgtgagacgaacagtcagacttgttat

SEQ ID NO: 15270 - DNA, 591 bp, Emericella nidulans
  unsure (1)..(591): unsure at all n locations
aaaccacaacaccaattattattaaccccaacaccaacctcaccacacgtccgttttaataaactntccctacaaacccaaactaaaaccctaacctaaaaaaaccaacaaccaacaccccaccaccaacaataccacactcaccataatccaaaccatatcacacccacaaacaaaaaacatatctacaaacacaaacttaaatcaccaaccacccctttactaaaattatacaaaacccccatccaaatctaccatacatcaaccatattaccttaaccacaccccctaacaccaacccangtcttctacaccctcctcccaaaacaccaacacatcccatacacaccaccactcccaccaatcaacaccctcaaaaacgcccttacactaacataaaaaaaccacccttatctcaccaacaaaattcctaacaattttctcacaaacaccaacaaaatcacattcctgaaccaaccccaaccgaataatataaacagccactcaccaacaactcataccaatccaacccggtcataccaacccaacacccaaaaaaaccaaccttaatccacaatccccacttccaca

SEQ ID NO: 15271 - DNA, 2166 bp, Emericella nidulans
agctgctgccgctgctgccgccaagacgaggtaataagacccacctgctgaacagtttgttgatcttttgtgctgacatgatagcagttccgaaaagaaagaagcaccgcgaccagcattctcttttggagatataatggcagacctcaacaagcagaaggaaccttccccacaggaatcgtcggagagtaaaactccagaaacggaagaggagcggacaaagaggctccgcaaggaggcgcgaaagaagttgcgcgttacttggaagcctgacgattcgctaactgacattcgttacttcactcacgaccctgacgaggaacttggtccgggtgatcgtacacgacaagtaggcgatgtgaaaggtgaagggagtgtcctcaaacttcataaaaaccttgacgaattggaggaggatgacgacagtagtgtgcgtgaagagcagcttttcgactattatgctccctctcgtaaggacccttttattgtccatttttggtgttcttagtctaacttgcatagaaatcgacgatagtgaaacttcagctgaaactcgagctgcgaactatttcaaacgagggggcgcacagcagcctatcagccccgaggcgaaggctcaagaacagcgagaggctaccacgcttatggttttccatacttcacctgcggacgtgccaccatcagctaaggagccacccccaccagacagcagcgaagcggcaccggaagtcctgtcattcggagagccgccggaccacgtcaaggtatgttgtgtatttgtcttggtacaaaatatggtctaatggtaaattcaggatcgacaagagcggtattatgcgatgattaggccccagcaaccgccccagcaaccgccccagagccagcctagtacacagaataaccaattcgtcttcaatctgcttaagtcgatacagaatccaggccagcaacagtcgacgccccctcctcaagttactcagtcagctcaagctcccgccttcaacctggagcaaactatcaacatgctccgccagcaaaacccacagccgcaaccacaagtgcctcaggttcctcaaattcctcaaccaccagcgattgatcagcggcttttggctattctctacggtcaacaaccgcagacccaactgcaaccgcaggcacaggcccagccaccggcccagaatcagcctggcgtcattccaccatacctcgctgcaattatagctcagtttggtaatcagaatcaaacgcagaatcagcagccggcagctactgaggcccctcagacctcaggccattacgagaacccggatcgtaaacgcatgcgcgaaaccggaggctatgatgacgatgataaatggaagcggaacaaaatgaatgctccaaacaaaaaacatcccaaagccggatccgtcccatgccgatactgggccgagggaagatgcctcaagggccaggattgtacatttcgccacgatccactttcaccatgactttccgtgataacattgtactcctgacaaagccctttgataccccgtcgcattgtttcgttctcttctgtctgcctatgcactttgcatcacgtctatacttacaactattggtcccttaaccggactagattcagttactctgacggtgttcggcgttgtgactcgcttcttacgctttttctttttacattctagcatctttatttcaccagcatattttccatcatacatcaccggcattattggtttcctctgtggagttcgggctgtgatctatctgattttgtgggtggaacatgcatgctcagtatttacagcggccatccggcgccatatcctgtttctgttccttgcatccggcctcagccggccagccgtatatttcggcagagcgagcattgtacattaggcatttagtaagacagggtagatatcttgctgagactaaatgttgttgttttcgtccgctccttccgccgccatgtatgtattggatgtagctaagtactaggtaactgggcagtagtcaagctcgaatatttcaaagatgccacggttggtttgttttgaacccgactcaatttgctggtcatatatcaggtggaaatatgctaacccttgcaggagcactaggtaagtatgagaagacagttccaacacacatcatgcg

SEQ ID NO: 15272 - DNA, 348 bp, Emericella nidulans
ggtcaactggcccttggcttttttccatccatccttatgcattaatctacttaaaattgtcagtccgcatgaacccacaccgcattaagcttctgcacactactttcctttaaatgtcactcaccccatttggctaatgcaaactctacccctcgactttttgccgctaccctccgactactcgggggtgcccaccccgacacacacccaccaccatcgaaccgggcctcccatactatctctaacaacccagccacacccctgaccaggccatttctgcgccttatgtcacctatccaatcgtcgctcagactttccggaagatgcccgatgctggacagcgttgga

SEQ ID NO: 15273 - DNA, 802 bp, Emericella nidulans
gctatgactgtcgtacacctgcaccggcttttccttaaagactggcgcttttaaccgcggcagctcttcatcctcgccctctgactcattcacttctcgatcttcaggcgacgcaatgacctgccagacccgaaccttccggtcttgaccagcggcagcaagatatttgccatctttcgagaagaccaaagcccatatggcttttccagtagatttgccattttgcgaatctcctatatcgggatgctcgtcttggtcgggttgggctgaggtatcgacgccttccaattcctgagcttgaaaaacccggttgaaggtcttctccttcttgtaatgagccctaacacgggcatactttggcgggtggtggaaaccgaggaaagaagcctattggttgcgcatcggcggcggcattattggctgcattccccatttctgttacaatgtcggctttattcgaagaatagatctttctttttgccggtgaaggatgcgacttaggaaagaaccccttttctcttttttggtgagagttataaagactctataagaccatgtcccctattgcctctatatcataattgtggtgtttttgtatttttattatcctcacttcgtgaattatcccaccaaatttctttaacttctttggtctactttttttttactactattttcctattttttcatttttatgttatttgtacttatttcactaatctgcttttgattatgtctatttcttttctctctctcttataatcttcctatctttatttttttttctcttctcttatttcat

SEQ ID NO: 15274 - DNA, 2086 bp, Emericella nidulans
cctgatattaatagagcgttttcgtaacaagatgtgccgtgagcgctgtgggaaagaaggggcattataccaatataggggccctgatgcgggctaggatgtgtggaaattaaagcaagggcgcgtcgctcgacctatgcgcgaaatagaatacaacttcaccagcacctacagacggggaagcagtcgcaaaatagctgaatctgcagagccactcccgcgataacgagtatgatcacacagaatacgagtgggaacagatcgtgacgatagttgttctgtggtcggatactcccgagtcaattcacgagcgcagcgaatccctcatactctggctgctggcgctgaccggattagtggtaggcagaatcccgacctttggctttgcgttctgcttgatcttggcaacggcgtacacgataccacttacaaacccaaccatgatggccgaaacgctaggaaacgtgacaggagcgtcgaagaaaattaggccagaaagtgcgataggaagcttgttgagagcgccaaccatggaataagtggtcgacgatgtgacgcgaacacaccaggcggaggtatatgagataaaaaccgtggacagtccagacagaatcatcgcaaacatgatgccgttgcggtcagcagacgggaagttacgggcgacattcgcaggggaccagtcttccaagatgccggaacagacgatcagaacgggaattgagagaagattgttgtagaacatggctaggatgacaatgttagaagacaagccaggtgttgtgaagtccggccacttactatcaaaatccttgaagttggtcagcttgattcgtttgcgcattccgagaacgtaagatgacgtgcagaggcagtttatcaacatccagatgtatccagcatttaatgtggaaacctttgatgtcgcatcgccactgctttcaatagcatgcttgatatcggcccaagcagcgatgatagagctgaaaaccataaggccgaacgagaagagagtgagattcgtcacagagccaccaaaccacagaacctcgccataggcgatgaggatgatggtcaggtttttgaagatcgtgtagacagggatagagagaaattgcaatgcctttgaaccggtatagatcatgccgatgagtaggagcgtgatgggaaaccctgtaagataaaccatcagttgagtcgctggggtagctgattccaatacacgcacacttccgagcctcatccaaattgaaatcgcggtatgtgataagcccacatgccttgcacaattggattgcaatgatacacacgagagactgagaaaatcacatggtcatcagcagttgataacgcggcaacttgcgcatgctctaacatacctgcacacaaaggaggaagaagttgaggttgaagtccgaagataggacatatttgttcataacggtcatcaaaatggacgaaccccagtatgccagaacagaaagagcagcattgttggaaattgagctcgcggtagaacttctgggttgtggcggaggcggaggcgcttgataattcttattttgacccaacttgtccatctctatggtgtagtcttcaggcttcctgttgtccgtcatgataacggtagcggcgtggtgtatgaggctgttggggcgatataaaagggacttcgcaaacagatagcgattgaagacgggcagcgtgccaaagaaggaaggagattctaatactttcaagatgaaagagagtcctaacgcaataataagagaaggggaaggtgggaagtttagtccaggcagtaaaagagtacagccgcgttaaggggagtgaggagtgcgttaagaaacaaaaagttcctggcgtaatctgataacgtgacaatacgcccgcttttggcttggcgctccggatgcgtcttttgtgagcctatgccaggtgatgtccgcttatacatatttagggttggcttaaatgcaaatggaaacggatgatatcaattgtgggctgtaaagagtctacagtggtacttaatatcagttgtgcgaaacggcactgctcaggtctggcacccctcgaagctttctca

SEQ ID NO: 15275 - DNA, 539 bp, Emericella nidulans
aaaccacaattaaaccaaaaacaaacaagagaacttaaacagtaaatcaaaacaaccaaccaccaaaacccgcaaaaaaggacaaaaaactaaacttaaacaaaatcaacccataaagaatcatacaaacaaaatggaaccctagaacaacaaacaacaaacccaacacaaaaaactgcaaccactaaacaaaaaacccaattcaaaatcctaaggcccccaaatacaaaaacaaacccctaataacaaccccacaaataaccaccaaacacaaacccccaaataaagcacacaactgaacataaaacccacaaaaattacaaacaaccatactagccatacaaacaccacacccccaaaaccacaaaaaacataaccgacaatcacaataacaaccccgaaaaaaagaaccccacaaaaaaaaaacaaccaccgaagccccaaaaaaaaaaactaaaccaacaaccaaactccttaaaacaaaaaacccaacccaaccccgtattaacaacaaaaaaaccattacaaaaaatctcaaa

SEQ ID NO: 15276 - DNA, 2351 bp, Emericella nidulans
aactaagcatatgggaggaaaccggaaatagcattgcacggcatatttggtgagactggaccctccagattgaaccccatttatagtcttctaagtttctgcctccgtgcttcagggatgcagcagttgcctcggtcatatatctacagcagatgctcgcaggacatccaggagtatctaaccctgttttgcagaatgccctgcaaactaatcgcagtggtccacttaatgtgattgagcttggctcgggatgcggaatttttggcattgctctagcagaactactgccccagtgctccgtcctactcacagacctacctgaagtcgaggagattatcacgaagaacatcgcagttgcccagccagcgcacgcgtccaagatccaatatcggccgctcgaatggggagaagaactgccagacgacctcttcggtgctcatacaattgatttgattctcgtctcggactgtacctataatgccgatagcctgccagccctcgtgtcagtgttaggtcgactgatcgagctgtccccacacgccatcgttcttgtggctttaaagcggcggcatgaaagcgagagtgtattcttcgacctgatggaatccgctggattacatgatcttcactcgcaccacatgcaactcccatcgcagcacgagcagtgggacgaaatcgaactacactgctatggtagacgttcccagcaatgattctagccaagccagtaatatatacctgcgatagtttacatcaaaccggcctcacataaaacctgccgtccaataagcaaccaagcctgggccgtatatgacataccgactacctagacgtggacgatggaggcatgctcacccgactggctacagcagttacagccaaagatagtgcacttgatgctttaacgactatattgcatagtagaaagtctatacactctactaatacagcaagcgtttcgcgactttcctggaagccagatatgccgtaaggcaatgaaagccgcgctttggatccttaggttttgaagctatcaggtctaaggccatctctacaggtttacatcatgtgtttcaggactagttgatacaagcctctttgtggtgagtgcaacagctatggatgccattcagccctgtttggcatccgacttttatcgcaatagcactgtggttttcgatgtaacggaccatatcattgaaacttgaattcagctctgctgatctatatacgcaggtctagcgacgctgtcaatcacgaacagtgcaataattgagacaagactgagtataaaacatatgatcagactttcagcagcaatttgagcttccgactagccctcggtgaagagattcgtcgtctgcgcagccgccgccatccttcagatttcgaatagaatttatcacagagggatgctagtgatgaattcaggtcataatcgtactttctcttcgtctgttgattagcgccgtcttgagatctcgaggtcgatctacctgagccgatccttcgcaatagacgtcgtttgccagttaatggcgagacaatgggctctaatgtagagtcgaggggcacaaaatcttcgtccgttttcccttggtgtaagcacttgcaatacacccccggacaacattgtgacaacgtcatttggatcatcaagaccttgaaatatttgcttgctggcagtcaagctatgtgagcgtcgcgggggtatgacagccaggccattcccaggatatttctcctcacgtgagccaaagtactgaatgccctgggtacttcgctgcacaaatgcgctgtagttcggggccagcgtgattgcacatagagggagaaacgccagccgcaaaggattatcgcctgaagatgatgggctaaatgacacttccgcgcagagtgcccacaaatccgcgtacaacgagcacacgacatagagactaccttcagcaatgtcaaattcgtccattcttctctgatgactgacaaaaatggtatattccgggtcgatgccgatgacaagtgacccttcttgaataacccattgttcccccagtcccaagcggatatccttgtatgactgcaggcgggtacagaatattggcttcttctgatggaagggatccgtccttgtctcaaatggtcgacactcaaagaaggttgattcttcaggaagagttgggtccttttatctgttaatacaaaaccaatcatacactgccatgctcaccagaagtggtatttctttatccgagtcagagtcttcaaggatcacgtatggagcggcaaagaacttctggtgatccaccaaacgcaaggagcccatccacagatcctcgtcaatatcaggatac

SEQ ID NO: 15277 - DNA, 2281 bp, Emericella nidulans
gaggaattgatgagttcttcgtaatatggcaatgccggttgattccgccgaggacttaaggccggaacaaggcttaatatgaaattacgaggcggatgggaaagtcccgtccgagcccatgctcaccaaagtttttatagttggctcataggccagtattcgaaacttggcgttcctgacactacttcatcaacgacatcggcttctcaccaaaacccccagcacggaagcactctacggcagcaatctcagcctgccagattgtcgactgccgacccctgatccaccatcacataaatgggctactggtaacgcggacttccacgggggcatatctgagcctttaaaagaacaatctcgcggctcttcgacaccgtgcagttcaaagtgtttgcaatactctactgggtactctaaatctgaccaatacatttggacataggtcttgttgtcccaggatatcttccagacgcaggaggacttgaccagcaaaggcttgagatcatcaagtcgtacggataggtgcttgaaggctttacagagccggcaaataatgcgttttggcttgaagagtatgcggattgtattatgctacgaagcaggcactcatgaaggcgcaagtggctccactgattgtggtggttgctcaactggataataacctggttgagatcaagcagtaacagccggcgggtgtgctttgagggcagtggaggtaagggcccctggaaatcaatggagattaaagcagctagctcatcgttcgctgaccacactcggccagtagatgcaacttgctatttgcagcttgctattaacagcttgggtttatatacctccaaccataccgcccttggtacatcgcacgcccttagatcttcctgtttattttctgcacagttttaccatgtatataatcgtagctatgacgccatccctggaccattccgcccattgctggcagtggacgcttggtagatgccattatacccttcaacagtctcccgcaactcctcaaacacgatttgcgcaagcttcgcatccctgaaaagtactatcccacgcggattctcacctccatcaaacctcctagcgccccctcatacccagcatccactacaccagcggtaatcccgaccccagaccgccagagcgaagatctcggatagatgctagccatgcaattccgtggaacgcggacggtttcgttgaaatcgatcaggtaattacctggctgtagcgtgatcgcttgctggctactgttgaaaggtaggacagaagtcctagctccctggcgctttgtattgttgaagtcaattgctgccggtgaagtccatctcgagacctggcggagagtgaggtcaacaccacaaggttgctgctgttgcgcaacgtatcgcaggttgtgcaccagttggcggttgatcacctgggcgccgctgaggatcatgatcggtgtgttagtgtatctaccgattctcggacctttgggctacctttcgaccgatactaattggcggtatggacccgggtatatcgcagaatagttagcctggaatagtgactcagcagcattattgccgcataagcaagccgcggggaagcggcatccccggagttgtcccagcgtcagggccgaggtcgaggtccgggtcggtcaacatactttccactcctcgcatttaattagactcattctcctttctttccttccagtactccacgccagacatttgttctaaacaatgctacgatcaattcctcgtcgagtaccccgacgtcttcccatcttcactacgacagcgaccgctggcggtccctctcgtctcgcccagcgcgcgttcacgtgcggctatttacggatgtcgccgtcatcgctccctcccgtccagccccccgtttcctcaacgcttcccagcgattcctaccagcttttatcgaccgccgacaaagctggagatgcagaggatgctctttacgaacaacagatcaaagatgttgaagcgtggtggaattccccccgctttgagggcatcaagcggccctactcggctgccgatgtcgttagcaagcggggatcgttgcagcagacgtacccgagctcgttgatggcgcggaagctgtttaatctgttgaacgagagagcggcagagaataagccagttcatacgagtatgctgctgtgcttgtgaaccgtttggaagatatgctaatgcgtacatagtgggcgccattgacccgtacagatgaccagcaggctcctaacaggagctctgtatgt

SEQ ID NO: 15278 - DNA, 805 bp, Emericella nidulans
accgatagggaagaccttgtgctcattactgggtgctgcagctctatagaggtcactagcgggaagaccggggaatctaacagggagatcagtctcatggaaccccagcctcaggcgaccccagcgccctagtgagaaaagtgccagccgtggacagagccccaacccatcacgcttgtccagcagattggcccttccgcgaatcgcccacaccgggatgctcgccctgggcatacctgctttcttcacacccctccccccgctcacatctatagccaccaaacaccccccgatttttgtctctcatttatttcactccactcaaccctaatccctccccctcctcctcgtctccacagatccttacgcactcaacacgcacctgaacccccctcccctttattactttaacaacactcgggaatactcctccaaatctctctacatcccccagacacctccatcaatgcgttgtattcaatgtcacattttccctcctgccattcaaacgctcttaatgtcccttactctcatgtcactaaaccatctctctgctatacacattccttcatctacttctttctccccccccccgtcccaatctactttgtctcatccctccgcatacccgccccgccccttccatcttatttctcgcatcttcatccgctttctgatccttcctcccctcttctgattcattgacattctaacttcaacccctccatcaccccctgacctcacttccctcctttccattgctacccatacctgcctgcatgctagatctccgcgtactcctcct

SEQ ID NO: 15279 - DNA, 513 bp, Emericella nidulans
  unsure (1)..(513): unsure at all n locations
accgggaacacaccgtgcgaccaatccancagaacacacaacgtgctttacgcatttaaacaccagcggatatggcagaggccaaggggagcttacactataacattggaacttattccacggatatctgtgctggaaagaagaatatacggggggacaaaatacattttgctaccttcacctatcaagaggacatggtttcgatggttggccgccatgtgactgacaataaacttctggcacgtggtagatacataaatatgaagcttatgaatgatgacaccgtcctgtggctatggagcgggggcaatatggaaaaatggatggaacatgatgcagggggttgatacaaggtacatactgttccaagaacgtaatgagtactcgtcctgtggtcaaatcaatagaacctatatgacttgagaactagcagaccatgcactgtgcagttggacagcacaaccacgatgtacctgaggcaacattgggacagacgatctagcgagacataca

SEQ ID NO: 15280 - DNA, 2432 bp, Emericella nidulans
gctggcgacgttctgcgagaaggaaggagagcgggttcagtattctgctgcggagaagagtcaagagacgtcgacatacagggactggggaacggcgcggtcgctgagctcggccagacgcgactcgagcatattgatccgttgcagaatcgcgctctggcactacgtcagatataaaatagtaatgagaaggaatagggaagaaccaacgttatcgtgcgcgggtgccggcgggtgaggcacagcgctggagtcgccaatggtcatcgagtacggctcatatacgcagcgcttacggctgcgacgacagtgaaagcatacaggtcgctctccggagcattttgtcttgcgacgtctaccaatgacaatctcaggcgttagcaagaagagcgccagcggagcaacccgtagcatggggcagcggtcacgcaccggcaactggcacaagcctggcggatgcgcttggtaataccggcattcagtcgatctgaatcgtgttccattatggtggctgagattatgatgggcatgtacaggagagtgccggaggggcagggggtgagaggagaagggagtgtttgcaaggaagcaaaaggaccttggactgaccacccagtcgagacactcagttagtgcggggatagacccacaattaacttgcaataatccaagaaaacaaattataattggttgctatagtgtgtgctccacgtccccggatgtgcggaaccgggggcggccccgagtcccagagtgcactacggatatttataaagtgatgaattctgccacagctacaccttagctgaatccacccttcgcagtgtatacgcatcccaatccactgaacgtttagcctggaactccttgacaccgtgagccccatccccatccggccgcatcatgccgtcaaatagagccctgatccctttcgcctgttcctcctttcccccatgcgcccaagccaggcggatgagctctttcgacatgcgagaggcctcaggagaggcagccttgagctgggtaaggaattggtcgagcagacccggcagtgcctctgcgttgtctgcgagctcaactaccagcccgcgtgccttcaactcgccggctgacactggccttgcagagagcatcgcctcccgcgaaagagcaattccaaattctcgaatgacgtacttggagatggtggctggacaaagacccagcttgacctcgctgagcgttacactcgcagccctaactgcaaagcgcatatcgcaggcgaaggccagtccaacgccgcccccgaatgcgggtccattcaaacacgcaatagtgaccttgggggactggtcaatggcttcaaagagatttgtcagtcggtcaaactgcgcattgctgctggagcccccctgacccactgcggtgcttcccttgcccagatccatcccggtgcagaagaacttgccacttccagtcaggataattcgtgaaatggtcgcatctcgtccggcattcgtgacagcctctgtaagatcttgcgccattatggccgtgagagcatttccattcttgggtctattcaagttgatcctcagattgacccccgaccggaacagctgcagaccctctgtttgcttgacgagcttccacgagactgaaactttgggtgatttgggaacagccgtttgcttgcgcattgcccacaatgctgcacctgctcgactgctgtttgcgatagatagctgcctcgagatccattctccagtttcgactagctttgacagatctactcctgtgtggatccccgaccgttcgaacatatatactaaatcctcgctggccacgtttcccttcgctccaagcgcaaatggacatcctccgagtccagcaacgctactgtcaaacatcctcaatccgcacttgtacgcttcccacacatttgcaaccgcgccgccgtaagtgtcgtgaaagtggccggccagcatctccaaaggtaccccattatcttgtagatatgttatcagccagcgcacgtcggcaggagtgccaattcccaaggtgtcaccaagactaacttcgtagcagcctgcatctaggagggcttttgtgcaccggagaacagaggagggccgtgtcggaccgtcgtaagggtctgcgaaaatacacgaaacgtaactataaataatcagacaagtaaatattagcacaatgatgataagctcgagaacacaggaaccgtataccctcgcaccgaaagccctgcgctggctgccctagaggccacttgtcgagctctctcgagtccttcgtcgacggtacagttgatgttcgctctgctaaatccctcggtcgcactgataaacaccgcaacttctttgatgccattgtgtagtgctctctctagtcccttgagattgggaactaggaccggtagtcgcagttaggatttt

SEQ ID NO: 15281 - DNA, 2606 bp, Emericella nidulans
atcggtatgtagagaagtgcgctgtcagccgttctgtaccccgcaagtaatgtatattcttccatgtgtataacaagccacgtaggttgtactgagttaaaccgcaggggctggatgtaccccgcttgcgcctcatcgacatgctgtcccgggttccaaccctggacagggaaactattcacaggatattacttcaggcgagctggctatcatgaccatgatgttggtatgtggttcgccacggccaggccaggccaggccacgcaaagaatccggccgtcaaaggagagaggggttgaacgcgctcagatctgtgtcgtttcccgcccggcgctatccattattttgttcaaccgccaactagcagaatggcgagtttcagtggcggtggcattcgtgttgtcaacaggggcgtcaagcgtcgagctaatggagggtatctcgggtaataaagtttagaggcgatcagagtttgaggggcgctgcgcttaggaataatcgtgaagaccgaccagaagccgactaaaggccggatctcagagggcttgatgctgcttgggttcgtagacttcaaaggcggggtggccagtcgcagaccaaccggatgaaacaatttggctcgatttgcaatatgttgtatatgaagtgatccggctgatccgcaaggaatattggttcacgtatagtccaggatgatttgaaatgaagccttagagtgccgttgttattctccgacgctgtgacaagtctcattcgggacctcggcgactctttctcgatgattgctgggtctgtgggcatgtacatgcatacatagcgcctcgagctctcacgttgaaacagcaccgttatcgagctttggcctcagcgggctgcagtggctgcatgtcaatgtcagttcgcggcactaatttagacccgtaagcttcgagccccactgttgatgcgccattgtctgcactgcacggcctggcgtggtctggacgaatgtttagcgtctcgttgctctcctctcgcactgtctggccgagtgggcccgctcattggaacctggattgtacggcggcgcgccatggctgttcggcatacaattatagatttcagtcctcggacctcctcgctttagatgccggatccgattgtcgcctcctattcgcacggtcgctagtgctccagcggctgccagcccggccattaggcaagtcagatggtcagagtggccgagaactcgcagatgccttgcatagaagccgaactttgttccaaaccgaatgccagcgggtctctcgcaatctgttgagggccctgtgttgcatcgtgtaaaatctccaccagtggcttgtagtgttttcactaggacgagtactccgctgttgagtcttgcaacaaaagagtagaggcggtgcatgtttcgtgcatcacagtgacaggcagcatagccgcccctttaatcagaggtagtgccaggtggatcagagagtttctaggtagtgaccaggcttgcactaacaaaccattctatgtgaagaagcggagaattgcctggtctactgataagggatatggaccagcaaatcctgtacatgaaagaacacaatccccatggggattccgctccacagctagataaaccctggcgaagatggccgtctaagctgccatcgtctgagcagcgctatggcacgtatttccctgattagaggttcatctccggcattgtgcagtattgcgttgtatcttatccacctcggctctcgtctgacatcgtcctagtagtcgcctccttcataggatgaattccgagctgtaggtcagattcccggctcagcgaagctgagttgaccgcttcttcaacataaaagttaaagccagaagccggcggtagtgatggtagagtctcctggaccggaaaaggtaatccgagtatagagctcgaagcgccagccatggccgctcagtagatctaaaagcatgagggcacgaatcatcccctcgggcgcttgggtcgttcgacacaagaagtcttcaggggataattgaggatagtgtcgggttgactactatctggtccgtgctgaggtgtcaggagacgagctttgacaacgcagaaactgaacatggcaggggtctatcactaagaccaccgcaagactgaagaggggagatgagtttcaaggggcagcttgcccctcacgcctagaatccgagtttcgcacgccccaaacaacttatcagcaaccccaaaacaacttatcagcaattttatacgatctttcacaagctatccgagcttgcggcgcacttagttgaacggcctagattgacctcgcattcttgccgccgtcagcatattgagtggcaagaggaacagtggtttacgtatgaatggattatatccactgagtccaggatggccggggcgccagtacccgatgcaatagcaccggtattaagatgtaggtatgggtgggctcgatgagactcttccctgtcatccgggctcatcgactagggcaaaggtcacgattggccaggatgctaccacaggcggctagcatgcgatggtgttggatcaggccgcaccagtactgataatgtccttcttc

SEQ ID NO: 15282 - DNA, 669 bp, Emericella nidulans
tttttgcctgtaggaatgaccatctccctttccctcttcacgcctagccaaccctgtacttcgtactgttcgatgtcaacgctaccggttctccccatgcgatggctatgcaataccggcctgtaacatgaagatgcagatgccacatacgtatcttgatcgaatatctacaagcctgagtaggccaccaacatacgcctgttccgcgccaagctgatactcaacatgacaatgagatgatagaatgtcagcttcatccaagagataagtccagacagtgcaaggaaggcgcgcatcgcatagttctcagcccgagagctatatcatactgatatccggcgggatacgcccgaatatagcaaacgcagcaagcaaacaagcgtattctccccttacgcttcctcgagcgcgcctaatttcaagtgacaatcattagcaaaacgttaaaccgagtgcgatggtgagtcacttccgcacgaggcttcatcggcgcatatgaaccggtctaattgaggagatgggagtctttcaatgccaagcaaaacatttttaaattgaaatgtttaccggtgggtttgggctagcattggacaaccgggaatagcagcaagacccaacggtttggatttgaattaaaaagccagcatgaaaactttggataacgggggg

SEQ ID NO: 15283 - DNA, 4479 bp, Emericella nidulans
tgtgtcacaggcgttgagcgggctgctaccgtcgcttgggctatatcttccgacatgaaatcgacctttcggagatattatattctcgcttgctcaagcacttgctatccagtatgaagtcgaataaccctctcattcggcaaggtgctctgcaatcattcgagtcacttctcgtcaaatctaagaccgaaagcttgcttctcaagattgctggcgaggttattgggcctctgaaaggcaataaaatcaccagtccagagcaacgtgctatttacgctcaagccctctcagcagtttctcctacaaccgatatttccaaagacatcatacaaggatttgtaccagtcttcactcgcgagtcaaacgaggctgcccttgaacaagagatcaaggcgttcgctaaacacctcacccgcctcattcaatcaaaggcgaaaattcctgatgacgtcgtcaatactatcgtcaaggggtctgctgagaaaaaaataccgtttcgaagactttggcagctctatattggccaagctatttggcaggctgagcctgaaacattggcgagcaatgagattgaaccttttgttacaaaatttgtagccaagctggaggggattttcaaagaagtctcgtctaatccattgccatcggcacagaacggagctcttttcacagcgtatgtttacctcgcgctctgcggacggctgtctgcactcgagaaattcgacaaggcagcctgggaagagaatgtcggccactccatggcgcttcagccgaagccatccttccttctgaatcccaaggcgtactccaagctggcctcccaagcagaggtccagtgggctgtcagaactcttgctgctgtcccttctgctgctaagtttgatgatgctgatgcacaaactaagaccgcctgggctgaggcatttatttacgctataacagcccctgggctgcacaacagttttcgtgatgaatccgctcgtaacttgtctatcgtctacaagacaaacattggtgcaataggacgtgttataacggacgctctttggtcttggattctcgcttttagaacaggggagaaagagtctgctcctgtctctgcaggcccggaccacctaaagttccttcacctggtcgttaaggcaatctgccctgctccgtccagctcagagtcttcggagcagactcctgccggtcttaagagtcagcttatcagcctgctgcttctcgctcggcctgagatgattcctaatgctcattggattgatctttgtttgagaactggcacggatcctggtaaccttgtccgtgagttttcgagtgattgcatgaaccaattggtccgggtgcaagaggatcccattcaatctaaagtcccccaggttgacgctgctatttgggctgcagccggtgacttggcttttgtagcgcctgatgtaatggtctcccagcttgttgaacagattaaggaagatctagacgtctcgcgcgtggcccatttcactcccaccgatgctgcaattgccaggactcctgaaggtaccatgttcgtagacgtgctgaacacaaagtcaagacaaacatttgacaagaataccaaagattatgatattctcaagtgggaggaggagatgcgggcacacttggcccagaaacagggcgagaagccaaagaagcttactgcagacgagcaagcgaaggtgaaggcgcagctcgccaaggaagccaagatccgtgaagatgttctacgcgaggtgaagagaatcgaacgtggctgtggactcatccagggcctcgccgctgggccagccattgacgcagatgactggatcaacccggcgctcgcatcattactagaactttcaaaggcgggagctggtttgttcgccggagacgtcatctcaaatgcttacatcaaatgctctgagaaggtatcttcgcgccttggtcctctacggcaatttgtgggtgtcgccactcttagagccatgggcaagggcactgtgcctgctgagatggaactagagcctcttggaagtaagttgttcgggatattatggagtatacactctaaccaatcgtagagctagtcacaaggattctctatcgcttgcgcttcgcgtccgagcagcgcccccttgataactcttctctggcatacgctctgcctctcctattcacggtcctcgcacagaacggcattgaagaggaaaaaggcgacgaggagggcgagcaggtgctgcttgctcttgaaatcctgtcctaccactcaggctcatgttagtcctcgtccgatcattagcaagactccactaacaggaccatctagttaccgataaccgtcttcctcgagtagagattctcggccagctgatatcctccatgcagaggtatactcagcattacaagctcatcaaagatactctattcgatgcaagcaggtgtatcgcgccgaatatcaacgaaaacgaagtgaacgttctcctcaaaggcaccattgtctcggacccgtctgtacggtcagcagtcctacaggccattgacgctgaaattgacttaaccgatatggacttttccgagcatatctggcttgaatgccatgatcatgtggaggaaaacgccgagatagccgagagcatttgggaagagaacggcctggaaattgatgagactgcgtatggaaagctcattccctacctcgactctcgggattccaatctccgaggagctgccgctcgtgcaatagcccatgcaattgagtcaaaccattcagtgttcggtgatattatctctcagcttcaatcgaaatacgaattcgaaatccggcccaaggagcccgagaaagacaagtatggcatgccgaagaaggttgacacgacagaccactgggagtcacgcagcggtattgctcttgcctttggggccatgcaaaaccttttcgaaggtgatcaaatcgtctcattcctccggttcttgattgagaggggaccacttatcgatcgcagcagtgttgtcagagatcagatggccgacagcggtaaaggtgttattgccgcacgtggtcaggagaaggtggaagagctgatgaagctcctggagacaactctagagacctcagataagggaagcgagacatccgatcttcttaacgaggctgtcgtcgtcctctacggctccctggcccagcacctcaagtcggatgatccacggttgcaaactgtcatcaagagacttcttgccactcttcctactccctccgaatcggttcagtctgctgtgtccgactgtctcccacccctaattcgacttgcggggcgccagagcggcaagtacgcccaggaaatgctagaccaaatcctgcagagcaaggattacgccacccagcgtggtgcggcttatgggttagctggtattgttaagggccggggaattgtcacactgcgcgagttccgggtcatgccccatctgcaagacgctgctgagaacaagaaagagcctcataaaagactgggtgctctaatggcgtatgagctttttgcaaccattcttggccggacatacgagccgtacgttattcaagtggttccacagctcctgactagcttcggcgacccgaacgcggatgtccgcgaggcttgcctgtacacggcaaaagcctgcttttcgaacctcagctcttatggcgtcaagaaaattcttcctactctccttgaaggtctcgacgatacccaatggcgtacgagaagggggcatgtgatttgctaggagccatggcctaccttgacccgcagcaactcgccgtcagtctgcctgagataatacctccactgactgtcgtgttgaacgacacccataaagaggtgcgcaatgctgcgaaccgcagtcttcaacgattcggagaagttatcagcaatcctgaaataaaatcgttggttaatgtattgctgaaggccctgagcgatcccaccaaattcacagatgaagccctcgatgcccttatcaaagtctccttcgtccattatctggacgcaccatctctggctcttgttgttcgcatccttgagcgtggtcttggcgacagatcagcgactaagcggaagtctgcccaaattattggcagtctggctcaccttacggagcgcaaggaccttatcactcacctgcctatcatcgtttctgggctcaatttggccatcgttgatcctgtgcctacaactcgtgctactgcatccaaggcccttggttccttaattgagaaactcggagaagatgcgctgccggatctcatccccaaccttatgtctacgctcaagtcagacacaggagccggcgaccgtttgggatccgctcaggctctttcggaggttctggcgggtcttggcacaacaagactcgaggagaccttgccaacaattctacagaatgtcagcagctccaaggccactatccgcgaaggttttatgaccctctttatctact

SEQ ID NO: 15284 - DNA, 819 bp, Emericella nidulans
ttggcccttttgggactattggtgcgaccggcttgccatgacgcagcacgcggacacgcgcgatgtgttttcgatctcggccgcgttgggctgacgcattcccatgttcgagacctgttattcaaagtcttatgatgccgagccggtcacagactcttggcttgccgggatcagcgtcctgcatactcactagcgaacggtggacctgcctgaatgcccaacacgggtcctgggcacgacccagaagcccgaggtgcatctgccgtcctgtccatcgcggggccggacgggtctgtcccggattgcgtgcgttggcccttgcggcgcacagcccactggtctgctgtgggtaacatgcgacagtggaacgcggagagcgaagctgcagggacggctgtaggtccttgagagactggccgactgccgggtataagcatgggctgatccatgctctgaggatggatccttcaatgcattgactggcgcagcccgaaaacaggtagcatccgacgatcgcggcgggcgctcaagatgcaccgcaaggcacgctcttttttactgttgcaggcgcttcagggcgctacgaacttctgcagagaaacggcctgagcggatcttcgcaaacagccttgaacaaggcccacagcgtttatgtgaaaagttcttcttagtggggctttgagttcggcggcagcacatactgggcctcggccgcatagaagcggagctttctggtacgctggcctgctcatgacggtttactggggcttgccgatgccttttttgcaggtaaaaaggggccagccttccaaacatatt

SEQ ID NO: 15285 - DNA, 568 bp, Emericella nidulans
aatctgcgagaacgcacgggggaccggcgattaaccgcagacgtgcttgattacatattgtaccgttcctgaggcccatgggcgcctctggggtacctgacgagcatacaacgattttgtgggtgcacactcattagctatatacaccactatgcgaagattggagatcggtgaccgtatacggagacactcactcaggtggtgggagagaccgactagatcatagggcggatacggcggatgggggagactatgatgtggggatgactggacctacaagaaacacaccctgccgagaggcgagcctgactagcagctgtcacttgcagaggagcgtaccccatgctggggaatatgacgacgatgggtgaactaacatagatagctaaagtatctatatgacatactagcgttgatgaacggacaggttactgacagatatactacactgtcgtccactcagcaaggaaagaatgggtatgcttgcaccaagagaggagttagcgcttacttggagacactatatcattgtagacctgctatgctcgaaaacgtaggaacaggatgc

SEQ ID NO: 15286 - DNA, 2346 bp, Emericella nidulans
cgtcagtacctgatgtatatcctcaagtcatggcaattcctatcgccaaacgcccgttattccccggtttctacaaggccattaccatccgtgacccaaatgttgccacagcgatccaagagatgatgaaacgcggacagccgtatgtaggcgcttttctgttcaaggatgaaaacgcagacggcgatgtgattgagagtactgacgatgtttacgacaccggtgtcttcgctcaagtcactgctgcatacccgcttcgtggcgagcaaagcggcgttacggccgtcctttatccccaccgacgtatcaagatctcttctctgattccgccgggtgattcaacgaaaagtgggaactcggaggataagactacagagaagcgtggtgacgttgtagcaagctttgaggagaacgcagcggagcttgtaacgaaggatcactacgagcctacctctttcttacggaaatacccggtcagcctggtaaatgtcgagaacctaacggaggagcctttcgataaaaagagcgccattatccgcgctgtgacaagcgagattgtcaatgtctgcaaggaaattgctactctcaatcccttgttccgcgatcaaatatctgctttctacactgaccaattccctggaaaccttagcgatgaacctgccaagctggcggatttcgcggccgccgtctctggtggagaactgcatgagcttcaggaggtccttgagtcaatgaatattgaggagagactgcccaaaggattggttgtgctgaagaaggagctgatgaacgcccagcttcaaacgaagatttcgaaggatgtggaagccaagattcagaagcgtcagcgggagtactggctgatggaacagatgaaggggatcaagcgagaactgggaattgagtctgacggcaaggacaaactcgtcgagaagttcaaggagaaggcagagaagttagcaatgcctgaagctgtgaagaaggtgtttgatgaggaactcaacaagctcgctcaccttgagccggctgcgtccgaattcaatgtcactcgaaactatctggactggttgacccagatcccttggggccagaagagtgtagagaactttggaatcagccatgcgacggatgtcctgaacgaagatcactacggtctgaaggatgtcaaagaccgaattctcgagttcatcgcagttgggaagctccggggaactgtggaaggaaaaatactctgtcttgttggccctcctggtgttggtaagacgagtatcggaaaatctatcgctcgggcactaaaccggcagtactaccgattctccgtaggtggattaactgatgtcgcggagattaaaggacaccggagaacctatgttggtgctcttcctgggcgtatcattcaagctctcaagaagtgccaaaccgagaatccccttatattgattgatgaagtggacaagatcggccgtggtcatcagggcgacccgtcgtccgcactgcttgagcttctggatcctgagcagaactcgtcgtttctggatcactacatggatgtacctgtcgacctttcgaaagttctgtttgtttgcactgccaatgtcactgacacgatacctcggccgttactagaccgcatggagcttattgagctatctggctatgttgcggacgagaaaatggccatcgctcaaaagtatcttgcgcccgctgccagagaactaactggcctcaaaaatgtggacgttactcttaccgaggaagccattgaagagcttatcaagtcgtactgtcgggaaagcggtgtgcgaaacttgaagaagcagattgaaaaagtgtaccggaaggcggccttcaagatcgtttcggatcttggggaagacgtattagcggaggacaaggctctcacagccgaggggaaggctgcgcaagaggagtcggagaaggagacaggccccattgaatcaacgagcgaacaggagaaagccacaactgaacacccacgggtgtgactgaatgtacccgatagtgtacacctcagtattgctaaggacagcttgactgattacgttggcccgactatcttcaccaccgaccgcctgtatgacacctttccgacaggtgtcaccatgggtctggcttggaccagcatgggaggtgcggctctctacgcagagtccatcttgaaaaatgcatcgacacacaagtcacaacctggtcttgacatcaccggcaatctgcagaacgtgatgaaggagtgaactcaaattgcctactcgtttgtgaagtcggcgatggcgaagcagttcccggagaatagattctctgaaaaggcaaagctgcacatgcact

SEQ ID NO: 15287 - DNA, 725 bp, Emericella nidulans
aacgtgttcactagcgaagcaggtgcttcgttcacagattttaattgaatttaatatatctagggcaaaaaggtctattttaccataaaatcgtaaaacagaacgcagcccgtaatttcgatccagctaggattcgcatatgtcaataatggctgattagagatggctgcagaagcccgatttcaacggctgggggtcctccagttccgtctccccgatatgaaccgtccaacttccgccctctgtgcctgaaaagacgcagatggcgccaccggggttagagattctggtgacgacagcgggattgtcttgaactgtcagcatggatttctgcttggatcaaaggtagtactcaccgatatcgtgagtggtcagatccgtagggaaggtctggtcccaggtgttatcgctagtgccatggaaagcaatagttacggagtcgatctgccgcttttcggcctgcatgcggctgtccctagccctggcgctggggctggcgctggtaagagccgcgagggaggcgacgacggcaaaagcaacggagcgcatcttgataagaaacgtaaagtaatagagtgactggattgaaggtctcgaatatgaaaatatctgtgattgatttgatgccttttattgttcttacagagcattcttgacaggttttataattttccaggcctacagtatctcctttgggctatttttatccatgcgagacaggtgga

SEQ ID NO: 15288 - DNA, 2078 bp, Emericella nidulans
aggggccatacgggataacagcgcgggtgctaccaaatattaccgaggcactaaaatatgtattatttccagggcaggtaaaacgatccttctgagtgctgttggtatgaacgatagagagttagtgggataacgccgggtggagttggatcaaacctttggcaaatatcaggaatctcattgatctgatagttaagcatggctgtgcacacaaccgccgatacgaccgtggcaatgacctgggctgaaaaggtatgccaaggtggaagcttagcatagtgggccagtttgagatcgctaatgaatggcagcgcattggcgagggtggtgtatctggttgtcaggaagggtgcggtcacatcagtggactagaatctgaagcagcagggttctggtacgtacccgtatagcttgaaaaagttgactgaaaggggatttcctggcgtccataggccccctaaaaattccgacagcacactatgcgcgcccaaggtcagcttccatatacttcaatgggaaaagagaggaggatggttgtactttaggttgatagcaatccctgtgagagcgtaaatctgaccgactggaaccaagaaggctgctgaaacacagaacgccacaaagatgactccaacatttgtctgcatgtcaaggatacaaggtcaatctcaataatttgaatctaaagaggcgttgtggcaacaacttacggatgttggccaggccgtgatgatgacgacagcaagggtaagggcaagcacattcagcgcagcataccatatctctgaaactgggtgcaacagccgattagcaacctgggtgtccgctaactgtttagatatggcatgatcaccttctttatacgtgcgcatgagcctggaatggatgtcggtagcactggccgtcacgccatagaagctgcgaaccaggttacgaaatccggccatgattgcctggccatgataaaagatggaatacgagattgtcgcggaatatgttgcgaagaagaacgcataccggactagactgctcggtgccagaaaggcggttgaatattgttcgtatctggcctgatcgaggagcgcgtgggagtctagtatttctgaaacgttgtatgccgttccccagcgattaaagagcctgttcgtattaattggcagataagaagcccagtatatgttagtgaaccaaaaaatggcaatgaggaccccgctgacgatggcgccggcgaacacgttcagggtggccagcaagggtaccacaagcggatcgagtgccgcagtgaccatattccaatcaaacgttggaaatggattgaggcccaaaccggtttggatacctgtgattgcggccaggttcacattgctgggagatatccagctgagccagttgaagatactcaatctttcgaacaggtagccaggaaaccacgcgtaacagaacattcctacgaaggcatacataaagaaccgggagcgggacatgttgtacgtcctccggaatggcccgaaggctggcgaattcttatctagtcattgtcacgaatattagacgggctcacccgtatctaagcggtccgtactcaccaccatgcagggctttagtgagagcaagcgtggtcagacactgggggaataggcagaaggacggatatacaaggaacttgcggactagaccggcaaggccatatcctggtgaacgttagctaatggtctgaattaagttgaatgagccaagcctacccatcaagtccgatgacagggaaagcaggacctggtagctaaaggctgaagcataggactggccgtagtactggtgtatgacctgagtccagactagggagcctcacgtaagctccgaacaattgaggtacgaacggagaggaacgggattaactcaactgatgacatttgagtacggtcgactagttcccacatttgccatgatagtaatcagtaaatgcgctttcgggctgaacggtccagggttaaggctgtgtcgcacgccgcagaagctgaatcccacatcaggcagaagctgctctgctgcctttcccagaggatatgacaacagctgga

SEQ ID NO: 15289 - DNA, 3012 bp, Emericella nidulans
  unsure (1)..(3012): unsure at all n locations
ttgaacctaagcccggactctgataagcactttggcaaatgtgatgataattcgaatacataaagtaatctatcccatctcacctgtcctggctgggtgtgcctccaactgctacatacaacgggacacttctgtgttcgagcttcggatccgcaatcagcatgaatctaatgggacgaccatgatttcgcagcccaatgtcgtccacttgattggactctttagctgttaccccatatccacgcttttacggtattccacctggagtccggagctatggggatgcagtggtacactactgctatgtaccacaacgatcaccgaaagcggcctcgcttcgatcaatgctggtgaaagagtatttcactttctggcaacagcagacgagtcgacactatgcacgcggcggatgcaggtttatttttgcttcttgtctatgctgcatatattattttattgaactggcacgacaagcctcgaggaattcttgtggcctgacttcagactcggtctccaaagaaagactctttgaatgatcaggagcatccgaggagcatccggacaccatggagtcgggtacaactaacgaaaaaattgtctttttgaccctttttgttcaatcgaccgcggagtcccgacatgccacggagttccaagcgcagtactctcatccgatacatcgacatcacatgactaggcggaggtactagtgttttcataacccggattcgcccgatgcctttgtttggatcttgccccctttaggttcaccgactacaccttcgctggtggagtggcagactgcaggttatcggaagaaaccggaagctgagggcgtcgtcggccgattaccggatttcgccctgtatccagcaagcagacatgtccgtcagaaccaccttcgaactgttatacgtattacagttttcgttttatgagatgcggtgaatcagtccatctccgaattttattgaatgtcggctaaagcgaatggcaaaatgattcagacttgcatccctttgtcaatagtcttaactccaaactggcagtatgggccggcacccatctcgcatgtcctcgttggagacgcctcgactgacttgcactgaccatccgttgagtgtcctacgcaccctgcactgtcgccggtagactacgggtagggtcagctcacttgaaggaagctcatcagatactgtcaggaggacagcatggtcctgggatatccatatcaactgcaccgcagcgtcggaagctgtgcctcagttcttgctagccgtctggctggcagtaggtgcagaaggactagctgaagatgggataagcgcacgtggccttcacttcatcctttgtttatctgcataagggtgaggaatgaagcgattgcagccacttttgtcgaattgtttactatgggacttgttcataacgaacatcacattctgcacatgattctggatcagcaggcgcgatttaagataagtcttgggtggagattggacgttcctcaatgatggaagatcacacctctgactgacgatgcctgatcgccttgtgcaagcctgcctttctaggtaaagcgatccgagtttcgttattggagtctatcgtacggaagtcatatcgactatattctggccaaatttcaggcgccgaaacacatatcattccataggtatgtctatatgtcgactttggaagtaaagagcatgctttttatggtgtttatgcaaccaagctaaaatccaactccaaatcatatagagttcagaaatgaacttcattgaaccatgtcatcgagcatagtatatctcatttttctcgatcatcaaatgatttcaatctcataggtttttaaataagttcgtacagctggtatgctgtttatagatgtattttgcagatcctggttggctttctccgcgttgctgcgggcgagcgatccaccttcaacttaatttctggctctgaatctttgcttctctcccctcacaccaccccagtggaaacagctaaacgactagggaacgacagggatttgtatcctcatcattaatgccagctatctttcggggatcaattggttgaccttcaactttcctcctggtgttgtgattgctctctacccctcaataacattgctcgagtcgcccaaggcgaactcagcaggttgactcagggcatatgaatagagacgcactagaaggcaaaaatcacctcgcatcttctagatcagattggcattatcccagatttgagagccatcaataatgatctccctcccactcttcgcacctcgcgatgtacgttagcattacccagattcttaccgcttagtctaaccaggaaaaaggcacacgaactttggttcggtccccaagcagttccctcctcacaacaaaccgagcccttatcatcctcaagctcggtttccgcaagccacgcccaagccgcccgccgacatgatagcacacaacaccgtaccggcgggactgccccacgccttggggcctctgcgctcgctacaagtgacaccttagccgcgctcatcctggaagaacgcgctttgcgcgcgcgcaagaacaatattgcgtcgttcggatgctcctggataaaaccggccggttgtccgaagacgatgctcggaatgaaggaagaggaggctgaaagggaggaggctatggctgctgcggatgcggagtttgctgctgccgccgctgccgctgctgctgcggcaggtggggagggtgaggaagggctggatgaggaggaatgaaaccggaatggagagggatttggatgcggatattccggacgcggatgaagatgaggagggtgaagacgatgagggacttattgaagatggagaagaagggttagaggcngatggcngcgctgacgaggaggaatatatggagcgcgatttggatgatgatgtccctgaagcgtttgaggattatgatgacgaccaggaggaagactcgatatccagccggtttggccgccaggatc

SEQ ID NO: 15290 - DNA, 2353 bp, Emericella nidulans
aatgggaaaataaaggaaaaattcgtcccaaagaaaattacggtccaaccggccgttcgctaagagctcccgttccttaaaaccaatggacgtttaacccctgtttaccgaagccttcagtttgcacattgtgtccagcagctgggggcctgccccaactgtaagcattgttgtcaagtaataaaccagcggttattatggtccagctgaccgtgcactcaggcgttgacgagcggatcgcccatcgaaggggtccgcagtctccgttcccctggacgtaacgaataagaaacaggtcgttaggtcggtgaaaaagtacgctcaactctgaatgggcacagcttaaatattctgctcaactgtgcgggcgttcatgaaaaaattcacggaaagattgctcttatgtatgtattatccttcgtaaccgctagtgccaactctcaagtctgacaatacatggcgtggtaggtctgacctcgagtactgattgtcggtcaatgtagttggagcgcataacgtgcttagacagtgcataccactgatgcagaacagtgccgtgaaggaaatcatcaacatgagagtccagtttcgaattcccgttgttatgtactactgacacagcatcttctcttctctcaagctcaagtggctttggatccataacatcagcacaggattacatatatgcactgtgtccagcctacaagatcagcaaggccgcgttaaatgcacttactgtacagtatgcactgtcgtatcgagatgagggcttcactattgttgctgtaatccaggagtgagttctgcttctcgtgaagccgattcacgttgcagtcccgactgacgccttatagtggattcagagtgatatgggtgggaagaatgccgatctgactctctctcatggcgcagaggccgtgttggatatcgtggcagttcttgagaccaaggataacgggtgttttaggaatctgtgcacccggatgggacgggtctgatggtaggaatgtatatgatagaaaggatctcttgtggtagatatcgtagatcccatagaagtagcgtataccaatgttacatacaaaattatatagatggcttcagggctaaagagtcctgaaatgtatgttcacaaccttcgcccatgagttcttcgcaatcaaacttttctaacaacaatacgacaaaataacagtgtatgagatttgcaatccgcttgaaaaggtagaaactccaccgagtccctaggtatggctgaggtgagtcaactttggacgatgattagtcatactgtcatagcttcgactctcactcattcttcctcgtttttcttctatacaattacgtacgacaaagccatggctcaagagctcactgcctctggagacatacttcccgctgtgagtttgcccgaattattatgctgacggccagtcgtcggggtaaggctaacggggcgtgctagtgtgatttatgctatggcagaaaggtagataccatgcattgcgttaacgactccgcgcgcggtatcccagactgacgtcctcgcgaggtgaaatgcgacaggcggcttacctgtgcaaactgtgttgatgccggtgtggaatgccgacgctctcggcaggggaagtcttctcggaagaggacgtttgcaaggttcattgggtcctctatggaggtttccaggccgggagctctccatatatggtcagactttactgattataatactcaacagcgaactggcatccgcagagtctatagttgatctgggtgggccgttaaggcgaccacggaggtaggtgcatcgccggtgatagctgagagttgagtctgacaaagttcggagtcagagcccacggctctccccagggcccagctggtaggaactcaccggatagacgaacagactctcgacagagccctgttgtgcttcgcccggaagcaatggagacatcagccatgaatactccgtcgacagaaggtgacaatacctcaaattaccatgccattcaagccaaaaacgtcatacagcttgagctagacgactccagatctggcctcagccaggaacggcaatcaattctgagatctgcactccagctggtgaccgatattgctgctagtgaacgtcaccaaggcgatgcacttgcagagaacgagtcattggacgacggacttgctgttccagaatcacctcctcgtgagatgctgttcatgctgcttcgaggtatgcaaggtctagcgatcaactatcgtgactaatgcgatccccgccccatggagtcgccgggcgatgagtggcaaatacacatttcggacaaggcacatgagcggatggtgacagctgggc

SEQ ID NO: 15291 - DNA, 3870 bp, Emericella nidulans
gctcaggatgtaactagggactcaggacgtaggcataatgctgcaaatctctcgtacacgtggtccagcgtcttacagaggagctcacttcactccgtcagtcatacttctaatcatatgattcattcaactggtaaggtctgtccaacagaacagtttgatgtggaattcaagagcatcatatatattcaattccagcctttccatcctaatgcaatcctccggtcgttattgcccacaacttcatccatttgcgacgctcctatttcaaccggatatctgtcctgcattcattttatcccactttccttcagctggacaagataacctttcttccggtgaaatgatccatctggcagcttcttgccccagactattacagtctgcgtggacccctccatcggctgcaccagaaaaaattcgagcccaatcatttccgacagaatccaattattctaataagttcccgcggcaaactgcctccaaggctggtcacttgcttcagaccactgaatgggattcggtctgtagtcgtgggtttgcactatgtgcagccaggctgatagcttgtgcagaggaaaaaacttgccttttactgataccctgcctcctttccaggtcaaggatggtagtctttcattgccagctttgacccgggatgggtgttgcggtcctgatcctgttaaatctgacgcccagcatcgaccaggcagaggcgaaggggcatccccggccaggaggtcagccgtgacaatccctgcctcgacacagtcctggatgactctagcaaagaccgtccacgattcactttgactctgtctctaccctccataggggaaagcagaacgtaggctcggtcctcatcgttcagcgtgtctcgaccgctcggcgcttcccaggcctgtacaagtgtaagcagccgtggttcgtgctcgtcaaccgagcttctaaatattgacttgtctattgagccaataaatgcctgacggggtctgaggcatccgtcctagacgactatgttgggatttggcagcgactgggctcgctatcattttgcttgttatgcacatcactctgggcctgtcgacagttgcgtatctgagctgccgatcaaggcatccattactgtccatcaagcatctgctctcgagtacacagtacgcattgcttcgccaccgaggcttcctgaaaagtccagactcttttcagttataggcaagacgtgaactcttttaagacatccctggaggcatttgtagctgcatccacgtggatcagatgatcagccgataccacgtcgaatcttgctaggcttgtcacgtcaggcagaagcaccagtacctgtattgcgttatctcatgcgcttaatttcggcattcctctcttgccggttggtctgatcgatgcaatattggtcaatccatatatactcatatccgagctcctttgctcgagttgttgcgctttctagtaactttgctttactgacttgactccaggtgtacgagattgcagcatagcgctttgtctcaagttccgcggttgctatcatatcccgcgtctgaacgtggatcagcctcaaggggttgatagtgttgccgttgggtttgccagattgggcaaatttcatcaccgagccatggacccgaggggcctccgtcaagtctacaggtggcagcatgctcgcccttttcattgactccttaaggctcttgtagtttcgccgcgcatcttgatgcctccccagttagctggtttgggatgcttccgctgcggagcctcttgagtgatttcgcgcgtccaccacagtatattatccggcgagaggatgctccagctctggtctgaggctcggcatagttcgaaacatgtatcgtctctgtctcggcaaggctggtcaataggtccgtcacggcggccacgctttgtggtgcccggtcagcccagagctcttcaatttccgtgtagggcaagacgactggaaccgtacgatccttttcagatcaagctcgtcacccagctagccaccgtcatgaacctgtaccagaccaccgacttcacaaaatggagcggcaaagacatgaggtccgggactctcagccctcagttgcagcgcagcagctccaaaacgattttgacatgctacacaaagcgcaatgaaaagttcggctagttgagcctgctgcgctggaactatcagctggttgctgtccgactccaaacttgtgctccactcaacgccatcaacagcacgcaagacaatatgaagcttgtggtccacaagtcgaaggtcccactcgcaatatccacgaaaacggcttcgtgggtagtgtgcttcacaaccttcaagaacggtcgaatacaaagagtgagatctgtgctcacctgcatctgcatctggtggaccagggagggtccttggcttgggagccgtctgataagatgacctcaaactgtgtgcatgcgtcctttccgatgccaggctggatgtcccacccagtcaccttgacttttttagagccgctggtagtttttcgaatagcagcacactccatgatggcactctatctgtgatacgttagcctgctaatccacagccttatgccccgccatccagtcggtatgtgcctctgaaggttcgaatagactataacccgactcagcctacaaaaatgtcagttgctatttatgctgatttttctctcagttatcaggctgggtccagttttattcctgtattttcttcagctcgtgttcttcaggtctagcagagctgagactcctaagccacaagcctgtcaaggaaccgtgccttattcgcccagccacccaccattcgcttaacagtctatccatattagtctagtagttggagttccaagacataagccacacttatatcatacggttatcactcgcgccctgccagaagtgaatatgctgtgtgagtccgttatcagcgaggcgctaggacgcgacgaggaattaaccaatattttattgaagggtaatttacagcccagcatcggctccttccggcttgatttaccatttatacaaacctcgctgaaaagcttgtatcaagtcttgcacaggctatccccaacggtcttggaggttgctgaagcaattcagccagaccagctggaatgactccagatgagtaagtaaccaagataatcacactgcgagttatatggctggaggcgagctcttcgcaatccacgctgtctggcaatatatcttgcctaggcaaagaggcagcgtataactatactcagctctgaccagttctgccaagaaacacccaacacaggtcatgccaatcccaccaccatcaccttgaacctcaacccttaattcattattggccctttctcgctcgcaatctgatcaccatgagctccgaccctggacagctggcgcgcatccagtctggacaaccaactgtgtctggtggggtggtaaagaggagtcctgaatcacagccaacgaaagcatagcgacgacgtcagaaacaacgagctaagtctcccgtctggagaccagatggtgactcaccggtcgccttcgggtgatgggcgtctaggctgtggttgtggccttgctgttccgggagatggagatatttgttaggatggtgcctatatggcttgctggtgtctcaccaatatcaagtgagccccgattgtctcgctccctctaccttgattcggcaggatccggtagcttttccggttaacgccattggcaggaaaatcgtacggtgttgactgagatccccccggtgtcagatttactccaccccagttgagactcctaaactagctcggcgagtacttcaacaagcatggggtcgactgcctggaa

SEQ ID NO: 15292 - DNA, 2042 bp, Emericella nidulans
  unsure (1)..(2042): unsure at all n locations
gcgctcgtcagtttcttcaatggtgcggtagaggttgcgaactgtaggggacaatgaccttgatttggacttggtaggcgtctcccaggcttctttcctgggaggtgtaaccgggacaggaatacgttcctgacgacttttcgcagggctgttcatcaggtgttttccgaaaagcacctgcaaatgctccttatacagtctcacggtatcaagttctcgtaccaagctctttcgttgctcaaccagaagctttttcgtctcgggatcaatgacccacgcatgcattgcagtgaacctgtcgatctgagagagttgcgcggaaagcgcatcgtactgcttggtggcgtcctcgagtgatttttgatagacagcgtcctgaaaatatgaagggacgaattgctgtccagaggcaggcacctgactgctaacaaccggagaagcttgagcaagctggggcatttgtggaagctggggaaacggaggcaacggagggagctgcggcaactgagggagttggggcagctgaggaagctgaggccactgagcaccaagtccagaaggggttgtgtaaaactcccctggtacggactgaacgcggcaggtgaaagtgtattcatgccatgccagcccgggaagttggatgtcgtcacggcagatgctagcggctggaaggcgaatgtggccgggtgagttgcgcaccaaccagctgcgacgggtntggtggttgagcgaaagcattcaagaagccatccgcactaatcccaagtgctggataagcggataacggagttccttgtgccggctgagttgcgggagggacactagcatgttgaaacgggcttgtgctgctgaggggatgaaagcatggcgcattggcagcatctaaggattggtgacaaatcagcattcacctttaccagactacgatgaactggggccgtacctgcgggcaaggggtttgtcttaggcgccctgctctcagggttgggcgcctgctgtttcggtcgattttctggtttagatttcggctcattttttgcagttgaacaaacagctttggacatgtcgctgttcgcagcacttgcagctttcgagctcaatggaagactccatttgggaggagaatcccatgggttcatcggcacgatacggcccccggcagtgacgcgctgtggctttggagaagtgtgctgctcaatgaatcgcacgaatgcatcatcaaactgcgaattagatgatgacaaagtttcatggtccggctgacggggcgcgttctgcgtattcaggactaaaggtgtcatcccattgcgacgggaatgaccgccggacgcgtttcttggccggttgacagactgctcggataggacatttgaccggactaggttgtctagaaagccggtatgtcagcatcattactaatgtactctgcacggaacgtactagtaaaagcctggtcgctgaacctttcaaggtctatgtgagcattcggctttgctgccaagagggtctgaatgtcgtatttggtcattgctatcggataaatgaatgtgtacccacgaatgtcggtttcaaattgctaaaaaaaaatgaaagtattagagcgtggtttcagcgacgcctgggttgtatagagcagaggaagaggattgcgagttgttgacaagcgaagagaaaaaggagaaggggaatccactcgtgtttggctgagtgaaggggaaagtggaaggaagcattgtcatgttgatgaggaaagagctcaccacaacatcccgttgccgatgagtggattacagagcagcttatgagttgattactgggcaggaaaagaaaggtcacgcagcccgggaaccttaacttcaccattaccaaaactaacaaccctacttctgtgtgtatcaaacatgctcgcgaggcctgacgggcgcagtatcgtgaaggtcccattcctcttccagctcatccgcaagagacgatggccaacagtctgctcgacaagccgtggagggcatttgttcttcatctcccagctgccatgccgctca

SEQ ID NO: 15293 - DNA, 423 bp, Emericella nidulans
ctgcagttcttcactgtcgcccaactcctttactttcggcactacgtctggctctgcgccggggtcgttcgacgcaaccacattgaactggaacaccgtcgatgggccgatcagggccggcggcatctgcggcagttttactccgccgttgtcgggcggtgagctgtcggagggtccctctattcatgtctcgtacttgttgtttctgttctcttcagattttttctttgtttcttttttttatttattctctttgtactttctttgtttcttattttttcttttcttttcttatctttttttcttttaatttcttcttttgttttcttctatcttcttattcttttttttctcctttttttttttccttatattcttagttctatttcttttatctcttttatttttgttttgttcattctt

SEQ ID NO: 15294 - DNA, 482 bp, Emericella nidulans
gcgaaagcccggaagggagtatatggtcggctcgttgccactttttggactaacgatgggctggggaaaagtcttaaggtctaccctacaggatacattagtactgcaacataagctgaccactttcgtggccaatgggacccatatcatatgggactattactgagtatataccctatttcatgtaacaccattaacctgtcaagcctgaattgggactgggtattgtcacttaactaaacctctgcaatgaagagccattgggatgatctacacatcggggtcagctatcgaggctcgatgattctggcacggcagacccgacaatttactcacgacggttatcgatgaccacagcctgaaggatcagctcttttaaccgctatgtttagcttcgaagccacacggttgatgactgaccatcagcttcttgtggccttttcgtgttaatataaacgcatagtaaataggactactcatac

SEQ ID NO: 15295 - DNA, 451 bp, Emericella nidulans
tcttatgtatgcgcaagtacgtctatccaactgcgccgtatagaccggaaacgacaatgatgttttaacttcctccgcaaccttcggctccaagacgatgccaattgaaggatacgcagactcacctgtgaccagtgagcctacactagtagacataaagtcttattataatccttctataaatatattatcatattaatgacctttatatcttcacatcaatctctactcctatttttattttctcattatatcttattatatcactcttatattttctctctaaccttatctaacacttatattcaataattcattatatattctatccactatttattttaacaataattataaatcaatatctaaatactcataaactttcatttttaacttaatttcttttctctattaactatattcactctatgacataacaactattcattat

SEQ ID NO: 15296 - DNA, 598 bp, Emericella nidulans
  unsure (1)..(598): unsure at all n locations
gcttgtattcnccaggacaaattttcctcatccacattttttaatcccgcaccggtcgccttaagcacggtggatcttaaatcacataaagcacttaccaaccaacactttctctttctaaatatacactcatgccattccatcatgaccagtactaaacaccatcttaaattccctcccatccctaaaccttaatcccattcacaattacctacatactaagaactcaaccttcctttctcgaacaaaattcacctaacgctaggaccaaatttaccctatctctactcttgttaaccctcacacagtaatattgcttatagaatcttaccgttcaacctcttactctgtacaatgatgaattctactgctgaattacacaccaatatcttgacattttgtctctttcagataaaccatttatgccaccctccactgcatacaaacccttttcgaccctaccttaattaccaaaaccaacccctaccaattttacactcctaataactttctgacccaaacctataccttcttggcccacctccaatttacctttaactacattacttcccaaactttactaccatcctaattacat

SEQ ID NO: 15297 - DNA, 3012 bp, Emericella nidulans
gacccatgtgcttaaacagcttcgcacgaactttagaatatattctagtggcaattattaatcagcctaaagcacaagacaatccttgcgcggcgtaaagcaaggcattgactatgtactatttggatcatactgactcaagctcatatatgatcttagctcttttatttgtattattttgtttagagggaggggactgagattagattggaaggcgattgggaatctcagggaagagctccctcatagtgggaaagacccagttgatcactttactagcatagagccagcgatgtcatcaccatctccataatagcgggtccaatagaatcaccttcccataacctagttttgtctctgactatagagggcagagcagcaaccgacattgtagatcgcggtagggagggaagagttcattcactatcttcggacgcaacgagatcgtgtagttcaagagatcttgcggacgatagttctgccagaacgcacgagttttagtatcctgttttgtggactgagagggtcaaggctaaggagcgcgctaaaaacacccgtcatgaccaaaaatggacttgtcggtggcgcatgcattctaagacagcgtatgaaagtaatgctcttaagcagcaggacagcaccagtctgccgcaagccgaaccgttgattaagattctagagcggtatggtcaattccccgcagggggaattggtgcgaattgaacctatatattcatggttagtccaagctttacctaacttgaactcagctcgctcgcgatatggcgatttatcgttttacaggctggtgggcaaggaattctcccattctatacaactgctgtcttgcactcgagggttcggttaaaggcttgaccagtatctgagtgccatccagcgctacaaacttggttggttggcagtggaaagaattagcagccagcacttcagtacaattattccaggtccctcaagccgaaatggcattcgagttagtaaatgaggggcgtcggatgtctaaggtgataatctcaggccttgacttttgctcacctaaagcgtaagggatatacagccccgtataaggacacctttcacatcaacaaatttcctgcttctacctagttcttacccactctacaaaaaaaaaggcttttgaaatcctcgcgcattcgattccgctaaagccacccttcaagcgagtccttataccgaattgctctttactacgcccaccccttccaaatccacgcctgtcgacttggtgccctctacgccaatggtcttgatgtgggccctagttgcgaacaaaaaagaaaaaaaaaaaagaaagaaaagacgaaaagcgacaaaagctttagacgtctcgtggaataagagaaaagagggaaaaaaaaatagaagagaagggatggaaagaaatgaaacagctacgtgaaggcatcaatcacatttacaaacaaaggtcagattaaacttatggggacctattcaagatcatcgacgtcgtattgaatcatatcagtagtgagacaggaacgtaatgtctaaaactatgagccttggaaacaaaattcatcactgcagcaactaagccatctcaatctgctcctcatctgtccccttcttctgccctcctgcactgagcccatcatcaggaatgacatatgtcgcccactgcctagcaggaacgcgatcctggaacaaccgctcaatgtccgcgttgctgcgccccgccgtctcgcccacgcagaaccacgagtaagccagcaagaacagcgttgtgccgccgtagacaaagccaatcatgggacctaggttgccgtcatagtagatatacggactcgtaaagaccatgagccagacggtcacgaagaatacgcccatcgcgcacgaggtgatcttgtttctgttccgaccaacggacatctccgatgcgatggagtacgagagcgtgccgatagagaagttgtaaaagataatgttgatatatgcgaggacgacgatgccgataccgacgccgcgggagaaggagccatcgggggagcgggtggtgcctaggccgccgacggtgatcagggaaacgaggatgccgattgagcagacgataaggtttgtgcggcggttgattttgtttcccaagaggacggagatagcgactgtgacgatttgcagcacgtagataatggtattgatggtgaaggggtccgcaacaccgatggactgcgcaaagacaacgccgtaggtataccaaaactggataccgttgatctgctgcacgaacatggcgccgcacgcgtagaagagtttccggcgctcgacagggtctgtgatcagagaagcccaggtggcgtccttagcttgctcacgttcgagctggacctggttttcgatggtctggatgtccatagttggatcgtagtcgcggttgctgcggttgatcttgcggagcgccttgatggccgcatcgcgcttgtcttttgtcatgtaccacaccgggctttcgggtgtgaagatcaggcacagcagcattgtgccggggaggacgacgaggaggcacatagggatgcggtaggactgagcgctctggatgctctgcgtgccctggttgacgcaggcaccgacgagctgggaaatagattgcatgaactggaagcacatgagggcaggacctctgatggccgatggggcaacctcgccgatataaatcagacaggtggcagtgaactgcccaacaccgagaccaatcaggacacggccgacgtaaaacacagggtgcgagccgaacgagcaggcctggacgatggctccggcgatgatgcagagagaggccgagaagaagacagcgcgtcgaccgaatgcctcgttgatcggggcggcggccagggcgccgacaagctcgcccacatagatgatactggcagacagcgagaggaacgccgttccaagcgagtatgaaccgtctgggtcttgctctccatagtctttggcaaacaggtcatgccctgaatt

SEQ ID NO: 15298 - DNA, 469 bp, Emericella nidulans
  unsure (1)..(469): unsure at all n locations
gaaaaccctgacatcattgctgtctcttccggcacttgcgttcctagacgcatagacaaattcacaaggtgtgtcgacagattactcactatactccacgaaatttatatttctcaccagatattataatcctaatccggcctcaccaaatataatgacactttaatactacacacctctgcccggacctnccgaccatacatccaattgtccacaaacaacccggttaaaaacgaggactctacaatataccatatacaccaagtcacacctaacttgactcatgaaaagaagactgacatatctcgcgccaacgttttacctccaaacactcgccccacttgatgactattacacctccagacctgctgttatacactccaaacctagcaaccactttaacaacaactcatttctcgtttggaatgacccttatttactgtccatgaatgatgaccatatatcacta

SEQ ID NO: 15299 - DNA, 663 bp, Emericella nidulans
gcataagcatcggtgaagctaaactagagcaggcgttgatttaagctgagccaaatgattccactttcaacagctgacaatttctatcaattctgtgcatcgccctgcaacgacaatctgattgtctgagaaataaacgatatctaaagcatcagctgctttccgcttgagcttgccccaagtcaattacgccgacaacgaattgaggggccaacagccgacagctcaatctattttgtactagacatcggcctagcctcttagtctagtctcaccctcctatgatgttccacgacagtgtcatcgatcagtgaacccactctgtcagagactaagaccggtcatgttcgtatccagcctggcttgcgttagcctacaacccaggtgttggtcgtgactggacctcgattggattcacaaacgacgacgaattgaatgccttagaatgtcagcttgcgcagcagtccagtggggcatttgtcgcttgaactggctggctggctgggctgctgcaatccacctggatctgcttttctcgttccacttataatctatcctgatattaacccatgctggtgtactgccaattagtatgtggctcgttcacgtaggtctcagccgcaccggcgggccccgtctaccgaggaatgcctgtttatcatt

SEQ ID NO: 15300 - DNA, 255 bp, Emericella nidulans
  unsure (1)..(255): unsure at all n locations
caaggggggggnaaaataganatccgctatccccacccttttttcaaggtcaacgacaccggaaaagttgagagggcttctggcaaaatcaccnacttctcccccttcgataccggcgttgtctgcatggctactggtggacgaaacatgggacgcgttggagtcggcacccaccgtgagcgtaacgatggaggtgtcaacatcggtccacgcttagaggatagcacatatgaccaatcacaatttcgtcagccc

SEQ ID NO: 15301 - DNA, 1116 bp, Emericella nidulans
gacaccacccatgactgcacgagtcgtgtcctccagtcgtctctccagtcctctctgaaccgctacttaattcagttatctgaccagctgcgtcggagcagtccgcccgctgtcgaccttcttcagcagcaagttcgatcatcccacggactgacaggggccactagcgaggcgtaagggttgcagtagcacatggtagcgcctgctacgtccacaatttcgccattgaagttgtgattcgcttgtaactgagggtccaagacctttcgattgatggaatgcccctcagcctgatgtgcccagagtaggcgaagtggaccgggccctgtctgggcagtccccggggtactcaagcatccttggcaaaaggcaatcgtcttggcagagctcgatgcttgctaaaaatcatggtatgaatgatagataataatgctcgattgcgaagcgatcctgtttgatgagcctggtgcggcttgttggagtggaggatgtgttgaaaaaggaaagtgaagggagcagaggatgagggacggtcgacagcggtaaacacaataagaacagtaaacacagtgaggaccctggggacgccaaggcttcgcccagacgtcgaaaccagatgtcttaggcgttgacagacggagcgtgggatggactcttataaaacgtacctgcactgccctgcatctgccgtccatccatcacctgcatctcacctacaaaatttcatctctcttcaaatttgctgcaagatgaagccctggattctcgccttcctagccctatcagcctgcgctctggcccaggagaccgaaacacccggtccttctcccaccgagtctgttggctgtgaaccgcacggagaccactggtaagcttccttgccatttattctgccagcctctactagatcaagcaccttgaatccttgctaacacaattcaggcactgcgacgccccagcaacatctacagagactgatttggagtcaacctctgagaccctgccaccaagccctacagagtcgattggctgcgaaccgcatggagaccactggcactgcgatgcgccacgcacaacgaccgagtccgagttcgagtccgatgcaacatccacctc

SEQ ID NO: 15302 - DNA, 520 bp, Emericella nidulans
gaaagataggaggaaaaacccgagaaccattgatattcctgagcaggtctactttcacttttttaacatacttcaaaaacaatggggacccggggcgccttccatcgtattgacctcacatcctactaccaaaagtctattgcaacctcgtataatgattataaagatcactgcaggttcttattttattatataaagttttaaaaataagcaatatatactgtactagcataaccatatatctatctaaccgtacaactttttctgacaattgagactatactagagtacattctctacctaacttcatataagatacaaggtcacttaacacacaagacctttacaataacacctcaccactagcagatagcataagttctgtctactctagtcagcacagctaagggcgtaagcataaagaaccctgaaagtatgacaaaacttgattgtgtgaccctgcacagtcaatgtcaaatatcaaactcttgaccaacaaaggtaggcataggtgactcct

SEQ ID NO: 15303 - DNA, 591 bp, Emericella nidulans
ctacttttccgttctctagtcatcttccctgccgcgctgtgctaacgtaggtacaccgagctagtggcggatttgtcgtcgagcaacagggggccagaaacgggcgtgaggaacgggcgtgaggaacgggcaatcgcacacagcacacaattcttgtggtatggcattgctggccttgaaaattggacggccgcaatccatggtagttagaccaatagctcagaatggttgacatcacgatatgatgagattctctagtcgatggaacctcagccggctgccccgacccgaaccagattcctgccgcgtctggacctgtgcagtgaaatgtgcagttgtggttgcaactcgatggagctatgaacccgcctcggtgcaagattcttcaccgtcacgccgagattattatgatcaggctctagtggcatatgtgatacacaagatgtctcaaatatctcaatattcaatgtctcaatgtctaatatctcggatccaaatatataaatatttcaaaacctcaatactatttagtaaagggtctcagctcagtctgtgaggatgacatatgatgaggtgtgatgggatgtgata

SEQ ID NO: 15304 - DNA, 551 bp, Emericella nidulans
ggggggaggatggaaaccgggacaacattacccatttcacgtgtacaaacggcactgtacaacaaaggggagtgaacgttctatactcagacacgcctccaaaccacgaaaagcatggggcgcagtacccaggctggaacctaatttgaacctgccagacactgatcacgaaacaccgttaagtcaccgttaacgctacgaggactagatatgaaagagacagatgatcccatacagctcctgcctgctggcggatggattcatacttaaaggcaagcaccagccacatgacgatggtaagcgcaatctctgttggggtggaaaagcggtaccttataacatagctgaacagagatacaactgtgccgtgactcattatgtatggctgcataacaaagctgcagggactgcacagctaggccgtgcctactaaacgtctctttgcaactgcactgttggaagactaggttgtacaaacataaatgcatgatgattaccaggtgatgactatggcggttgacgggtccgcatattgatgccattgcctgggc

SEQ ID NO: 15305 - DNA, 598 bp, Emericella nidulans
gggggggggcttggtatctggatcaaaccttacaattctctttattgaccgcagcctacctaacaggagggatcgtggaattttctactgaggcgcgagcctgatccgcttactaaatcccgttatgaagatactgcttacacgactcaatatgtcccccagcacatagcaacaacagccctcgttcgtccggagacacagtgacatcagacacattctcgttcataatgaagttcgagaagacaaatgcacactgatccaatccaatcgacttatacacacagtggcataacatgctacagggtgtggactatgccggctgtggtatgcaacaaggacaactctcgttcatgcttctggcagacatttcccaaaacaggacgtgaaccgaggactctcgcttgaaagctgggcacgtcatcccaggccattatagtttcacaaacggcacggctggtgagatccaccatactcctcctagacaaaaaaaaattgtctgtatgccatgaacctgggcgactggtgattttacgcaagtattccaccctttagactaaactggttcgagctagggagcatactgtaagctacctccggc

SEQ ID NO: 15306 - DNA, 3198 bp, Emericella nidulans
gagaacacattcgaggtatgagggcagtttagtttatggcatcagaaactaacaacagcagcgctggcgcttagtgattcgtacattgtcgcagtaacgacaaaagactatgttagagtatatacattatatggcacacctttcagggtgtacagacagaaaagcccggccgtgacctgcgccgcctggagagactatgttatgaccataggcaacggaccgctgggaagcgacgggcgaacggggacgctgcggtactcgatcgaaaacgtcaagcgcgacgaaatatgccagaacgaggatgttgtggctatcccggaaggagctgagctgaaaagcgttttcttcacagacatgggggtgagcatttccctattgatttgagacctatctaactgagtaggacccttgtatctacgacacggaaggcgtgctgctggtcctgcagcactggcgcacccaaggccaagcgcgctgggttccactcctcgacacaaagcagctggagcgactggcaagcggccgcaaagaagaaacgtactggcccgtcgcagtcgcgcaggacaaatttcactgcatcattctgaaaggcggagatcgatacccgtacttcccacgaccaatgctcagcgaattcgatttccagatccccatctccgacaagcccaagccgcaagaggaagacgaagaaggaagcaccgcgcgcaacgacagtatgcgccttgaggaatcttttgtccgtggtaatctcctcctctcactgttccaggacctcctttcggccacgcacgcgacggccacgcagcgcgctgaattgtcgcggaaggagctggagcttgacaaggtgcttctgcagcttctggcgatcgagtgccgagagggcgaggagcggggcatgaaggcgctggagctggtgcatatgatgaaagaccgcaatgggaaaatggttgaggcggctgtcaaggttgcgcagcggtataaccggggcgtgctggaggataaaatccgggacttggcggcgcggcggtatgcaggggaggacgacgacgatgaattagcattttgatgagtgtatgaaatactagctgtttaattgataccttgattgattgatatcggactggatacgctggcggtattttttggtagttgaggtactccgcagagtccagacatagtactgcaacgggcctgtgggtcaacgtcatcatttcaagtatcttcgagtttccattctccaaattccaattcttcaatttacaactatctgataacgattattctaatgcattaatcacgccattatcgtctcccgcgatgccgaggttcgctctctctcgctcatccactttagcctcttcccgcactactcgcttctatcgatttcgctcgaacagctcaagatgcgcgtcttctcactctcaaatccgccatgatattcctcgctcaccgtcacctcaagcccatcttcctctcctaccctctcaatcagggcctggattcagcttcaaatactcgctcacagacgaccttactcctccaaacgaccacaaaccccccgatgagcggatcataaagcttggaaagagtatacttcgccttccgtgaccactgtatatcttaaagaatataaaactaacatttatatataacagctctacgaatcctctcgcctctcctcccgacgattctcacgaaccctcttcccccacacatactctctcccaacgtaaccctccacctctttccctcgacgcacccgcatctgcccaccgtcaagggccgcactctctaccgcgccgctttatgggctgtacctgtagcctggagcagtgtcccgctggtcggaaacgtgaagctgcaaattctcagcgagaggatcgtgcgtggcgggatagttccagatccacaggtggacacggcgcatggaacacaagccaaaaatggggattgcggtgatgagaggcttgtagtgcgctggcggacggagaagccgaactctcattcatcttcgtcttcatctaaatccgagacttcaacattatcaactgcatcttcatcccctctgaagcgagatccgaaaaccggcgacgaatccaagacaaacacgaacaaaggcctgagcgttcttcttggtggggatgctccgatcttcaaactttcgcgcgacgaccagttcactggcctctttatattctctttcgatgaagaaggccgtgttctgacgcagacaatcgagcatgcggaggacgcaggtggctgggagcgcacggcgaaatttgtcactctcacagattggctgattgggaaggcgaggggatcgttggatacgccacaaccggccgggttgtgctgttctggtactgggcaggatcctggtcatggtcgagagggccggtggcgaagtgatgaggctgaaaagataaggatctcgggggcgtctggatcttcgttataattcttctattttccatgctcgatggttgccgagatgatagaatgctggcgttgtatttatctggacaatctcctctcttgttattggactgtattatactacatacctatatcccaatgaatgattgcgatgcagtgaataattcacgtacaacagccactgtccagcagcagcagtaacattgctctaatcagagactatgtataccatatacaacagcataggacatatatcgtacatacctagcccaggctcacagaacaataagccttggtatatgcaatagagtcatcgtaccggttttccttcaccagcagcaggaggaacagccggtgccctcaaccctaaaaacacacccatacaaaccccagccataaccacactgccagtcaaatacgcaacctcccttccaacccaccaaaacagagtacaaaacagcactggtcccgccgcgcgtccgacctgtccccagctcctcagccgtcccaaaacaacgcccctctcctcctccctagcttccagtgacccgagcgcattcaatcctgtcacaactgacgcacttgtcacggcaaggaaagtagcagctgtatagagaccagctattgatgtgacccgtgacagcagaaagaaggagattgttgcgctcgcaacgccgattcgaacaacgaggagaggcgggagcctgcgcacgactgtgcctttgaggagtgaagcgatgagacccattgtgacaggagacg

SEQ ID NO: 15307 - DNA, 489 bp, Emericella nidulans
acaatttctctacggcaaatgataaatggaccgtggtcatggatgacactgctgtaagcggagagtgttggccatatgagccgtatggcgagaagcctgcaaggatagccatcggcatgccagggctctatggatgcaccgcgatattcattgtgtcgaataaaggagtgtacactgcgcacttctgggagtggcccgtcttttggagcgaccagcagggattacaggagacaaccgatgaacactttaagaagtacaccgtcgacgcgctcttacagggcggaaatgagtttcctgatgtacaaatcacgctcccagacttgatgggaacggacgaacgtcctgggcctcttcaccctttcaatctacccaaggtctatgtgattacaccttggtctgaggaaggttccgcggcttgtccaatatccagagcgaactcattggctaggtagccagatcactgcggttcttataccaatttatgagggg

SEQ ID NO: 15308 - DNA, 511 bp, Emericella nidulans
  unsure (1)..(511): unsure at all n locations
tctgtgccggtggcgaccctggtctgctatacgacggtgctctactctatgttaacaacaaggtcatctaggtataccgtacagtaaacgagcggaaaaaccaggatacagcaattgagactcactgcatttttccattgacgatgggagcgggtaaataaaaatgtaaagcttaggtacagctttgtgacgcggcctgggacctcgaccttgcttgtcaatatagcacgggactttattatcatatgaaaactatcggttgacaaataaggaccactgagtctatacgtacctctgaacccacttgatctgagaatacactcacccagtgatgcacactgacataggaccgagggtgttgtgaacaatcacaaggaacaagtgggtgatgcgtcactccttcttcggattggatgcatcattcnaggtcgcagacgcgaaccgaagacggctacgactggcggttgatgcggataaggctgagaggatagagtgacggacgcatccacga

SEQ ID NO: 15309 - DNA, 3404 bp, Emericella nidulans
cgataatgcttgtcagggtgcggatccccgtttatcggtttcgccgccctccaagaaggttgatctttgcccaaagatggtgcggaaacgcagacgctaacgagtcggtcggcctgattcttcagaagaatggcaagccagacgtggtgaatactccgaaattgacaaggaaacagcagaggccaaggattccaagaaccctgaccttcttaagttccgtgctgcaaatattgtcaaccactactactcctttgacttcttcaactccatcgagacctgggttcacaagctgccgcaccacatcgctcgaaagaagatacctagtgttaacatcgagagcggcgaggttgtcaagcccgagaagccgaatggtatcaagctggaacagttcatcttcgatgttttccccatgcttccccttgagaagtttgccagcattgaggtacgtcgagaagacgagttctcacctctaaagaacgctcgaggcactggggaggacgacccagacaccagcaagcgagacatcatgaaccagggtcagcgatggattgagagtgctggtggggttgttgtcactgagggagatgccgtgggtgttgaagtatctcctttgatcagttatgtaagtttcttgggctttcaaatattaactcgcgtgtttctaacaaacgtctgttgtagggtggagagggactcgagttcctcaaaggccgcgaactcaaagcgcccgccgtaattgaaaaggaggagtaaattatacaaactatatctgttttcagctattcatacttttatcaaaacataaaacatatttaacggcacaacttcgcatcgcctcgcctatataagcgtgctgaaggttgggcttcatgcaccattccatgtgatacttcgtagcttctaatcgctgctcattacaagaatctggggcaagcaccttacgcgatacgggaaagccccgggagctaaagtttttcctcagtccgctttacttttccctctgtgctggctgttggtcgcttgtaacagtttggaatttcttcagaatatctgctatcctcgtgcgttacaggaattttttttataaccttcccgtttttgtcttggagggttggcgtgttgtgtctgtctgctgaaggttagtcgttccaaatcgtgtgtgtgtctgtggcagcaaagctctcgttcttgtcagcccacttattttttttgagtcctgagagtgggctgttgaagattgcttcctactttgagattctcaaactgacgatcaacccagcgcaatcgatataaggagaattttcgaagtttgcggtctaggaagggtgagtgagctgctggagtaccactcgtgactttgtcctttgcgttacggtcttcattttgcgatgttttgcgctccggttcatcgcggttcaagcttcactttcaaatgagcatgcctttctgccttccccgggagtcaatctctacgaactgctatatacaagccacgagcgcttaaattatgccgcctgtccctccgtacttctcgtttgcgcctctttggtaccaatagtcatgccttgtcgatccgcataaagtcccacttctcagcgcatgagttggttcagcattgctgactggagatttgtcctaccgtcttttagctcgttacatacagaaaatcatgatgctctctcgacgtgcctgctacaagtgtggcaacattggccattacgctggttagtcgcggggaaggaataccggggtgagaagcggaatgtgctaacgggcttgtcaagaggtctgctcttcttctgagcgtctctgctacaactgtgagtggattataatgattcagaacctatacctctagttcatcacgctgattcgcttgggtacaataggcaagcagcctggtaggtctcagatggtgtgtgacattgcacggagcaaatatctgatccgcggacaggacacgaatccagcagctgcccgcgccctcgtactaccgagagtaagagttccaagtcaatcgaggaaaggcacaggggtactgatatttataacttccagctaagcaatgctacaactgccaaggcctaggccacgttcaagcggattgtcccacgttgcgcctcaacggcgccaacggtcgttgctacaactgcagccagcccggccaccttgctgtacgtttgacaatccatccctgcatgtcaaaacaaaactaactgcgtttcttgccagcgtaactgcccggctcctgcatctggtgctcctcgaggcactggcgctccccgtggaggatttggtggcggtttccgcggtggatatggcggctaccctcgcgctgccacttgctacaaatgcggtggcccgaatcactttgcccgtgactgtcaggcccaggctatgaagtgctacgcctgcggaaagcttgtaagtgcaacatacattctttgtagacttaatagggctaacataattttcagggtcacatctcccgcgactgcacggctcccaacggtggtcccttgagctcagctggcaaggtctgctacaagtgttcccaggctggtcatatctctcgggactgccctaacaatgaggccactactgagtcggctatccctgccgccgccactgctcctgtagctgctcctgtagctgctgctgctgctgctgtcgagactgatgctggtcctgttgcggctgcagctcctaccaccgccgtcgcgtaggagggaaaaggctatctcaagtcatcataatggccatacagccatttttccttatttctcttcattttatacatcggacttaccggcctaggttggatccatttttgtgttttcgtgcatatattacgcccctcatgtttcatttctcgacacgtccttttccttattcctcttatgtatacggcggacaaaagtttcacgaagacttaggttcccttactgcttggatcctttgcacgattcagggtcttatgattggcgtctattgtactcctcggatatctttctcattgatactataggtgtggcaaggagaggaggcgaggcggagggttaatcgagcgcgagccgaagtgttggtatgcagtggaataggcctggcttcgagaccagggtggatgggattgttcaagttgtgctgaaggtcgccagtgagcatggaaaggtgcctggtgcgatggtcacctgctcattgtgcgtgcgatatccttatactcgtcgaaagtgaagcaaaaaaaggagaaaagcaatattcaattttgagtttgagtgcagcacctgcacttgtttggtgtcaatggacgacactagccagtaatttcccctaagcaaccacgtaaataacacaatcgtcacatataatccagctaggatcgtggggtgttgtgatttggaggg

SEQ ID NO: 15310 - DNA, 1043 bp, Emericella nidulans
tggagtaggagtagtatgccattgtccacatcacattcgtctagggcgtctatcaccatcaccagcagtggggtcagcagaatagatgagttcaaatcaatgagtggctgaaggagtattctatcaaattgctcctttagcccttttgttgcgatgtcagggtcgacctgaattgtattctggacaccggggaccagttggggaatccttatcgctaattgtcttgttattgtcgagaagaattttgatgtattgccccgattcccttcatttcttttgaagaagaagcttgcccccaataagtttgcttcattgaaagtcctcgcaattgtttgtgaggtcgtcgattttacggtgcccgctctgctcctccagccaaaaaatacgttttccctgaggcagtctagcccactccccaatcctaattaggactgcttctttggtgcctggcagacaatgactctcatgttgatgcgcacttgagttagactcagccccatgcgctactggcaacttatacgtccatattgaggccgattcgatcagtagttttaccaacacgagtaatgagggccctgagcaggtgtgagcgagtcaccagtcaccacatggtcagatgacgcacgtttgatcaatagtcagggatagtgtagaagacagtttgtatctctcaagattctggatgattctctcgatctctgtgcgtctcagatgccatttcaaggctcagaatctaaagtttctcatagttcacccccccttcctggactgatcttcttttccagggcctgaggtcggaaagacaatctgtaatattgctaacgagttgtgacgagctagtcagcattgtgccattatttccctgaagaatatcttttagtttctggagaatcccttcgaggcctgcaattgtctgttgtaagaccatgatttcgccgcgggcatccttcacttgatgaatatagccactacatatcgcagcaacactcccggtaagttggatggcagtgataacgctagctgcacaggatagcccatccttt

SEQ ID NO: 15311 - DNA, 449 bp, Emericella nidulans
  unsure (1)..(449): unsure at all n locations
cagagcngattatgggacacagattcaacctttgctttctaattttacaacacggaaccacaacagggagacggggattttgccagcgtgcaaagtacccccctaacaacagagactgacgtcccttgatctatgaataaagcatgagatccaggcacatccataaagagcgagctggtatgtcctatgggactcctccggggttgaggagagcaacacaaaaaaccctatctacacatgcgataggagaatgcatacgacccaaaggatcctttcaaagcccacattcacggcatacacagccgaggcaaagaacctatccagtgaccaagagagacttagcaacaaccacccgggactggcagggggcaacatgcgcaccagatgcatacagcgagcactcacaacgggtttgttccgcgcataaggatactctgccagcaacagag

SEQ ID NO: 15312 - DNA, 4110 bp, Emericella nidulans
  unsure (1)..(4110): unsure at all n locations
ctgttgctcagagtgaaagacatgcgctcccgcgacataagcgaaagcccgatgcagttatgggttttagaggtgcgtttgattcgccccatacactcaagacatgactggacgtgttgctgtacgagaaagtgccgggcaggaagtccacagatggcccgatagagaaagatgagggcgctgtgttgaaaagctcgagcaaaggcaagaggctgcatggcttctagggctccaccttgcttgaccaagtgcgcagtctcattcgtaagatgataggtgctgaatgtgacaaatctgggttgtagtacgctctcgaaccgccgtacctgctctgtcgaaatttcaagggaattaacccgtagcgactgccgatagaaacccatctcggccatggtgtggaagatcgaggccagggtcgtctccccatatcgctgtttctcccaccatacagtgccttgctcgatatgcagccagatatccgcggggaggcacggagctcggtcgtcgaggagggcacgagtcagatctgtagacgcaaactgagagagcaacatatgcacatcatcttggtggccttggtcgtagaatgcgctaaagccgccgagattttcgacgatagcgcgcactcccacccgatggctgccagtcgaggcagactgcgcggtgcactcgatgtatccatccagaaagtagagaagcaatactgccagcagcacgcacgagagcccctgtgtatcgctcgcgctgccttcgagctgcttgcggacagccgtcaggcagttcagcctcttcgatggaatcacctcagtcccttgtctcgaccactgttccctatgggcgcgatgggcttcggcgagctcgcacatggtcagcagcaccggttggcaatcgagggcgaggcggatcggaggggggcacggatcgaacgaggtcgagaagagaggccacaccgcgaactggaagtactcgagtgcttttcgctcgctctctgtcaagctgttctggctcgtcggagatcggagtaaggggctaccagcaacgtccagctggtatcccggtggaagccctttggccggcttcgagctccatcgaacgcgtaatttcccgtagctgcaagaggttccggaaacgagacatcttcgacattcaggtgatgttaaatcgcacttgacacgtctagttttgcattgccagcagctccctgcgacggtgcgttgccttttgggaggcgttctgggaggcattctgggacgtttgcacgaaggagtacaatcagaatagatctggatgagcacagcagagggttagatagcttagaatgatacgatgttcaagtgtagggaaatattagagatgacgcaggagacagcttgatcaggaaggtggtgggagaaatggatcctccctggcctggggagtcggagagttggagacttcgcataatcgccgttaacctatcagtgcccagtgcgggggcgcctggaattccattgagaatagaacgaatccatgggacgatcgtgcctattcctgccctgtctggtctagtctcttctggccccgtccgtccagccgggcccatggcccaaaatcttacccgatacggtaaaccatgatgcctatcccgataagcttctctagggccagcaagggctcagatccaaatcgagccttataagcttccctctctcatctccctacttgaacagcgatacagacaaagttgtcagcatggcttccattgcttctccagaagacgtgatcgctttggtctcccgacatcctctgcctctagcaggtacagccctctttcttgctgcgctcctcgtcgttgtactgcaacccttcagcaaaaaacccccaaagatatcgccagcacctacatcgactgagagctccggggagtcctttgtaacgccggtgccggagcccgatctggattttgaccctgtggccaggaccccaaagctctaccgtcccttccgccatggcccaaacttcatcaccatgggaatccgcaagatggactggaacaattggatcgagatggactcgtactttcttcgataccacgaaaccaaagctgccgagctgaagaaggattttgacgagcacatcaagtacgtcgacaacgaagtcaccaagcatgcttgcttcgagctctacgaagagctcgtccagtaccttgtccatcgatatcccaaagtctttcaactcggcgccaataccgtgcacaatgcgttaactggggagacgtttcgattccctgcccgtacgttgtcttctcccccatcccaacagctgacgctaatccggcagcagaaaccccctccgaggcgctctcttcgtcggcgctgttagttcaggatgatcttgtgattatggtggaaaacgacggtatctattccagtcccttcttttgcagcacggcagcgactgactcggtagatggccactatcatctggatgccggggccgtatgtcttcctggcttctggcggnnnnnngagaaattccgcatgtcgctggatacgctgcatttcgaggcatccgttcctcattacgctgaaaagctccaaaaatctatgaaccgattcttcaagacgctccctgccgcacgtccagtggtccgcaataatgtacctccctcttccgcgactcccgtctgcgacctctcgttgactaacactttgtagtatttcatccaactcgatgacggtctccactggtctcatcgcatgggcgaccagaccggcactgaagttgcgtgtaaggtcattctcggcggcagtcaatagtcaatactgacagagcgcagcatgggctaccgcatatagcataggctcgacaatcgacgagatccatttccggtccgagcgccaatcgctacgtcgactcccacggtctggggcaatcgtcttcactgtacggacatatttcgaacctatcacgacgatcgccagggagccccatgttcccggccgtctggcggaggcaatcaggaattgggacgagactgtgtcaaagtataaggggaaatcccattgggagcacattcttttgccgtatcttgacgagcagcatcgactgcagatagagtctggcgtcctggagagccagacagaaggcgaattccccttttagcgccgcatggtattagtggagagttgcgcctccggacctatctcaataacgcctaacgtttatgaactgtatcttattgtccaattccagagccttcattgtacttcgggaccgtatctaagaatcattcatgctagaatctcaagttgattagacaagtaaaacccacacgccggggccctgctcaggtgcttgggcgaaatgataataagtaggagtccaggttccataaaacatgtttcgtgtctataaccacccggctgcctgaagtacttagtactgctgcgcctttaaaagatgaatagactaaactaccaggaatcgctgccgccgtcaccccctctatattagccattttagcatggttatgcgcctacgacagtttcagtccaaagctttcttcacattgttcccagagttggctggctgttttcggcatagagtccacgacagtatttgtcgcctcttttgtatagaggacttaatttataccctcttccagaatctcaactatctctctagcgctgttgaaactaatcttgactacgggtcactaaagcaatacgccatgccacaatctatggcttggacgatttctattcctgctaggcatactattttagcctgaatgttttaggtgcctatgatattagaatatttctaatctcgagtcgtgcaatgagttgatagagatctggagactttcttgagccgaagaaagttaacaatgatagccatcaaccaggggacaatttcattgattaggcagtggtatgaacaagtggagagctagtgaactttaaatcaagtatttctgcgtgctgtggtaagatgaatcttttattgctgatgccctgctgatatggtgtagtcggctatatctgtacagtcaggacgctctggcaatacgctccgcagcatacagtgatagaatggtaattacagctgctttacgtccagggcacg

SEQ ID NO: 15313 - DNA, 453 bp, Emericella nidulans
atcatatataactgaatatcacccgttgactcataaccacatctaccatgaaaaagatcctcacctcgatcaactaaccatcctcctgaaacatcctctgttgcactcaacaaatatttcaaactcctatgcgacaatgaaattacctctaaagaaactaaactgctgataagaaacatctgttcaacaactttgcctcacatcaagacaaagaaagcacagagagtgcacactgcaaaaaacatacgtactatcactccccaacagaccatcgagaagctcccacatccagttagcttcgatcatgattgctctatctgcaccagcaccttcaacacctccttctatgatgagagatctagtataaacatcatgtcgatgtctgatgctgagacattacgcatgactaactacatgctgactagaatcactcttctctactgggaacgatac

SEQ ID NO: 15314 - DNA, 8110 bp, Emericella nidulans
agacgccgctctagcttagttgcaacctcatctatgctacattgggcgaacatgagaaagcagtacgtttttgattccttcggctcgatttggcgctaacaaccacaggttgagtgctatcagggcgcggtgggcctggaccagtatcttgccatcgcctactttcaggagggtgtgtctaatttcctacttggcgactttgaagaagcattggcgaatttcaacgacactctgctctacctgcgaggcaacacatacatcgattatgagcagctcgggctcaagttccggctgtactcgtgtgaggtcctctttaatcgcggcctgtgttatatttacctgcagcaaattggaccgggcatgcaggatcttgagtatgcttccaaagagaaggtcacgcctgaccacgatgtgatcaacgacgccattcgggaaagggcagaagtaagtacgttgccagtactcgcgatccaggctgacccctcagggatataccgtgttctcaatccccgtaggagtagtttaccggccgaacgaagccaaggtcaagaacctcaaaaccaaggactatctcggcaagtcacgcgtgatcgccgccaatcgactgagcactccggccgatacctcccagagaagcgtggactccgtgccattcgcgacatctcacctagtacagaagaatctgacaagccgcagtcgccagcagtcggagccgccgatgcatcgtaatctattcccgcctactccccctccagatgccgacaaagcaagccttagctcgactgggagtaacgggacggtccgcgctcaacctggtaaagcgcagcgtcccccaaagctcgacttggatcgcccaggagctcagcctgctggacgaagcaccacggatcttactgcgcctgagaagccacggttagggacgattcgcacagcatcggagccaaggggtcagtcacggcagcctcgcggatatgcaccagaaagacatgtgcgttctagtgacggctatggacatcgtagaggagcaagtgatcatggttttggagtttcaaacggccactcagacgacgcgtacgggatgtatgaagaagcgcgagcaatgacgctagcaaacggtggacgccccttccagcaacaaggatacatcgacgaagaagaggaatgcggaagttcaccatgcgacgaggatttagtgccagatgcgagcttcgaactcatggggtcgcgaccgcgcgcacggtcatgcagccgcggccctgcacgagggtactcccgccggccggaagtgcgcaggtttcgagtcaaggtacattcgtttgaagacacacggtacattcttatccctccaaccattgagttcgccgagtttgagacgcgaattcgcgagaagtttgggttccagatggctttgaaaatcaagatgcaagatgagggggatatgatcacgatggtagaccaggaggacttagacctattactaatggcatcacgcgagattgccagacgagaaggaagcgaaatgggaaaaatggaggtatgttcaatcccttctcatttactactatgaatgttctgactagaatttagatatgggtggaagaacgacggatgatttgatgatagcactataccctgcatatgcgcctgtatatattagcatttatacccgtaacgataccattgttcatttacccttaaactgtatcgattgcactcgtagtctacatcaaattggcctgggtttgtagggcacggggatcacgggatcgcccaatcaccgtatctccagctcagcatttccgtagctccacttaacgtcaacatcaacatcactactcgaccttcaccagaccatgctccgatagccagccaacatgacagacctcacaccgctatttaccgagcttcttcacaaacaggatgaatacatctctctgtcccgacccctgaccacccaaaccgccgatgaattcctcaaagaagcctaccgcattgtatgcgcagcacctgcaaccaaatccccccaagactaacaaacccaatagaacacccatatctcctccctcctttcgcacctgcacaaaatacgcccatcgtttttaagcatttcaacgcacgcatccggcaaatctacacaccgcagctccccctcgaccaccaccaccaaaggcaaagacacaatcctctcccccgacgaactcgacgcagtcacctcctcaacctcctccctcctccacacactctcctcctcaatctcaaacctctcctccgcggagtcccttcgccaagaaacacactcgacccttctcgacaagaaatacaatcgcaagcgctcgcgcgcctcgaatcttcttttccaatgggcatccggctcatccgcgttagcagaaagcgaagatgcaggaaagaaacccgagcaaatcattgaagaacagatcgaaaacaacaccaaggccgtccgtgaaagtgtcctctggtttctgagacgtcggctggaaggcacgatcgagatgcagcgggatatggtggagaagaggattgagagggcgcgagagcgggagaagagcgttctttacaagaactctgcctcggcttcaacctctgccgctggcactctcgctggaagtactcgtagtggtgttgcaggacgaggaagaggggtctcggtttccgccccatcaaactaccccgatgccgcgctggaaatggcagatacagttggtgttggtgcgaaagggaacacgcttgatgcgtccgaagttgcggctatagaagcagagcttacgcccgaacaactgcagcttttcgcggaggagaacgattccatggtgcggtattatgaggatactctgagtaaagtccagtgcgtcctgatttgcccttctttcgttcaagtaaagcaaagcgaaactaatctcttattctttctcgtataaataggaacgccgaaaaatcactgcttgaaatatcctccttgcagcaaacgctggtgtcgcacctctctacgcaggaagaatatatcaatataatggtgacagatgcatcgaatacagagacgaatatcgggcgcgcgaacaaagagttgaagcgtgcgagtgagaggcggagtgcagcgcaggccgtgttttgggggaccgtcgggttgtgtacatggttggttgtttgggatttgatattctagttcttccaaggtgcatactgttcggagaagaccattcatggatggatctgttatggtttatcaaataaaatgtagctagtagctaaatatcccatagacttttgtcgcagacaagacaagcatgtttattttatctacctggtgtattaccaaccaagcaagccgaattaaaccgccctcggactaggcgtcgaagaaccgaaataataaaaaccgaccgagcaacccgagacttcagtacctattcaggtgaactgagcatgtaactttagaggggaatatgtgaaacagatgccaaaagcaaatggtgaggcacgataagtgcgatgactggagtacatgagtagaaaagatgaagggatgcgatgagaggattaggtgtatgttcgtaataggtggataggaagatcacgatgtctccctcacaacgctatcaaccgcctcggcaaagtaatccaggttatgggagttgagaccagccatggagatgcgaccgttcttggtctagggttcaatcagtcagcactcatccaaacacaacacatgacaggtatcataccatatagacatgccacttctcacgcagcaccttaacctgtgcctcactgagccccgtaaagctaaacatgccgatctggtcggtaatatggttccacgagccgggtgtcttcttctcctcaaggcgctgcctgagccccttcctcatctcgacgatccgcccactcatcgttcgcagatcgtcctcccattgcgcaaacagctcagggtcattgagcactttactcgcaatccgcgcaccgtacgcaggcgggttcgagatctcagagcgttgcagaatggccagctgcgaggcgacatgtgccgaggactgagcggcttccgggcccggcgcggaaacgaaatgaaaggcgcccgtgcgctcaccgtacaagccaaagttcttggcgaaggactgcgcgatgcagagctcgaacccttgctcgacgaaataccggatcgcccaggcgtcacgcgccagatcgcccgatgcgaaaccctggtatgcgcagtcaaaaaaggggaaatgcgagcggtcgcgcatgaccacggcaacttccttccactgctcctgggtgagatccacgcccgtggggttgtgggcgcaggcatggaggaggatgatcgacccggcgggcgcggagcgcaacgcgttgatcatgccgtcgaaatcgaggcctttcgtctgcggcgagaagtacgggtagttcgcaagcgtgaagccgacatttgtgaagatctggtggtggtttgcccaggtcgggctggagaggtagagggtcggtttgggggttgcggggtggaagcgggcgaggaagagcgcgcctagatggacggcgcctgtgccggagatggtctggaatgtgcagacacggttctccgcgatggcgggcgagtcggcgccgatgatgagtttctgggcggcggttgtatattcagcgaggcctttgattgggaggtattcgtggttaaggttggggtcgttgcggatgagctcatctgcctgtggtctgtcagcactatcatttgaaaagccggaattgggccccgatccttcggacgctctatcgaacgctcgatcaacgctcgatcggctgtcggcagaggcacccatgacagggacatggcaaggatccatgcagaggcccatgagagaaacgcaccttcttgacaacaggcaaaacccagggtttcgcattatcgtcgcgataagcaccaatgactagatcgaccttcttgtctgaggggtcctggcgataagcctgcgcgagaccaaagagcggatcctctggcgccgacgggacaacagcggtcgagaagaccggggaagctgatgaggagcccatgatgtgtgaggcgagagaagcaagccgagatttggcggccgagtaggaactggaagatacggatgaaggagtggacatggtgacctttttatttcaatcggcagtcagaatgtagtaatgtcacaccaccgttgggactgggctggaccatgcaaagaatgtacgtaaggtcaatgctgcttgtgttcaccggtcaatcgggtctccaattatagcacggagtagataatgaggggaaagaatttccagcagatccagaaaatgcgtaacgggactggtctggcatgtcatgcatgggcaatggcagctgtgctttattaagtaaataaatgcctcaatctgccaatctgcctggagctcatgatagaggccgggtaccgaggtgttgcttctcctaggctatccgatggaagcttatgacgacatcacatgctatccttatcactcagcaacacagtctacagtgtactactctgatgaagccagaaattcacgaagaatcaaccaacatttttgatgtcctcagtgtagatagacagtgtattcgatacactggtctgatacgtgcggggaagactcagaacagtcagtccactcaaatacgaaactctccgaatccccaatttcgtctctcaaggttcaacgaaggagcattccctataaagtatggtccaaattggagcgataatgtgcgataatgaacgataatgatcccctgagccaaccacctcgggcgcaaaagtcatcgccccgagtccagccgtttgtttcagccctgactgacacttctccccacactgagtcagaccgggtaaggcctcgtctcgagtgcacctgacattgccaattgcaacgtaaagcaacgcaagcgacgcaatgcagcagaaccagcagaaccagcagaattagccgtcaacacggacattttccgattttgcgctggccggtccgacgtccgtggcagagacggtccagattcaggctccagggagtccagaagatcttcatcagagtaaaatggtggaagaaaacgtgacggcgaggctccgttatcctcggcgagtggccggctcgcacttctacccgggttcctggatcgtaccggtggcttcggttaattgagggttcgctgcaatagccgtggggacctgatgacgatagtcctttggtgaaaaaaaaaaaaaaaataaaaaaaagaaaaaaaatttgtggaaaaaaaagagggaatctcctcactgcgtctcgactccttgctgattccggcggttctcctcatcgcgaccgcgtctctggttctcctcccactcccagtttctccccatggggtccacgcagcgggttcccctcacgatctccttagactcggaataccgtgactcgtgctcgcatataaatatcaagaaatatcaagatatatcaagatatatcaaaagttgacggttatctacataatctggtactttgatcgaatatggacaaagaaggagcagaaaccaaaatatacacaagatcaaatatcgagaatcgcccaattttaaccagccagtcagatagccaccctctaaacgcctgtatcccatcgatcaaaccaatcgagtcaatcgggttgtgcagtgaactcgtaattgtgccaaacgtaaatgcagaccgataatgcatcccaagcgaaaccaaatcatcgtaaatacgccaaacgtccagaaagtcatggacaatcgttgcaatcattgacaaagaaaaagaaaagggaaaaaaaaaaaccagaagagtataggttgttcatggatccgtcagatacccctctcatgtagaggtcggagccgcaagcgtcgaggtcgactcgtcgccatgcgcccgcgtgcggatccgaaaccgatccctgagccgagcggttaatcgaatccgacgacgccgttgctcgttctcgtcaccgtctgctggatcacggttcgcttcctcgcggacgctgcgcagcgctgcaaggcgttcttcaacgctggcttcccgcattcgacgggcgttcagcgtgctggttaaatagctgctgagtcggtggcggtgcgtgtgggtttcttcggcgggttggttgtttgttgctgcgttttcttcggagccggtttcgccatcttggttttcggtctcaccttcggcttgcggcggattgaggtcgattcggctatttaagtgagcaaggaatccatgcgaggagtggtacggtgcaacttaccagagaggacatgtcccggacacatttaccaaccacggatcgatacactcgggatggaactgatggttgcagggaaggacacgcaagtcttgtcccttgatgaaatcatccgtacagatcgggcacgagaaattgggatgctctgtcgtcgtttctgtctctgtagtaccagcccgtcgctgttctggatctgattcaggcgaagacgtggcagtatctcgtggcgtctcatgtgttggcgacgtggtaccaccggttgccattggctgccgggtatctgtaccctctcgtaactgcgacgtcggcgtctccgactcaagcgacatctccacgtctcccttgtcgtcaagcttgccatcaggagtgttgtcgccgaacttgacgatcggaatcgtttccagcattgcccttgctatccctcttgctcgactttgacgcggtcgcccgggtcgttgccgcgggccgtatcgttctggatggcggtgggcacgaatagcaccggtgatgataatcgaaaggaacagtgccgtaatgatacctgtgatgctgtaaagtatgatcatggctgctacggtaattagcgactgtatcgggcacgggccgtggccgacatcacatacctgtgttagggctgtcgccaccagtccccccgccatcgttatcgccgggtatgttcgccgggccgaaggtagacatgtcgggcacaagagaagtagatccggtttgatttccagcagcgagctgtgattcaatggctttggcggtactcgcgctcagtaaggtgaagatatatcggtagttgctttgtcaaaggtagtt

SEQ ID NO: 15315 - DNA, 5057 bp, Emericella nidulans
aacaagaagtcacgagcaagaagttcaaccagaccggtatagatgaggacccctgccgaaatggcatcaaagattcccgacacaacgttcgcagtaaaggacccggcattgtaggtcgtgcggacaccaagaccgatggcgatggcgatcggggttgtcaggccgtagagcagacacaaggcccaaggaagccagctgcccttgcggaaggggatggccgacattctggctccaataccgagaccctcaaatgactgatggaagactaggaccgggtagagggtcgggaattcctcgccggttgtgcccaggttcaggccgatgatgacagagtggaagataatgccgaattcgaggatcaagaaagcggcgatctgctgtcgaaacgagcgttcgatatagccagagtcgatcgactgggcctcgagcgtgtcgcctgctttcttgcctgtgctggtggcctgtctggacacggcttcctcgttgttggcggtgctggtcatgaactgctcggggtcctccctgcagactccgtacttgatctcgacgtaccgctccgcgccaaagtccaggaggaagatgcccattaccgaggcgagcacgatggcagggcaccaggagtagtctgcccagtggccggtcatgccgacacagctggcggggccgatctcgtcgtaggcagggtcgagaaggtggataaacgcggtggcgacgatgacgccggcgccaaagtagcgagcaaacaggtagacgtaatgagggatatgtaggcggggattccgtttcgcgagcatggggaagaaggtgacggctgtggatacgacaaagatgacgaaaatggccgagatgcgcgccccgagtcggccatcgtagtcattctcgccggcattcatatagcagatgacatccctcgggtctgcagtgtccagatccaccgagttggggttgaaagacatagtggcagaaggttggcagcaaggaggcggttaagggagcgttgactggacgagaaatgttctgttcaggtcctctttagagaaggactcgaggtcgtggcgctacttataggaaaagagcttcccaaacggttcgaggaccattggggttgctagaagacacactaactattaccacgagtaccctgggcgtctagaagcccgtcaacagtgtcagcaatcggagtgatagcctgtttcagccatcatcaagtgcgcgaaagagaaaaaagtggattgtgacctgctaacagacaatgttgctggtgctagagaaagaagcaccattcttattattgaaatggatcctatttaaccccgttaatgatagtgtcggcctccccgagagcttctgccgggcacttcttgatatctgctgcctagactgtggatacggtacactacttgatgacatgacagacgccgaatcaacccaccgagctggctaagaggaggcaaagcttgtccatgcttgtctttcgcagccaagaaacgccttctgagtggtgggacgacgagtcaggagatgaggttcgaggaccctgggggtgagatagtgggactgcgagcagagatttcagtcagtctccttggctagccgtggcagccaggcagaggtatatggatcagttagggctgtcgatatttctgttgtcatgggatttctatagccaatcccgctggatatctgtctgaggatttagatcagcaggggaggtatggatgcaccaaccataggcgctaccatcactcagacatataactgagttctgcctataatacaagagttctgttgcaccttctgccagagagttttccggaatctggagcatctgcagcgccacataaggcgtcatgggtaactctgcccagatggcatggatccaacgtcaactcacgcaaccgtgattctagatacaaatgagaaaccattcggctgtcagtgtggagcggtgttttcacgacgtgaccactcgcgccgtcatgagcgccttgcttgccatgacgggaccgagcaatcaaggcagcatcgcaaaggggtcaccttgacgacaccagagtcctcgcgctctttaaacggtatacctacagacaagactactgggtgccgttcctaatagaaaaaatggggagttgagagcagcgcttatgttaatgtaaaccaggagtatcccgtccagcccgcgcaacggcactcaaatattctcagcccgcgacaatcgctctaggaagctggtaagctgcatctatcgctgcccaagccaactactgacacgtatctgattacccagcgttgatcgagcagccacggtttaatctagaaatatctttatttgggcccctgctcagaatgcgcaacggcttcgatcgttcaccatccgtgatccgcagatggggttcacttctagcggcgtaccatacaacaagtccgctggcaacattggtcaagcttggtgttctatacgtcaaaaagaaccagtcgattttctggagcattgaagctactctctgcggtcttgattgctcaatgttccttgaaaatgcttcgttgtatgaaggaaacaatgcaggctacgagtctaacaggtatgtacagttagttcttccaaagaaaatacttctaacgtaataccgtaggccacgaaaaatgtggtctagactggatcaatgacgttgtcaatgagggcttatcgtccgtcaacgcctgttcctttgacaacattcccaggcctcccgttctagatgaccagatcatcacggtctggtcgcatatcatgcagggcaattccctgtttccgttcataaagctgataagccaagttctggtcgaatattagcggctgtccgctcgggatcatatgagaaaatgtgctttgttttttcttttctttagggactcttgcgtcaatcatgcctaaaatcaggcaattattctcggaaagtcgtccggtgggcagagtaataagctatcgtggtattcgatcagcatcttacaggggcgctgggcccagtgaagaaatctccaacgctcagggccgacatctccaaatttgggaaactggagctcgccttcgaaatgattccactaaatggtaataggattaccacttgtatcgtgcaagagaaagctcatattacctatatatcagacgggagtatttatacgttgacaagaaaaaacgccaataggcaaggactgagaatatagcctcatcattaactcatcaagagattcaatgtgacaacagcgagctgccgcctcatagaaccgcgaaaatctgaattgctgagctctaccagggcttctttcgagaatctttgctcgttaagcgataggttatcttgaactttgcgccgtacgaccttcatggcccctttctccaagattgggggtttggagaaggatccaccgcgccactgtagacagtcttcaggcagtgatgtagtgaggatgatcgcgattataaataaaaaaaagccagaaaaaaaatccgaggcaaaagtatggacagcagggtttataagtcaaggtctcccgtcgcgtcgttcgagctcctcatcacaaattcatcttcattggcatattgcaccattcactatgtctctgaccgtcattcgcattgctggcgagcgcaactctgttcgtaacctcaaggctctcagggataagccaagtaagtatgaggttttgatcaaaggggacgctgtctcccccaattaccgcgacattgcggtcgccacctctcagtacccctttcccgttaaggacaatctgattccttgttccgacgctgctggcgtggtggtggaagttggcgagggggtgaagggcattgtcaagggtgatcatgtggttgtacctttgaccctcctactacctttagacaacaggaggactggctcaaggactggctcaatgggcaggggagtctgatggagtcctccgagagtacctcgctctgccttgtattggcgccgtgaaactccctaaagactctcccctgagattttcgcagtagtcgccctggcctgcaccggtgtgactgcctggaacgtcctgtacgggaacactcccctgaggctgacagatcgtgttaggtcaagatatgtaccatcaaaaatgattaaggaaatttgataaccgctgaaacactatgagcactggtggcgtgtcaattaccggcttgcttgttgctaaggctgcaggggcgactacgattgtgacttcttccagcgatgaaaagctcgagtctatcatggcgaagtttggctttgactatggtgtcaactacaagagatacccggagtggtctaaggaagttcttcgcttgaccggcggcgaaggggtcgactatgtcctggagaacggcggttctggtacgattgctgagagcatcaatgcagtcaagatgggcggcaacgtcagcgtgattggactcctttcccaggccaaggagatgcctgatgtgctggcctggcgctcgctaaaggcgcagtggttcgcggtatcacagttgattctacccagctcttgcaggaggtcgtccgctttgtcggccgtaaagggctgcgtttacagttgacaaggaattcggcttttctgccgaagaagccgtcaagactttggaatccatcaagtcgtgctctcatatcagcaaggtctgaatcaaggttgccgagtagagggtaggagacagatcctgcacttgttactacaatgtatgtgcgaacatattatgttccatgaggctcactaagcaactcgagagacttcatagcccggaacaccgctgtgagataatgagggattgtatatagtaagaagaggagaatgatactctatcgcaatagccaagatccaatgcatttagcgaattagatactacaggtctccgcatggcgggattccataacacagctcaaagctgtcctgaaatacctctgacgaccaacagacgacgtcaagagtggtgcccaccctcgctggatatgggttgtccaaaattccctcattgcccagatagaaccggccctagaagtcagagcactgatgagtcttgg

SEQ ID NO: 15316 - DNA, 640 bp, Emericella nidulans
taaaggcaaaacctaacaaaaggcctgttcgacgtaatcaccattcgttctttcttttaagtggagcgtgacaagatactggcgcgcgttagcctaaacaaaaagtggcacgccttgacagaatatactactgttttgtgttaagtaagaaatgcctaacgttcccaacaatattcccagttacaattgtttgactattgggtctttttcgctcattgcttttttcacgtccacaatgcgaattaccatacctattaggatctctgcattgacgctgcgcatgagaactgcattggtgacgagcattgattactttttccagaaaacctcattctttagctctctaatatgaattacatcccgtattaaccggattgttgcctggctactcatagggctttcacaccaactatggtaagaaacttgggactgaatacactcttatagcatcatcgcaccaccttatagctaccaactcgcagcgacatcgacgccctgtgaggtgacttccatgcttccatgatgacacttttgaacatttctctaaccactacttcaaccgacaaatttcatccggtttgattaccgcttcttctggtcctactattccttgcaaaatattatgcttgcttcttaactt

SEQ ID NO: 15317 - DNA, 3962 bp, Emericella nidulans
gataaactctgtttaagccactctctactggccacaagcgattcttgcctcttagactccggcgtctcatttgactcggcttccgggtctcttggagcttcgcctatttcggccaaaagctggagacaccagcctcctagataccatgcctccacactctggtcgtcttctaaaatcaagcgctcgagtacttctagcgcctccagcaacatggagacctccattaggagacgagaaagactgattcttgttgggaagtcagggacatgcggatcttctgggggcaaatctttccacagctcaagactccttgaaagtgctgcccgcgcatcatcctctcttaattgcgagattcgaatagacgccagcgtctggaggacttcgggagagctgggctgaactaggagggcttccgtgatcaggttctcacagcgagattccgcgtcttcctcccatctgaaaatgtcagcttgataagaggctcgggagaaagcaataaaaaacaggggcgacctacgaaagatctgtcatatagatctctgcaacaccacaaagggcatttgccatcttccttttcttctcttccaactccaatgcttgtgtagggccgttattcgcttcgagttgttgaataacgcccctcagagcccccacccctttctcaaaccattgaacactgtccttcccaccaagctcactcaattgagccagccaaaggaacttttcagcgccgcctccctcagactcagggatagaaccagttggatcaagctcgaccgcctgtagaaaatgtttccttgcgaggtcaatctcgcctaactcaacgtagatctccgcaatcgtattcaaacttgaaagctgcgcgggggaattggaggtcgcaatctcgagcgcctgctgggctatcgaaagcgcagcatcggcttgtccggtctggagaagtattgtcgcttgctcgagaagcttcctaggatcttcgttcatcttccgttttgagatcgagccgccggcgctcaagacggacttttcgcgggttttggaagctttcttcttgtgaggtctgggcttccccatggtatggctgtcgtaataaagaacgtactatgtatgatgtcccagtagatgttgacctttcctcaaggataattatatattcaagtatttctcgcagatcgctcacataaaagaatcaagtgtattccccgacttgggtggaacaattttggtcgcttttcttatctgtttgttcggtttgcaggagggtccggcggtgatctggttcagtcaccagaattgagccgggcgacttccagctcgagatctacattaagcaacctaaataattgtctttataggctatatcctcgccgtggccttctttctttctttctttcttttttctctccctgaaaataccttctctgtacatactacggaagtagttaatttctctctgaacaatttgcaggatacccctcctcaatactgaagccaggatgggccgcgaggaccagatcgaagagcgcgaggtgctcgattccatattcccggaagaaattacaggtacaacatcatagatgactgatcagctagaaggttgacggctgctgacccaatgcagatgtgtccgacacttcataccggatatcaatcacgctcgacgctccagacaacgacgaacaaagccaagaagccgaacctcctatccttatcctccaagtcacctatcctgaagagtaccctgatgttgcgccagaactagacctcacagccccaaccaatgcccccaaacacccccgtctagatattagcgaggatcgcgaccgactactcgaagctcttcagccgactatcgaagagaacatgggaatggcgatggtattcacgcttgtcagtgcgcttaaggaaagtgccgagttactcatggtggaacgtgtgaacgctgtgcatgcggtgcaggaaatggaggctgcgaaggcggaggaggaggagaataggaagttccaggggactgccgtgaacagggaaacattcttggaatggctagataaatttaagaaggagatggaagaggaggtgaggaagaagagggaggagaaggaggcggaggagaaaaaggcaaataaaaagggccctgtcaaagaggagaagaaacttacgggaaagcagctttgggagagggggttggctgggaaagcagactttgatgaggagtatgaggaaactatgccggctgctgtagataagatgaaaataacggcgtaggatatctctcctggaataaactctatgtgaagcctatgcgatgtggaagatttatgctccatgaaacgcgacttcaggctagatgcaagctcaattgtacatggaagtaaacttcatgataagggggggaacatgcttgaggttacataggaaaacctcccgaacgacggttcatgatctaggcagattttattcacaaaccttaataacccatgggaattcctggattggtaaattctgccagacggcagtgatcgtttgctttcaggctggcggacgacctagcacgttcggtagttccagcagcggcctgcacgccggaacatgcactgtgcatagtcaatgatgctgtacaagaagcatgtcgtgtttgttgacccggcataacccagcggctgcggcatgcattgaagaccacaagctatccaaacttgattgtgaattgccgcaaaatagctcaggatatcagtccatggcaggcatgagaatgggccttcagttgaagtagatataagcgtggtattgtgcgaagagacaatctcaggtctccgccgatatgtttagtttcttcagaatatttttcctgctcagcaccattctcttttttttcttctcatcgtcatggttcccctctttagcatgtttctcctcttcagatttctgctcctcttcggctaacttgcgctctgcaaggacaatttcccacatggagcgcgcaagcgcttgcttccgtcggttgtcctcgcctatgcgacgatagacttcgtcaaaagcggcgcgaggtgcgctagaccacctttcttcgccttcccccctcccgttagtcaactcgtcccattgatcttcatcttcgccgaagagtatttctggctccagcctttcgcgacgctctaccaatttctgtcgttctgcgagttttctccgtatcatgcggctgagggattgtggctgcggtttcttaatgcgcaggaatggaataccgctggcattaactaggactggcacacgacgcttgccgctcacaataggtcgagggcgctctagtatagaagttgcatctggatgccgttgagctgtcgcctcctggaatcgccggttttcctccgcccttatttgctttttgttcggctgcttgacgggacgaatgtgagataacacgttctgaagttctctcttctgttccttagttgattgggctttggcaagtattcgccacacaagaccggtgtcatcttcatttcctagtgcagccgagtcgataaggtcaagtgcctgacaattttagccagcggtcaatgcaaggggacaaatgactgcatacttcgtatccagccttaagcgcgtttgccgtctgagaggggctttggaggtttttatatttgcgaaatcgttctcgaacgtgcgcctgtggagaaacgagttctggccgacgtcgctgtaggtccctacatcgtagaaggagtgccctgtagagtgctaagcctaatgaatgcgtttgtaagtagggttatttaagatgaagggggatttttgagcttacatgcaacccgatgggcagatgatttcttgggtacaaccagatggtgcattcttctttccctgtagattcggagttcggccggtcatggcggaggtgataaaagatagaccacgtcacgtgcagcatactaatagatcccttctattcatagttatat

SEQ ID NO: 15318 - DNA, 428 bp, Emericella nidulans
ggctattacttaatctttcggaatttcatctacaagccctcatcagggtgatcatctgcctatgagctacctctattgaaaaaagggggctcagatatactctgtgttagtcgaataccgttgtgcaggggaacctatttggtatttttgtcctcgacagaagaatctctagaggccaaccagagtccaagagcaatataagcaaacgttaatacagattaccgctcattgttagggacgtttagatgacttctattagactccgacgtcagaggatcctaaaaaaatgaaaaagatgtgtgaagaatttgagtggtaccgctcagacaccagcctggcagtcataagctaagcctgttagcaagacatacatcccccctcttatgagagtcagtacaggagcagtgttagcttatttctttgtatag

SEQ ID NO: 15319 - DNA, 604 bp, Emericella nidulans
ccgggaaaaatgggcccaaacttaagcctcactctttgaattctgaccaccacccttctctccttggagccgtgtactattcacatgcatcatctaaccaaatctccactatcaaacctatatgctgcccttgatacccagcctattcactacctttcccacaaatttctctcaactccttctaacatccatactttactatgaaaactacctacctatctactcaaacacatatctcaccatacagacttctcttacgcaaaaaatgctcaacgaacccacttcccactatacacctctcccaccttctatcaaaccaaaacctcgttacccatacaattcccaacacaccatcatcaatacctactgcttacaacaatgtaccacaatcattgcttcacacgctctttataccttaaacttaactttaatctccatcattatacaacaccttcatacacatttagcacaacacttttattcatttcgccccatcttataacccaaaatttcacactcctttacatcaaccctaacattactttagacccctaaatcaatcttcacctttcctccaccaaaattgtcatcctagtttatacaa

SEQ ID NO: 15320 - DNA, 604 bp, Emericella nidulans
gtatattccacgactattaacccaacttttatacttttttttgctctacactacatacctagagggcccttgaatactttttcctgcacaaaccttacattcacttttcaacctaataattcatctactacccccattccatatctctaatttcttccaacatgcattgttcttctaactacattaatacttttctattgctacaattatctcaccattgcttttctaaaaaccaatcttcatctaacaactcactcgtacctaatatcctaaatattgactttccaatcacatcaattccaataccaaatattaaccattcaaacattccgccgtaatcatatatcatcaaaccatcataccctttttaagactcgctactataatacatcagcccttgccattaacaataatccatgtcctacaaataataaaatctcattttaatctcataccttttaacacattccttacccaatctttccattcctcccattcctttttcactattcctccttgccaattacctatctatccccttatcttacctttactttacacaataaatatctatcccaactactttccttttcataaattccca

SEQ ID NO: 15321 - DNA, 1589 bp, Emericella nidulans
ccgcgcgctcagaccgtactgtttcctcgccctcccgactctcgtcatcgaattctacctcgaccgcattggccgcccaacctataccgcagatggctcgcttcgttctcccggcgaggacctaggagcggccggtctaacagaatacatgtgggatgttctctactggacttggggatgtattggtgcggtttgcatattcggcgatcgtgcttggtggctgtggattgtggtgccgctgtactcggtttggctggcgtatagtacgttcacaggggtaaggagtggtctaactgggtttggtgctggggcgggtgatgttggagaggcgacgggggcggagagtaagagacagaagaagttggagaaacggggtgggcaaaagatgcaatatcggtagcggctggtcgaaagttctttttcgacttggatagctgctgtcttaaggatcgtgtagaccagaattggtaaaagtgtgcactatggatattgacttatatatatcccaactcgaagataagtatctttgcaattcaatgaatggggattggcagcatccacccaaataagatagaagaagtaaggaaacactacgtcaagctagctgcggcacaagcgaaaaattgcacaacacgcagccaaggtagaattaattgaacaatattaacgattgcaaagcgaaactcatcatagccatataattttgtcatgatatcatggggaactatgtggggaataatcaggatccaagaaagcaagactgaagcaatagacaaggagtataaaagtataaattcatccatgcgaccccaaacctcagtgattagagattaccttgcgcagattgatcttcagcagcatttgcaggttgtgttggttcttctgaatcttcaaccgaagcctgagtatttggactcggttgcggggtctcgtagatagcattgagcctctttaggattttatcagcaaatgcagggtccgtatcggcgagtatgtgggagagaagatcttccatggattgctttcgtcggataggtgcttgacttggtgtaggttctgtgtcgggattctcgattcccaacgactgggatagtgcctcggaaattttagttgcctcagcgtcaacaacttcgtcatgatctgcattatctaagtcggcagcggctttctcaagcagcactgcggcggcagcagctccaaaagtgttgttaaattcaggagcagctgcatgttcaggctttagagcttcgccgtcgagtccgttgtcaccgtcgatggactcttcagagaaaaccgtaaattccgacacagagtccgagtcatcttcctcaccttcaaaaagttctgacgactcgctatccgtttcggtatcagattcagcaacagtgtagtttacctcgggcgggttctcttcggcttcaatgaagtcctgatcttcttcttgcaccactggtatatcttcgtcttcgacggcaggcttcgagagaggcggcggaggctccagtctggtgtcaaagtcatcactgacttcccgggctgcgatctttcagcggccgactttcttcaatctagcgagttccttcgctgcg

SEQ ID NO: 15322 - DNA, 4252 bp, Emericella nidulans
tgttcacgacggggtgggtttgaagtgtatgtcttgaattccacttatttgcttggtttcggcatattcggtacgaaagagggagataggtggtttttctaataacaaatgttggatacagcgtccgcatcgacatttcaattgaccccttctccggccgcaacccatcctactgcttcgtggacctgtcgacgaaagagctcgctgagcgcgcaatggctgaactcgacggaggcgatcttctcgggcgaccggtcagaatcaagcctggtgttgtgaagagcgcgagtgagcgccagccgcagcaacgaactggaatgggtgcgggcaccggcagtattggcgatgggatgagctcagggtcgccgcgcgcgaatagggcagggtcatcgccgttaaatgcagaccggtggcgaagggacgacaacttgacgtccgcttctactacacccacaaagttaggcaacatgagcacatacaatcccaaagccgaccccagcaaacgcctctatgtcggaggcctccccagactaacggacccagatgccatatccagcaacatcacgcaatttttcaagggttataacctgtacgttgtctcttcccttccctccagcggccactctttcaacatgatgtaaaacatagcaaaggaatgttaacacatggtcaggacgaacatttccaaactattcaccccacacccggcgaagcgtttcgaaccaggtgaccactactacctcttcgtggactttgagacagtcgaagagacgcagaatgccatggccgccctgaatggcgctgaggggccatggggcgctgccatccgcgtccagagggcgaggggtgagacgtggaaaaacactgactcgaacaatacctcagaggagaggagacccgctgctggacgatggggtcctaccacgcggcgacaggatgtggcgtctacccctgctccggcgagtggtgaagccgccgttcaagcgtgatcttcgtatccgctgcgcttaggaccggatgtggtctaattaacgctgtcccgcaatcaaagctgtggttatttagggatcgttggcgttgatggacgaaaattatggaaatgagatatgggcatcacgtcacatgacattatatttcatggcacatagcattgaatctttggatagcttgatacctgagtagttacctagcactgtctggttgggattaaatcgcataaatgcagggtctgtctaagcatcatcggaatcgcagatcaggtagactaccatgccgcagtttgagttgctacccagtcgtcatacacaggccttaggcatcacaatcaaaaaccttctctcccctataccacgtctgacaaacccttgcctcaagcaacttctcttctttccagaacatgtcaacaacaacaaaatccgcgttcaatcccacttctaatctccctgtccacccttccgcaaaccgcgaatatgccgccccatttgtcgcacctgcaacagcctgtaacagcgtcaaactaaattccgggttcaggcgctgcaggctttcccgctcaatagcagagcgtctagttgttgcatggtagaggttttgaaagggaaagtgtggcgctgtgggcgcgtctgttcccaaagcgataacagcaccgccggcgagaaagtccttgtatgcgaaggctcgtttgcagcggtgtgagcctatcaacgaaggccaggcggtgaagtgggctgggtcggagtggacgggttggatagaggctgttatgccaaattggccaagacgggcagcgtcggcgggggatgttagttccaaatgttcgatcctgtgtctccggtcgcgttgaggttcttgcaaactttgggactgggtattgacgagggatgagagaatatttatggattggtggacggcttgatcgcctatggcatgaatggcaacttggaggcctggcgtcgtctgcgcgttgaatgacggcggacataaggtcctctggccagattggctgtactggatctgggttgccgccataggggtgcctgagggcggcggtgcatccatcgacgacaccgtcgcacatcaacttgattcctgcgatggtaaaagtaggatcattgtattgacggcggatttcaagggcgcggtcgacgtagctgaaattgacttgctggtcatctgagaaggggacgagccagtgggcagcgatgtggaatgggatttttttatgggcacggtagaggttcaggatttcccagtgatcctcacacatggccatgtctattgtgcctgtatatcctgtagcagagtatgatttgatagctgcttccagagcatcaagtttctccgcttttggcgtgactttgtcaagaaatggccaggcaaagttcatcacggccccttcactcagtaggcctattgctcggccagtctcgtcacggtggattgcaccacctggaggatctggtgcggtatgcgcgcacatctcgtcgagagccgccgagttgcaccagatcgagtggagatccgccgcttcaatgtagatgggacggggttcaaggtcgtctatcatacttgccagcggttcttcatcgaaacatgactgattccaaccgcggcataggatgcgagggacggagagatgcgaatcagcgtaggacttgatggcatttcggatttgaatcagagtggtacagccggtcaagtcgactttgcgcagcgagagcccgtactggagaatatgaacatgggcgtcgatgaagccgggcatgataatccgatcatggaggtcgataattctggcatcgctgggtatggtggcatcctcgagcgatccaacgtgcacgatttgattcttttcaatcaccatgcaagagccaaaagcggcgtcccccagccctgactccggcgagtatacgcgagcgtttttgaagacggtcgtcatcttggtaagttgagttgtttgaggtgtgtagccagtcggttttatggcgggccatgagccgggctttattagtccggtgatctcagcgcgtcaactaatcatgatgtagcgtagaggttgcggttgcttccaactccgtcatgatacctctgatatctgcctgtagttcattcgatctgctgcgcttgataatagctttttgatcgttcgtggcttgatatgctggctcttatcgcatcacctgaactgtagaggtagtctgtgattcacttgactaccacagtagagttacactagcgaaagtcttgtggctagacatgatgctgttccttgtccagaccgcgaggacccagttctggtttatcttgactgagaaatacggggtgggagggtgttcggtgctccataggcgacaatagtggaatgtaggcggtttccaacggtcacaggtaatagtgaggtgaggtctcgtgacttatgcccctattagtacaggtcaagtcccgaccaaattcgacactatcgtgtctgttcaattagtaccggcttcacccgattcgccccgggcagtcaggcgggcatctggaagagccgacccagcgctgaacatcaattattgacgattctcggattgattctgcagcctagaaactggatgtccggcgccgcggctgaaatattagctcctgtttgttatataacctcgaggggagaaaggttgatgctcttgcccctttcctctcgagacgagacttgactcgaactgccccgcgttactcaatgacctcaccgcaatccaggtccgcatcgacttccaccctgttctgctgctattgatcgtgtgatattttccttggtcatctgttggggaagctgaaagtcacggcatcctatcggagaaaattcagcaagaaacaatcaagggtttgaacattaagggcctgaagctctccccaggctcctctccgcatctcatctccgatacgcacctttccggtcgggtggtctggccagggtctgaactggagccatcatgtcgtccaagactttcttcgccagcgtaagtcctttgcttggttcaaatttttgttgttttctagccatggcctgttattctggtcttgtctgctatttagtacctggcaaacttccttacaacatttactggctcgtgttaatgcatatcatgttttcccctccatccccattcttcaaaagcttactagcaatagtcagatgacacaaagatatgtgtcgttatggtcgggttgccggccaggaacaagagtctaattgctgggaaaggtatgttaa

SEQ ID NO: 15323 - DNA, 577 bp, Emericella nidulans
cggtgggcgaaactatgagcacataacaatctctgttcaatttttagcgagctcaacaccaccccggagtcacggtgagagtattactagcacctgcgccatccccacccattttcatcccatagttacctacattcaagctcgcagacccactagtcctccccggctcaccaagatcgccaaactcaaaccccgtcactggttcaagctcgatcaaatcttcagagaccggaagatgctgcccgaacacggcattccattgatcccagtcacaattaaaatgccggttcaccatggacagaggcgtaggaacgcttaggggtatttggtgtgcggatggggagagggtatcgaccaaggatagagtagtttgcccctgtggtcgcgaaagaagcgcttgagctgttttaaatatatacacgagctgtatgaattgaatagctgccagagcatgcccaaccacccatgagcgatcggtgacaaaaccgtgccaggaccttatttgtgtgaatgaaccgtttgccatgggaaggttgtccgagcaggagattgggaccctgcggttcgtctcggtgtg

SEQ ID NO: 15324 - DNA, 498 bp, Emericella nidulans
gaaagagccactgggggggtggccttgcttataaaagtaccgctgctccttttttctacaaacgcagcaagctctggggcgaagtggagatacaccgcaccaaataccactttctccctccccacaaatagcgcgaatatttacagctgttgaatcggatgataaccagaacatagggcatgaagggcctgcattctttccgctacgtacactagaagaggtggtgcaagagggtgacaacattacggggactccttggacgcccgctgaggaaagctatacacaatcctgcaccgataccaccgtgcacaataaaatctacatcataggaaccgaaaggaatgcgaccagccgggcaaatgatcatcccatgatctgaaacatctattacttaatagccgctattaaacctgcccctccgctcttgcgacacgagaggacagagaagctgggccctgtgcatctaatgaacttgagctaccaacccaactgctttgc

SEQ ID NO: 15325 - DNA, 575 bp, Emericella nidulans
tacgctatatatttgctaccagcaatcgtcctcgttggcgtaggcggcgtcatcgtatctcaccaccgtatatctctggagacctcaaaaattgattggaagcctgcttcatgcttgaacgagacttctctcaatggctccatcgccgccagaggatatggaaaacatgccgacatgaggccgacatgatctggacctctgacttcataaacaagtgttgagtatgtctagtgtcatgatcagacgtcatactgacgccctagagggcctcggtgttactataactgctttaaccgtcgatgatcttaggttttcccttaagccacgatttccagttactgtatttccttgcagtaatccctctgtacttgattaattaagtgccaacatggaaccccaaacacagaagccttcacgcggaccccagagccaatttaaaccggtgagtatcagcgaggatataccttagttgaaacaccctaacgttatcattattggaccaggccatgaagtccccgtcagcagatgaagagccgggtctttagtcccagaggagaaggctcagcctacatcgc

SEQ ID NO: 15326 - DNA, 4015 bp, Emericella nidulans
ataaatgatagcaaatgcggtaagccaatataagcagttaagaagcttgacgctgtaagctggccaggaaagaagacgttgaagccgttgatcagtgctaggacaataaagaagacgaggccaaaccatgcgccgtatggctgcagccaactgcgatacggcagttcatgcacaccttgacgcttgcaggccgctcgaaaacgcaggtacacgatacagcaacaaatccaggagacgaatccggaggtgttagtgatggtgacaaaccaagtgaatacagtagaactgctattaccgcagttcaggtaagctagaaagccaaacaagccacatgcgagcactgctgcataaggaactccgcctttagtacagcgcagaaagactttaggtgcttgaccggaaatcgctagtgcatatagagcgcgagagctcatatagaggtacgcattgccagcagaccacgccattgtaagaattgacgcattgaccacgctgctcaaaccacggataccggcatgcctgatcccaacgacaaacgggcgaggactttgcgttgttgcctccgttagaaagggcttcatcgttcgacggactgatgacactcatcgctaatgccgcgcctacgtagaagacgaccagtctaagtaggaagcgattggctgctttcttgaggtcttttcgagggttttgcatctcaccgctcgtggaaatgagaagttcagggctgaaggtgaagggaaatgcacagaggactagggttccgacgaaggcgatgaacctccctgttgctccctcggccagccacgttttggtagcccctggatcctcccagtagtgaaaaccaagaatgcccgactgatttggaccgcctccccagaagagtatgaacgagagaatcaacaacccaatgattgtgaagaccttgatggatgcaaaccagaactcggcctctccgtagtactccactggcagcaagtttagagcgacaatgaccacgatgaaaacggtgatccagactccaacattaaccggactggtattctaagttagcaatattgaggaggaaaacgaaattaaggagagatgctcacctgtcccaataatcgattaccaaagcaccggccgtaacctcgtacggcaccaagatgcccaatgaataaacatacaaccatcccatcgcgaaccccaggctccgggagacgtatcgcgtgccgtagtacgacattgacgctccagcaactggaagatacgcggcaatctcgacgatggccgtgacgatcatatacacaacgatactcattaggacgaaagagccgagtagaaaggctggtccacccaaagccaacgacgcccccgtgccaacgaagagaccggttcctagattatcagtcaaacttgttatagtattcatagcaagaactcctaccgacacagcctcctagagcgatcatttgcgagtgacgcggtttcagtcctcgctttgttgtcccatgttcgaatacttccccagaagcaattccgccgttcatgctcccacccatctgcagttcctttttgccgtagtctaatgacatagtgaaacaattgctgaaagcaaactgaagttgaaaagaagatgaacactggaagatgttccttgggtgtagaaggggagggaactaccccttcgtataggaggtggattcttcagaacggcaagggtggatataccagtctgacaagagtggccattgcgcaaagacagagcaggacctatcaggcctctgattcatgccccgaattcccttatctcgcttctgatgtggatccttaccccgttcaagatcgccaccggatgaagttggggtacagtctgtgatggagtagatcattcctctttgggctcgctggctgttgccagattcatcgagctccaagttcctgttgagtatactgagaatcaccaaactagagccatgcagatagcaattccacttaggtaccttcgttatgcagacgatgccagcagggtgataaaagggtagcttccagcgttcacagcccacccttcacatcaatcaaatctagcaaccaacgcggaacacgattaccctagccttgacttctaatcatcaaaatggtcactatcaagaagccgcagccgttcaagcgggccctgcacttctcggagggagagttcgaggagcggcgctaccgggccctcgagctcatgaagcgcgagcagctggatggtttcctgatcaccaagcaggaaaccctctactatctcacgggatatgacacattcggatacgtcttcttccaagccatgtactttcatatcgatggttcgatgaaactcatcacacgcatgccagatcttcgccaagccctctacacctccatcctcaaacccgaggacatcatgatccgatcggacgatgcgagcagcaacccagtctccttggttccgcgcgtcctgaagcagtttggcatcaacagccccaatcgccgtattgggtacgagcctaattcggccaccctgactcacgagatcggcaaattactggaagaggccgtagatgggctctgtactctggttaaccacagcacgttgtttacgcgagaactgcgcattgtcaagtccccgactgaactgcgcaagatccgcaaggccgcctatttggccgattttgccctcatccgcgcactcaaattggcgaaaccaggagcgtacgagggcgatttatggcgagagattgtgggaacagtctacgagggcggcggcgacgacccagcaaacgagaacatgctcgtctccggaaacaaggcagtcctcacccgttattcggctggaaagtccaagatcgaccgacagattaccctcgaacacgcgggcgtgtataagcattaccatgcctgccttatgcgtacaatccatatcggcggcgtcaccaagctcgcccgggagatgtttcgagtcaatatcctgcagatggaagcagccatggctgccctaaaacctggtcgcgagataggagatgtcttcgaagcctatgctcgagttgccgacaagaatggcttccaggaccaacggtttaacgcgtgtggatatagcctgggcgccacatttgccccgacctggatggactatcccatgtttgtgcggggccagaaggtcattgcccggccgggcatggtgtttttcatccatatcatcctaatggacaaagcgactgatacagcaagctcgatcggtcaaacggtcgaggtgacccaggacgggtgtgttgctctctctaagctccccttctgtatcacgcggaagcagacaattgctgcctggaagaaagtaaaaaaggaggactatggtttcacggaagaagaggaagacgaaggtgaaaatctgcaggatgtggaactctctgagggcgatgtggatgctgaagactatgatgttgagtatgactttagtgactatcagccttctgctccccctggagaccctacccagcaagcttagtgggattggcttgtaacatgtaaacagtattaagcattgttttctgaatcttataccgcggagtgcgtccatgaacaaagggatatagtcatcttacttgtgggcgagagtatatagccaggttatacaatgcctggaggaatgcacattcagtcaaatccattctaacaattggtggaacataacaacatgtttttgacggataaggtgaaatttattcagtatatatgtaccacgaactacgtattgcatcgactcatccctggcagaaagtctcaacaatagccacgaatgcgtccgccagttgacgaatggactcgatttccaccgactcgtcctttgaatggagtccacaacccttgggaccccagatcacacccggaatcccagtctcggacagcagggccatgtcagtccagtaagtctcgcttcgaatgggaggcgcgatgcccgtcgtcttgatcgcatgatcggccacgagcttaacaaaagcgtgatcaggggcgatgaaat

SEQ ID NO: 15327 - DNA, 452 bp, Emericella nidulans
ccagtgtgtttggtgccaggtggtcttactggactatatgaacggtactgtagatggtcggcttgttttagggtactggtacaaacgctggcttttaccctgaccatgaataagaagcttgatccaacggaaaaatattcagatggtgcattgcccaggacagcctgttgggccagactgcctatgacaaccggtggtgacctaccctatgggcggagcgttaccctctgtgtgaagtggtgtgatatcggatgaagagcatacaggcactacctggttaagctgctttgtggtactacctaatacaaaatacggaggtctaaaggcagcctttctcgaagtatttactattttattggttgatgcgcatcgagcacacgctgaactaggagggggcactggtgcagcgacagcaggcagcgaagtgcaacaacgccctgatcaacaacatt

SEQ ID NO: 15328 - DNA, 473 bp, Emericella nidulans
gagcccacggcagaagtggcataccgcgccgccgaccgagctggcatctttgattgatgagcctgcacagagcgcccctttggggaaggcaactgcatatactgcaacctggttgtatatacctttcagagagaaattaccgtgcacgtaaggggggctcaaggagcccatggggtctggctgggggcgcagcagaaccatcaagcgttatttgaaccactagaacgttgaggcgcgcacagtgacaccggataacttttcggaattgacgcgctggctgagaaaccaatgcactctgagatggaacaagactggcatacattgagacgggcttgacataagagcataactcatgaaacagacggagagcgcactatgtcctgggcatcttcgctggtgcgattggcaacatatgctcgcgtgtagaaacaagagtcgccacgacactgtgtagttgcggcggagccgtgtct

SEQ ID NO: 15329 - DNA, 520 bp, Emericella nidulans
tagcctccgggctcctgcgcgggggagaggctctcggcagcctagagaataagatgttgcatggttctacatggccagaatgcccacctcacactgccacagagtgctggcctcaacattgatgcagagccttgttgtcagtggaatgcaatggagatacgtctctttagctgtcacaagtaagcgggctgcgtggacgctgatacacatggacctcaccgccatctcgacaacgtgctgcgtgcatgcgcgacaatgtcacgctggaatggcaggcccgaggcccgccagatctactcgcaacacgccaattgtggcgcgcaaaaccctttttgcctctatattgactgacgttaatttctaacaggatctgtaccatcgtactagcttaacaagtctgcatccgtaactggtgatgatagcgtggacgagtaagcactgatacgactgggaagaacaggatatcgggctgccaatgactgtcctgcaacatgctaacatgttgttgatgccctgtcat

SEQ ID NO: 15330 - DNA, 528 bp, Emericella nidulans
gaagacttccctgtgcactgactacgtgacctattgggagcccgagagactcactggtctgaagccaagaaggctcattatcttgtactgagaacaacaggtctctgcggactacgaaccattagctattgaaacgatgctcatataataaggctacatccacagctgacctaatataaaggacatgcatcacccatagtcatagccctatgatgacgacaatgctgcactcacaaccacctgactgaccatagtatgtaaagctagagagactaatcagacatccctaacgcaatatgaccaatacctgaacaccagcgatgccaatgatctgcacaccatacgctggcctgtgtgagacatatatccgatacgtgaggcctgctgctccataccctctgatcgtatggcataaccatatgctcagtccgcttacatgatgcactcgtgtgataagctgacgagcgcacacacattggacatcactgcctttctgcaacaggatgacggcgaaatacatacattgcc

SEQ ID NO: 15331 - DNA, 876 bp, Emericella nidulans
tccgactgtctaattaaaacacatcattgggagggccagaaatgttcgctggcgaacagcgatctgtgaccagcggtcaaaatggcgaatgggagaaacaaagccaaacgacttgaaaccggggcagaaactgaggcctcataaaggcagacaaacgccgacacatttaattagggacgcaggtgaagggacacactagaagaccacgggccctataaaataaccagcgaaaccacaggcaatggaacggattctgcagaaaaagggctgaaagaaaaccccggaggatcgactattgttagggaaccagaaaagacagtggggagccgaaaaatttgggggattagacgaagttctaaaatgtgaaccttatatcttggtaaaacctttgcttcccaaaaaacttggctttaaaatgtctatataatttcggaatttcattgggaatcaaaaattaaatttttataggccctattgggctttcctccatttttaaaattaatattttttgataaaaaaaattacttcttgttcactgtttttatttaaaactcttttttggataaaatcttataaaatttcggtcttactattattataatacttcgtgaaaaaaaatatttaacaattttaattgaaactagggttttctttcttttctcttaatttttaaaacttgctattataaaatttaccttattataaaactttctaatatcgtgcaccttattagtgatacttaccttataaacttatataaaaacttttattttcagataattaatttttttagcatacaattatatataattaaacatacataccttttatctgttctttacaacatactaatttatttatatttacataataact

SEQ ID NO: 15332 - DNA, 2560 bp, Emericella nidulans
  unsure (1)..(2560): unsure at all n locations
ttgtgaagaattcttccgaagatacgggagagtagcggtagaaggaagaggctcggtcagaaacgtggttctcccaccgcaaagccagagggaccgattaaggtttccgccagaaatctggatgaaaggtcggtctatccaacgggttttcaaactttgggagacagaatctcggctcctgaccggcttggcagggaagacttctgggccataaacaagtggacatgacgttatcgattgaaaggtagaattggatagaagtcatgcaggatgaatcatcgggcacctgcacctgcgccatcatgtgccgtctgccctgtgacaaatgtgtattgcggaacacccaaaagtcggggacagaccaagtgggagcggtgtaaaaatggaaaccctgcgcctcagaagccccgctatcacacgggccgtccaatggaattgcgggaagatccccggcttgctttgcgataggctcttgacaagtggctcagtcgccaatgtggcgcttagactgatcccggcagaagtcctcaccgtcacctccgcccatctcgctgtgttccggaatacacctagcctgcagccactgtgggtgtttggtaatctgcacccttgtggacaaccagggatttttgcatccgtgcttgcatcgtgctcgcttcgccgaccgtcaaccatgtttcaagcctcagtattcgcctccgtggggtctgtcagcgttgcaatgctttctgatgccatggcgtcgggcgtctggcttgtttgagctctaatccatcacttctttctcgccggtgccatacaccgcagcatatctgattctctaccgaacgaatgnatgggacgcgagccagcacctcaagtctcagccttgcatgagccacagttgccccacatccaaacccaactgtgtaatctatcctgtaatttgtattgatctgttacggcgtacagaccaaatgagccatgatagacattcgagttgccggaaactggaccatcgctaagcgaccgctgacgctatggttgctcagttggcgcgcctgtcagaatcattgttttcacatggaatagaagaatttcccttgacacgtcaatccgaccatttgagcttctgacatttgagataggaccgcgctattggattcataaggcgctaagttgatcacgccgaggaggaatgcggctctggatggctgtgcggttcgagacaaatccggttcgtccgcaatggggaaagtgtttgctcaagagatcccgttcggggccgagtctgccaatgagatggcagactcgtctgctagcggggtgactcttcatttgacttatgccaatcacatttcggcgctgaaatgcacgttcctcagaaaggggtgtggtggagctgaagtggactaagatcgtcaagatgcccatgggccatcgtacgggccatcgcaattcgcaacacttgcagtgttcgaggttctgacagtcggggaatcggagtcaacggatacgaccccgatgggcgattggtgataggttgataattccagacagtcgtacagttgcccgcaagttacgtcaagttgcacgtcgtactctctggagaaaagggattcggtagacccaaattgacgggtcgagaggaatcctgtctgaccgccaagcacagtcgtatcaaataaacatcccagcctaaacggacccaggccagtaatgagaggtgaatcgcctggcgatcactgcaatctctttcccctagtctaggcttcgtgtccactgtgcaaaccatactgaatcatgcatcagcggactagaagccgtctctcggaaccgcttgccctgtcatcagaggcaggcttgagcaatgaggggattatttgccaccatcttatcatgaggagtcgatcgcggctgtcaagcaagcggagccgagaacgataactgtcaaagcacaattggtgatggcacgatgccaagtttgcgacttgacgacaatcatctattccagcatcacggacttgccgatgacacttgtgggtcagatcccggtctgtgcatacagacgacggcgtctccggggggcatctgtactcgacagtatcccaaccgcgacttagtttccaactactcgctatgctaattaatatcgtttcgtattggaggtatggcaagcgactcgacctttcagttagactattactgcatcctctagagctgtgacactggcaaggccgtaatgaggtaagagtagcgagcgagcagcgagcgacaggggtggccgggcaacccgcagcatcggcgcaggacaattttctttttaatttcatcctttgtgtatctgaagatatgtggtcttttatgatcactttattcttgctcgatgatcaagatttgatcctctctgccttaaaaggtacgtctaatcggttaagcctcgggaattcgggttctaggacgatggctgtggatcggagtgcagaaaatcgactgatcaacgatgttaatgaatggtacgatgatattggtctctggctggagacttggagtacggaatagctatgtatatctaaggatc

SEQ ID NO: 15333 - DNA, 2962 bp, Emericella nidulans
  unsure (1)..(2962): unsure at all n locations
tgtcaacgcggagaatcctcagcggttcttccacgtatcattgcctttgagctcgtgcagatcggggttgcgccgttggaggcggggcattaaggaccgagagaccgaaattggtggcttatagcttcaatcgcgaggtgaacggcctcgctaaccgcctgtttctctctatctacctatcaaaccacctcgggcccattccattcaagtacaaagaagcagtcaccatggccctaaccaaagcgacggcgcatgccgcagtgagccggctgattaccaacctgatcaacatcaaagacacgaccggccagttcctcctccggctcgaagacgggcgcgtcattgatacaaagtcctgggccggatgggaatggacgcacggaatcggtctgtatggcatctggaaatactacgagatcacaggcgacccaaagctcctgtccattatcgaagaatggttcgccgcacggctggcggaggggacgacgaagaacatcaacaccatggccgtgttccttacgctcgcatacgtctacgagaagacggggaaccagagctacctgccctggctggattcctgggctgaatgggcgatgcacgagctcccgcgcacaccacacggcggtatggcgcacatcacctacctctcagagaaccaccaccaccagcaactgtgggacgacacactgatgatgacggtcatgccgctggcgaagatcggaaaggtactcaaccggccagaatacattgccgaagcgaaacgccagttcctcatccatatcaagtaccttttcgacaccaagacagggctcttcttccatgggtgggagttcaatgccaaccaggcgacgggacatggacataacttcgcgaatcgcgctgggcggnngaacagctgggtgacgatcgtgataccggagttcattgagctgctggatctgcaaccgtccgacccgatccgggtccacctcgtcgatacgctgattgcgcaggtagaggccctgaagcggttgcagacaaatgatgggtactggcgtacgctcctcgaccacgaagactcctacgtcgagtcctcggccacagccgggtttgcgtgggggatctcaaagccgtgcggaagaggtacatcggcgccgagtacagagaggtcgcagagaaggcgatccgggctgtggtggccaagatcgacgatgatggggagctgcaaaatacgagcttcgggacgggaatgggcgatacattggagttttataaacagattccgttaacgagcatgccgtatggacaggcgatggcgcagggggcgttggtcgagtggttgagggggacgttctaggatgatagggctacgaaacctataatgatagaatattagcagatttcacgatgcaatccccttgccaccatttcgactgatgacgtgggtatactggtgagaacttatagggcaaaccttctcggccaggcaggaccatgataccgagaatccccggcgcggctggtcgctgtatgcactttactccttgctagggacattcagatatggaggggaacagtgcagtgtccattttcttcattacatcctcatcaatacgtccttgttgggtatcttcgagcaagggtatgtcgttccggttggggtcccgttgctcttcgttttatagcattgacagttctataccgatagagaacgggtatctcaatatgaatgacattaagaccatcgctgtcttacatgtaccatgtgagctcggcagtgccgattcggcaacgaggatcctgggtctgcgtaggctgtccaccaaccagttcatggcgcggtggtcgtaaatgtagcggtcgcgcgtagagatgtccgagtggacgatcgcttgtagcattaagaggaatagatggctatggggtcatactggacggttatggcgctgcagggtggttttgcgactttggtgggtataggatggctgatgagaattggatactaatggatacccactatggcatgcgtcaggagctcaaagcacatcagataatgtgagatcgcagatgtaatgaacagcataaagctctttcacagagcatttggtggatataagtaggttataaaggtagctaaggtaaacgcaggaagtgacggtgtagccacaagcttcagaccccaaggctcaaacgaagtgcaactaagatgctataatttattccagcacgaagcgctcaagttacattcttaagcattatatcatatcagagctcatctctgctgtgcaatcggagggtggttgtctgcttgcgcagccaagagctcgagcctggtagcgcaggaaggacactagccaagctaatctgtccttatcaagacgatacacttataaggcattgggttcagtgaggaataccaatgagattgctggaaagaagtggtattttgtttctctgctctatgccgaatcaaacctgcccgaggaacgcagatctcacttgcagtcgagatacgagctaagcccccatggatcccatgtattttttacggcatttcattgctgcccgtcctgttatcccagaggtgcccgcagtcttggttttctcggcgtgactcacacggatccatggtctgggtaaccgtagacgccctataagcccaacatcgccttcgacgggacataatctcatactcacccctccagaaaatgcctcctcatacccgcacctggaaagctcgcgtcttcgcagcaacaagcctagacggcgccattgcacgccgggaccacgatgtcagctggcttacacaaccagagccaaacccagcccataaggccccgacgcactcagcggcaagatcaacgccgtctacagaacagcacgcggccgaagtcgattttatggtcatgggccgtcgaacgttcgaggtttgtattggttttccagagtggccgtacccggcgaagaagctgcttgtcctgag

SEQ ID NO: 15334 - DNA, 613 bp, Emericella nidulans
aaattggatggctaggccaagaacggaaaaatcatacagtatctcgatgggtaagcgttctgtcgtgaagtgtgtaccgttgctaactgggtagggaaacttgggcctgggacgtcaaaacaaagcatatcacgtacgaaccggttcccacaattgacaatcccttgggaattgctaactacggaccgaccgccacccttttcacgctcggtcctcaattcaccgttcagcaatatgacctggagaacccggcaatggtggcaaacgtgcagcaccctcccacgaactccatgaccgcagctctggatcagatgagagctagaacgaagtccccacgcacattgcaggatgccccggagatgcgggaatcgggctcgtattcaaggcgtcgggccccctttgattccagtggtatagaggctgtaaagcaacaacgcgccgagatgagcagccctgaatcctcccgcggccgtgcagcctccgtcagctcaaaggctttttctgacagatacaaacccccatactctccccctacaagatcagcgcataccgcaacctctttctcactaacgtcagccggggcgggagagaaacccccagccttctttgatac

SEQ ID NO: 15335 - DNA, 491 bp, Emericella nidulans
aaagaaaggcgcagttatggctgtatgattatggagattactttcggccaagaggattccttcccatgtaggggaggatgtgccgtgttgccaatggctgtattgactgtgggggatggagtggacataaactgctacaagagacatgccctggctggggggggaatgcgggagcacttggagccaaccgggagtcggctgtcagggggatcttgtgttgaatgtgttcactcattgatagggctagatgggcaaagtttgagtcatgcagattccggggatggacaatgcggatgcgatagtatatcttctaactggggaaggacttaagccaactctcggatactgcatgattgcaggtgatagcctttgatatagaaatctgactatattcacctatctggcactattagcaattaatgccctggtttacatcagacgtctagaaacttgcaaacgataaaaaccgtcgatatcccgttttctttctg

SEQ ID NO: 15336 - DNA, 5122 bp, Emericella nidulans
ctcgcactcgaaacgagccgttgcatcgaccacctgcttgattggcgaaggccttggtggaatcgtggctagtgtttctttcaagtcaagtgaaagcccaacctacacgacgggtatttgggttacctttggagtcaccatggtcagcgtttgcatgaccgtgataatggatgtgtatttttggagggtcaacaagaaggcgaaggaaacggaaggccgtattgagggtatggaaaactggtattatactctttagcttagtttagtggctgctgcgggtccagagaaagacagaggaactgcataccagtgaaagaaatcagtggataactgtgccccgtgtctttagcgtggcttctgcaatctggcattccataattgcgatcaggtcatcgaattcgaaagtcgataaatagagtcatgcaccccttcgaaaccgcgcttaactatattgggctatggtccatgtgagtgagactctcgccctgggcaaagaatgcacacggtcagcagaagtcgaacggcagatggaagcttacactcttgaggaatttgtagatgtagatggccgatcattggtctactcgatcgattttatcacaaggttgcaggttaaacctcagggactcaattctcagaaccaaggtcaggtcagggaccggtgggcacttgtaagaaagaacggaagcgccggagctaagagtctctcatacggggcggaggagactcatcaacgcccagaccgctttccattggctacaagccgagctaggctgctcagcctcagcctacgctgcttctgcctgcccagcgccagcggctaggcctttggccaccaccagcaccccgggtttaagaacatcgcttatcgcctctttaacttcctttttcatccaactcttgtccctcacttgtcatttcatcgcccaaaatctcattttcatcaaattttgggacacttgtctttatagcattatgacggtctctcatcttgtccgtcgcggggttgaggccttctctgcagccgaggatggggatatgcccatctatcgtgttgaagtgggatctcctatccttgctggcttgttctttattacaatccttgcgggtgtctttgctatttcctccgtaagtacagtcatgacatggttgctcggtgacattgctgacaagtcgtaccctagatcgcgtacacttatggaacactagtaccaaccctcgctgccgtggaggattctaatccggcactctatcttcgtgttgatattgatcctatcaacaagaacccggccgatccgaacgatgtcgagatggaagttgaaacccctgctcctaggcccatcactagcaagctgcgcactacgcttcgccacctccgcgcgcgcggcggccgtctctcacgtttccgtggcttcagcatgttcatcaccttagctgttgcccagtgcatcgtctcttctattattcctatgtctcctagctcgatttatagtggattcatccaatccacgcttgtccatattctccttgccaatctgcgggtcgcctgggtgcacattgtgatctcggagccttctcccaagcgtttctaccagcgtatcccgagctttcgatctctgaagaagattatccctgcagctgctttcgaaagccttgttgtcaacggctcgtgccttatcgcttttttcatcatccgtctagtccatggactcaaggaactcgatcttattcgcgatggtgatgtttctcccgagctcgtgcggcgtgccgccggcataatgagcatcgctggcttggttggctggcttgcgtccttccccgcaaacgtcatcttcgtccgcgtggcggcgtctatgctccctgcagaggacgagccaatcatccccttcgaccgaagcttcggtgggaaggttgctcccgaagtcgttggtggtggtgctctgagcattgccgatgcttggaaaacaatggaccgcgacggctggaagcgctatgctaaagctgaactcaaggccatgggcttatacatggctagctcgatcttcttctctatcgttattgcggcaacgttactcggtggtgctttcgcaattaagcctaagggtggcaactaaactgcggaagaaccgacgttaataaacgcagttaccgtccctgggaagcgcggtgcctcttggacattggttctatgattgtctcgaatataatatctatccagtatttttactcaccctgtacgctcgccatttacataccaaccattatacttgcttaaatgataaatcatttattattcgtgttaggctggcactttccgtattctcaatacaagacacttgatgctgcatcgatgtggtgtaaccaatctataatcttatgcagtgagattgagccaagcgaagtggtacaaggttatccttgttgcttcgccggggaccctgtggcaactggcaagggacgacgcttaagccagagcattgatcacggagtatccggttcgttcccgatgaggggagacaggaaatccccaccgccttccagccaaccaaattcctcgctataccacaccgcctggctctggggttatttcacgatcaactgacagcctcttcgtgactgtcctgtctgctggaggcaatctcgggataactctttactctcgcgccatttgtcctccttattctcctcttgtcatctgaatttcgctatcttctagctcctttcccctctctcgcctctctcctgcccagctcttctacccttccacagcaccccgcccccgcttatcgccatggccacaacaccagcaggccgcatgctggcccgtcagttacaacatatgcaatcagacaaagacctccccgggattagctgtggacttgtagacaacaatgtgttcgaatgggaggtcatgctcatgatctctgacgatgttaaactatatggcggtaagttcaatgtcttccatatttccgaaccggcagcattcagcatctcccgttccaacattacgaccatttattgactatggacgccatatcaggtggtttcttccgtgctcgactttccttcccccccgagtaccctcatatgccgccgaagatgaagttcgagccgccgctttttcaccccaacagtacgtgttgatctcccttctgtgaacacaagcccagaatgcactgttccgtactcaccagtcacgtcagtctaccctaacggcgaggtttgcatctccatcctgcacccaccggaagaagataaatatggctatgagtctgccgccgagcgctggtcacccgtccaaacacctgaaacaatcctcctttccgtgatttccatgctctccagcccgaatgacgagagcgcagcaaacgttgaggccgctcgtctgtggcgagacgatcccaaggaattcaagaggcgcgtccgcaagtgtgtccgcgagagccttggagaggaataatcagttatacaccacatatgcatttcacattttgacgtttttcgctcgcccatttgtctcgctgctactgtcttccgcttttgggtcaagtaacgcactggtgttgggcgttttcgagctgtgaccctcctctttgccgtcttctgtcttcgattgcttggctgcagccacctagtccctatagactattcaacctggtcacattgagtccgtcgcaaatttggcttgccagttttggagttatatatccttggttggttgggcattgtggtggaacagatatatccatcatttattctcatatcttgtgttagcacaactgcgcctggattttagcatgatttcctggatcgggccgactcgactaccttctatctaccagctcaaatccaatttcagaattttcaggttcctggtaaatactccatttagtgaaggagacatatcgtacaggcattggaatggcagttaaagttgttttcccagcaatgctattagtatagacgacgcagataaattctggtaaataatgcttgtacgtgaatttttgtttatgtacaatggtctaacttaatatgggtatatatccccaactggaatatcaacgcggcgttatggctgagccttaactcccttcctcaacggcggaaggaagaagctaggatggaagacggtgagcgatagaacagcgagaccgatcatcctgtatgaaattagcgcttgggcaagggccaaatgatatcagtatcagaacttacattccatcgagtactaggaattctttttctttttgcataagcggattgccccagccgccggccatttcggggatactgcaattatcgctgttaatacaagtaaccgaatggcgatatagagagaagggtaataagagagaaggcgtaccggtaaatacaccgaatcagcacggtgaagtatgcgaagatctctccaaaaaggataaggtgtatgcttctgcggccgagagacttctcgctgaaagatccagggccacttttcctaacgcgccagaagaactcggctgcaagcagtccgcagactgacattgtggcgacctggaatgcgataccagcaattataatatcatctccaatcttgagaacttccatatcatttcctgcagcggctgcaacaccgccacctgctgcctgtaagatgagcgatccgatatcgcagcagatgaagatccaggtaaagagtttcggcttgagacgcgagtgctcggggccgagcgcgaggatgatgtgcttcaaagtaaggtagatgccggcggcgatgaaagtcggggcgagcacgaggcagacaatctgcagcttaaaagcgtcaccattccacgggttatcgttcatcaatatccgtcctatgtaccctgctagttccatgagcggccctacagccagcgcgatcattatcgtccatgaccgatagtaggtaccaatccccagttgtatgacgccaagaagaccaaaccacacggcgaagaagacattgccgccaaagttggggtagtagccgtaggttgttgcctcgacagggcacaacggggagacttcgtgacacgtttcgtagcttgccatttgaagaaataaataaaagcgcagtagcgggagctgggctgcgtggactcacggtcgcagg

SEQ ID NO: 15337 - DNA, 1258 bp, Emericella nidulans
tgccagacggacactggcacaacctatctatacagtaagcttgaaatcttatagcgcagaggaataaggctcagactataagaaggtgcctgccagatgctcacacttgtatattttgattttgcaagacgtgctccaacaacctgcgtagaatgatttaagactatactataagtggatgccctatacgtcatactttatagtgattaggtaaatctgcgtgtttcggctgtcggggatagcttcaaaatgttcaggaatgtatggttgagcggggtgcgcggctcgcttgtgcgatatgtttacgatctttagttgcccggacctgtaactcgcagactcgtgcatcttcccatttcttctgcatcagatctgttattttatcctcattgtgcttcgacggacactacatgaaaattcaagagttgccataggctgcgttcgctatgactgattcatatcacaaagcttgcttgaagtcaaggagtgagcttctccaaaataggaaatccggagaccggcgacttttctcggctttaatcttgtttgccctgattttgtgctgcagtcacggaaaggggaacgttctccagactgcactaagtactagttcccagtcgtagcctcctaaatctcctaaacaaatgcagatcacctccctttccccactagtataacatagtattgccccgccaaacggtactggatatctcaacctttagggatctgtaaccccgcgctcggtcggtgcgagaccagcacccgagcccttttccagttctttcatctcagcctcatcatgaccaaatcgaacaagccaaaggagccccagacctcactgaagcaactgctaattgtggtcagactcaagatcaataagtactccggatgcctgcaacgctgcaacccacgggaaacaggtttgggtgacactcggcgacaaaacgactcgactctccgttactcgaggcatccggcaaacccatggttgtttatttgacgtgatatcaagtcacccgatgcattcgaatcaggcaaaacctcgtcttgtgcctgaatggcagggtgatgatgtgcagactgtggctgagatatcgcccagacggggaagaatcagctagcagttgcagttttaggccacattacattcaaacatgagaaggctttacctgtcttccctgcagagcagataggtcaccattatgcataagtggataggcataaagcttttagcagtgcttatataacggcacatagc

SEQ ID NO: 15338 - DNA, 8247 bp, Emericella nidulans
tggagttggtccaggaagcgatcctaccagaccagacgattcccgcagaattggctcttcagcagaaggttggagacatcgttaggatggcgttttctgcctcaaccgcgaacgtgattgagctgcgtgtgtggggtttgaagatacttgaccaagtgttgaaggtaattataactccgcgcttcataatctgtcctctaatttcttttcttagatgtttggcaagacacccgaccctgactttgcagaagcatcactacttgaacagtaccaggcccagattgggtctgctctcactccagcatttgctgcggactcctcgccggagcttgcgtcggaggcaatcaacgtatctgcgacatttatcgcaactggtatcgtaacgaacgtggagcgtatgggaaggatcttaaaactcttagtcctaggactcgaaaacttctcagcaaaccccgacactaccgagataggggatctcaaaggtctcaactccaatgcaaaggtgatggtcaagatggcgttgtatgcggcatgggcacgccttcaaattgcgagcattgagcacgagtatctcaatgaggtcgttcagccttacttgttaaagcttacccccctatggctgtcctctcttcaggagtatgctcggcttcgttttgaaccggacatttcgggcagtctcggcacgggtccggaaagcggcgatttggacgaggtttatgccgccctgaatcgggagacgcttctgaaggtgagaagctcatttgttctatactctactaacagagctaactgtacttgcagttctaccaagaaacttggttgagcctggttgatgctattgccgggcttgtggagagggacatagactttgtctttgacgcgctggacggaaaggcgcagattaaagagcccgagaagtccgaagaggatcagctaagtaacggagaaccaaagggaaagggagatgatatcaactatcgcgacgagcctgttgcgttcttctttgtgctttttggcttagcgttcgaggctctcgttgaccagtctacttcagcctctcagagaatggagatcctccaggctctcaagaggattctgagacccataatctctggtaacgctatataccaagatgccatattctccgaaacgatggacagtctagatcggctcgcattgacagaaggtacagccgttcagaatgtcatcgtcgagatagcccgaaacctcgcgctagatcacccatccgcgaaaggtggtgaagatcgcagtgaccatctttcagacgatattgaacagctcttcgagctaacgaggagcatcattctcgtccttgccggcctcctacccaacctccgcgagtcaactaccatcgcacgattcaatgtgggctctgacgatgcactgtctctcatccgtctttctctttcgtctctagtcaacgtcgcctcaatattcccatcaatcattcgaaacgaccttaatgcatgcattctccacatcttcagcacaatcctcgccacaggtctgtgccaacaagaagtcgtacctcaagctctgcccatattcaagcactttatccagagcatcagtggccaggaaaatgccagcctagaaaaccaggagaaccagaatgttatctcccatcagctccgcggctgcctcgtccgttttctaacaaccctcacgatcgcccaacgtcgcgaatccgaatcctcccttccctgtgccaagaacaccctactcaccatcaccatcctcctaacaacaggcggacatctcatcccgccacacgatcctatcctccctcaaattctcaacgaactcctcgactgccttcaagatgttggtctcgctagcgtcgcggctggctgtatccgatctatcctcctttcaaactcaacgaaatccaacacagacgaagtcatagctcgctacttgattccccgccttattgccttcctcatcggcacacctactgatccaggcggagaagcctccaacgacccggagaactcgcgaaccagcatcgcgcgcacgctagtttcatgcgtaaccgtcccaaacgcagctgccttcccgggaggagaaacacatacggctatgtccttggtgatgtcatgtctccttgcgcgggccaaacgcgagggtgcacccgtttatactgaaacagccgccaacctccttgaactggcgaaggcagatcagctggcattcagaacattggtcgggactatgagccctgcgctgaaggggttgctcgaggagattctacgtaacgcaaacgttggggctggtggcggtgcggtgggcagaggggagcaggagacgcagaatgggggtgggcagcagagtatgccgagtattgcgttgagatttgatttctgatttggaaaccatgaggatcagggatgtgtaatgtcgtgatcattaatgacggctttatagtggtttttctgtttttagttcatctttataccatgattttatatatctattcatctttttgcaatgaatatctcctgcctctaaacttagttcgagtaggtgataagtgatgtgggtatcagtagctattacatccaagcctagctcaagtagggtactggcatagcatgcatggataagacaagaatgtgaatgaacacaaaagaaaatgttaacgatagagaattgacagctttctctgtcaaggtgtaaccatgccgcagccttcaccgaagtctaaaagaaatgctcaagtctaaattatattccgcgacaagcttgcaaaagaaaataatgtataagaaagtaaagtctgatatcaacgcttttcgtaagtcagcatttagcctagagattcgctgagatgcgccacaggaactacatcctgaggtccaggagtagccaacacagaaggcgtgcgggactctgccggcttttgagaaggcgcttcttgctttttcttctcagcggcgttctgagctcgttgggtagatgagtaacggaggaagaggaggatcatgactagggctctgttagtggacggttttccaaatcggaaagaggaaaagaacggagatggacatacaagcactcgtggcaattgccaacgcagctctccttgtcagaatccacctcagcccctcaatctcgctcttactatcactgttcaacgataccgtaattttatagttgagctcctgcacagaagtatcgatgctccgctgtaactctctcactgtcatcttatggtcattgaacatccccttgatatcatccttgagtcctgcaagttcctggttcgttcgctgcgagaggatatctgcctcgtgctctaatgcggtccgagaggcgcgctggcgctgtatctctgagttgcgagctgtttgtaggctcgactgaagctctgagcaggctgctttgaagaggtatgtttcgttctcaacgtcggatttcgaggtgagattttgcttagcgaagtccaggttgttttgaaggattttgcggacgcctttcatgattgtgatagcttgcttatctgtgaatccgccctttgcgaggtcctggacgagggagtaggtatcaaagtggtggacgtagggtggtggagccatgtgcgggggccggttgtgtggtaacgttgaaggagtaaggtacgatgagggcgatggcatatgaaggacgccttctagcgggtttccatccaatattggcgatttggattgttcttcagcatatttttcctcagggttagggtgctgttgctttccacgagcaatttccggcgcagcttcctcccccccctcctcctcctcttcttcttccggctccagttcttcttcattcgaagtcttattctcaatcaactccgcccttttctcacctgccgattgctgagaagcagcagaggggtcctccgtggactgaggtagttgcaattccgactgcgacccagatttggcctgctctggagttgaagaagcagcactcttctccgacggtgacttggagccagagtcctcgctaggacccggggtgctctcgtccttcaaccgggacggcggcgggatattaggttcgactgccggcccataccgtcgttgtatggagccctgagcacgtcgtcgagtggtatggaagggagctcgcgaaccccggggcgggcgggcattcgagggcacgcgaagggagcggtgcgtggacggttcgcaggacttgaccgcgcgcatcaggttcgggtagaggaacggaagccttggagacgccatcgtgaattattgggccgggggatggctttcgtggaattggcacttgtgaatcagaagcagagagattgggcaattgagtcagtcgaggttggccgaatgaagctcgagcccagagcggtcggtcatttttcccgcggccaacgcgcggccgagcccgtgatgtgacgtaagcggtgaaaacccccgcggcaacgatgtgtacttagtgcgaggccgtcaagaattagtttatgatgctctatgatggtatatttacatgatgtatgcttgctacaattgagcagcgtcagccgctaataatccgaacagtagccgtgttcggtgccaatactcctgtgccctctgatccatggtctcgctaattgatcccgcatctgagccaaagctgtttcgaagcttctcggcgacctcctgcaatgaactttgctgcgtggctttgtcgaccatcgcactgttcaggaagatagtatcgaagtaaagctgtaacttgatatcatggagttgtgcttcggtcggtgcgacagatcggctgtttccgttctggaccggtgtttctttttcgtcctccggcttagcccaatccgctggagagtctatatcgtccagatacgcggtaattcgccgtgccacgtctttctgtagagcacgttgaaaaacacagacggtcgacatatcccagagcccatggccatgccggcccatagactccagtatcctgcgcataaatttgaaggtagcaggcgatggctgaacaggaagctcaggatcgccttcccaaagcaatctcccagcaggggtcatggtttgggggttcacagaggatgcaaatgacaacggccgggtatcagcaataacctccgccgcaagtatttcttgcagtccagggatgatgtctttgaaaaattctgtatctttcggaatgaattcatgtggaaggtctctccgaacgagtcgaacaagtttcagcatgaacgccgctttctctcctcttcccgaatccccaatattcttatgggagtcggcgaatgaaccctggagagcatcgaaagactgtcgaacagccgcttcaagtgcattccttaacagctggctatcatcctcgtttaatatcgctgtgacgtctaagtcgagatcttcatccgcagcctcttcaagtatgtcaggccatcgaacttcccgtagagcatcaacagcttccctgagtgtgcggattgtggaaagccacatttggtactcctttgttgcactagaaatttctgcatctcgaccaagtagtttatccgtgatggcttctctgaaagcagctgcgccattggtatagtcaagggagagcagttcgtggtcccacagggactgagttttaccatgatctccatcccaacctgaaagtgcggacgcaacagcttggccaaatgtacctagatccttggctttatccaatagtatgtccttgaggcggctgttaaaaacggttcgaatgccttccaaaacttgcaaggtagaatgggtagtcgttgagctccaggagcaaagccagagccccaacgtttctttgcgaagttgaatcagctgtgagaaatccgcccaagtcttgagactgtcctgactgcggcgcacaaactcctcaaaagcacccttcgaccacttcttgattgctctgtctgcatcttgcttggattgctcattcagcttgatccatggagtaaagttgaaaatgtctgtagccacccagcggcccaacacatccagtgagagctcgtcgatattgcggatgtcgggatcggtaaacaaagatcgagatttcagtttacccagcacgtccgtaaaacggcgggaaagcaaggtttttgagaactgcagggtttggatataaagacgtaaggcagccaagatgttctcgcctgaaggtttggcattatccagctggttcccaatcacgtctaagcggaccttgtgatagtaggcaacagcatcgtctgacgaggagctcgtagataagcagtatgcggcgagagcttcaattacctcgtcaatggtggacttggcactagccaagagtttattgatccggctccggagaccgcgcctgagagaagcaagctggttgcgcagagtctccaggaacggtggcacagacttctgctcagaaaggcacttgtgcagaaggcgagaaataaccagcagtttcgctatcagaagcggcgatcctcgcttcctcaacattttcgatatcagcaccgagcaccgatgaagtagcgccagctgagctccaagagcgcgtttagtcgcatctataccttgttagttgatctacttgaaatgggcgctcccataagttatgcagaccttgagccgtcgttttattattttccatccgattcagatgtgtatacttcttacccaccagacgcggattgcatcgtcgtccaatatcgcccagggtcgtatccacttcttccatgttgcggctcatggccacaattgtctcggccgtcccgacaagctctcgatatctggtactatagagacaatcgcagtcagtcattgaacaatcgttgaacccatcacgacttacccaacaagagcccggagcttctccttattgctcgcaacgtcgcggcggagctcttgctccagacggcgcacggtgggaattgagtattgaaatgcatcttcccaggtcttgaggctctgtggatcgggaccgtcagatgccatattgaagcaaggcaggaagctgccagaagccagtaggcctggggagatgaacaagtaatgcgataagcaatcttagtgcctgagcgttgaggcattgagtctagactaacctaattaagggagctatgatgactcatcaaatgcaggtgggcctgcaaccacgaactaactcgccatggacgatctaatgttaatttactgttgtataaagtgctctccaatgtttcacaatgaaaagactataaaagggcaatctagagcataatatcaggcatatcaggcatatcaggcatgattctgagctcgacagtgataccgaggttccgaggtgcaatgtgcctgctgctcttacatagcggtttctgacagcaacaacaatatccgtcagacaaccatgcaattagcagcgccgttccctttggctgatgcttccttccatctacttctgtcgctttatgcatttagcaagtcttgcatttctccatgaattcagttgattaatctggtattccagataattaggtcctgttctatggacccctaccggggtccaggtatgtagttgacgaggaagtagaactatgaaccttttctattcaaaccaccttgagaatatgtcgcgaactgtcttcctgattctggaatattacttaagtgtacttcgtcggatcttgccatccaattgccgggcatacctaggtagcttcgtggactgggtgggtggcaccatctgcagatcgcacctcggcaccggtcggttagctatactgcgtcgggccatgcaagagggggagtagccgcgacctctttattagcttctgctgtaaccccggatttttctttctttcttgatattcattttcagcctcccctcttcagtgattcttactgacgatgtcgtcttctccctgcttggtcaacagcccgaagggcacatcccagcgtcgcaacgaatcccagccattgcacgaccttttgtctccgcgcgcgccctcaaaacgctcgatgcagttgaaaagttcgtcgaagaagaatgtattcccgccgacgccgtctataaccaagcgctcggtgagacgacgcaggagcgcttctcagcccacccgcaaatcatggaagacctgaaaacgaaggcgaaacagttgggtctctggaatatgtttctgccaaaaaaccacttcagtgagggcgcggggtacagtaatctggaatatgggctcatggcagagtatctcgggcgacgttgacggcgagcgaggcgacaaactgcgcggcg

SEQ ID NO: 15339 - DNA, 874 bp, Emericella nidulans
ccagagatgatatcccttggctataagggggtgactttgggatacgctcgcgaatcggtgcgcagatttgctcaaggacccggccacatctgaagctgcaaaacaagaagcgatagacagcgccgtggatgaatggaaggaagggaacctgcggacacttagaatgataggagtcggcgactgtatgaatgtaaagtacgtaccgcatgtgcttccatagccaaaactaacatgttagattcaccggggctggcccagttgctgttgaagctctcaaacggggagatcagattccaccgccgcgaatgcacgcagcgatcttggagatctgtgcgacactgcagcacagggatcccgcctgtggattgatgcggaacaacagatcttccaacagaccattgacaactggactatcgatttgatgaggcagttcaatcgtcaaggcaaggtggtcgtcttcaacaccatccaggcatatctcaaagcgtcaacggagaatgtcagccgccatctctctcttgcacaagcagaaggatggtcgctcgggatcaagctcgttcgaggagcgtacatcgcccatgattatcgctcgcggatccacgacaccaaagccgggacggacgccaactacaaccacatcgtgcagtccctgctcacgcgacaataccccaccggcgattcagtggccccgcaccattttcccaaaacccagttgtttgtcgcgtcgcataacgcgcagaggctgcggcaggcctattcgctggcacggtaccggctgcaaaacaggctcccaacgattccaatcgacattgtacagctgcagggcatggcagacgagctaagctgcgagatattggcatacaactcaagcgac

SEQ ID NO: 15340 - DNA, 968 bp, Emericella nidulans
gttctttgacgggaacaagatcctctttttactataacacacggagttgtacgggcgctagagcctatcagcttgcctgagcatgttcaagataactcaattgccaaactatatcgcggtaataaataccgcctggttctaagcaatccagcctttggcagtttgatgcagtttctcgaaagcaagcagaaagaaggtggttctgttatgtctgcaatactagcagctattgcactatcattaccaaagagcgcgcggctgatgataggttcagctttgcggcactgctgtcccaagcatggtatgggtcagagttttccctacagaagatgaaggcattccaggtcatcatgctggctctgcatacaccggggacaatcccgcgatggctggcaccttgccgcgacttacgttagcgaagcttttcatggagcaggctcttgaaggtgacctgcgtgctgaactcgcagatgaagatgccaagaatccgcccgggtcctgggcaaaacagctttaacgcacgagctttgcccaaatgataaaaaaggaagagggccatgaagctccacatccgccgtattccgtttccgcatccactgaccggatgttatcattgggtgcaaaaagttaagggaaattggcttggtttggttgtatctcagacaagaggctggccctgcctctgggtggctgttacttttccacaattttgacggaggaaataaaacccttttggggcgcccttattaggaggtcacagcttattctgctaataatgttcccccgggtcaaaaaatactacctttgggctctgaaaaaatttttccacgtgcaaacccacattatgtccctaaattctctggcgttaatatgctgctctcccaccccaatatgtcataccacttggtttttttctcccacactctctttttcccattttggtctcgtacctatttcctatcctctcc

SEQ ID NO: 15341 - DNA, 849 bp, Emericella nidulans
ctcccagcaccagtacctcaccaattcttggtgtcggataaatatgtacctggcaacaacgtcctggtacttgcagtcaacctcgtggctgagtctgccaacggtgcagtacttgcggccggggcgaagacggaggacgcgaagagcctgaggaacgacgacacgcttcttcttgtcgtaagggggagggacacccttgaagaccttgagcctctcaagagcagcagcaccgcgggcggtcttgtgagggatcattccgcggacggccttgtagaagatgcgagaaggagcgcggaagtggaagggaccaccgcgggtggggttgaacggggtgatcttgcggaggtaggcgtggtacttgactgttgccgaaaccctatgtcagccggctgctgcccaaaaaacgatcatgacaatgccgccaattttcgtcggtcatttgatataaaaattccactttttatcggtttcttggcttcctccattttcattacaaaatacttgggggaaaaaagccaaccaaattcaagggtcgataaacgccgcttcgacggagactcgcggaatgttagggctaaattacgacgcattttggtcgtaatattttttgaaaaattggtcgtaccagagggccttcccctgccaacttaatctcccactggcttttttaaaaggcttttcttaggattaacgtttaacaacgggctccctgttttgaactttcttttataatatctagagatctttttctccatgattctatgctttttttaaactttactattatttacaattcatttcttttacttatgatttattatccttctttttatgtatcaaactactttt

SEQ ID NO: 15342 - DNA, 577 bp, Emericella nidulans
ctatgatcataagggttgatccctggcgctgggggaaaaaaataaggaagattcagaccactgcaaacatactttaacaagcccaattgaattgatgcgaacaggttgcgagccgcgaccaacccagacaagatgaacagcagcgaaatatcgatcaagtcacaggcggagtttgtactctggagcgtagcttggctgcttttgaactttgcactcaaaaggcaaaatcgcacaaggaacccggtcgtcagtcgttagtaacggggtatgagttaagacaagcgaagtagactataaaggaccaaagaaagcctcatgaaacaggactcgaagaattgcacaattgaaaaaagaaagaggaagcccacaaagaactttagatctgagagcgcgatgaactattccagtagagcctcctatcctaaaaactgaaaccgttcgagtctcacgcggtgggaggtcactggcaaactgacagattgaagaataagagagcggcgagcggaggtggaattcaatggcgaatggtcagtttgtatcacgtgactgtacgagctctacctaagctcgaaaagga

SEQ ID NO: 15343 - DNA, 2261 bp, Emericella nidulans
catcgaatgtataccgattactgtgggcatccttctttcccgcgacatggctattgcctggattcttcttccttccccggatgtagatggtgttaacaattgtaacgtgtaagaggagcggacggggtttgaactttgtctcgcttttatgctccgttattgttgtagacaaggtgttcgggtgatcctggacttgttgactttgatcctgattttcatgatctctctgtggtctggtctttcgcttgtgcgtccttctgggctcggctttgtactctccctgcaggaatccagcttccaaaaatttgtcgcgtaatgcctcgcagaacaggtagagacgagatgtggggtcaaccggcgcagcatgcagaacggtcgcagagcgagcacgtgggagagcatgcatggattccaatgaaatattgaacggttcgggtgcggcggatttgacttgagagtgttcgtctgtcaagacaggtctgggggattgacttgttaataggctagtatcggctgttacccctttctcttgtccagcgttctgagtattctccattgctagggactctctctttccagtcttggaccgcgatcgctgccgcgcagcactttcctccgccttgcgcatcaaggcgactagatccagagagtagaagaaccgcagcgcttcgtcaaggcgctgcgggttaggtaaactcatgaccccgagagtaagatggagcgtacccacagggcgtatagcatcgtccgggataagtgggcgatgcgcctgtcgctgctcgtcttcttgccctttttccaagatcgagaatgaaattggtgggatcgaggctttgaatgaggataatgaagactctaattgaggaagggagacagaattgacgagaggcagacagaggaagtgtgttagaggcggccgctttggtttcgcgttggttgagttctttgagcccttgtgctgcttgttcgtgatgtccgtagacatgatgactgtggttttggctgatgaatggtatgcacgcagaacgggtccccttcttagaggcgagaggatcctcattcttatattcgggaagatacaaaagtcattgtaaatggcaagtaaggacgaggttattgtggtagatccaaagacactatacctatgagtagaacaaaaaagcttggcgcgatcgaccgatgatttcatgctccttttagtgccgtgatgccatcgattctgcctccgcttctcctcccggctcagctcaagctcagcctaagctctccactctccatccgtttacatcttcctaccaaaacagctcaattgacacagaacatctcactcgctcgcccatcatgctcaccagccgcgcagcccgcgcccttctctcttccttcccgtccactttcgggcttcgcagactcgcaatagcagcttccgccgcttcgaccttccgtttcccaaactcaacaaagctcgttgccaaatatcaacaccgcaacggctttcattcgaccccgcaaattcaaaaaggcatcaccccaggctctcctgacccaccggcaccgcagccagagtcctccgtgcgcgtctcggaaccgtcgccgttatcgaaccaccaatatcacgagtactcggaccattatctgcatgtcgtacaagctaaaattgaggaaatggaggaagacaggtcggatcttgaaactgaccttagcgtgagttgacctatttacatgacattttcattctgccaagcttggcgtgctcgctgcccgtacttgacgttgcacagatcgattaccgctttcttatcgccaagctgggatagctgaccggttgtgaaaatacaggccgtttcttcatacaatgttgtcatggtggaacatcctgttaacaaacacccccatcaggaatgtggttattttcggtttcgacaaggaatacatgggtgggagagaccatgcccgaagctgataagcccttccaacgggtgggtggtttgggatttttacctgtggccgtaactggggtggatgattgccgaaagttacgcaggtgcagaacaatttgggtgcctagttggggaagggtatacctttagtcgaccctatgtggggtggataggttagcacaaaaatatttgtgggcagtcattttgacggtttatattcctatctgggggtgaatactattcttctcaaatatacttgtgaaaattgtaattaaggaccggttattgattggggtatcaaacattggggggtgtttgttcaat

SEQ ID NO: 15344 - DNA, 2775 bp, Emericella nidulans
cggccgataatacgactactatagggatccttggtgggcttttcaagttgcagatagggcgattggacccagcccccagacttgaagaaatcgtttcagaacacaatgagtgtctgattagaagtctgagacccgtgccgccaggagtgtaaacggggatgagtatgacaacataccaaaccgcgccgcccatgctaggggcagagggcttccaaacgtcttttcgccttcaatctgttctcagtattgccgatgataattgtcggtcgttgagtcgagcaccaggggcggttctgcaccaagtatgatcgctggtcttccgggcggtcggggcagtacggtgggagtgtggcaaaacgattgacaacgctagtggtttcgcagaaagacaaaaataaaagagacaacaatgaaagaccaggattaaagcagcagagcgaagggaataaggaaaaatcaggcgacaagggctcggtgggaagagagttatcgacggacacaggagagtgtgaatcccgcacggttctgagagtgtccaggactatcaggactaacagccgtagcgaccagacattccttgatagcgcgatgcaagcgcggctgtgtgtcagactaagtcactaaactccgttaagggggaaccaccagtggagatggcggagaactgtttcgaacgagtagtggcttgctgagcgctattccagcctatccgagcagctgttgcagatatgctggcagagaagcatatgccatctcatcaaaatctaaatgagaatggccacgatacttatataagagcattctacctgaagtacactaccctactagaaatccagccgcaataatacaatcttaaacggtccatccctggcgtcgaatgctagaaaccagcgcttccatggatcgggctgctgatgtctcggttgaagccaccccgctaaatccgccaggcgctgttttgaaggattcatcagctccagaaaaacagatttcagtctgattgaacggagcgcttgacagtggcgatgattgacgactgaagatcgggggcctcgtaagctagaggctgtcagactgtgccctgcatactgtccctgactagtactgtacagcagtaactcggtttcataaggatggacaattagacattctggttcaggtacctttgtgaaccacactttggacaccgagagtttggcaacacccaaggcgggacaacgagtggctagagcaacgcatactgggcgggatgatatccttagtgccagctaagacctaccgatggagcccacggattggctaaccgaagagcgcccgaggggcatcaaaggactccaacaaatcatctgcgagaacgacacgagtacctggcggaatgacgaggctgaggaggtcagagcatcatccgagcaacatcactcttaacccaccactgccctagggctgaattatggtcttgccaacaactcgacgactcgacgaactggtgtgctaagattttgacgaatgataattattggtcgtcgctgacagccatggttgctctcgtggctttacaacacctgactgagcccctctgattgtctgatctgtggaccacggttctaagtgccttttgacgcgcaagtggggttgatttagaaaaaattagatcaggctacagctacaccgacaatattattgatgaaccagaaattaaaagtaataatcagcaattattgtctattgatatacagttttctgcgggattctccataggttctccaggtcatcaagagaaatagtaaatcaattggccgaatttccggatacccagcgtctatcattttaggatttgtcatatcgcaaatccagcacaggcggccattctgatcattctctcgaagacacaagtaagcctctgaatattggcaaagtaggcacagttagtacgtctacgtacgtctacgtacttctaaagagctgaggtggcgcatgataatggagtagcatcttttcatctcggtcatttctgtacagtgactgtacaacatctggaggaaacgtgggaggtcagagtcgatttgcgcctgtataaccaaatcccctcaaatgaccgctggttcagaagtactgggtcgatgccttgcagcttgaccaaaaaggagaaacatggtcacatatacaaccatgactctgaagtcaacatctaaattttttgctttgggagcacactgggcggaactcgtcacagtacatctgatgactttgcaagttaaatacctatcactagactcaatttagacctttctgtccccgttagttctggactattcttgctatctgaaacatgatccacttgcttatgtgatccacgctatgtcacgtgccgcgtgccctgcgacacacaatccctgtcgacatccctgccaaaaacctctcgagtagtcttgacacgtgcctaggtcaaggctaccaccacgattgcggggcaccggcactctcctgacacgccatcgatggcatgctcacctgttatggttgactaggcccacggtgcaggtggctcttagtacagatatcctacactcgcactattatggcacttctctgttatttatatctctttaacatctctcaattcttctccaatactatattacattacttcacaccttcctttccctcccttacgcttattcacacttcccttcgttctcacaaactcttccttctctctttagctcttattctcctttcttattaccgttactcttttacactttcccatctttc

SEQ ID NO: 15345 - DNA, 412 bp, Emericella nidulans
aaatggaccgagacgcacaagaaccagaacaaacgccaattggttaacgacccaaggagaccacacagggcgaggggagaaaacacgagccaatgaggaagcaaatcccacgaaaagcaaacccaagaaagacaaggacgcaacaacaccacgccagctgcccaagaagagggaccacacagagacccggacccaaacaaacacacaggcacaaccaacagaaaaagcaaacagcgcagcgaagaagacacaaacgggaatacagacacacactagagcacaagacggaaacagaagccgaacgccacgagcatgcaaagccacgaacgacagcggcaacccgaactgccggaacacgtacaagaaaaagagacaacagcgagcaacaagcagggacaaacgccgaacgaga

SEQ ID NO: 15346 - DNA, 298 bp, Emericella nidulans
aatatgtggaccgacagtgacaatatacagtccaatcgccaagcggtgttttaaccaaggagaatacacatggtctgcaggctatacatgacccaatgtccatcctagttccatgaaaagtataccgattaaagacgatctcttcataagccatgctttcttaccaagtagacaggccattcagagacccgatgcataggaagactcatgtacaacctactggataatctaaagcgccgctgagaagacactaactggatactgtcacactctagaccacaagacttgatagagatgc

SEQ ID NO: 15347 - DNA, 573 bp, Emericella nidulans
aaccccgggacggagtttaatactaggatggtactacctaacatgtttccttttatgaccaccttaacacatgcatcataggctgggcgcggaacttaaccacatctctcctaaaactaccactatacaatgactcaaacttgcacctcacagtccaaccatttacggacaataattcacatatgtaaacgcatcccacccgtataacgcatactctgaatgtattcatagacaccacgttcgtatatttgctacatcctaactatgaaaattccacacactgacacacgtaactctcatatcactccgttccgcctgacaaaaaacatcgcgcgtcctcacacaccagcccattaatgattcttaaatcatatcgcacatcaataacgctccatacttgtcaccatactcgtgaaacacttatcctaagacataccagacactgatctttgttcacttcacaatcgtttgaggcgtacatatatgacgcatgcgtgaataccaccatggctctctctccaattattggacaagccaaagaacatgctatctgttgcgccattgctagagtga

SEQ ID NO: 15348 - DNA, 3034 bp, Emericella nidulans
tgattgtctccatcgccaaggacaatcgctcggtttccaatgaaatgcatgcaccaaattccaattccacccattgagaccgcagacgtgagtagcaggtacctaattttaaagcttgtttagagctgtaatccgtcagaagtcgcaactgttggaactgcgtaccagttatagaagcccgcagttgatgtccgtcgatgaagaagctccaatgtagttatacagcccatgacactgatgacataggagagaacaatgaagcccggtaaataggaaacaacgaccacgtccccggtggggagtgtatccatattcaacatggtccgatggttgaataaagtcgacttcggagaagacgagcaggtttaaagagtaaagaatgcatacatagtggtcaacacatacgcatacctggagccttccggtctatggagaacgagaacaaaaaagtgaaggaacaaaagccagcaagcaccttgtccataaatgtggcgagctgagcttgttataaacttatagttggttgacgccaggggctccgcaggcctgtctaccttgattaaaacgggtccactattctccaagacgaatggttttaaagatctgacaagagttcagaaccaggaacgatgatacacttgaagcaatttaaactccggctgcgtctcacctttgcagccgtccttgtgtatttggaatatccccatcatatttcaaagccatggtcctgctggtcgagacgacgagtcattgctggagtgctgtggtttgatcttaagcggaaacaaatgacaaccctgcttttccttcacattgatatgccacggtaatctagctcagctgtctcatcgagatcgtgttatcgtggcgatggggcgcagactaactgggtctccgatctgatcggatcgcctgataggaaccgtaagagcgcgctagagcctagctccggaaccaaaaagttctccaatgtcttagatctgaggctagaccaggcagcgctaccgccgcggctgttcagcccaaaccgcacccattctcgtgcacagatagccgagattgttagacataagttaattaactcgccctcgtgggatcgaaatccttgcgatttattggcaaaccgaccttccgcgagattccttcggtctctcggctctcagcggtggatatcctgtctctccgtttaccatggcagccataagctaagacgaggtagaatgaattatgagcaggattgacttggatagccagcgcaacgaggtgaaactcgaattgagcggctgtaaactgtagcttcacagcgctccattcaaaaggtcaataagccaataattgcattcacacggtcaccgaatgggccacggaataacttgagatttctgtcggtcgtcagcaagtcagagctcgaaggccgcatagtcaaactttaacctgactcggttgtgttttgtaaggctttgccagtcgcaccttcgtgtcagctcctgcttaggggactccgaaggattgtcgtttttaaagacgaagaaatatggaatgtatcagcgaattctgaataccatctaacagtccacattgtttgagcgttgtccagttggcgttcgagtcaccaaacctggggtgatgcaggttggacgaactgaaggtccaggtccaaattgcggctgcatgcagtctgcacatgattcgttgaacactctaggcacacaacaacacgtgccatgcccgttcccagcttgtctagactcgatcacaacgccagctcactatggctcactcgattcgggtctggaaacgcaacacgcttgctgtcaaatggctttgacaatgtaaatattctgtttcatgcagcctaagtttcaggaaccgatttatgaacatccaagttgacctgacgccacagttccacgaaagggaattcacgatgcagtggatggcgtttgctgaaattttatcagcagctcaggctctgatggatccttgactcagtactcaggtgcagaaaatttagagtcaagacgtgaggtccgactcgaaagtgaagttggacaacaacgactgagttcttcattaccatcatcactatctggtctgatctctgcagagttttgtaagtcaagtgccatcgtccgaacccgtcagtgaacagtctcgttatattgagtaaggcgcaaacgtcactgctatattcgtatgcacgccgctgccctccggctagagagaagctcgtctctgtcgcctgggacggtcagcctgtatttgtttcggtcttcgaactccggtaacgaaccacggttgagctttggacggacttggagttggagctactacgagtcgcgacccaccgctgtcaaagatttccacgtggatatactatggagtatggccggagaatgattgccaaccgttggcagagaacctgatttgtccaaacttagtggcaactgagagcaactctcgggcccaaaatacccgccagtcgctttctctgtccgaacgcaggagtcaatcatgtggcttggaagcaagttagctgactgaatatcggttaccgctgttgcacagaggagacaagtctataagggcttcttgaaggcgtgctaccagcgcaattgctctccagtagagctaaggtctgccttcggtatgcctgcgtgacattcttgaatccctgcctggcttccatcaccacagcataaatcccagatgcggcacaccttgcggacaaatttctgacgtcgtcgattatgaactgtttctctccttgcggggtaagtttcaacttgaaccctactgaacacctagtctagctgacttcattgaggcgcacagtactatgatgcatccttctttcgaacctctaccgccgatgtcatgcttaccggtgccttgctggcactaccacatgggaactattattatcatgcctgccgtaagaattcttagttcctttactaaatgtttgcatacttcgagcctacggatgaggggctgcactttttagagagcaaattccaaaaaggatctgtgc

SEQ ID NO: 15349 - DNA, 578 bp, Emericella nidulans
taagacataccaaaactcaccagcccaatttgagctcggcttcatcttcttcgttcccgttctatgttatgagggccatggatggctccgtgctgcctttgccctacactctttatgggggtattctatctttcagacgtgccgcggcttcacagtaaaacgatatttgaattggcaagagccgtgctagcgcttaaccataaacggatgtaagatcaagttctctgatgttgctggatggacaaccaagtagacatcatggaatttgtcagcttctaagagcccaaaagattcagaagctcgtgcagatccctgcgggcatttatcggacctctgaacgggtagacgctgcttgcaagctctgtgggaattggcgtcctttttcaggtcagggttagagtcgtggaatgtcgttgggtcggccttccggtccacatcttttccatgccgcagaaccaccgtttatttcattgacaaatgtgccttgtaatcagtccgcaaacttcttgcgaacatgacggaagtcccaaccatctactgaatgatgttacacttcacaatgtgttgctgttcacaac

SEQ ID NO: 15350 - DNA, 2047 bp, Emericella nidulans
  unsure (1)..(2047): unsure at all n locations
attgcgactcatcggcgccaaagttggccccagacgatccagccagcaggattggaggagtaataactgcaagaataagcatgagtcaacggttcggttgcagtagaagtacctccagcaagcatcgccagcgcatgctgcaatcccagaagcaaagcgaggaccagtgggatcttatcctcgaggccaaagaacggagcagccctccttttctgcttcacaaatggaagtcttggtgtaaagagaaagccatagtcgtagtcaccgatcaggccatctctcgtggtaaaagcacgagcagctcgtcgcacgcggtctccaaatgtcctcctgggcctgacgtctggcccgatctgatctgggccgtccatatccaccgttgaacgatcaatctcgacgtatcatgcgggacgctagaagatgggcggggattgacggtttcctgagtcaaacatcagacagtggacgggatggccatcctatatgaactgaccgcagttcgcgagaccgacgtctgcggaagccgtgagtgaagcaatgaataatgcaaaatgttatcgcccgcgagcagagatcaatttaagataagccgttcgtgtgcgagcgccccaaagcttatctcagacacccaagcgaggcgggcggcaccgaatctgcgatcggactctgccacgttctggctgcaacccagggtgtcagctgtcaaaaccctgtgctgcactgcctgtggtatgtccactgtgatctttgagatctaacagcttttcctgcattgaacgatgcgggggacgttggagttggcacgttaatcgatcagattttgatcgcgtccaataaaacattgcctttagtcacgcgctttgctaactccccacaaaacggcctttccattagtgatagaataagcaaacctatctccactccagccttacagatactctgcacagtgcaagagttcttctcgaacgagacctcggaacttgtaccatttcaagcgctgtcacaggacagaaatggtgtgcacggactccaagtagtgaacggctcgaggtctagagcatgacgttgttcaaggggattcgctgatcgactcggagtcgcttcgagaggctgcagaggtcatgacgatgtaagatgtcgcggcactgtgctccggttccgaagtactccgaagtcttgcagtgcataacgtaatgcacgcctccttagtaataacgcgtcgagtcacgttccagaataagggcggaaatagcagccgcgagccacagttgagccacacaacgggtgcctgagccactctgttggggacactccggacctgcattcgtcgtcttgacccaacaaaaagatggagatttgcctcccaacaagatgcgaatttccaagccgtacatcaattggccgaatcccgtgttcgttccgtccctatcatggcctccagcaatcagtctttaccttgggatcttatgatatctcatgattttgtttcttccaattacaaagtgtctggccactccgtttcctaactttccggctggctgagtcgtccgcctctgcatcaacgcaggcgcctttgatctgctccccaacatcattccctgtgtcctgccgtggtggacccttcgaagtcgacctcgcccaggccgaccttttttttttcttctgtttaaatactcgctttctttcatttttcacttatcaaaacaaccgtcacttagagatagccatgtctgcaccaacggcggacatcagggctcgcgccccggaggccaaaaaggttcacatcgctgacactgctatcaaccgccatatctggtacaggcatgtgaactggctgaacgttatgctgatcatcgtcgtaccgctttatgggtgcattcaggcgctgtgggcgccactggagctgaagactgccatgtgctccggcctgtactactgtatcaccgggctcggtgtcacagcacgtgagatgctacgagcctcatgatggctgatgccgcatgctgacctngtcaagtcaccatcaggtatgggctcactgctcgac

SEQ ID NO: 15351 - DNA, 825 bp, Emericella nidulans
gagatttatgcgaatgcactacgcgctgaacacagcaaacactctgaccgaacgagacgcttagatcggagttccgctcggctgcagaagagccagcgaattgctatgaagacgagctggcatagcacccaatgttttggctgatttgcatgagcagagagagactattacgcatactcatgggatgttgggacagagcgaatgtaatgtggacaagagcatcaaaactctgaagggaatggctcgtaggtactgtcacccctatgctgacctttaatgggacagacttcaagagcgacgtctgtggaatgcaagctaaaaggttcttttcgtgcaggatgggtacgaattactctagacccgttgccataattaccaccctgatagctgtgttccttagggtcccaccctcctcaaatcggctagtccaacgacattcttgacgccattactatagattcttactgctagcgatactccttttcccgtctctatcttcacaaccttactaagggctagtcattatttcttgatcctatcctaccatatgtctactactaaatggacataattatatgcgcaccaaaaatatctaattaaatttgctacttttaccttaaatttagtcctcttttgcactctttcttttttaatacatgtcatttaatcatacatctctttttttcatccaatataatttctgcacttatggttcattactttctactctttctacatcatactcttttccactataatccttaattttcactttcctctaccttcatcttacccctctcataaatcatttctccctttccttat

SEQ ID NO: 15352 - DNA, 1781 bp, Emericella nidulans
gtgccatccctgcgagccagtcaaggagtccagaaatcgacctctgacgttcacgtcatctggatcgtgatgagcgtataaaatagtcgcaggcgcagtctcatagcttctaaataaagcaatcccaagtgcccaaaacgtgctgttcgagatgcaacggggcgcagcccttaactacgaaagtgactatcgggaaacaaaagataccaggagacgtaggtgttcttgccctaaaacattctgccctgttccagtaacgagactttgtgaaacagtcaactcgattcaaaatcaggcgcgtgagaggttgagaaatgtgggactcaacgacttgacgactcgacgccctggctgtttgtgtgtcagcagaccgttcacggactccgtatggctgattgaagaggaccgtgagccaatccaacaccggatctggtgaggtgcatatgtaaggtgtccatcgatcggtctaaaatctttctagaacgctttagaaggtcgagtcgatcatggttggtcgttcaacggccaaggtttgaagaagtctgtaagctgacgtccatggttgccatgggtgtgcatagcgaccgcatcaaacgtgatcccagctgcaagctgttctaggaacgccatggctggtcgatgtgcgtgactctgacttctacccatggagtcgaagatgtgcagcagcgagaaagtgacgaagctctactagtaaaaaaaaatcgggatgttgggctcttagaaagcaggagattagtggcgatgttgagtttagggttgtgaggggaggtgtctgaagacggagaaccccagcaccatcaaacccggtaataacactagaatgattggccaagagaatagagttctgtagtaacatgtagttcatgcatcttctggccccatatcattagacggagagaaggacagagaatccttccattggcattccagagccgtgcttgtgcggttgatggatgagaacaaagaaatggccgtcgggctacttgacttgttggttcctgcgcaagccatccaatgatgtgacctcctgaagacacatctcatcggctcgatgagacagccgcggaaccgtagatcatgaccgggcacctgctgccacgcatcaacggcctgtaagcccccaccagtctgcgccatctgcaacctcacagaccacggacaagctacagaagctgactgcgaactgaccgtagtgaggctgagcaaatgatgtgctgagcaagtcaaagactgcttgggtagcacacagtacacggactcaagggttttgcgtgacaagttggcgcaatcatcgaccgcgaacagttcgatatcgtccaaccgcaaccaagccttctgtcatcgcaccgctctccccttgctctattattttatatatctcggcaaaaccttgtacggccgccacatgcgtagatcctaccggggcccaataaagaccgccgcggacggcgaggcggctgagaagtaagtgtacacaggggtgcagcccacgtcatggaaatgccagtatacgttcgtagattctagtccaggagcgccagctcaaagtgaggagacctgaggaccctcacgactgcactggatatggggaagctgcacctgccgaacccggatctgaaagacggccccaatatgcatattgtactccgcatattgtacgaggtgatcctcacgtgattgacaagcatcagaagcggaagggactcgagattaccgtctatactgtgaccggttaggatttagaggatccccgggtaccg

SEQ ID NO: 15353 - DNA, 899 bp, Emericella nidulans
tcctctgatctactcgcgctacgcctcagactctcgtatgttgaacattcccagaacctgaacatcctctgggcaggtaggccgggcttccgaaagagcacggctaacggggtgatgcgttcggcataggtgaacatgatgttcttatttttcttcatatctatctattatttttctctcttttataactttatccttatttatatatccataatctctctacccttctcctttattattctttcttcttttttttcctcttcattactctccttctctattcttttcaactccttacctctcttcacctttctttttctctcctcaatatatcatatcttctatttattttatcttcttacccttctacacttccctatacatattatcctatctctactctacgctctttctctatacaattattcttacttcctttcattcccatattttaatttcttttctatcttaatctcctctttcttatcatatcttctcatcctctttcctttcttactttctcctcttccattctacttattttttatcattacttcctatctttattctatatacttaatcctactccttcttttatattactctacttttttatcccattcctcttcttttactattttcctatctaatctcattatctcttactaatctcttcttcatcttcattattaacacttatctcctttcttctttatttactttcctatccttattctcatttttttatacttccattatttatttttatctaactatcaccctttctactctccattcttcttctttactttattacttcctcttctttcctctattcataatctacttttctttatttcctcatatttcttctctacatctatatatttatccatcta

SEQ ID NO: 15354 - DNA, 790 bp, Emericella nidulans
tcttacctaggcccgtccgtggattcctacctgtcaaacttcatagcaggggcacgacgccagattaccctggccgcgttgagcgccgccgctcacgctcgcgttcgccccctcgccacccaaaagctcacgggggctttcgctggaaagacaagcgttcaaacaaggatagccagaatgaaggcgacgtacgactagatcgtgggtaccgaaatcgctctcctcgtcggccgtatgaccgagaccaggatcgcgagcgggatcgtgatcaaggccatgatagatacagaggcgactatcgagaacgcgaccgataccgcgaccgataccgcgaccgagaccgcgaccgagatcgaaaccgggatcgcgaccctaaccgcgcacagaaagagaagaaagaaaagaaacccaaacctgctgcgccgtctgggtccggggaagcactgattgtggtacatgttaacgaccgcctaggcacaaaagccgcataccttgtttgccctccgcacgatcgggaacttcaaggcctgtggccgccatatcggcggagacccatgagatctgttaacggcatggggacgaccgttaagacctatcacctgcagatatagatggaagggggcactagtctgaggtgggccgagattgatctctgtcccgagggaacgggctagggtaaggcggtccggcgtcccgattggagggccctcgggaggggtgtttttgcacacccacaggttttaatggggacggtttggctacagctatctccattttttgcgtttttttc

SEQ ID NO: 15355 - DNA, 494 bp, Emericella nidulans
aaaaagcaaaaccacagacaatttctgatacaactgacgaccactaaatcttatatttttttccacctagagtgaatttatcggggagcgggacgtgcaataatatacccccgtccctccacatttccagatcacatgcaagaaaaggcccacatagacctgtgactcccctcgttaactggacgtcaacctgaaacgcacacttggggttccaagcataaagatcccactttacatgcacttcatcaccctcacatatcaagaccatatgtggtttaactatgatttacgtgcttagacaaaagtaccggccatgcttaacttgccgatcgcaaaaccataccttaaaaaccactcccacaaatctgatcacacaaatacccaccggatcggtgaccggtctggctcttagacaaaacaccctgttctttcgagtacaagctctcccatccttgcgatgtaatgatttaaacaggctcctcgtacactcccaa

SEQ ID NO: 15356 - DNA, 2403 bp, Emericella nidulans
gcattctgcagtagcagctcctgcatgctctcgtgcggccgtgcctgagccagatgagggccaatggcaggagaaccaaccacgaaagactcgtcactatccgactcatacgagtcatcacctccctctgcagaccaaccgcagcacgtccgcgacggctcgaacctgatcgtttgaacacattactctcttccagcgaaggagcggtgttcgggataacgtacgatacaagtaacgtgcgaattgtccgctggcggtctttgagatcgggcagggcagggccaccacgacgattgaccgaccgcttttgtcgcctctggtctctttgaaatgatacctctgtcctctcaagctccgcttcattgagttcgtagagatagggtgtgaattccttggcggcctggaacggccgaaaggacgaagtgagtggtgaaggtaagaaggatgctttcaggtccggatcttcaacaggccgtccgtcgaatggatgtgaaacgatgtaaagcgactttgtgaacaattgtgactgctcgcgaatggaatgagcaattgccgttgtgaactcgcccgaaagagaaagatcagtcgtcattcgcgcagcaaattcttcggggctattatgcgggtcattgatatcccactcgaattggtcaaccagggtatgttggccgatggtaatgttcaatttgaccacaatgcgcaattcatcgtttttataagcgctatagggaaggtgaggatcgagagcttcctcttcgatgtgaacatgggggtagaaatcacaaatttgctcctggatactctgagagatcattcgtaccagcgggccacacgactccaaaggcaagcctaggtcctccacgagtttttccgcgaacaagtcaggggacacgactcggtcatgaagattccatgtaaaggtatcacgaatcttcaccttttcccaatcgatatccaacctaatcggtaccagatgttcaagctgctcgctctgtgtcttcatatcctttcgcgagacccgtagttcccgtgttttccgatttccggggcggcgccgatgggcgggatatagcagctgtggatgttggttgcgcaagtcggtacgagcattcccaaaaccttcgtagccaacgccgtaaagagcggccgggttcgtatgattttcccgtcgtaaggcaagatagtaatcacgttcggcgcgcttttcttgcaggagctgctgactcgggttttgccatgccgtcagagcggaatgctggaattctctattgacatattcatccagcagaatcttctccattggggtctctcgaacacgaacaggcaacgcgttgccaggggaagagggtggaataaaggccccatctcgcgatcgttttttgccaggcgcggcaccgttggcactgccattctgtgagcctggtgaagtgtccatattggaagcatcctggcccgatactgatttgggtagtgacacgccggatgctgcaagaacagctttcgcattgtgtttcccttccccaatcgtatctgatccttcgatcccatgatccgcaagaagtgaagaatcgacgtcgtgatcgaagtccgcagctccatccaatagatccgaattgttctgaatcgcatccgactgcgcgtcagccattccctgctgggatgaatcggggaatgccattattggtaaacctgcttcacgccggtaccacgggtcttctccaacaagacaggcgagtcacttgcacgaacggaacaagcgcagaaattcgagaagtatccggaaatttataatagcattattcttcaggaaaggtaatctgaagctgtgacaaaatgtattagtctctgcacatatgtttctccgcgagtaatgatcacagaagacgcgaccgcgcaccaatcgaagactcgcaacgccttgccatttgatgcgactaaggtatgttaaagattcgtcggagagaaaggcagtcatccgcaaagcgagtgagagtagcatcacagtagctggtagggcaaggaggagcaagccacgaatatccaagccaatggatctgatgaggggacatggtcaagcgcagagagataattatgcaagccaagctggggaatgaaagggctgagataggaaagtagagatactaaccaggaattagagtaacagagcaaagaggctccagggccaaacgaagcactctatgggtcttcgtgccgggtctgggtctttgcgagagaaaagcgcccggaaaggagcggcgggatcagctgacagcgctccggtagcacggcgcgtctcggacccactggcgacagttgtttgtccctaatgttcaaaaaaaattcgtttcgctatgaaagcagctaccgaactgcgggggttgccggtgctattaaatcacgttc

SEQ ID NO: 15357 - DNA, 859 bp, Emericella nidulans
  unsure (1)..(859): unsure at all n locations
aatggcctccccatatgagggtcaagggtgaaaatttcttctttttagctgacctgcacatctgattggagcagggactaatgtngaaatagcggccacaaaggttactaggctctatatgccaaacggccgaacggctaagcgggacacctccagatacaggaactgtcatgctggcaatcaatatatagaggcacgggtcgcttgaattgaaccaatccgaggatggggtaggcaatcacgaagattttttagcggaacgctgattcgcaggcaggatgcctttcgcaattgtgcctctgaccgagtttaggtgctatcgaagcacgccctgctctcatggagcctgttcaaactcaatgcgacgttcacgggactcaggcccaagaggctgcattctctatagaaacatcaccaatatcgacactatgtgtgctttgagcggcccatgaagacttgcgagatgaatattcgatagcgaccaaggtgcgaaattgccacaaagccaccatgccaccaaacgaaaggcacctgagaagttgccggcacccgatcgtcccgggaagactcctagattgcctgaacctgactaaccccttctaggttgaacccgcggtgaaggacacatcacccttgtctgcgcatactgggcccctttccttcatttatggacccccccagcttacgcttgtattttgaggcggcccacaacacgactgcctgaaagagcacccatggtgggacctaattacccttctttctacccctgcgccgccccaaaaccttgctgccccaaagattgacacgaaactcccctttaagccccttcttcttattttttttttaggttgtcgcacta

SEQ ID NO: 15358 - DNA, 456 bp, Emericella nidulans
ccattacctgatgaatgcttcgcttgtatgtataaaacaacctctctctttttacggaaagatgcagggacatatggggggggggactttttagataaaaatcaccccactaagtacgggtaaccacaagaggcggatcgcacgggaaggggatgttggagggattacaacctatctctgagccattcttgcgctggcgtttcagggcctctggccccttgggtcagagccgaccatatcatctgtgcggacagcggggcttaatcgccaaatctctgatgaaacgagacgctgggtatatgtctgcggagagaaaaggtggcgatgagactagagatcgcggcgcccaaaacctggctctggctgacggtagtcttagtggacgcccatacccagagccgaccaaattttaaaggtctagaccccccgcacctggggatataacgcgcccccaaa

SEQ ID NO: 15359 - DNA, 406 bp, Emericella nidulans
gggacacacttggagtatattgcgtccgatggttaggtggcgcacggaagggagaatgtctaaagctatgcacgcaaatgacaggctttcaaggatgaagcggagaacaaacctgattcagcgtgaagcgttgtaaagctgacattactgtcccaaaatgtacgcctattttgaaggtgtactgcagccggaagctaattcataataaaacttgacacgttaaagcaaggattcgaagactagaccacccgcgatatgggggtgaatggaggtttatttctccacgacaaagggattagatcgccggcgatgatacgtttatactgaaagtgaatgcacacacctacgtcacttgagacatcttctgagccagctttccgtctgctgcccagggatcttgtgctat

SEQ ID NO: 15360 - DNA, 618 bp, Emericella nidulans
gaagagacccacagtcgattacggtttaaccggcgcgggctttatggaatttcaaagagcgaggatggctcgggggggaggggatttttcatcacccttgccaataccgagcgcgagttgaacgggcaatgcacgctcttcgggcgccttgagggggatacgctgtacaacatgttgaagatcgcggaggccgagcgcatcgaggggaccgagcgacctgtatacccggtgaagattacatcttgcgaagtgggtgatctgggaccgttcgttgataaggctaagaagaggcaggttgttgctacagggccgaagactgaggagaagccggccgcgaataagaagatgaaggccaagcccgggaaggccttgttgagttttggaggcgactatgaggaagacgaggatatgcctattcgtccggcgaagccaaagttaaattctatgcttgttacggacacaaagcttccataaaaggagtcatcgacgaaaggagaggccttgcaaacacgtaaacgactctggacgccatttgccaagcgacaaccccacccatcgcttcgcccaaaaccgaccaaaaacccgagcctcgaagcacttcatacccaacctgattgg

SEQ ID NO: 15361 - DNA, 2373 bp, Emericella nidulans
cattccagagccacgatgccacatttaacgtgacacacgcccgcacggcctgattcgtcggcttccccgtgcccagagcacaatttccgtgccccacagtaattgactactggtgcaagaggtctaccccggataaatattctggctgattgaacagactaacccgaaccggacgaggttaatttctctcgaccgggcgcagacactgcagggttttctcccaggttttctgacgccaggttccttgtttcgctcaagtgcacgctgctcgaaccatctcgaacgatcgcagttcactgtcccctgcgggtctcggggtctagacatcgctatatcgctaatatcgctgcttgtatcgacagggaacggacgccatcattcttgagaagccactgaaccatacggcgtcggaccgccgagcagccagccaacccggtctcatcgtactgcaggcatcgacaagcccgttgttgggaccgcgggcccgacgactgtcccactgctgacgagccacgaggcctgccgttccgatgccgactcgtgcacccgccaagccgtcaggccgtcaggccatcacccatagcccaggctcgcgagtcatcagcgagcccggtcgacgggacggccgttggccgttggccgattcgccagcattgatcatacatgctgtaatgcgctgcccccgcggagactcgtcggcgagcttgcccgagtcacccggttggcatatcgccgaccagccgtgagcgggcgggtctagtatcagaggtcgagttagtatcaaaagtccagtagcacccgcccagtagctatcagtttgcgtatgcccatgccggtactgattccagctgttcgtctcgtgtgacccgatctcgaggtccgctctgactcgcggtcagcccgtgccatgagccggggccggttgcgttattatagggacagggagggacagaggacaagcaatctattctcccgctgccctgctctattcgcgcaatctactaggtgcttgtgccaggttcggcggctcgtcctgataccagttcattactagtcatagatacaatcttcccaaacatagatacatcatttacgtcctttttctggccgttcacgtagcccccagctcccggcctctcttctctggagagagccggctggttccccgcctgaagtactctcgcatgcgctggagccgaccggggtggatcagttagtctccttgctcgagtcattgtagccgtctcaactacctcagaactgtttcaggcggcgcctcatccccgctgtttctgctagaccaataccgcggttgacagaaggatcctagggagagtttctaaccaagaaccagaatcctcggccgctcgactgggcggcgagagcagaaacagccgtccaaacagcggtccagtcgtccaaacgtcaggctccttctcacacacatcactcttcgaagtccagatgtacgctgaccagagggatgcctaaattacacagtggcatatccttgtattgtcaggcagaggaccattttaaatctactggttgactactgttatggctgggtcacgactacagtgtcacggctagaatagtttcaaacggccgtccacttcaacaataccccatccgcattcctcatctgcagcgtcaacttggagacagaatgtcccagaagcgccagcaatgtctctcagagcgcgtccggctcactgatccccgccgtcggaagcggctcgcatttcccgccgtgaagatgaaaagactcccgctgatctcctcgttcgttggcgaggactggctctggcccaatcgtcggtcctcatcagacagctgcagtagtagactgaggaattattgcgatggcctccgcttccctttttccttctctatcgctttgcgttcctcatccagcacctcctgcacgtaccccggcgcccgctccatatgaaaccctagcaactgcagggccgcagcataaatgaagctttcataaactttggcagcaagaatgcagcctccaggagcatctgcgaaacgatcgacagcgtctcaaagtacgccagcgtccgcgtcgttgtctcgccaagttgcgagcgcagtctcggagcccactgttcttcttggctgaggccggctttgtcgatcacgttcagtgcgatgctctttgaggccgttgagagcatggttcccggggtgctggatgatatattggagcatatcctgcgcttgccagatgctctccgtcgagacggtgctgctgatccgttgtcgcggtctgcagcgaacattcgtcgatgatgtttcctataagttacaggtccgttactgaatgaagggtttaaaaaaatcctgataacgggcgaaaga

SEQ ID NO: 15362 - DNA, 542 bp, Emericella nidulans
attcatgcctgagtgggagagcctggattaatgacacttgttctttctaatatttgacgcgactcgtagggcatcgatctgagcgacacggtctgagtccgactcgttgtcatactagtgaccataacgcggctctgcttcgcatccctgtttgtgatggagtgctgtgacggccgcagcttctgctccgtatatgcggctcgacagcatcataaccagcatagagcgcacctggatactttgctgggtgcacacatgcgtacactgtttcatggctttacatgaatgctagggcacggaaaaaagcagcgctggggaacgtattgacttcctgacctgcatgccatgtggagcgccccgacgaggtcatactgcgtccgggtcgagtggacttgacaggccggctaggccaactctctcgctaccagtatacctgttggtgacagcggtactgcggacactcgtaatacagcgggcactacaggctagcgttcatccacggttttatgatcaggtatgtattgaccagagaacgcggatgg

SEQ ID NO: 15363 - DNA, 880 bp, Emericella nidulans
  unsure (1)..(880): unsure at all n locations
gaaacatgaatcgcttggtgtgtaccatccggataccatagcctcnttgcataatctggcacagacctacgaatgtcagggtcgtctggctgaagcagaagacctcgcggtgcaggtgctcaagaccaacaagagggtcttggggttgaagcaccccagtaccgcaagatccatggccacccttgcagtagtatatcgcggccaggggcgactagaagaagcagaggaactactaatagaggcagtggacatcagccaacacgtcttcggcactacgcatacgtacactgtgactatgacgtccgaactagccacatcatattatctccaagaacgatggagcgaagcagaagagatccaggaccatgtgctcaagctccgtatggagaagctggggcctatgcatccagtcacgctgttgtgcatgtatagacttgccctgacctggagggcagcggtagcacaggcttttgcgtttcaaatgatgaaggagtgctttgaggcgtgtgcaaattttttggtacctgtccttctgctccattttgtttaagatggactttttctcctgttagttttggtatatgttattttctcttctggtcatttccttagcacaaaattcttctctgtaggcccctattctcattttttaaaaccttcaccttcccatccatagggttatttttttttttttctctagattttttttgttctgtgattccaccttatcctccttttaatattaccctctaagctcttaagctctttatttctatttcactatacttctcctattattatcctttctcctggtgatgtacctttctatttttctatcgttcatctttacctctatttttactactctctgtatattttc

SEQ ID NO: 15364 - DNA, 940 bp, Emericella nidulans
tgatgtatacaggtagggttgagcgtatctttctcctgggtcttgttattttgggttgggagattcccgcgggcggactcaatgcgggggttgccagtctgccagctagcaagagtcggtcaagccagagcagcctccgggtggagcggaaacggcgattaaaaggggcaaggaatgaatccttgttaggagtacagtttatcatcaaggaatgaggcttagacgcatgacacgtgggcctactactgatatgtatgcatccaggagttggcagccctacgggatgcagcttacgtggacccatgagcccgaagaacagacttgagcaggagacgtcattttcagccaggaattgaccattacagaacctgtgcttgatcgaggttctaatgctttgaggatggggccattggggttcgccggatcccacggtttcttcactaaggaaggggaagctgggccattttcacgttttaaagaatcggttagaagggatattaaccttctcgggctgggccaacgtatctcaggaaagggatttaggccgaaggaaggtatttcaatagagccttgacttccgaatcttggggactggccaataaagcttttacgttaacgtttgccgttgtggcgacttttttagccccataattagggtctgggcgccccctttgtgcgggttagtcagcggcgtggcgaaacccgatgggggttaaacaccctcttttatacccccttttaaaaaaatatgcgccccaaccattctcctcctttttttgttctgcaaacccttacaacaggggggtgggtcctcttcaattgttactttacgttgaatatacccttcctctcccctttatttgattgtaaacttttctctcttctgtaatagtttttttatttttattatttcatctatccctcattattcatttcttta

SEQ ID NO: 15365 - DNA, 422 bp, Emericella nidulans
aattcgtcggtcaggggaacagggaaaatttacactgtgtttaattcgggagccgtaccaggaggtggtgggagccgcagtgcggtccacgggtgacagctgcgggtgattatgacattcacggaacggacactccaggcttgatctactggatgcatttcatggcagattgtctggacaagtctacaacaggactgtgactacggccgcgttggactgcataactacacactgatattatcatgcatggacagttgacacgcgtgatgagtgcagcgattatgactgtgggctcacagaactgtttggtatactctatatgcctaggctgactaaccaaactaagcagtcgttatatctcattaacctgcaacacatgtttgtcggtaaaaagtcgagagagtatattacgtgctctgtat

SEQ ID NO: 15366 - DNA, 3494 bp, Emericella nidulans
agtgccagtgtagctcaggtgcattgggcccggttggcagacggaagaaaagttgctatcaagattcagaaacaagagattgcgcaacaaaatacagtgggatctatgggcttttaagtatgtttttttatcgcttcagttattgatctttgatgctaatactacgaagggttgttacctggatctacagccgcattttcgacctcccgttctatagtcttgtcccttacgtcagcgagcgtcttttccttgaaacagattttgagaacgaagccgacaactcggaaatgatggccaagcttgtcgcgggggagtctcgccttcgtgaccgcgtatacgttccgaaagtttggcgtgagctgagctctaagcgcgtcatgacagcggagtggattgagggagtacggctctgggacaaagatgctatcacacgcacctggcgcggaggctggcgcgagggaagccccggctgtggcggaacaccactggactccccgcgggccaacagatccgcacccgcacgttcaagcttcaagatcaaaccggagcgcaacgactggaggggcaggaacggccgcggcggcctcggcctgtcactgaaggaggtaatgacaacaatggtagacctcttctcagcgcagatgttcctttggggcctggttcactgcgaccctcacccgggcaacatcttcatccgccgcaagcccaacggccattccgagcttgtccttatcgaccacggtctctacatccacatggatcccgagttccgacatcaatacgcgcgcttctggaaggccctcctcactttcgacaacgccaccattaacgaaatcgtcaagggctggggtgtcaataacccggacattttcgcctcggcaactcttatgaaaccataccgcggcggcaacctttctacgcagcaagggattgaacgccttagcaaagctgagcgcgctcagcgccactatgatatgcaacaagccagccgcaaagccgtccgagagatcctaggcgacgaaaccaaatggccccagcagcttatcttcatcggccgtaatctgcgcatcgtccaggggaacaaccagttcctgggatcgccagtgaaccgtatcaagataacgggcttgtgggcttcacgggcgctggttgagtcgccggatcttcgtctgaccgagaagattcgtaactatggccgccatttgcttttccgtgtcgtacttttttctagtgacctattcttttggtttacgaaggtgcgacagtttctccatctgggcggtggcatggaggatgatcttgaggcgcagatgcagtctgtggcaaaggatatgggggtggaattgaaccatagtatttttgaggggtgacatatcgaccgtcttctccactgtagactatgtagacttatggttcgggataaaaaggcactccagtcatgtcgtgatacctggttaagtttattgtacccgccaatggaaagcatgtccaatgatcaaaggcgcatttatcacgatggaatttaatagttaaaggtctgaaaatttttatcgaagagaaggaggaatcacatatttaaatatacatactcgcttgcttgctaaccacctcaaaaaagataatgcaacagaagagtatacagaacctacatcaccactgtaagggaagggtatcatcagatcatacatagtgcttagcgcatgtagcttgtcattatggtgttgatttagtcggatcgtcagagctgttcactgatcttcccactcggaaaatccgagagggcgccattcctggcccggatatgcagtgctggacatcatgatttcctcactggaattgtcgtccgtgcgggcgggtagctcaaccgggccttgtaatgcattgatcgtgcgcgcgccgctgcggtgcggatgatcgggagtggtggtattgggctgtgcttgtggcggagtgggttcggacgctgatgaagggtgagggatgggctgaccctgtttctcgtcctgcggttggaatttggaaggaccgtgttcttcttcgtcttcttggtaggtgggcaatcgggtgctggtatctgtgccagtgccggtgccattgaggacgccctcagtttcatggctccaggaaaccgatgtactcgtcgctgcctcgtcgtcgtcgtcgcctgggatggtgattttccagggtaattcttggtcaccaatgcgacttgtgcggggatttgatgatcggaaggcacctaggttgaaagcgggatcggtggggtcatgcttcggaaggtggcgctcttcgggccgcggcgcaaaggctttgggacttcgggagcggagatgcagttcttgagcgtaggtacgctcctcagaacggccgcgagatggcggcgtacgaggggtcggagaaggcagggacggactgtatcgcggggatgaaacgtggggttggcgatgcggagagacaggcgggggatacggcgggaaacggggcgagagtcggccgggatcggtgggtgtagggtcgctcaaccttatatggtctgagctagcagtgccacggaggggctggtgaaggcttgcgacggagaaggtttctggcgattcatgcgcaaagtatccttctagaggtgcacgtgggctgtgaatagtgttgcgaccgtctggaagggatagtggcctttcatggtaatcaaccgatgagatggacgagccggcgattctagagtccggccgtgaggtgactggtgcgaggtaatgcctggtaccgctctccgaggaggattcaattataggctctgggggcgcagactttctatgccgagtgcggctgaaaaggccctaggaagagactgagaatccatccacacagtcaacatgacgggaggaggacttacggtcaatcgatggaacggcttttttgacggttgctcggtctcaaaatcagactgactctcacccattgagatacggcgaaaccggctgacgttcttcagcttctccatgggtgacgagattctttgggatgcggggtcccgcgacgagaatatgtgatctggccgtcgcgaccagtcatgcttgaagcgaagggccgcaggagtcgacgggtagaggtcgggcaaccgttgtggtgagccggcgcagtttgaataacctcacgatgagacgaaggctttcaagaaggttattcttcctctagactcgaggcactaactgcactcttgtgacccacggcgccgagttcttccgccaaggagacgcggctgggactcctcgcccacggctgaagagggaacagagaagaacgaatgactgccctaagctgtggataaaatcagtcgccagtcggaataatgcttgacatggacaaaaagtagcagaacaagtggactcaccaagcttcgaagcaagtggcggcgacgggtctagatcgtttgctgcacgctcaacaggtcaaggacgagcccgagggcgcttgggcaccgcagaagagtagagaacgta

SEQ ID NO: 15367 - DNA, 375 bp, Emericella nidulans
gtgtgtataagctctttttggggggtgatactgctgtgggtgtgttttgcctgcatcatcctttgaccgtggcggtacacaatttcctttggctctactgtctcactcagatttttctgcacctctatggcttatggaatcgcttaaatcgtctaaaaagtcgggatcaaaaatgcgtcggggaggcgaatgataagcacgtgactgtaccagtggctgactatggattccgtagtgaaaaacgtatccaagttcatttagttcacgcccgcatagtttaaacttatgaccatctgagtgacggtgtgagtgctgcacagtacactgtgcacgggtacttagtgcatttttttcttttcctttttatcttttgtg

SEQ ID NO: 15368 - DNA, 783 bp, Emericella nidulans
aaagcttctcatgccacggagaatctaacgcggcggatccctcaaaaagcgctctcatactcgcccaatcatcaggagatgaggccgacgatacagaaagagccaacgcatcccctgggtccaacctcaccgtgcaagatctggcaaggataaaccacgacaaggcgcaactcgcatacctctctgcttgctcgacggctgagaactcctcagaagatctcctggacgaggtgatccatattgcaagcgcttttcagctcatcggctttccgcacgtcgtcggaacgctatgggaaatacgcgatattgctgctgtggccgtgtctagactgttctacgaggaattaggacggcgagtagtcgcgggcgagaacttaagtaggaacattgcctatgctctacatgaagctttgaagcgatatagaagtactaaacgagtatcccggagcaatgatgttctctcatgggttcccttcgtccatatgggggcgtgaatcgcgtggttgttctgcttgcatcatacggctagctatacacattatacattgcttattgcagaagactgtgttggaagagacgatagcatagacattcggattccgaggaccgcaagagctggaatttggtgattgtctgcgtttccatagaccagggttccgataagacaaagctgaccggggcttacgagccaggctttagggtcatttttcaagctgatgtgcataggaacctgacgtaaataaaaaaattccattgaattatggcgaggtaagtggaaagtat

SEQ ID NO: 15369 - DNA, 908 bp, Emericella nidulans
aggcaggacaaaacgcttagcggtggagcgtttatatgccgaagataatagcgccccaaaaccagcacggaaggggggttgtgcaggaaccacaaaggactgggcccaaaggcccaaagagaaggacatccaaacaacggggattccgaagggggcggggcggttatcgtcatggcggcgattagcaacgtaaccccaaatctagaggtgacgcctgtgggatgggcgggcagtaaaaggccagagcgaggagaacgacaaacaagggattggctagataggtacaatgcacatgaacgagcatgaagccatcgtacacgctgtaaaacaggaccatttgggcgagaagaggggagaggacattcgcgagagcaagaacaacttgggatagaatcaaaagcactcaacgagcaacagagcggccagtaatgcgagaaaaactgtttggctgcctgtacatgaaatgctagccattatccggcattaaaaattgatgccagaaaagaaggataagatgtgaacacgaaaccctgccaaagatataccgaagcgaaggggtccaagaacaagccgagaacaggggccgaattgaaaccccaggaatggccgccgacccaaagaggggatgactccgagacatccgcaagtgtacgcgagggaacagagagagctacctaacaactccaggtgcggaaaggcctggtaaaacaccattcccgtcaagcgaagaaaacggccgcgtttgcttaggggggaaattgatcaaataacaaaaccccgaagaacttcaaactaaaggcttttccggcaaagtttatcggggcgaggtgggtaaatcctattaaggtatttctttaaaaacatctcataaaaaagagtatatatttataatggtgtgggggggaccc

SEQ ID NO: 15370 - DNA, 420 bp, Emericella nidulans
cccttaggaacccttacttgttatggggattatgtgtctgtttgactctctggatgagggaaaatcggagtgttatatatgactttgggaaagcctggcgcatcccagggactacgaccttggtctctgtgtatctaatgaaaggtaaagctccttcttttctaaaactgatgaaccgagatgtagagccacgctagccttatttgttcagcgtcatgggttaagacaaaatttgctcccttatcactcacataacgaggcctcctcgtgtcgcacgcatgtgctggggcagttcaggtctaaagttggcctgactccgtacagtgacttcgattgacgacgactctgccattatctcattaagctactgtgcccggcagcccaagaggagatgcggccatccttgcgatttgccctctc

SEQ ID NO: 15371 - DNA, 397 bp, Emericella nidulans
aatccctgggcgggcggcggttaagaattcgattcccgcttgcgttcttctcaagccgccgtacccgaattctgcggggggggacggacacacaccgggccatgagcggcctactacggatgctatagactgagcggaagggggctggtgtatgcacagaaaacccggggcaggaccggcgctcgtgagggcgagcgaccgaggagcatatggaggagggaagggctgatcaaatggaaccgagacgagggagacaggccgcggtgggggatgtcatagtcaataacgagccatatgtttaacaagacactagccgtgaattgctgggcggatgcgaaagatgactcacagctggctgccgcaagccactgggtgtccattcaagagagcgcgcagg

SEQ ID NO: 15372 - DNA, 2696 bp, Emericella nidulans
cagggacattgttggaagctcgtctggaacaagctagtctcctcaaacgcgtatgttctcgtcctcattattatctgcatcagatcatttagatactcacactccccaccaggtcgtcgacgccatcaaagatctcgtgcagtactgcaatttcgactgcaatgactccggaatcgccctacaggccatggacaattcccacgttgccctggtatcaatgctccttaaggcagagggtttctctccataccgctgcgaccgcaacatccccatcggtatcgatctggtctcgctgaccaaagtcctacgcgccgctcaaaacgaagatatccttactctgaaggcggacgactctcctgatgtcgttaacctgatgttcgagagcgcagagacggataggctgagtgaatacgatataaaattaatggacattgaccaggagcacttggctatcccggagacagagtacgctgctacgattgagatgccctcggcggagttccagaggatttgcagggatctgaatgccctttctgagtcaggtgcgtggctggctgtcatctctccaattacatcgagttttactgattagcgtctagtcgtcatcgaagctacaaaagaaggtgtcaagttctcctgccagggtgacatcggcagcggctccgtcacaatccgccagcacaccagcgtcgacaagcccgagcaaaatgtctccattgtcctcagtgaacctgtcgccctcacattctccctcaaatatctcgtcaacttctgcaaggctaccaacctttccagcaccgtcagcctctccctctcccaggaggtgcccctgctcgtcgagtacggtcttggaagcggccatctaaggttctacctcgctcccaaggtgagtctttccaaaacaccatctcctgaactatgatagtgtggaatccgtacttatggaatttttagattggtgatgaggagtaagcgcggccagtcggaaaccagttatgatcacgaaagggatgcattaggtgacgggcatgattctacctcttttgttttattgttctttgcttgtccgagaatactcctgggtgttgacgatatctgaagaggatagacgtcttttattataatatccattctagatatcaaagcgagatgttttgcactttattaccaaaaggttctgtcaatcttcattgaacattctaccaccatatatatccaaacgagcagtactctaactgagcaaacacaagcccttcagtaaacctcatccaagcatagtccagtcgacataattgaccacctctcccccccgcagtatccgcaaagacttcaggcattccaaggcaagagccagcgccgcgcccctacgagacaaagccccaggccaaaccaattagcaaggccacaaaaccactctttccagcccccccaacccaaccaggagaagcggggataaagagaaaactaacctgaagaaaaaatgtgaagcgccatccccccagaataatcggaatcgaatgataccagtccctatctctacaagagaaaataggggcaaagcatgctgcgtattgcactaaagtgtcgtgcctgaagacacacacaatcttcgcaatgactctcccaaggggaaaccgggaaggacacaagtatccccccgccccgatgtttctgatgccgattgcagatgtgcctcacaccagacccttgcgggccgtaccggccgcccgactcagctcgaaagtcgagtcggacaacgggtgcatgtggtttgaagattcctccgaatttctcatttgcggaaatcgggccgtatggcgcggatgatgcgtgatgtcatctggctatactggcccggacaagacggcgaacgtcttatcgtgtgtagcaaagaaacgcagcattggggggatggctggcttcaggaagggaaaagggaggagtcacttgtcagcgagaactttcctgagctagacgatgcgcagggctgagccctatgcagcactagagcgcgggcgcttctgaccgctttccgataaaggctaagaaggctttagcctgggtgagaggtttaataacatcacaaataggtgggcttataacacgtgacaatacgcttatggcttgacacctctgatagctctatttggcgtgctgcatagccgcgatgctaccgttcattgattaacgtgcctcctgatttttgagacaatgttacctctctcccgcctgagtatactggtagagtcgggttgtggtggtgctgtctcacttccgagctgcgaagtcagcatgtataatttttttgaagctcgggagcatttgcgaaccacacgcgacaagtgtctagtgacctcagcaacagacccaaaaggtatccgaaactcccgcgagagctcgaagaaatgccggcccatgatctcagacctcttcgaccctgctgtcgactccattgctccgacgggaccactcttctccagcctcgttgcgggccttaggtggcttgcgtgtgaagtaccgccacaattgttgtcctctcagaaatgagctatacgattacggagctaaatcactcagtctagactctaatccacgatgaggatcgaccctggccaaggattctctagcctgaacattatatattctataggccaaatttcagccacaaggaggcggagtttggacgctttgctcgc

SEQ ID NO: 15373 - DNA, 195 bp, Emericella nidulans
agaccagagcccttcttatgcctaatgcgcctgttgcttgagctcgttctatttctcttttttgtttttatgcgttgacaagttcttttttgtctggttctttgaaagctgatcttgtcctttatagtaagccgttgggatcggatgctcatcttctccgcgtgcaatcttggcgccgctctgttcgtgatctgt

SEQ ID NO: 15374 - DNA, 3193 bp, Emericella nidulans
tccgacaatcgttgacgttgctgcctcaaatactaacagcatacatagtacatctaccaggttctcctgtttggctgccgcctgggcttctatgagcccatccgtaacgggcttacgaccgccgtttataatgattcgcatgtccagtctctcggcatcaatgttttcgctggcgcttcgtcaggtataatcggcgctgctgcaggctcaccgtttttcctcgttaagactcgtctccaatcattctcgcctttccttcccgttggcacgcaacatcagtacaggaactcattcgatggtctgcggaaaatcttcgcttcggagggagtaggtggattataccgtggagtgggggcggccatggtgcggactggtttcggtagctccgttcagttgcctacatacttcttcgcaaagagacgcttggttaagcatctcggcatggaggacggtccggcacttcacttggccagcagtacggcctccggtttcgttgtctgctgcgttatgcatcctcctggtaagttggcactgggcacctaaaccaccgaatttgatcgatctaactgttctcagatacaatcatgtcgagaatgtacaaccagactggaaatctgtacaagggcgtattcgactgcctggcgaaaacgatccggacagaaggtctttttgctatctataagggctactttgctcacttggcccgtattctacctcacactgtaagtagtttctctgggattttgcaaacagacactaaccaacctgcagatcctgactctcagtttggctgagcaaaccaacaagctgatgcgacgggtagaggacaggctcctctcagattcgcttaagtcccgtctctagagttggaagctttagtacagaccgtgcgaatagaaatgttggcattcgcgattggcgctttgggatatacataaatagcgttgatgttgaattctcgtttatagagtaaacttaagagattggcgagttgatatatacatgatgacccatttacagggatagatttcggtgcggctttattggtagtcaaggcaggacaagacatgctttaagctccagcctgtacgtctcgacatctcatgaatcgacgtgtctgcacacgataaacgtcaggaattgggctgagctggcaacatctccaccttctatcacaaaatgacagagttccgtatgatgcgggcacaagattcttggctttgtccgtaaatccgagctcgactcgcttggggcgggccagatctactaatgggttttcgaaagtcgcgtcaagaaacgcgtaaacaaagcgttcttcgggagtaaagccagcttggccgatgattcacaagaaatcaatttcaagatatgtgggggctagtgggtattctttgtcggtagctttgtactactacgtaaggaagcgacaatggctggacaagggagcaggaatgcgcacatgcctctcccagcagccccctgcatgctgcaaattgaatacgttgggttacgctggattaaaagacaacgcaaagttgaaatattagttcctcaacaaatagccgaaattcagttagaaagcgtggaacacggaataggagtgtgttttcaataaaggcgcgagatgatcagataagataaacgccgcatttctacacgcaaactagcaattcagcgtatgcaacatttcgcctagaagccaatagacaagccgcaccaggccacggtggagattacaagaccgggtcggattgacgagcagtggtctgagatccaaaccgtccttgtttggctggagaacacgcggtggccgtagagcctcaggctgccaggtgcgctccgctgcaacgctgaacgggtcagccaccaaaaagtcgcgctagtgagaaagtcatgtgaccgtgtcgtgatcgcgttcgtcctgcaggcgggtatttcttgtgctctctccctcttttctcagcacttgtttacatttccatcccatccctcagaacacagaagcattttgttgctggtgtgaatcaattcgtctttcagcgttgacctttatctgctcccagtgtcttccacaatgtctgcgcaactcactccctcgaagcaggtacgtcaattcgtcacgtcccgtcggcttcggacgcgtcactgggtagattgtaacttacaatgacctgaacaggccgccagctctctagagaacctcaagatgaatgattcccccgtcaagaagctcaattttgaagctgccggcaaagagaacgctcccgtctcgaaccccatggtcgacgtgccggccaccaagcccgctacagagaagcctgttgagccttctaaggctgctcttgacgtcaaggctattgaggccaatgaacctctgcttcaagagaaccctcaccgttttgtcttgttccctatcaagtaccatgaggtcagtactatgcggcatctcacgcgtcacgcgtaaattggaaaattcttaccgcctaatgaaccacctccactgacgcatgtctccgcgatatatagatctggcaaatgtacaagaaggccgaagcttctttctggactgccgaagaaattgatctctccaaggatcttcacgactggaacaaccgtttgaacgaggacgagcgctactttatttcccgcgttttggcttttttcgccgcttccgatggcattgttaacgagaacctgctcgagcgcttcagcggtgaggtgcagattcccgaggctcgttgcttctacggtttccagatcatgattgagaacatccacgccgagacctactctcttctgattgatacttacatcaaggagccgaagcagcgcacctacctctttgatgccattgataccagtatgtttcttggctagttttgttgatcgcgctctaacatgatatagttccttgcattcgcaagaaggccgactgggctattaagtggatccaggacaaggagtccaccttcgctcaacgcctcgttgcctttgctgccgtcgagggtatcttcttctccggctcttttgcctcaattttctggctgaagaagcgaggcttgatgcccggtcttaccttctccaacgagctcatctctcgtgatgagggtcttcacaccgactttgcctgcctgctcttctcgcaccttaactggcgcccatccaagaaagttgttgaggacatcatcgtcga

SEQ ID NO: 15375 - DNA, 601 bp, Emericella nidulans
  unsure (1)..(601): unsure at all n locations
gaatncaattttcttgtcatacttgtacactggacctctccgcgttgtaaattcactcatactaggtaacatctagatcagtagtttgactccaggaagcgacagagcagatggggaaagtttgagttgtttcagtaaacttggaagacgtacaactgtctacacatgccgcatggtgaggcaggaggtttaatatcagtggccacagcgatcgccttgaatcggcgatggccggctacctattgaacgggatgattagctatccaagggagcagaacagagtgtgtgaaaccatgcactgtccaattttgggtggttccaggatatcgaaagagcaacttacgacagcagtcccaaacgccacccgctcagcacatgtgccaacgggatatgaggcattttcaacattggcccctgtgaaaaattcccctgactgggtgaggagaggccgcgccaacacgaaattttgaatagggcctaagatgaagtcttagaccggttcatgacttttccaagtgcagtcccgcaagaatgattcacgttacagcagctgcttcttgccgcattggctttgggctagagtttcttcctcgcagtagag

SEQ ID NO: 15376 - DNA, 200 bp, Emericella nidulans
aaattaattgcaaggacttagtatcctcttcaccttctggcggagttttggatttttaagtttggttttcgcattgcattgcgtcgggaggttgtatcctattgcattctcaggtcaagggagtcctgctacttagtcgacttcagcgttcaagtttgacttatcttcttttttgccatgatacgacaagatcagaccag

SEQ ID NO: 15377 - DNA, 922 bp, Emericella nidulans
gaaccgacttgatcatactgacattcggcacgcaggacggacgagagctagtttcgaaactatacattgactttcccctcaaccgcctcttctaccggcagatggaggacttcttagagcgacttacgtccaagttagacataagccagggcgtgatcaagatcctcgaaatgggtgcagggaccggaggaacgactaaatggcttgttcctttgctggcgaagctcaacataccggttgagtacaccttcaccgatattgccccgtctttcgttgctgcggcgcgcaagaaattctccaagcaatacccgttcatgaagttcagaactcacgatatcgaaaaggcccctgcagatgatcttatcgggagccaggaacgtattattggcagaaacgcagttcatgctacgcatagccttagtgaattcggaaagaacattcgcaagggcctgcgggctgccggcgttctgctgatgcttgagatgacagggacactccactgggtcgacatttttttcgggctcttgaaggcgggggggtcttttgatgtggctgaaccaccgccgtatttacgatgtcctagtgcaaaaggcttgtagtttgtggatctgccctctttctgtggcgtggcttctgtcggaaacaagcttgtgagctcctccttggttcgcctagcgggaggtttaataatttctttccccccctttaatggcctctttatctgctcacgccagtttctcttagtcttctaattccccaagtttgtgaatatatagtcttttaatttcttcctcttaacccttctctttttctttattttgtgatattttttacatctataatattaatttatgttatggagatttttttatatattttataagatctttttttctattttattttactcccatctctctta

SEQ ID NO: 15378 - DNA, 798 bp, Emericella nidulans
agccgctgttgttaagtcgctgaactgatcagaacccgacgaagaagcaggatccccagggaacatagtcgggaccaaaagcgggtcatagaagagctgtggtgcgttcgggtcgaggtcaacgggagggaaggccgttgaaagatcggggaaaagagccggcgtagaagaggaggataaagaggagttcgaggagaaaagaaaatctgagtcgctgaaggaatggggagagatatcgaggtactgattagactgctggagtgacctgtcttccgaccaggtacactgctgtgatctggcgggcgaccgactgctgcggatatagtggcggcggccattgcgagatagtataagccgggtcttgtggcgacccggtgccttgggctgtttataagagagggagagagcctttacgactctttttggattggatgggggagatatagttctgttttgttcatgcagggaagttttattctttaatctttcctttgttttagtctatttaaatcctttatctttcccctcctttttaccaactgtgttaattctcatttttatattaatttttatctcttttctttttttctttcctcttacgactttttattcatcagctattttattatatgtctttttctttttctttacattattcttcattttaattcttcttatctttctttttctattctttttttttcactttttttatctatatatttcttcttcctattatattttgctggctttatcctcattaacctttttaatcttcattattgtgtcttcctctac

SEQ ID NO: 15379 - DNA, 726 bp, Emericella nidulans
  unsure (1)..(726): unsure at all n locations
catgggcactcatctcatgcggaatcgacgcgacngttgtccaacagagctgggaaatatcggggcctatagatgctgagctgcagaccaagagattgcatcagaacgacggaggccggcgcagagggctggcgccccacagcactagcccaggggagataggccatatgtgctgcctgcctaccagaaaacgcgcatgaaccgatcctaccccccaaggacgtgcctaactcaatattacacacagaaatacgcctaccaccgaccaggctgaagctgtcctactaggacacccagaccacggccaccacagaccccgtcccagctggttagccgggcaagggccgacgtacacctgacccgcagacggagacgcaggcgcctctggcactataacccgctagacagcgacaccaggaggcagcgcggagccagaggtccgccaacgaaccaacactcaacgagaacatgacccagcagggcctcgctcacgccaggcacatctccacccatgcctccaaaaaacaatctacgcaagacacacagtcccatacttcacggataaccccggccccgacgctgactcaccgcaggaatacgcaacaaacccccacccccccggtgccaacctccagcccaccaaaccgcttcctccagctcaaccccccaaccccaagccaccgtccccggggaccactagcccaccacctaaaggcgcggccaccc

SEQ ID NO: 15380 - DNA, 4289 bp, Emericella nidulans
actactcacatcagcaatatcaacaagcggaaccttatttcgaacgactatttgcatcgtatcgcgctgctcacatgcctgtgcctgaggaaatgcagactatctaccaattctgccgtatgacaacccaagactcctgttgcaggtagtcggtggcggtagtggtgcgggaacggactttgcgaagattttgtcctcttttcgacggttgtagaccctttctattttgaaattcagggagacgggttgtatatcattgttttggtgaattctacatgccaaggtaaccaggcgataattgtcagatgattgaatgaatttgcagtgcaatatcagagcggaactctctctctcgtgtcattttcatgttcaaactggggtattcctactccaacagggcattctttctgcaaacctaaggaggtgtacctgtccgagtagctctcactttcctcctggtattccctccatcgagcatcatccattaaagtcacaatccacgatacgcctgcaaagtaccagctgccctgataaaccttttgatcgacgcagctgataccctttccatcgtggtccctggatgttatagtcccgccttgtccacctgagaatagaccatgtgcacatcagcgcgccctcattggtgcttgcggacgcggtgtgacatgacattcatggcgtgcacctggccttcctgcatggctagaattggactccaagggttggaagggaggctaattattgggattgggtcagggcaggggcaaacgacccttcgcgtctctgagagagattaatgctcagaattcaagctgcataggatcttctgcagtggtctccaagtcgcaaatgctggttctagcatgtatagaaatccacctagggctcaatagctccttccaccatagtttacaaacagcccccttgctgtgcccctgcatccaccggggccctttccttgcagtcccgttacagtcacggcgacaatgttggccgaagcccgaattgaaagtcgaaacccgtctcgactgtcgtgtcacgacaaaaaggggagtcaaacacggtgacattgctgatccctttcctggtccttcctaactgattctaaccgcccccatcattccgatcaccttaaaaatccacccggccgccttgtccatcttctccagcagatcacccacccggccgtctaaccgtcgacccaatggcggcgccatacacatacccgtgagcccgacatgtgcgctctgccccaacgtcaagtggcctagctgtggcccacgggaacctgactcgaggatgcactggctggctcgacctcgacctcgacactgcatcgtccattcgttattgcgcttttttagaattgcttgatcggatctgggacacacactcgtttgaattgatcattcccggtcccgaggacctgaagtggtgggcattgttatcgctatcgttattttatatcgttatcccccgcgcgcgggttttctcgaagtagtagacgtgttgcgcatttttattgcgggctgtcggtcttttcaaggatatttggttgttgtttgttgggtatagaacgagacattgagtcgagatttgcttgatcatcatgaagtctacctcttggggttggggggttccctttgttttgtcgcagcttcagacagtcgttgaggctgtggacctcctgggcggccatgttaatatgttgtgagtcggcttcgtatgttgatcctgatgctatggacattttgattgacactatgaccacagtatggggacagaaggcggcggtaacaactttcccggcgccgcaaggccatttggtatggtcaagctgggcccggatctgctcagtggcacaacagatgcatactccggatacctagcctccggtgagttctccggtttcagcatgatgcacgagcaggggacaggtggtgccccaaagtacggcaccgtctcgcaattaccgctcgtcggcaatatcaccaatccactttccaatataactgttgctcgtaacggcaccgatgaagcagaagtcggatattacaaggcggagaccatagacggggtcaccgtggaattgagcgcgactgcccatgcagggatttaccggtatacctttcccccagagtccgacgaaaaccatgtgctggttgatgtatctcatgtgcttccatcgttccggggacagggcttgagtcaggaatataagggtggtaacatcacggtctttccagatggccattatgcgggtcatggggtttatgataatgggtggaatcgttcgccagattggacgatttacttctgtaagcctcccatccatgttgattcttgcacccttcatcgttaacgcttttcaggcggctggttcgataatgacgtcgacatgagccgagtatataccggcactgatgaagacggcagcattgaacaggagagcggatccgccagttcttcgacgggatcgacacgagttgggggcgtcttctcttttaatgatacggaggttatttcccgagtaggcatatcgtggatttccacgagtaaggcctgccagtatgttgatgatgagctcgatgaagcatccttcgaatccatcgtcgatgatgcacaggctgaatgggaggagacagttttctccaaggtgaccacaacaaccaccaacgagaccagccttacgctcctgtactcatctctttattttatgcacctgattccgacgaaccaaacgggcgagaaccctggctgggaatcggacgagccgtactatcaggatatcttcaccttttgggtaagcatacatgatgcttgaaagttctgttccctaaccgtaaggaaggacactttccgctgtgcgacggcactcatgcacatcctgcagccaaaggcgtacgaagagcagattcgttccctgattgacatctggaggttcgacggttttctccccgacgggcgttcttccaactacaatggccgaacgcagggcggctcgaacgcagacaatgtcctcgctgacgcatacgtgaagggcgtgcgcggggccatcaattgggaggacggctatagcgcaatgataacagatgctgaagttaccccagagaatgatcccgtcgaccccatggcccgtgactcctccacgaaagagggtcgaggagctctgcccgactggattgaccttggatacattacacctacttactcccgcgccgtcagccgagccgttgaatatgcctgtaacgactttggtctgcaccaggtggcatcaggtcttgggctggatgacgatgcggacaagtacctgaatcggtccaggaactggagaaaccactggaatccagacctcacatcattaggattttcgggctttgttgttcctcgtgataaagatggattcattgacactaatccgctaactgacgctggatactgggcggacccgtattaccaggcgagctcctgggcatactctttgacgagcatccacgatatgcagtatatcatcgatttggctggtggcgagaagactatgcgtgagcgcttggatacgatgttcactgatggcgcaagtggtgccagtggaattatctttgatccaacaaatgaaccgtgagttttctctcttctatttcctaagaggcctgctgaactagttagaatgttcaacatcccatacctgtacaactacatcaacagacaagatctctccgtcgcgcaatcccgcagcatcgcaaaatcgtactacaacaccggggtgaatggccttccaggaaacagcgacgccggcgccatgcagacatggcttctctggaatatgatcggcctgtacccggtcaccggacaaacaaccttcctcatccactctccatggtttgaatctctgacaatcgacctgggtgatggcaagaccttagaagtcaccaccacaggcggagatggaaccggcgatgagattattttcgtgcagcgcttgcaggtgaatgggaagaactggagaaagaattggctcgagtgggatgatatcttcgccgagggaggaactttggagtttgaactcggagctgagccaagtgattggttcactggagaagttcccccaagccctgcttccgtccaaggtgtgccacctagtatggctgtggtacagagctcgggatagagcgtagattgcactttataggttaaagagacgttgttcggtattaacctctccccataaccctatggcctagggtacctccattatggaccattgtggaaccttacaaggtttcagggtc

SEQ ID NO: 15381 - DNA, 586 bp, Emericella nidulans
ctaaaactactacgcttctatctcggtctgacattaacttgactgctttgctgatttatccaacccaccaaccaacagtgttctgccttgactgcagggccgtcccctcagccatcagggcagctacgtcctcaataaacaagttcgttctatctcaacaacctcaacctccccatatacccggtagaagaagaaacactcacaaattttgcgttcagacagataacgcccactctccacctcagctcgcaaccaaagctgcaataccatctccgacccttctccttcgcaactaccgcaaccacacgaccaaccctctcccttccccattcacaacagccccaggcgccgacacagactctatcacttctgccgaataggtctgcgatctcacagcaagtccgttctttcttcgctagtgcatcacttcggcggaaaacgcgccacgtataacccctcgcggcgggtacagaaagcgttcgcatgggtttcctgggctaaggctgccgtccaaagtctgggcagaaagatccttgttcggcgggagggcttaaaggcaggaagaagcttgagcttggggaaattt

SEQ ID NO: 15382 - DNA, 2124 bp, Emericella nidulans
tattcgggccgggttttgaaagacaatgatactttagcgacgtacaagatcaaagacgggcacaccattcatttggtaaagagcgccgccagcaatcaacgtcccgcagccgccgccgctgccaccccgagcaggagcaccccaaacccaacaaacaccggagtcccaacgaatctcgccgccggctcagggaacaaccctcttgctggcctaactggcgcgcgatatgccgggtttgctcagcttccaggcgctggtatgtttggcccggacggcgggtaagtgaccattgattggaactcagttggtccttcaattagacgggctagtccgctaacacagtggcattcatagatgggacctcctccggatgccgaatcgatgttaaatatgcttgagaaccctcaagtgcagtctttgatgaatgaagcattacaaaacccggccatgatcgacatgatgattcaacagaaccccctgctacgcgataatcccatggcccgtcaaatgctgcaaagtgaggggtttcgccgtatgatgactgaccctaacacgatgcgtcatatgatgcagatgcaacgagcaatgggaggatttggtggcggtagtgctttccctgccccgggagtcaccaatacaacgcccgaggaaaatagaactgcgcaaaccaacaccaacaacaataatagtaatgctgccaatgccctcccaggaggtcttttcaacccttttatgccccagggccttggcgctggcaacccattcgcagctctttttggagggaaccagggaagccaaggaggaaaccagactgatcagactggcgcggcgcaaccagagtcgggaggagcaagtgaaactggtaccgcatctgagcagaatagaccggctcctggcttcttcaacccattcaatcctggtgcgaatcctttcgaccccgagcaaaatcccctcctccgcaaccctgcgttgctagaacagttgatgcagtcaatgggaagccctgcgggcggtgctgctaacccttttgcatcactgttcggtggccctagctttggtagccctgctccccaggacaacaggcctccagaagagagatacgcggaccagctgcgtcagctcaacgatatgggcttctttgaattcgaacgaaacatcgaagctcttcgccgagcagggggcagcgtacaaggtgcggtggaatacctgctgagccatccgtcttagttttgatcttgccatttctgaggacgcgggatatttgacgggtttctagcggtcacgatatctctttgtgttttcctgggatcgcagcgtgttgctgattgaagaacccttctgtattaaaccttttccttcatggtcccgtagaatgcgcatatttatactttggaacaattttacagctctaatatttacttaagaagcgatgcttacacgccgtttatagtagaatagaggggggtatgggagtcgttggcggagaagttggaggatagtcgaggaatttgacaaaaaagccattgccccttcctcagcagtatcaagcaaaatgccatgtatagccacttcaaccagaacctcagttcttttgttgaatggcatgctagcgtggtgaggggcggtgtcgaggacgttgggacatagtccactaacctttaatgctttaggactggatatatattgttggtttcaaaacagaatgttgtagaaaaacaacagatcatgacggagtccgtttttctttagaaaaatctgaatagaattgcgttctcaagccaacattggcctctgaggacagtctgagcgttaatcttgatggtttctggatgttctcctgtccgtttgttggtgtcttcggaaacctggaatttgagacggactcccgagtcggcttcgccaagtctcgacccctacgaacaacagcctcaacgactcgaacatccttttgtcttttccaagtttgaattccattcttgacctccaaggcacttagttgtcacgtccactcgttatacgtcaaaatcgtgcgccttctcctcttatatcattctaatattcgagtcgcatttcttgagctttaatctactcaccccttccatcacgtcgctttcgaccagtcag

SEQ ID NO: 15383 - DNA, 607 bp, Emericella nidulans
  unsure (1)..(607): unsure at all n locations
atccacatccatggggaccatggtccggtaggtgacggtgtgactgaagcctttctcggctctcacccgctagcatgattttcctgggggctgaatgaatgccatcacagccgagtagaacatcagcctcagcggtgctgccgtcgtcaaagtggagaataactttgtcgttgacgtcgtcgtagtccgcgagctgcttcccaaagatcgtcgcttcttcaggcagcatggccgccatccccttgaggaactccgatcgtacgcagccccaaaagctgaggttgttggtgggcgtccggaaaagcagtgacttggactcatcttcagcttcttcatttgttcgagggtggaagccgtcccagtaggcgttgctcgtgctggcgtcagatttgccgctcatgctgcccaggagctcgacgagggctgggtcgatcatctccatccactctcgtgctgcgccagtgaatgcaaacccggcactaacctcgtgccaggtcggngctcgctcgtagatgattgcgttgatgccccggcgacgcaagccgattgctgtcatgacgccgatgatgccctcgccgacaacggcacttgagggggtgtgcaatgc

SEQ ID NO: 15384 - DNA, 699 bp, Emericella nidulans
  unsure (1)..(699): unsure at all n locations
acagccttttggagaaggaagctcgggaatggaattccgcgctcaaggaagattgtttgagagtttctgcgcagacttgattacgtgtgtagttacgggctaatacacaaatatgtggctagatcaggctacgatgaactaagagtgaccaaaatacctttactccgaccctcgtcctacacctgattatcctcttgcaagataacgtagaagccatctaggaaatttataagaaccatctgcttggtaagctacaagtgaggccatgaaaattcctttttttttttgttgaacgggcaagacattcgtattccacccaactcaccaaaagctgatgtccaagctcgtctatcctacttacagaggcttggagtattcctatagttctaatcccggacttctggcctcttcgtgaattgtatagtcaggtatttatgacgcggtcgctacgtcgacggctgtttagaacacgctttgtcaaatgaagaagataagccggagtagtccttgcttgaagaattattaccaacatttgtgtactagcaatgcctctatgtgtgtttcatgccgacctatcacgccccatccaactnctacccagaacgctcagacttaactatattggtatgcattagtgacccgttgagataaatgatcaaatgactagatccagcaccccgcggaaaacgccgttgggag

SEQ ID NO: 15385 - DNA, 5100 bp, Emericella nidulans
cggtccactcctggacatgcacaatccttcaaaagttggctatccagtacttcgtccttggagctgcagagcatttcgggctctacctttccacaataacagcgcgcatcaatcttgacctcacacgctccgcaaagaccttcatgacaaggccgactgcaggtgtgttcaccgcacggcaacaaatcgccacaaatctcgccgcaactccatccgttctcgtagtcggtgtcttgacaccgcttcgtagacgaattcctgccgcagaaacaatcctgagtcgggcccattgccgtacatggtttgcatggcccagcatggcaagtcaaatcacaggggtgtggacaatccttacgcttgcgtgagcatgtctgcccacacgagtgagggggaagcccaggaagcggccgcggatcagtctctttctcacaccagcaagtgtagcttgatggaaacacctcctgggcaagattacaaccaggacacctccaagcacgaggcccgctagcctctccgttttcaccaccgggcacggttcgggaaggatcctgcacagcggcgccttcattcttcgaccatttcttaacacagctcaaatggaacacggtccaacagagtccgcaagaccaaacgcgtgtcttccgtccaatctcgctagtacagatagggcattcgtaaaggttatgagcaatatcctcatgaatccgtgtgatgatatcctccgcctctgactttgtagtaaccttcggctgccgtgttcggagggatttccccttcccttttccttttgccggtgcggcattgctcgaggacgatccaggtacaaatgctggagcatcagcccttaaccctgcatcttccgtaccctctggcgcctgcttatcgtcctccgaagtctcctgtgacttcgtcaggcgtccaccgaacgtccgtctagcagctcccgccccaatttgttggtcgccaccccgcacccgattctggcgctgcccttctccatctaccggtgtattcccagcgcctcgccgtcctcttctcgggccacgtcgtgatcgttgctgacccgccgtatcgcttggttgtgttgcgagctgagactgggatacagaagtggtcggcgtcggcgcctgcgcttgtaactgctgggtttgggctgccggcaaattatgcggctgcgctgcggacaagaactgcgtttgctcctgtgtttgtgtccgtcgactcggattacctcggcggcctcgatgtccccgtctaaaatttctaggatttcgcggggcgctatcgaccccggtcggcgtagctgttgacactgacatattcggtggagtctgaaccagcaaactcgaactcgtactcgcactcatgcactataaactaaacctgagcgcacgggtatgaactctagctttaagatgaagtaaaataggaatgaaagggagaagaagttgaaaggtcccttcgaggcgaggaagcaaagcctgaggtgaaaagaaaggaatggaactccagggaccaaagaaagttgtaagcggcagttcctgagtcttattaagactgtggcgaaggtggctgcgtttgtaggacttgcacttatctactcgaaccatggcacaaatctgacaaaggcactaaagggatcgaccattactggcttccgtaatcatcagccatgtcacttggctacaatctgcatttgtgactcatacgctcacagtaaccatctcgagtcaccattactcatagtgggactcgtgcatacggagttttgtcgagtcttccaattgtaacatacgaaggggtaataacagggtccatatcattgcaattaaacaaaatattcatcatcgctataaatgcggttcctcaactggtggggataaaaatgcgagtcaaatgcgcccatgcaaccattaaacatcgagattaagataactaaaaaaacaacacaatttctcctctttcgttctgcttcagacgtaatgttcgccagaggtccttctcatcctctagtctctgttcgcggtctgcgcggcttcggccttgacctcgtccgcggtcgccatctatatcgtccgagaaatctttgtggaatcgcttgagcactttgttgaccgaaaagccccgagtgctttccggtccctttgtaaccaaagacaaaaagtgagcagccatctgccgttgtgcctcattgggatggttctcttgtcggtagacgaccatgtcgcggccgttgtcccgcggagagtccggatactcatactttttgacacggcgcgaagggcggtctgcttccatttgcgcgctgcttttgcgcttggtcttcaaagcttcggaagaaggagcttggtcgtcgtaccggaccttgtgagtcttcttagacttgcgaggttcagcttcattacccgcgacactgcttccggaaacgctggacccagcaaacatagaagagactagacgctcagcacggtttttgatcgagatgcccaggcctgcgtcaccgtggccttccttctcgtcgcgacgtgtgcgcttgagaggcgatgaaggatcctggtatcgtcggcgcgggttttccaggtcatcttcaccatctagtgaaggcgatcggagcatgcggtcaagcccgcctgttagaccggaatggagcatcggggttcctgggtgattcaacacactagatggagcctcgagcataggagtgtctgcgtcctccatgtcatggtcatcggtgcggcgcttccgcttcttatcgcttgaagtcgcagtcagagcggggggagactgcttcctctcagtacgccgatctttcttctttttcggggcaggagtcatgaactcctgtgatacagcagcatccttgttgggatacactggtggttgaataggccctgaaccataagtaaagccgttctcttcgtagtctttattttcatcaccctcctccgcttcagcgcgcgtcgacgactgagaacgttcaaaaaccgaaggtgcgtggtccttcattttcatctgctctttcggttcggcaagagagactttggacgcgttcggtgtcttttcgtcaactaggaaatcaaacacattgaccttggtgccttcttgtgctggggctgatgtggttccgttcgatgtagaggtagtagaaacggtggaaacaagattaacttgggaatcgggggcgtcttcaatatatggagcacggtggctggtgttcgtcttcgcgctgttattgtcgtttttgttgccgttctgattattgttgttattgcctttgcgaccgtttttggccggcttctctctgtagagtgcgccttggtatttctgagcctcgctcatacatgactaggagactcgggttagcttcagctcttttgagtcactgatatgctgcggctttggccgacttgtcgatggacaactcccggacaagcgccacacgcgcatcaagacgcttagaatacgaatcagaccacctgacgagccggagacgagcactgcacgctccaacttgacagcaaataagaaaacagttatccgtaccgtatgggatctgtaagatgttccttggaaatggaccatacaatcaatgcaggtgaagcttgcgccgcggcattggttgcgatggggatcaagcttcttcttggtgagaacgtcaccgcacgcctagaagtaggagaagaatcagtaactaattccggacgtttcacctcgttatacatgatatgacaccgagtattcgtctgacctacctcacacgagaatgagaccattttcacaagaatccgcgaggttataagccgcgtaacagaacgcgatcgccgccacagcgagatacagcctctttcagaaatcgataatggagatatcaggcggcaatcaaaagagtgctgttcaatcagagctggaatcctttgcgcgaagggaacaggacgaagtagagccaaaaaacgtgggaggggtgcctttgttgacacagaaacaaagtcaaagaagtaggcagcaggagaaagaaggacgaataagaggtagggaggcacttgcaccgcagctaggaggtatcagcagccgaaatcaagagtagtgcctactctatcaaggctatctttcgatttgcgcttttcttgctggaatctttctggcgcgctcaaaaaatgcgagatggaatcaaagagtggaaacagtgggtataccacgctagtcctaattgggactgacaagttccgcattccgcagctttgtgattgatgccctatcaagcaggcgccaacacgagctattacatagatctgtctcagcaggcctaggcgcgaccttggaagagttgaacaagtcgtgcggccactgccggccagtagggtcatggttggtgtctggaatgatcaacaggatgcgtataatgaggattggtaatttgactctacaagttcttaggaccaacaacagaggttaaaaaggagcgtggactcgtcagaagactggctttagcgtacactgcacagccaaggacaggcccgcgggagctagagtaagttctcgggggtcggcccctcactttggctcatagtgtgccgcctctggagggcaagcctatgctgctatggatgtcttgcagcgaagcatgttcataagtccacaaatgctccgaaggaggtattcgaagtgagacaaagcttagcgtactactttgtaccacatcttgcattgcttcgtgcgctgatattagatctgaccgcgatcgaattgtctctttccgcggatgatccttgttcagcccgatcggcttcgaaccatactagtagcgctgcacatctagctacaagcaggtgaatggctaggccacaagttctccccttcatatctgcgcatatgaagccgatcttaatggcaaaccggttatatttgataacaaacacaccatcaagcttcgggtcagctgcgccagtcacagagacaacaacgtttgcgaacgaagagtcatgcgcgcaactgcatattggtgtcgctttgaggggaggggcacccttgttttcgctttcttccgtagagatactgccctcctagctggtgtgtttgcatctcgctcgacgagttgatatg

SEQ ID NO: 15386 - DNA, 559 bp, Emericella nidulans
  unsure (1)..(559): unsure at all n locations
tggcagtaccgccaactctggcgctgatatagatgctgttctatgacaccatcgcctttcgttcccaagatagaaaggctaatagaggggtggggtggactccagtcaaggatccatgaaataccccataataataactcacgaccactactgtggaggtgcatctcatactctgcacttcaccgtttctatgtttgcaccagcctatacctcgattnctagagtatatgactcgaatcggactagacactcgatatcgcgggagcgcagattctacagtctttaaacccgcaaggaatggcgcaacaaggcacatggactgccttgagtcgcatgctcgcaaactaccccttgggcccatcaatcgcacctgtataccacacacccataacttgatgttcttagccacccgactatgggtggtgcctgtataccccgtaaagaccctacgtttccctgcatcagatgggatattataatcccagactgtggccggcctatattccatgtaggaactactatctattagatcgcctgaggcgtgcgttgcattcccaac

SEQ ID NO: 15387 - DNA, 580 bp, Emericella nidulans
aaccccctagggggtccgacctagtgggctactttttatccaaccccctcataaaacaacaacgacattatatatagagaggggatttctagcaccatatagggctatccactccactctctttcaacacttaccctaccggtggaagtataaccaacaaaaatcgtatcagaacaactttaccctacaccatttacatataattacaacacctgtgcaaatgctaacccttccctccaactacccattaatgcctccccaatagactttcccttgatacatctcaacctcttcaaccctgcgttgcttaccaacattagccccacaatcaaacattgcacatgtagcgacttgactaactaatctaacccgtatctcaattaatgcccccgatacctcttatacttccatcgccaccttttatttactcccagatcaacattcttcatctctacaccaattatatggtacaaacccccttctatttacataactcatcgtccattgtctttaccacagaagacttcttataaaccacttaaaaataaacactcccattggatttttattaaaaaacata

SEQ ID NO: 15388 - DNA, 1570 bp, Emericella nidulans
aaccgggtcgcgcgtgttgtgaactagcgctcccttgccaatgatatggagcagttcaatggcagcgtgaatctcggcgtcgcggaatgcgagctgcgcgcgtttgaaagagtcagcgtcaagatcggttgcgaggtcggagaagcggaatgggaggacttggcggccgggggagccgcggaggtcttgactatggtgccaggcccgctcccgtcgcggtgttcaatggcgacgaggacatggccgcggctagcaagctcgccaagaaagtgggtatagtcggtacgagagctggcatcgccgtgagaaaagacggtaacagggaaggcttcaagacccttatcgctggaaagcagcggcgcgtcgacttcggccgggatggtgatggggccgccaacggcccacaggacgaaagtgaagatgggtcgagtgaggaagttatctgcatgggcgaggcgggcgtaacctttggctgtgagactgatcggccgcggaatccagggataccggggcttgcgggagcggaagccgcggtcggttggataatagatggtagccaggagggtttccacttcaaaggctggctggccggtgctcttgatgacaccctcagcgacacgcagaggcccgccagctagaggtacctcgagatcgatagcgccgactccgtagggtcctgcataggacggcagcggcgaggccaagaggggagagccccggaccaagcagtagagcgcgtatagacaaaagatgctgaagaggagatagcgccaagtcagccgtgggcggagaaggcgggcggagagggcagcggtactggacagccagtgccgccgccgtgtgtcggtcagccatcgggggcgggagcggtgctggcggctgcatggccagcggcgaggtccggctgttcatcgtcgctggtcactaggggctccagctcaagggcctcgccgggtggcgacagggtcctgtctctactcatgacgataaaaccccgtgagtcttgtggatttgcgagtggaaaggtcggaggttgcctgagagcactcaccggtggcgatgacgtagcttgtggcgttgccaagactccatagaagccggttgttctctataggaatacggtatagacaggactacctgggtgatcctgcagctttgcaaagactatggcagagacaatacgtcaagcatcaaccgaataggtcccagcagcgcacagtgatgggcgaagatgagaatttccgtctccagcaaggcgaagcaaatgttgaggatggggtcaggtgtctgggttgttccttccacaaaagccaaagccagatttcagaccaaaaatgctctttcaagatacctaggtgcatctcttggaagattcggcgggccgtcggcggtttatctaaggggttgccgcaggttctatgttgtaccttatcatgacataatggttacctagatgtatttctacgactactcaagccacgagtgcctgcttactaaccaatccggacgaagctgcgttaaatgtgtgggccggctgagtcagggaatttcctctctaatgtaaggtaat

SEQ ID NO: 15389 - DNA, 3609 bp, Emericella nidulans
  unsure (1)..(3609): unsure at all n locations
atagtgtcctaggtgatgtgggcgaggaagttgaggagctagaaggactggttttcgagatggaggcgaagcgacacttcaatctggcgaatgaggactctactgggttggatatcaacgaactcgaaacgattgtggaggagacgccttctagtggtcgatttttgaataaacgttccagcatgggatccctctaccctgcaccgcctgctttggacaggccgattattcaaactccgcaggatgacacgaatcactctaatcttgttgaactattcgcccgtcttcagccgctgcgcgcctcgcttgatttcttgcctatgaggctttccatgttccagtcacgcgcggagaaagtttttccgtctgcatgcacggagttgatggagcgccgcgagaaacttgagaaggactacaagaatctgcaggcagatgctgaaacattgcggaaggagctagaggaagaccggtggatcatggtctttcggaacgctggctctcaggcgcagaaaatgtttgagtctgttgagagaagcatctcaaagctgcaagagggccttgagacgggcatgcatttgcataatcctgcaggcatgacgaatcgtattgagagctacgaggccaagaagcagcattacgtccctgccatagaccgggttcttacaatcacccagaaaggagtcaaagacagactaactgtgaatggcgaaatccttcggcttctggcaaacatggaatcccaggtcaacgccttgagagccagtatcaaggtgatggactcgtctttagaagacattcaagacttgaggtcacaacatatgcgcgattccatttccaccgtcctgacgatagatagtccagctacgggaagccttgcggacactccaggaagctcaccggcatcatcggtggtcatgactccagccaacaagtccagtcggcgaggtagctccgtcggctccgcggctcgaacatcgaccggacgccgggtttcaggactaccgcaacttgcctccaacctaaccggcagaaagcccagcaatcccaaggccacccctaagaccacgctgacagcgccgtctccaacgccagcagcacgaaagcctgcacagtctgcacagnctgcactctcgcctgcgttgctcaaccgaccacggtggaataccagtacgaacaccaatgactggatgtgggacataagtacaagccttggacgccttcgttgcgcaaacaaactgctccctcacgcgggacacgcccttcgtcgacaattccaccccgggacccatctacgtctcccgtaccaccgaccgctagatctgcgagccgtatatccagtcgcctaggcttgcgtagccctgggcgcacagcgtctccatcacccagtccctccatcttggatcctcctccttatagcaaacttcgacgcccggctggaacagagaacatgtccaataccccccgcagccgccagagttttgccgggacatcgttcaatcgcagcgtctctcaggaacagggacgaagcgacagccctacgaaagctgctcgtcccggtacagcacttggacactcaggaagccgccgcatcagtttgcttcctctgccgcggaaccgtaacaaggataatttcccgtcaactcggagcaagctctcggaacgacctccgtggcgtggttaagcatgaaggagattaccacggtcttattcatctgctgcctcgaagttcatattttatcttctcccttgtattatctgtggtctttcgggttgtcagattgcttcgatgattccccttttgcaaagatacctaccatatgatttagcgcaatgtatacattcaatcaggtgtatggagtttatcttcgaatttcttgttaatctaggcgttttctactacagcttctcctgtcaggtctttcccaataattcatggatcacatcacgtagcacagtattccatagttcctcccactccattgccaattccacctgctctttcactgcccggagccgcgacttgatgttggcccaactctgtaggatgctgtccatttgggtaacaatcgtctctaagccatcagtgctgacattagcgatgtcctcgcgcagctgcacatcttcgatagctttaacatagacattaactaggctttcaaactttgtgatcgccttgtccacaccatcaaggccttcccgtccagcggccgcggcccataccacgtcatcctccgcatcaagtccgttcagcacgttcgatgcctttctgatccatatctgaatctgttccgcggcaccggtcaaggctttaactgcggccggagcgttcgatatcgaagcgatgctagcttcaagcgatgagggctgtggaagggcgatggaggtaagctgagaaatctgattgctgaacgaggatcgtgagaatgagaatatcgaattggtactagagtatatcgatgacgtccggtgaagaccgtgaggattaaagtatgactgagtgttcgatgacgcgctcgactggataggaggggagtctttcgggggcgggcgtggcgcgccgtttgcttctgcttcgagctcgctagttttttgaatgtacttctcgtaatctgttgggccatcggtctggtcttcaatgttaggatcacttatttccgggcccagcggtgccggggctggctcaacaacagacatggtagttggcgtattttccactttctcttcttttgtttccaggcggtcggatgtggcgtcctgacccgacccaggggttgactccgcgaccggtggttcaggcacgcctgattgtggtagtggttctcgctgtacctgttgtttttgagttttggttggcaaacgatattccgctccaagcgcggccctttctctcaacttcgatcgactggaccttgtgtagactatccaactccttgatctgctcctcgggaatccttccaaccgcaccggggttccggggggatgtgtctgttttggagcttccgtccagtaacttcacgcgtgcagctaagccgggtgatagacggcggagaatgttcgggcggatgagagacttttcggattgggcgtcgtcgccgtcgtcttcgtgaaggaggctgctgccgatactccgggtacttcgtagcgaggctttcgatttgatacgacgagggtgtgccgattcatccggagaagagacggagactaatgtagnagnaggtggtggtgnagaaccttgcgacgtggtcgccgaggtgtacgtgtctggagcgggagccgaggggtgagagctagtggtaaagatggcacgcatcgatacggcgatacgtccactctagcccggaaaatctggagggctagaggtagagggttggctcaaaagacagagaaaatgagaatgagaaccagttgctattatgacgcagttgcgctgggtgaagaatgcgtcgttgcccaaaagtatgttggcgggcccctataagaatgtttgttgttgctgtctgagtaggagtggggtgacgactcttgcagaagatgagctgatcttttatgagcttgctgagctaaacaagggagtacatcgtattcagaaaatccaccagagaaaggagt

SEQ ID NO: 15390 - DNA, 815 bp, Emericella nidulans
  unsure (1)..(815): unsure at all n locations
acaatccttgggtatctgtggagaagggaaatcctgaagatccttgctcctataatcgtttctgggttgggcgtaaccacgtgaaactggagacaggaatggacggactgaatgatcaccggtgttgcttcggcattccatacggtcacaatctgtcattggagagtgcctgccaatgatcctaggactgagtaaggcagaaaggctggaaaatgcgggagagtcttaagcatatcgagagacccggttgtgagaacaggcaggtgtaaagcggatttgttcttctacagaagcaattcaaccgcgcctaggcgttactgccttgccctcaagccgcgtcgggagacctgccgaggatgaccatgagacagaacttccaagagaatactatctcaccgatgtttagccgggtcaggtttggaccctctcgtgaagctatcatatttatcttaggttcctgctcgcgatagaaagactgacattgggcctatgttcccataccgtgtgagaccttgagcatctngtgtggttcgagcaccggaggttgattcttgtagaggcaagggatcagcataggggtacccttccggcaatgttggctttgctagctgtgctgcgaggttggcttgaccgtaggcatggtatggtttgagtgttaggacaggacgctacacgggggtgcaacatgacctagggactaaatgcaccttgtgggtcaggcccgctccattaacaacgggcgttgggcgccacggttgtggctttaacaaagttgggagtcttgcagtatcgcttttatttgcctcgtccttttt

SEQ ID NO: 15391 - DNA, 1877 bp, Emericella nidulans
ggttggagatcatctcccggccggtaatgcgcgaggtagcccacagagtcgggaagtcaagagtgctcgagaaggtatcggcatagccgaagaaaagcatgggaggaatccagccgcgggcgtactcgagcgcaaagcaagacgagtccatcttgtactgcttaacctcgccgcggcggaggtggtggacggaaccggccgggtagacttcgggctcgtacgaaccggggacgtaggcgagctgagtgccctggaggatgttgaagtagtcatctgcggtgtggcggccagtgtgtccttcagttccaatggcggtgcctgagttctgttagttggtttcacacatgttttgtgcgtactttgggagacgatgggtggacgagtggacggagagcgcgagcgtaccgaagatgataagatactcagtgatacctgtaggaaagagatcattagcataggccgttgcgagtgcaagcaggttcgggagagaaaagggcacatactagcgtggataatgtacatagcgcccattgcgcctccggcgttgttgaaaacccattcctcgtccttgttcaggtgcgtggagccgaccttctcgtctaactcagaaacgatgtactggacaatggcgcgagtgtcgtttccatgggcagcgattgcgcgctgggacaggtcgtgcagatggtggtggtcgaagatgtagaactgctccaggcgggcgtcgaagaacctgtagagccctgtaaacaacgccagaaaggcgactgcgatactaagacagcgcattgcgtaggattaacggggaattgagatgcacaatcacagaggacgcggttggattgctgatgaaagatggaaagatgtcaaagttatatttttatgcaagtgccggcgtttgtccgcggaacccgtcaaaaatgacctgattttttcctttggttgccgggagacttggcggcgatcaacaacgctccgcaatgccccaaaatgtcccaaatgccccaaggctgcgtttaccgcactcataactgcggtcttaaacagccaagtcgtaggaggctgtcaggaggctgatcaagcaggtccatggctgtagctaagagcgcctgtgcaaatcatcaactttctggcgtcaccaaataatctatagatgctggggtaaatattgttccccagaaaggagctccagagcatattcagctgccaaatcattggttcatggcagtctttccggcctccgacatggtcagactcgtcgtttattcggtacacaaggtaggcaggcttcatgacatttaacgcatactcgaatttcctcgtgatccaacctttcatcggttgcagtgtagctttggatctctgtcacagagttccgcgcggcctacgctatccttggtcccggctatattgggacatacaagtatccgttcgaggctcggtactctgcagattcagagtagatctctgaagttgttcagcgggccagtggaagctatattgactccattgcttcgcactttcccaaatttaacgggcttcaagggaaactccatcgttttttttgggggggggggcactcgtaaggaacgcggatatatatacttcccgcacataggtcacctgctcggccaaagcggcctgtggctcacactgccgcacccactaagcaaaccaagttctctccttccaagtctcctaagtacaaggagatattacgaaatcctccaccaatgcgtttccagtattcatccacagaagtccagagccattggtctagctccactgaccttacttgagtacgttccgctttcagtggaagcttgtttcatgctgaagcgaaggggcaaggtcggtccaccagctcggtgttaagcaga

SEQ ID NO: 15392 - DNA, 2522 bp, Emericella nidulans
aaggacacaaccaggcggggataaataccctgtcctccctcatcctttcttttctgtttgttctgcaccacaaagcattcattcattgaacagaggttgaacctcccacagtcctttgacaaccacattcttttgtctgtagatcagacccagtcaatccttgatatacttatcaacctcgttcgtccagtccacacgacagacaatcacaagcactctttcaaaatgctcttcaacaagatcatcagcctcgctgctaccctggccactgcctcggccctgcctttcgctccggcgccccgcagcatcagcggcggtgtcaccctcatcaacaacctgtcccaggacctctacctctggtccgtctcgggcaccgcctcacccatggtgaccttgcccgctggccaatcctaccaggagacctggcagatcaaccccactggcggcggcatctccatcaagatcggatgctctgaggatggctccgacgtgctgcagtacgagtacaccaaggtcggcgacctcctcttctgggacatgtcgagcatcgatctgagctcaggctcgccgctcgtggctgccggcttcgatgtcagcatcgatgacagctcgtgcgacaccgtcacctgcgcccccggcgacgtcaactgctccgaatcctaccagtaccctgacgaccacaacacccgtgcctgctccagcagtgctgcttataccctcaccctgggtacagcgaactaagcaaaacaaaatcgtccttgaaacgtcatgtcactctttcatttcccggcgtttcttggacttccacgacccgcatataggcaggccctcgcccaggcaggcggtcttacgactcatgacggatgcgctctagtagcgctcacggtatatatgggaacggaacttggcgcatatgaaggatataccagatacctagggttgggatagattgaaaaatacaccactttacactacctcattaacgacgtctactgtagccatcgtatgcattagctctaattttactcctgaaatttaaatattaagcaacttcgaactaggtctctagcaaaagctctgacgccattggtcaatttgagtgagctcactcatgggcggtacctaaacggcagctagcgtatctcttggacgcaaaagtaacaggtacataccattgctgggatgctcttggtaaatgccaccatctcactttacaagccatattgtccaggcgctcacttgagacaatatgaaacatgcctgtcacatcgtcgtcacctctgacggacgcggggtcagactttagcacagtcacggcgcctgagacttcgggaactgtctcatctcgagttgagatgtttgcatatcgcctagcgttcatcaagctgggtcccgtaaatgtctgtcatcaaagatatacagcatacatttctttatacattattgtatcggtggccggacatccacaatgaggtacatcatagtaacgtcgcccggtcgatcctgctccacactgtggattaacgcaacgccccgactagccgcggttaccacccgtacttgggccaggagaccggtcgatcggagcttttctcaatgctccagtctgccctctcaaatttatgattattctgcagttgtaattgactatattataatttgcgttgggaatgtgaacatctttagagattgaggcttgagtgctaagttattgttctgttggctgatgtcatcgatcgatgaacagccggcttacccaatggggaaaagaatacaccagttcaagctgagcaactccactactctggacattcaccggctcacaatggaggcattgcgtaactttgtatcatcaacggctgcactatccgagtcggagctcggaaggacctatggcggagattgtgttattccctctgttcttggttgctgctttatttacaagcgtacctttccgcccctggctccgtccatggctcagctacaccatacatcgccagcgtgaagactgagataattttcaatatggcggacagggcgtcttcaagaccaagagctcaagtaagatctccccacactgcagttggatatagaactgatatccctagtctgaagcagccagactccgagacgaagagcgaatgcaagcccgcccttcaccaacacgcagcgtcggaggtggtagacgaccctctggactggcaacagaaggctcgggtctgcgtcaccgtaacacaggactctctcgacgaagccgcacaaatcgtgtatccagcttgtcatcacgaacgacgctcgctaaccgcacaggaggcaacttcacttttgccgggccagaggagacgtctcagctccgagcggcacatgagccctttgtgcaccccggatacaccgatctcaatccagaatatgagcagcccccgaatacgaagccagtatggagtttggcgaagcaaaaaaactcgggtcgttaggccggggatggtcccgacgaaggaggagagttgcagcttcgacgacta

SEQ ID NO: 15393 - DNA, 473 bp, Emericella nidulans
cacaggaccgatacatttgatctcttcgtgcctcttttaataacttcctcgagtctggccactctgggatcgggtaggtcataggagtgttaggagtgttagtgttagaggcgttagtgtagacttgcgttctctttattgttgcatcacatctttttgtccttttcgttcccttatgtgttatcttatgcatacatcggtccccgttctacgcttcatgctgttctccgttccaaatttccaccgggatctacctacggtcctttccttattttccggtgttctttttctatgcccatattttttatcttttatattcaattttgatcgatgcttcttctgtcaacccccctgttctcttagtacccttttttcctttttgaaccagagtaccctatttttttcggttaaactttgtcttttatctctggcccttttatggctaccatggtcttttctctacattttttttc

SEQ ID NO: 15394 - DNA, 3049 bp, Emericella nidulans
  unsure (1)..(3049): unsure at all n locations
ttcaggactatttgggtctcatcgcacgtttcgagactaggaggcgaggagcggtgcaggtattagcgctgaacatactattaattattggggcttggagctaatggtacgttcatcaaagaagctagcgtttttgtagttagactagatctcaacttggctgaagactcaaaaaaggtgcaaagtcggtggctgccggcttgctcccagtaggctgccaactgtccgcctatcatctccacctatcatctccttcctgagaagccgaagatctgaagaaggaattactattctctgctgggcagcgcattaatgcaggagaccatggtatgattgtacagcctcgcaattggcgattgaggggngcgggtcactcaacagagcacggttacaaataacaaagggatgcaacaactcttcaaggttgcaaacgctgattccaatctatcgtaattgaagtctctaaccccgtcttctgggccactggaatggttgacgatgttactcaaaatcgttgagcagggccttggagtatgaagaccgtcggattctgaaacctgaatcatgcggcagacaattccgaggagaggcacggcatgcgctggcaatttgcaccacaacccgaacagtcaatgatttgcagagaaatgatctgagccccgcctaaaataatcagatgtcatcgatgatttgctcccaacgttccccataattatccatggaaccgtgcgacgtggctgaaaacattggcgcacatcgctccatctggagtacattctggaagaacgggcgcctagtccaacgaagtgatacctcgacggttttcagagggtttgaactcaatgacttagatgaccagacagagatggttgcatgttgattagaagagcttctccagcttacaggagctcactccgcattgggattgctcctgtcaacaattgcagagtatgacagggtagtaagacctaatttctcacggtacaaaggatcatggaatgataggaaacatccgaaaatcggagagattcggccaggtcacgcacaagccacaattgtggctctgctactgtgtgtctttttgtgttccgaactctcggactctcgtatcaaactaattgcctgcgcctcattttataatagagtcatcagataattacacaatcgcgaaacaaaaggcatgttgagctcatacaatgtaatcactgttgtcattccttgggagcgtctctatgggcatcagcggagaatcgcctttccgaacatgtcccatgcgccttattcattccgttcccaactgcagccctaccaaaacaattacataattctagcggagctgggtagcgttatggatggaacaagaatatccctttgttcgtcagtaaacgcccagcaaagagtatctacgtagagccttagcaatctcgtgacttataattgacctactctgtcgcagtatggatgaattctgtcgtgctggagagccggctagcgactatcacaacagatgactactctatacgataacctcgagtggcgaaggcagccgccccacatccgcctggtcgatgatgcgcaataagtgtcgttaccatgagttcttatcataaaagcctcaatgagtaggaattgcctggtgccctgctcctagcgttttcttgagggcgacgttgggtctgatttttccactacagagctggtgagcataagaaatggaaggatctcaacggtaaggggcggattttgaaggagatctaggtcggttgtgtattgtttttaattccatcgtctaattttatcaatgtcagcaagctttaaggaggagctgaaggtcaggctcttcaaccaaccctgcttgttctaggaggtagaagtttaggtcggtaagccttctagtgcacgctgggcaggcacataagaaagaacatggtgagagctttgatgagtagacaagtcacgataccggtgacctgtcaatcgccgccatgaagagctcgacaaattgtgaaagtagacgaatatggtgcggctgaggtagtagagaagcaggcgtgagacgaggaagtaccagcgacaacgaggaaagagtcctgagagaacatgactaagaatcccaggtgagatatttgtttcggttttattttaacatccaagtaccgtacgcgggccatgactcgaactattcattgttatccagagcggcgctaagtctgtctcgaccatggtgtatgccaacatcgatagaggtaagagactgtgatctgtgcctgcaggactgaactctgagtgtcgagtgcctagagctttatttgtccaaacttttgctcctgatcatccgccctagaagctctttgcagttcttctcactatattgttcccagacttcgtatagtgagaccaattcctgcgtagattcaatgaccgccttgatgtcgacctcactttcagcaagccatgcgatgagtttctgtatcctaggaggaggaccagctccccccttatcgctaagggccgcgagaatattcatgccgccgtctcgcattgcccctgcgattggagctgcagagccatgaaaggccgtctggctgctgggcttgaagacaacggctacaataatcgccatgactgcgataatatgtggcgggtatagtaaggataagtcggtgagatagtgatcgttgatcactgaccacgcaagcgcgacctcatcggacgtaagggataactcaggctggagctccgatagagttcggtacgggtgatgtacgataagttgggcttgcatctcagatatcagggagaactcgcattcgccaactttagagacgtcagggacgataaactctgtggtgcattagcaatgaccatatgctgttccacattcacgcacctggccagagagctcgagcctcactgacgacgaatctgatatgctgcggacactcttccattttacaggcgagatagaaggccgtcgtcagaacaagatacgggtttgtattcctgatctcgttcttcgtgtagtatcgcttgatataaacctgagccg

SEQ ID NO: 15395 - DNA, 528 bp, Emericella nidulans
gaccgtaaagacactatgaggtgcgcacgatggaggccggttgtgctttattgtttttaaggcgctgcggccattaccaggtaaatgtggaatagaccgcctggtaatatattgaaccccacgtcctgcatgccggtctacctgccgacactcaggctgtcattacacaatacgggacctgaaccacggatagcaggagccttgccatggcctatgctgctttaatcgacgctgaattcacgaatacttggcctatccgttcatatcgaattagccgtgtactggctatgctactgctgtgacattgctggtcagatgccgcggagacccggaccggtgctgagctatcacctgcagacgcagcactgtgcctgccggacatagagcaaacatctacttgttctgaggcctggcgaacggagctggcatatccgaatatgtgcgactacccctctgataatgctgcacagaaagcgagcgtcgctcgcagttctttatgttcaatatgaggcttggaggcccttttat

SEQ ID NO: 15396 - DNA, 438 bp, Emericella nidulans
ctaggaattttcggcatacatcccgcgggcgttctggggcccaatggggagcaattcacagcggattattttaatgcaaaagccacggttaacacgctagcctgtatgcggcgctttatggataggtatggacctgctgccgagaatactgaccactctggtgtgctgcaagcggggagcgaacaactgatgagggattatacagaggagagcgggacggatacgcaccgagccgaagcgagaggtatgatggaagcgcaatatggacactgggaggaggagctcgacaagaccaaccccgagggtaccgcaaacttactgagagcgattcgggaaggggttttccaaggggaaatggttaatcccacgaaaattaaggcccggggccccggtgcgtcccggggaagaaaatttttttgaggtttcccccctgaacgg

SEQ ID NO: 15397 - DNA, 443 bp, Emericella nidulans
cgggggagcggccaatcaactgacggtaccgctgcggacgccaatattggcactctaactaacccgaccgttatgggagctgtacgcatttgctgtgccgtacttgacgcataagaccaaaaccaagatagctggcacctctgactgtactgggagaaccgctgcaactaccctaggggagcgatgaccacattcaccacgcccactgtcaatataaatgccaagagtggggagatcgataccttctatccgcccaatggctcgtaccgcatacaatgcctgactaggtatcattaaggcttggtggagagacctaccctgcacgaccagtacgcaaccacagagagcgagggctgccactatagtgccgaaagcgactatctagatagcctgcaccggagagaatactactacggtctgatagacactggacaggttacact

SEQ ID NO: 15398 - DNA, 2472 bp, Emericella nidulans
agtggccaagagaacatgcatctgattgtgccctcccattgtgcgtctgtttatagggtcccagaacccagcgagcatcagaaagtcagctattgacagcttgaccaaactttcgcgacaagtgaatgtctccgattttgcgtctttgattgtacactccctttctcgagtcgttgccggcaacgaccgtatgttacgacaggctgctatggattgcatatgctctttgatattccagcttggccaggatttcaaccattatattcatctgctgaacaaggtcttgaagcatcatcaagtcaatcacgtgaactatcagatccttgtcacaaagctccagaaaggagacccgctcccacaggatctcaatcctgacgagagctatgccccattggcggatgacgcgaactatgcagagatcggtcaaaagaagatggtggtcaatcaacaacatcttaagaacgcctgggacgcttcgcaaaagtcgactcgcgaagactggcaagaatggatccggaggttcagtgtagagcttttgaaagaatcaccttcgccggcgctgcgtgcttgtgccagcctggcgggcatctaccaacccctcgctagggatctattcaatgccgctttcgtctcctgttggacggaattgtacgaccagtaccaggaagagctggttcggtcaatcgaaaaagccctcacctcgccgaacattccaccggaaattcttcagatcttgctcaatcttgctgagtttatggagcacgacgacaaggcgctgccgattgatatccgcactcttggaaaatatgctgccaaatgtcacgcgttcgcaaaggcgctccactacaaagaactcgagttcgagcaagatcagaactctggagctgtagaggcactcattactatcaacaatcagctccagcaatccgatgccgctattggtatccttcggaaggctcaggcgtatcgggatgttgaactgaaggagacctggtttgagaaacttcagcgatgggaagaagcccttgcagcttacaaacgtcgtgagaagattgaccccgactctttcggtatcacaatggggaaaatgcgctgtctacatgctcttggagaatggaaagtgttgtctgacctcgctcaggagaagtggaaccaggcctctctagaacaccggaaatcaatcgctcctctcgctgcggcagctgcatggggtcgcggtcaatgggagctgatggattcgtacctaggagttatgaaagaacaatctcctgaccgttcgttctttggggcaatactggcaattcatcgcaaccaatttgatgaagccattatgtacatcgaaaaggcccggaacggccttgacacggaactctcagcacttctcggagagtcatataaccgtgcctacaatgtagttgttcgcgttcaaatgcttgctgaactcgaggagatcatcacctacaaacagaatgttggtgatcccgagagacaagaggcaatgcgccagacctggaacaggcgacttctcggctgccagcagaatgtagaggtatggcagcgcatgctcaaggtcagagcacttgttacaacaccgcgagagaacctagacatgtggatcaagtttgccaatttgtgtcgcaaatcaaaccgcatggggttagcggaacgttctctcgcctctctagaaactgtcatccctgacggcaacggcggcactcgcactatctccccaccagaagtcacatatgctcgcttgaagtttagctgggcaactggccgccaacgcgaggcccttcatatgctccgtgaatttactgccaacctaacagaagacttcactcgcttcaatgcacttgttgcctcacaatctgaccataacggtatcaacggcgttaatggtatcgcagaaggaaaccataccgatatcatggcccttcgagagcgcgttggtgatgtcaacaagtttagaaagctccttgcaaagagttatctaagacttggtgagtggcaaacggctctacaacgaggggactggcggccagagcatgtccgcgaagtactcaacgcatattcagcagccaccaggtacaaccgcgattcctacaaagcctggcactcatgggccctggccaactttgaggtcgtgacgacaattgccagccaggcaagtaaggacggcggaaatctggcattggttccagggcatatcgtaacagaacatgtgattcctgcgattcgcggcttttttaggtccattgccctctcttcgacgtcgtctcttcaggatactcttcggttgctcactctctggttcaaccatggtggtgaccaggaggtgaactcggtcgttacagagggtttcacggctgttaatatcgacacgtggctcgccgtcactcctcagcttattgcccgcatcaatcagcccaacttcagggttcgcagcgccgttcatcgcttgcttgctgaagt

SEQ ID NO: 15399 - DNA, 3767 bp, Emericella nidulans
ttaccccgtttttttaattttaaaaaaatttttcctttttttttttttttttttttttttttttttttttttttttttttttttggagcgccgttgcgggagtattatggggcaggggatctacgggtgtttgaaggcgaatatcccgggggcggaggggagcccaggaacaaaggttaggctgaacgctctcgttttcatgatagggtttttcacgaaagtcagtatcattctgtcagtgcatttcatcttgcacttcatcgagcctccactcttgtttgagttgttcaacggatagtcgctgctccttgtcggcttcggtttgtgtttctctctgtgctgaagcttcgggtaatcctgacaacctttcttcggcctccttcctcttttgtttgcttgttttgtgcgccgagatgctttcggatgctaaaacagataccagcagcgatgccttgcaggagtttctggccgagaagcattctgagtgtggcagactctgggtaaagcgaagtaaagataaacaagcactttgaatctgatcctgagagctaaggtaggggcgggcatttatgtaccatgaggcaagtggctgatatacgtagccatacgttactccacttctgtcatgcttctcattgcagccatcttaatgggcaggcgatgtcagctgaagataatcaagccttagtggaggtcttacctgcgctgggaagccttctctcctcagaggcgtgcagtagagcttgattgttcggcctatgcaccgcctccaggtaacactgggacctcgcgtgcgagacgcatgaccctttcggcatagatttgtgctcgcgtcatccccgaccgagctcggctcagcctcagttgccgacgggtctggggccactcggctttattccagacctatgacaggtacagcagtatttcattgtaacgatacactagcgcagtatttaatacgctagtgcaagcaaatctctaccacgatcgagattcaaggttagaaaaggggctgatcacagtgatcagggatttgtgcgagatctgaccctgttgacagcagcaggctgaaaattctccgaaccatgcgacttcatacgttgacatggctgctcagcctcagccttgcatctatagtcaccgcaactgcaccggtattacgaaatgcgaccgtgacccgtgggatcgatctcttcgagatccatcttcctgtgaactggaaaactgccgtcgctgagggggtggagtttgttttcgtaaaggtaggtgatctgcgctccgtctaccaatatcctgatactgaggcaattctcccacacatagtcaacagagggcatcgcgtaccggaacttgcgcttcaaatctcagactggatccgccgccgccgcctctacctccagtaacaccaccatcctccacggcgctgttcacttcgccctagcgtcgcagagcaccggcgccgcgcaagccgacttcttcatttcgcacggtggaaattggactgcggacggggcaaccctccctggcgttctcgaaatggagggcaatatccccggcaaactgtgccacggaatgagtgcgacagaaatctcagattggatgatggatttctcagaccggtataaggaggtcaccgggcggagaccgatcttgttcctctctgcgggatggtgggagaagtgtgcaggaaataatgagacgttcgcacaggagcatcccctctggttggcgaattgggcagatgagatgggggatctgcctgctggttggaaagaggcgacattttggcaatattcagggagtgccggagatggggttagtggagagggagatgtgttctttggtgatagaagggaactggtgagatttgcgagagcgtctgtataatattcaacactatataattgtaactatacctattgaaagtttacagtcttgtaaagtcaatgtacctataaccaaaacgaccctaaacatgctcaacccagttgcccgagtctgcttcgagctcattagcatttccaattctcgcggaaaactagtttccatattccatagggctatattcgtgccgctcatgtctttttccgggatgaggtgcaaacgtatacatatagtggggttgttcagacggaaacgaagcctacgccatggcgcccaatggagtcctgtccctaccaagcgcaaaggaagcgaataaagccgtctctttcccctctagttgaagcatcagaagtatgatggcgggtatctggacgcacttgtagggtcggatcgtcatggatatgggacgggaaaactgcgctgatacgttatataagtaccatgtcatggctctcgcattgtgatgtcgcgaatcaagactctcgcgatgatgtacgcttgtgatactgagcttgaaagggtgtcattatcgagggaaagtttttatagaattgagcaatacgtcggtttcagatcagctcttttttccctgcgccctttgcttcaatgtccaagcccgtataacagagacgtaccaagggcttctaccgcagctagcgggcaagcaagcaactggggaacatatttgattacagtcgcaaaactcttagttaagaggcatcacggaaggttataatgctagctcagatgtatagtaaattcaattatgggactcaatctaagtctcaagatgatcattaacccatactcccctacaagtcggacaggtaggattccgggctgtggccagccacgtgcttatgcatattgcgtggtagttgactccacaatgagtcttgcaccaggtgagctcagcatgcttcctatcgttcccaccgtaactgtcctgcgctgccgtgctcctgacaggtcccgaggcttctccaccagccgtagcagcatagccattgttttcactctccgagcgagaggaagagcttcgtccgtcccttgattctcgcaatggctcgagacagataccacagtccccttcaatcgcccggcgggtagcagtccttagagtagcaccagtggatgcggtcgaaggttcagtatgaatggccgaagattgcaggcgactgagcaatacagattcaaaagtgtggttactggtgcttcgcaagttgtctgcaactggtctggtgcggacagtggatgttgtcgttgtccgggctgtgcgatgagcgatagccctcgtcatgcccactgcctcccgtgtgcccatatcgcgtgtggccccggaggacctcctggtggatgaacctggcctgtttgttgcatcctcaattgcagagacagaatgtaatgctcgactgtccacctcccttgctgttgtttctgttacactaatcctagatcgggtttccacacgtctttgtccggcattccttgaggttgaagaggatgtacttgtagacgcaggctgaggtgtcgctgtggaatatgcatcacctggaacattattcctagtgctggcaatgctatccgagcgactatatgcagataatgagcttgtcggttgcgttcgcaaatacacagtgggagtcgcaggtgttgacctgggagtcgggacgtggcgccattgttcttgctccagggcccgctgataatcggcaaggagcttgtaagctctattctggaggccagcgagctcctggagtccagggcgcgcatattcatagtccaagaaccgcccaatatcttgccgccatctctcggcaagaccttcagcctggccctggtgaaccgcgtacatagtgtaaactcgctaaataaatgaggat

SEQ ID NO: 15400 - DNA, 1439 bp, Emericella nidulans
atcctcatccaagaagtaggacttctgctgccgcattgagtacgccacgtctccgtcattgtgaaatccggcaatattgaatctcgacagcgggacttcgcgcagcccgtccttcttcttgcgcaggaactcatacattgaagggacagagttcacgccgccaggcagccttgtcccaatgccgacaattgcaataggagcggacccacccatgtcaaggagactttggttcgacatcgagtgctgcgccgcttcggtcttcggctctccattggcatccatcttcacgatctctacctctggtcctaggtagttcttccggtgaacgggccgacggtgacgagggtgcggatcgaggtcacttcccgtgaggagtcacagctcgttatatttcgttatttcgtcgaaaatcgagcccctcgcctattcgcacaaacccgcccagggcaagtcaaagttacaccaatagtggttgctggagccaaagaaaggttacttgctctagtgagagtctggactggcccttgtccaacagaacgcgggggcgcgcgttacaccatcaacaccacctcttattccagagacaaccttctcgctgccagagacaaaccacggactgtggatggctgctgaagtactgcatgacatgtggtcacatccttgcgcaaccgtgtagactgctttgtactccccggtttgctcagcgcgcacataaaaacctcgtgccatgagtgagcacacgcccccagtcacctcgtgggccgcgaatgtgcatgcttgttttactatggcgagtctttcaagtcttctcactcaatctcgagcaaagccaagcgcccctcgctgttgaccctgcgacaacatggagggaactatgccagcaaatgagtatgtgcggcattttgagaacgcggtcgtccttctcactggtgcaactggcagcctgggtggctgcctgctctataagctggcactacgtctgccgacaaagaagatctatgccctgtgccgaggctctgttggtgagtcggttcgcaagtgggagtctaccatgccgcagcagatcgacgaaattctcgacactggcaaggttgagttgatcaccggcgatctgtcgaagcccggcttgggcttgaatccagccattcgcgaggagatgcgcgaggaggttactgcagtgatcaatacggccgcgaacatctctcttgtcgaggagctgaaagactcagtgcgagacaactgccagactgcaattgcactgttccaggaggtgtctgaattccgccatgtcaggcacttcatccaattctcaagccttggcgtcaatgcatttctcaccggaggtctcatcgaggagccgctctattccccaccacgcactgtggacgaggaggatgatcgttaagtctaccagcgcaattccttaactgcagacgatg

SEQ ID NO: 15401 - DNA, 3318 bp, Emericella nidulans
gccatggcgccatgatttcgagaggcctatgtagtgtacgctgtggaagtgactgagaaaataagcattgcatgattcgacggctccataacggaaggcgtcgactgatattgagaaacctgtaatgatcttatagaacgggcaggtcctttggtatgcctgcttaccccgagacgcaacatcacttgcggctgcctcggcccaagcggcatcttcagcatttcccgccatgattttggagaatgctgttcccgcccgtgaagtttgatattgggcaggatcacgttgcgctggcttcgctatagcagctcgatctgcggcaacggctttctgctcgggggtgctgactttaggactctcctgcatcggggaaatcgcgctgggcctaccgtcaaggcaatcattgacgtgcgccatgactttctgttcaaacttcctttagtctatctttaaattgtttgaacttaggagcataccatttcatcaaagccttccaaacttccttggcacaccgggcacgtcggcttctcatcggcatgtatagtgtccgcagtcgtattattcgcatcaaacccgaaagtcttcttcgtgacagctgcttcgcactcaaaatctaagccttcatcttcaactccgcccgcttctatatcgtcaaaatcgggatattcatcttcttgcatatggctcgtggcttctcttaccagcggtgatatgtcggcggctagatcgcgtttccctgccgtttgattttcgtccgaatgtgcctctgactccttcacatccttctccggggccacatccgcttcaccgtcggcatactctctgaaagcctccagcccttcattttcactatccgactcatcaatgaaagggccgctgatcttctgagccttcgaagacaacctttcgacagaccttgcatgaggtgcttctagatcaacctttcgccgcttcaccgcgttttcactctcgttatacctgtcgatcccttcttccatcccttcttcgagagacctagcagcaccagcattctcattctctttatccccacttctgctcccccaaatatcaggggaccgcgacctttctctttcaatatttttttcttgacctaaccgtgcatcccgactcttcttgtcctccaagaataatccctcgtcgccaccaccactagcgtttgaacttccctccctctttaaaagccgcggccgcggagccgtaaccctactaccaggcctctccccctgcgtcgtgaactgcgtaatgcgagcttgtttggttgttgatttcggcggcccgtccgccttttggaaaaaatttagaagggtgttatttcgttttaccgagtgcgactgcgattttgcgccggcagagggtttggacggtgttaaaacccgcctattgttagatgatgctggcattccctctggaatctgaagattgggaattaagagcgaaaaagcggtaggttgtatagagaagggagttgcgaaggacgttcaatcgaggtcacagctagtgtttaaggacgaattcagtgaatgtgcatcccatccggcatccacgcggcatgaacggtcatattattttgtccagtgaaaaataacggattacagaagcagatatatgtttaaaagagagacaatgttgcgtatatcaagattagtggccaatgtctcggaggcgcggcaagtcgattttcgcgacacgaagtcacgtgctcaggctacttactctatgtaggctacggctttggaaataacatcattgcagggctagatggactgttgacccttgaatgtctaattcgctatcctggcgataatgatacgttcgaaaataggagtaccgcccgctgaaatatcagcaggaaagggacgcaatgagctcgacccagcagcgttacgtgccttctttgagtccgctccggtatttccaactggaagctcttcccaacggccttccatcatacatcagccctcatggtactcaaccacctggccctcccaggttgtggtttcctcggtcgacgaaatagcaacatcgcatcacatcgtaaaagcgcaattattagataaatatgtctcgaatcctaggtgtcgaaatcaccgagccttccctgcctggttcgcagcttctgaaagaacaaatcatatcagtgtcatgtctcatgtcaagatttgttccaagagagtaagtggctgcatacctctccgcgtcgcatcctccaacaaacccacatcaacttccgaccgcggcaaaaccacataccgcactacactccctcgaataaacatgttcttgacggagctgagatgtggatatttatcgaggtctagaacgtcgatatcgtcgagtttaatgttcaggtactggtcgacggacttgagcgtcccgcggatacggatatcattcttgagctctattgtcacgacttggttcgttagggtcttgaaaaagctgaatcggaggattattaataatgctagaaaattcatatggtttattggaggccaacgtacctgaaaaagagcattttggttgtgcaggtttttggtgaagattggttgacaatgcgactgcgtcttcagacgcggaggagctctaggcgggacggacttgttcacgtgactggctcgcatgaagtagactgagattcaatagtcatgtatttgattaggtctatattctagactgcaaagcgtttgtgcaagagaaagcttacagtcatataacattgtctcataggagatgtcgcctatggctgagctgtgagttgttacaattggattgggagtgatacaggtgtacgtatgaagtggaagaatatttctaacagatagggtttttttcatgttatactaggtcattggtatcaagtctcatgccgtcgtactcttgccatctcagatctcacccatcacagaacgctcaacagaaccacgccaaaaaatgtttagttatcagataatgatcgatcgccaccaggacgatagagggaacaaagacaaccaccaggactgaatatgaaaatttagagagtgaaatgggcgcaagccgcaaccgaagattcatagaggccctcaaaaacctgtagcgtcactctgcttctttaatggtttcatcgcccaaccagacaagcatgtccagccagacccattcttccgcccctcgtcaaacatactcccgataccctcaagcaatttgctcttatctcgacccatctcaacctggagctttagtagccactgttcccagatccaacccacccgtaaacctggtatggacgcaatataagcgtgctttccacggcccctg

SEQ ID NO: 15402 - DNA, 1349 bp, Emericella nidulans
ataatgaccgctgccgagggcagacttcccacggctcgcgtagtagccgcaatttacttgcttttttccaccgatcatgtgccagcgcctggaggtgagattgttatttgcaacactttcccctcatattctcttgttatctttcggcgaatggcccggcgaactgggtacaatggtctgggtaagtagatagccaagggtgcagcgctgtgacgtttaccctgacccagcattcaaagatgcgcgagagaaaaaggaaagcagaagcaaggcctgggttatggaattactgaaaggtcagagcgctagaggtgactggaccaagagcttgcgcagtcggtaggggatcgtgagtttgctgaggcgcatgcgacagagatattttaagcctgcaacgttcttgctggtgtttatctatgcaaaggaaaactgagttcaggataagtcttaatcataaatctgttgaagagcaggaggtcctcggtggttggaggtctggcatgggagctcaagaactattctcccgtgatacgtcggtctatcgagccctctactcaagaactttactgatgactggggaactggagctggtactttgatcactacatgaacttcaggcttgcctaatctggtcatggtctcatgacctcaaagtccatagcaaagggtcctgcagggctcaaactgtgacaccagtcaagtccctgggttgtactttcacttcaggatccgccatttccatacgctgtgtgtccacatacaatgtcaaaacctgcaataacaaccgaaacaaatattcacctaccgtcgacggcggtctccgagccgacgagatcttgcagtagaaagcagaacaatagctctatcaagccgtatcgcgcaagactcccttttccctgcagcgtgtctcagccaaatgacacggcagccccagaagctgcgtggtttactcgagcattggttgacgaaccaaggacgaatccatcacgccctggtccacatgcaccctcccagcaagcaatataatgctacccgctgaacttggggattttggttgccgctgcctcgtttttttcctcgttttttccttgtctacctttttatgctcggattcagtaccttattgagccgttggatcttcgcagaatgttctatagcagcgctacacaatagaaataatccagaagactaaggtcagaagatccactcgtcatacacctataatcagatgacttccagaaatccgcctaaagcccatcaaaaaccgtattggagctgctataggagacttcaaccagggcttatactcggcatcgactatcgaaagccacgagtgtcttcgtcaggat

SEQ ID NO: 15403 - DNA, 2918 bp, Emericella nidulans
tgacatccagctagtccgtgcagtgctaaaagccttcgtcgaatcattggaggtgcttggttattcacaggatgagctcctacctagtgtacatgacacactacgccgtctaccccccgcgcgtatcggctcgaaagggcagctccaagaatggatgttcgattatgacgagaatgagcctggccatcggcacgtttcgcatctctgggctctttatccaggcaacgacatcaacctggaaacgactcctgagctcgccaaagcttgtgctgtcactctacaacggcgacaagcagcggggggcggtcatacgggttggagtagagcgtggcttctcaatctgcatgcgcgccttagggacgcagatgaatgtgcagagcatctagagcgactgttggcgcaatcaacccttcctaaccttctggatacacatccgccgttccagatcgatggtaactttggcggtggtgccgggattctggaaatgttggtgcagtcgcacgaagacggcatcatacggctactccctgcatgtccactagcatggcggagcggacggcttcgtggtgttcgcgcccgtggcggtttcgagctggaatttgaatggaaagacggagtgattcgagggccagtaattgtgaagtcagaattgggccttagggctgtagtctattatccaaacaatggtccgcgtaaggtcttggagggttcggggattattgtcttaaacggagacaactgaagcagacgtcgccatggaatgctaaacgccaatgccgtggccgtatagtttgttatctgaagaccatacaagatatttcatatggccaagagcctccatccggatatttaggcgcgaaaacgtggcggtcgtagggtagccgtagctccaacacaaagcagctcttcctgcacaccccgccggagaaatgcccaagggtattttccagcaatcaccggttcctttgagggccaactcttcaattacccggctaaagagccgaaccttaagatatgttccaggaagcgtcggcgtttttctatacctctcatagcaggtgcgaggattcaacgacttacgggaaacacaacgcactagggatcagtacaatcatggacttgacttcagtgcaagacctcaaaggtgccttgcgcaatgacttcttccatggatatgccacggcggcggcgcaggttgaaggagcgtggaacaaggatggcaagggtccttcgatctgggacacattcgggcatactccaggcaaagtcaaagacaatagcaatgcggatgacgctgtgaggttctacgacttttaccgcgaagatgttgccctgatgaagtcgtatggtgtcaacgcttatcgattctcgctatcctggtcgcgcataatcccactcggaggcgccgacgacccggtcaatgagcaagggatcaagtactaccaggacctggtagacgagctactcaataatgggattacgccattcgtaaccctctttcactgggatgttccgcaggctttggaggatcggtacgggggcatgctgaaccaggagaggttcattcctgactttgtccgctacgcgcgtgtctgtttcgaacgcctagggccaaaggtccgtcactggattacattcaatgaacctggtgtgtactcgctggcaggttatgcggcaggtgttcatgctcctgcacggtcatcgtttcgcgaactcaatgaagagggtgattcctcgacagaaccgttcatcgtcggccacacaaaactggtgacccacggccatgtttccaagctttaccgagaggtgttccaaccgcagcagaaaggaacaattggcatcaccctccatggcaactggtcggaaccttgggatgaagacgatccgcgggaccaggaagcagcagaacgggccagggaattcgagatcgcttggttcccggaccccttatacaagacaggcgactacccagcctcaatgcgggctcaactcggggaccgtctaccgcgtttcactcccgaggagtcaaaactggtactaggaagttcagaattttacggtatgaactcgtacacgacctttttcgtgcagcacaaggatacgcctccagatatcaatgaccacaaaggcaatgtcattgttcacgatacaaacagcaaaggcgtctctcgaggcgaagagtccgatacgccttggctgcggacggcacccactggatggcgcaagctgctcaattggatttggaaccgatatcatgtgcctatatatgtcacggaaaatggcacgacagcaaaaggagagacagctcccacaccagaggtactcatcgacactttccgtatgcgattcttcgaaggctacgttggtggattggcccgtgctgtcaaagaggatggagtggatatccggtcttactttgcctggaccttcaccgacaactggggtatgttcaagttccctttccctctcgaatctgactgacacagggtagaatgggccgctggctatactgatcgatttggatgcacgttcatcgactttgattctccaatgaagactcggtatcccaagcaatcggcatattatctgaaggctctgtttgagcatttgattgcttcatagtcgcccagaatgaactgccagtatagaacatactttgcgtaccatattcataatagagaatgtcgcacaaaaatggatgattgaaatgccgtgtgaatacgaaatccgtagatcgtaagggccctatacagatggtggagtgagtggaggtggaggaaagcgcctagatttctagcgaaactggttagcctgagctactcacgtgcctatacggtgtatagtggcagaattattgatggcttggatagcttcagacgactcaattaggcttaacctctcagaaataggacagaatc

SEQ ID NO: 15404 - DNA, 411 bp, Emericella nidulans
tgataataaggtgatcatggatgtcggtggctttgtccaattatcttgtgatatggtctgagtactccaacattctgcagtagacctgattagccagctcaagtagccatccgacgcgcatatcagttggagtaatcgggaagctgtgcgggccttacatcagtgtcgtcgttaaaatgaccctagtgcggagtagctgcaccttgcatggttatcaaaagtagagaattatagtagagaaatatgatgatctttgggaaattcaagtgagtttttgaaggtttttgaagccacaacaaggggagatctctcacacattattggctgcttaagctgttcctccgactacttagcaagatcatatcttagtccattgaaatcctgggaggtttgtgcttgctgattctcctt

SEQ ID NO: 15405 - DNA, 1198 bp, Emericella nidulans
aggattccaggcaggaaagcaagggatttaactgccctggatgttgcagcgcgaacaaagcaggaggttctttagcttctcctgggaaaagcgatgcgtttttattgatttgacttgctaagaaagattagttgagattagagtatgttaaccaggatagtacctattcagccagggtctttggcaacactgtaattgacatatcgcttccaattccaaattggaacaaaatgaaaattgaatcgaaaacaaaataaaatgaagtaaagtaaagtagaatagaatagaataaaatgtaatgcaatgtaaagatttctagagaatgcatattttgctacatcagcgaccacaactcgcctttgcagacctgtccagtcaacttgtccccagatgccgatggccacagatcgccagggcgcgagtgcgcctcaaagttgtcagccctgactgctcgctcatacatggcttcctcattaaccaagaagatcttgtttctaggactaatcatgctgctgagcgcctggctggcatcctttctcgcattgccactaccttctcgcagccctgagagtatgtaaccgtatgacaaagtcttcagagcccaagtgagcaattcaagcgagagtgatgatatttacttatgtggctcgcctgttctaccgaggcataggcattacggagccgggcagtattagaagctagtatattagagataaagaacgccgctgtcaacaagaagcagcagagatgttcaggagggtcttgtatttgaaggataaagaaaacttctggcactctcgtctactgcgagcagatccccgcgacctccctgaaccagctttaggcaacttcactcagatattgaagcattggtgagcgcgaaagtgggataactgaccatgattccccggctgtgattgaggcagaggctctatcgttcccatgcagcctattctttcccgagagcgtctctccggagatcacgttgggctatccgaaaagatttcgacttcttgcctcgcaacagctcgatgctagtgagctgcaaaggcattcagtgggaggtttcaaggcgatgctcccctgccaattcctaaaagatgaggccggacgctgcattatgatgaaaaatgataggaaggccacctggagtgaaagtgaatattctagaaaaatagatctgaacaaatcattagca

SEQ ID NO: 15406 - DNA, 879 bp, Emericella nidulans
cacggccccagccctttcttaccacaggagggatgggggaatgagaatggtcaatggtcctcgggtgacttgctgatctccaattaaccgcaattcagctgtcagggccactagcctgatgcaggggttgactgagtggcgtatgacggccaatcagagtcatggtgggctgcaggttactatgcggaaaaaagaccactgagtcagatatatattttgctgaacagggagaagatgcatgtcgccgcagaaacttcttggttggcagcgatataagagtattggtggtcttacgtgtgactgggatgtgctccaagtctgtcgagacaagggtgccaggcttaaaagcggggtgctgagggtccagccaggatgacaggcctagaagacataatgggtcatttactgtcgtaagcattcattcatttgaaactccactgtcattaggtggtcttatgacaaggccaggctttgtatcctgcatgccaataataagcaactgcatttccataacccttttctaccccgacggccaccactagagcaccacggccagccctagtatgccgagtgcaccgagcaagcttgcggcaacctcgcccgtggcatgtggggcaaggccactagaggtttccgtagctggaccgttgccgttctcactgccatctccgtctccagttgaagaggaagtcggggctggggttcgagtcgcgttgagatcgacctctcctgaatcgacttgtgacttcattgcaaggacgtagctcttgacctccgtcgggaggtcttcgtaccagctcggggtattgaaggacctgaaactcagatgcgatcgagctgcggccagtaggtaacagtagttgagcgagcacagtggag

SEQ ID NO: 15407 - DNA, 682 bp, Emericella nidulans
gctctgagtcgagaaggactgccggggggaatccctacttctccagcactgcactataacatgccttgttgcagaacctcctgccaactggccgggtgtctgccgggatatatgtgggtacttaacgcaagcttaaccttatcagaggaggactatatggcaactataccaaacttgggagcccacctcgagcctaccatgtggctcgaccattgcgttatacgaccaaaacccatttgtataacacctgaggcatattcattggacaactgattgccaccacatttggtccctatgttcaggaccagcatccaactgaacaatttccaacggctgaccctaagttaatgaagaactgcgccatggatccgcattcaacgcagccttgtcgctctgccacgccatgggacctagtcaaactgcgcgactacacgagagctgctgctcctgagtgcggtaactgccaacatacaacactgggcttgtggcgcattgcgcagtcgttaacggtgacctattacaactagcacggtactacatgccacaccaatatccagaccattgtaccaacaggtggcgtcgacatactaacagtacataagccgctcaaggacctgacgagaacaccttgatgccagcatgagtcgcagagcagtgctttataccgctgctgacacgatct

SEQ ID NO: 15408 - DNA, 2107 bp, Emericella nidulans
atacacatcgccaccacaccctagcatattgcaccatccacaagcaccagaacctgcacctcctcgcgcacaaacagcgcatccgcccgcgtgggccctgacctcgcaatctggataccaaatgaacgagccaagcctcagtttaactccagagcatcgcccagccgcaggcccacccaacggccccaatctgaatcatgactctgaccctcgcagacccgctagacgccaacagccctgcggagtcgggacaacccgacctcttccaggctgtcccggtcagggtcaggagccctccagacgcaggaccacgttcacggactctatttccaaccctgattcaaccatccgctgctgggaccacggctgtgaggggcgcaaattctcatcggtgggaaattaccgccgccatctacgcgagaagaacgggcaggccaagatgcacccttgtccagactgcgggcgggtcttcacgcgctcaaccgcgcgcaatttccatcggcagtctggaacgtgcggactcattccaagccagctgatgctccagatggggatgggaatgcagctgcaggtgcagatgcagcctgtgtcgcagcactcgctgcctctggccaccctccggctttcaacctggccccgccagtgctgttggaacccctggccgattggagcgagcccagtcagatggatctgtacgcggcttctggggtggtgtttgattgatgagatgccagtaactcagtcagcaatgcatccgcgtttgcccggctgagcgacagaacaagaaaaataaaaagaaaacaaaaaaataaaaaataaaaataaaaatgaataataatgttgaataaataattatccaagattagataaatcaaatcatcatcctagactattcttagttctccctcccatataatattctaattcttcatcaatttatggaagacgaagagcggatctctagtgtccattcaacaccgtcttgtcttatcctctactatattagcagctctagtatatgctaactggttccgtctagtctgttcagccgcggcgggcctgccggccgatcgacccttgccagcatcttctctgagttcggactagtgctgacaagcgtttggcgagcaggccattcggattgacgcactgctttctgcctgcccgttgagcggcatatatatacagtatactgtcttgcaccctctagccagaaccatcacctaccgtccgcgccacaaaacctcctccagctagcgcttattctgttcatccttggctaaagtcgaaacagttgttccgtcggctttgtcacattgtatccatcagaaagcgccaacatggctaaggaaactagattctacccgtaagcctctcatcagccctaactactggtcaaggtcaatctcattattcacatcattcagatacaccagcaacggcggcgccacattaggcgtctcaggaccagatttcgccatccttgctggcgatacccgctcaacagcagggtacaacatcaacacacgctatgagcccaaagtcttcaccatccaggatgcccgggaccgctcgatcgttatctccgtcattggctttgctgctgacggacgggcgttgaaagagcggctcgacgcgatcgtagctatgtacaagtaccagcacggaaagaacatcggtctgcgggcctgcgcgcagcgggtctcgaccatgctctacgagaagcggttttttccctaccagctgcagacgatggttgccggtattgatgcagacggccaaggggccatctattactacgaccccgccggctgtattgagaagcggagccactgtgcggccggagaggcgagtagtctgatgctgccgttcctggacagccaagcaccgcggctacagccgttgagcttacagacggcccagcagctggtgcgggacgcatatacgggggcgacagagcggcatattgaggttggagatcacctacaaatgttggttgtaacgcgggaaggggttagcgagcagcttgttgatttgaagaaggactagattacttaaatcatacattggtaatcggttttggcaccctggagcccgtagcagaagt

SEQ ID NO: 15409 - DNA, 862 bp, Emericella nidulans
  unsure (1)..(862): unsure at all n locations
agaccgaaatagttttaccatttaccgacaagtggaaataaaagaaaaacttttatgataacaaaattgaacatgctaatttgcgcaagagagtacaaattgagtgcgcggtttggcacctcgatgtcggcttagctcatccacatgaatgcaaaaatcatgaagggttcgactgttcgtcgattaaagagctacatgagctgggtttaatacgtcgtgagacagtatggtttctatcttctagagggaattaaagtagaataaagatagccccttcgtacgaaaggagttgggtatattgacctatggcttacctattgcttatgntatatatattattttatatatatatcatttacttatacttaaagaaatatgttcgcataggcatgtggtggaagggttccctcaggtaaagaataagtgccttaaaagatttaagcgcgaaagcttacttttggatacttttaaacgtagtagaacacttccaggtttatttaaaaaaaattattttttttttttaaagaaaaaggtttagttggtcccatctttacgaatttttgacctaacagcctaacttttcaaaaacctaatatactttttttcgaaaaaagcccggttggataaaagaaaagttttccgttgttatcggataaaaaagcgccgctcttgtcctgggggtttaaactaaaaaaaaggggtataccccccggtgtcatggtatcccaacactttctttttgtcggggtcttacctcccctctgcagaattacctctctggactctctcttcacaactgtaggttttccttccccttcttccatccttatcttactctcgcgtctattactttcttcttttt

SEQ ID NO: 15410 - DNA, 141 bp, Emericella nidulans
ctaaggctcacatgaccgacaatatgcatatgagatggcatatgatagatccaatcttggtacctatatcggtgacgctgagaatatcctctcctaccatcatacctgtatgacgaatgagcgacatgtgccatatagaga

SEQ ID NO: 15411 - DNA, 2138 bp, Emericella nidulans
tggtgttcttaacacccgccgagcatcttccctctgccatttccaccgccacttatcccatttaattagcctgctatgagtgctgacacaccggtacggtcagcgacgcagtcctgtcctccacccgaattgccacaacttgtcgctgagcaacatgttcccatcgctcccaatgataaggagacgcagcggttgattgtggttctgtcacacgccagcttggagacgtttaaagcttctcacggtggacgcaatggtactgctcgcgacgagaaatactctttgctaaacagcgatgaacatattggcgtcatgcgcaaaatgaaccgggacattagcgaggcgcgtcccgacatcactcatcaggttggaccatcttatctctagcgaagacattctgataacacttgatcgctgaccatcctcgtctgatacagtgtcttctcactcttcttgactctcccgtcaacaaagctggcaagctgcaaatctacattcacactgccaaaggcgttttaattgaggtcaacccctcggttcgcattcctcgagctttcaagcgcttcgccggtctcatggttcagcttttgcaccgactctccatccgttccactaactcgcaagagaagcttctcaaagtcatcaagaacccaatcaccgaccatttgcctccaaactgccgcaaggtgacgctcagttacaaagccccggttgtgcgagtcaaggattacatcgagtctctgggccccaaagagagcatctgtatatttgttggagctatggccaagggccaggatgactttgcggactcgttcaaggatgacaccattagtatcagcaactacagtttgagtgcgagcgtcgcatgcagcaagttctgtcatgccgcagaggaagtttgggatatcctatgaacgaaattgtcattccactcccatcttgcaaatttcccgaacttgacgacgtgacgaatctccttgcggacatacatctaaacctgtcaaaacatggcaaacaccgcatgttggaattgacctttctggccctcgcgccgcccttcctacgtacctgtggacttactccatctgacaaattggatctacgtcggtttcctgttttgccttacctcctgtttctggatctgtcaagatttatgtccggtctgtggaaccaacaactccaggagtccggattccagattacagccttatgattcctgtattatgcgctcttccgacggtatagttgttgacaagtgacaaaaggattgtcaaggcccgggcggatcccgctgtacttgatttatgggctacgccgtatctgcggcatgtctattaacacagctgcacacgatcatgtccttggagccggacaacctaccatatgcgaggaaatcgttgtggtggcatgacgtatcacagtctacttctcggccggccatcggattagatatatagataaataatgatgtgagcctctaggcctccaggtagagacgaaagagtgtcccgcgttgcgtgttccgtgttccgtgtttggtaattacaggcgtagaccttgagttttggcggtgatgtctcgggttgtcttagcataatcttcctctctgttctgttcaagacatgagcaaagatcgggctcaattcaccagctctgaactgatgactcactcaatagtcgccgccatacctctttaacctcgggaatatgccactcatgcagaattaagtacggattggtggctccaataaccaaggacggtattctcttcctacgacgtggcaagcggccatcgccccctcgaagctccatgagtttgtggatctcccgctccattcggggcgcccaaggggtccgtccatgcgttgtctccatttaagtattttgcactatatcatcatggatctcagatgatggatagcgctgtcgatcccaagcgtttaatggcgaaaagagacaggcaagttcaacaccagacgccagcttgacacgggacgccccgaaaattgcctcttgcattgggaatgactgctgacgacgcgtgatttgtcttgttcagaacaattttggtcaatctgtcaaggctctagaattcatggtgtggatatcacgagcggtcagacacaccagcggcgact

SEQ ID NO: 15412 - DNA, 541 bp, Emericella nidulans
cgcgcttcttgtaatcaagcacggcacctccacctatagaaaatactttatctacaatccgcattcaactgggacccgagggtactaatataccacccacactacgggctacctaatcccgctaggtatcctcccgcagctatattctcttgctctatgctgccgagccactcccatatcaatagaaaacatgactacacatactacacggaacgaagtgaacgaaatactgcagctatgcatttcctcaccctcgctgctggcatgccctggcttagccttgccccgccatcaattgacagacggcctgccgtggtgccattagccttgagcacgcaataggacacgggcgattcttgcagtgagggaccagtccggtatcgataactccacgactaggtggaaggaaccacatgcacccatcatgcgctctcttgtgatcagccatgtgggatagatttgcatatagccacaaatcaccgactcattcagagtgccacgtgctgaaggttacatagcgcggttggctttgacttgctgg

SEQ ID NO: 15413 - DNA, 865 bp, Emericella nidulans
gcacttgatgatgttggccgagctcttgaagttactggacggcgacacgcgagacggcgagctgccttttcaccctcgttctctaagaaagtgatggagctaatgccctgcttcattaccacctggtcgaagtgcccttggcgatttgggctttcaatgaacacggtccgaagagctggatggcgtgccacgaggcgaacccaggcgtctcgaagacgcccgcagtctagttcgacattcagatcctcggagctcaatttaattacaaaggaacactggtacagatcggggtaaacagcttgagccaccaagaaggcttcctgtcgcggcccacaggggaatactgcttccacgtcgcggaaagggtcgcccgttacagccttgagccgagatgaaacaaggttgtccagctctgagtttggtcagttgaggaaagggaaagtcgcttagttgttccttgcactttcgctcatttcacacttagcaatcagtttctttaggggcagtgcgaaacaagccagtaagttgacctagttttttccgccctaagtttgagaccttggaccgaaacgaagtttagttgttgtgctccaagaagggtaaaaaatgttagcacccttggggaatcttgaaaatttatctgcttaaaacttatgatgctttacttatggcgctttgtcttccacttcccttttttcctactattgctggatcttttttacgtatgttggatatcaataatccttctttttcctatttctagtatcattccactctttttctttctctcctacgtttgtttctattatccttctctttatatttcatcacatttattcttaattacttttctaacttcatattt

SEQ ID NO: 15414 - DNA, 850 bp, Emericella nidulans
cgctaaaagtccggatactcacgctcgtggcgggaggatacagtcagggctctgcggttattgacaaatcaatccagaagctcgatgatagtaccagggatcgagtcaagggtgttgtgctctttggtttcacgcggaatctccaggataagggccagattcccgggtactccaaggatcagacgaaggtgtactgtgcagtgggtgacttggtctgctctggcacgttgattataacccgcatcgcatatgacctatggcctgaatgcctgagatgcactgaagtttttggcaagccaagtctcaatttaggagccaatttctcttttttcatgccatgagttcgatgggcacgctactggcttggagcttgatgttttctttgacccagcgtccacctatccaccttggcttaagcttacttttaaatgaatgattacttggcgtttagcaagtctcgattctacacccctacaatcctgaatttgccttttggccttttctcaatcaactgctagaaagtataccaatcttatcaatctttttttcacacctaatacctcctttctttttacgcgcaatcccactaaaatatcccctttccccgtaaacttttttaaccttccacactttattccccacttttcttctaatacttttttcaacccctcttctacttcttccctataaatttggaacattttcatcccccttttacgtcaccctccttacttatactcttctttttactaatcaaatcccgccccacttatctctcacttatctccataattatacagctctacttacccatttattctatctatttctatctctcctctcatttata

SEQ ID NO: 15415 - DNA, 777 bp, Emericella nidulans
tggcaccacggcgcctacccaagcccatttatgtctcgcatcgacacttactctttctcgtgaactgccaccgactagaccttgaggcggaagcccagggggtcaatgtatccactctcccgctctatcacggcttcggcctggtcgccccagccctcgccatgggcgtcggtaagacggtctgcttcccttcaggctctacagtccctagcgctggggcaacactcgacctgctgaggatctcgaacgccgccttctttcatgaccgttccctctatcttggaggatattgccttccctggcgatgagggcatccaggcctcggctgggctggactatgtgacccttgtcggtgcgttcccataacccttcttggtcgacgagcttggcgctcttgatgcctcatggctttgccccctcggacgagacgagggacactctgtcttcgcttaatttcgttcctggaatcctcacctgcgttctacttgtctgaatgtgtctcgactcaccctgtagtcaactagctcgcccatctatccccattgtctctctctcgtcttagcgacttgtcttgtcacttcttcctccgggactcttacttgctcctctgatccgatgttcaggcagcctcttacggctccggctagttcccttctctccttttgacctttacatctctttctcttactttctcacttcgggccactttgtcctcccctctttcttactccttttcaccattgagacccattacccaattcattgtatctccaccta

SEQ ID NO: 15416 - DNA, 2528 bp, Emericella nidulans
taatagatcacaagctacgaagttgagggagtaactttgccgcttgatccgggattcgcgtggtgtatacagccacgatccgcgtaaagggacataattggccgcgcttagaaaggcaggtatatttggtgaggcataccatgtacatggaacgcgacaacctgtcagatcattgtccagcaggtcctggcttggtaattcgcaaatgttgggtatacttacctttaaaccacctatggataaatggattgcttctcacctggatcgtgccgcatacccaacaccagcaaccgatcgcaggccgtaccgatcatgaatgaccacgctttggtgcgatgccacgataagcttgatgggaatgaggatgcgaagacggccacgttgaagccgttgccgccgaggttgagcaggtatgcgcgacggataagggagatatctgggagtacattgctgactgctggtaatccaggtgtaggcgccatcactgtcgatgccattgtgacttttgatgaagtcgtagctggttcagtgtgcccattcgaaagaggtggttctgtataggaaagcttagggttcaagtcgcggacggtaccacatattcgaacaagacagacaagcgacattgtgtacatattcagcacgacaacaggaccggtgtcgttaggtgtgagcaccgtgcttacgttcttgggtccctgcgtgaagctacttactatagcactagtgggagccgcgtaaaagagtgtctgcgactgtccctgcgcattgccgatgctccacttggcccagcagcagtctgccgagcaaccttattggttcagattaattgaatagttctataattaagataatttctgtcttttctccagctgcataacccagctgcattatccaaccacagtgcaggccagctcatgccaggagcagtcgctattccaccctcagcctccctgggccggcggtattgcaattatatccccgagccaggctcacgaacgtcgacatggactgaatcgatccaagagaaatcagcaatgctgtttcccggaaccagtccgacagtttcaatctcaatcactcgcgtcaagacacgagccgcggtgccgctcgaccagattcctttgtagcggcgccatctgcacagcagaagcaacgcttcctgtctcaccagccagttgcggcacttgagcccgcaaataacagggatgcgttgatcttacgttgacggcgaacgtcggcatcggcttcatgcttgaggcggccgtcagcagttgcttcgccatctccacggcatgctggaagcgcgcgaagtatgcattgtactccgtctcccatggtagctgctgcctctctacgctgagtagaatataggggattaatccccattactcgagcagcatccaggcgttgcgatcccctgcgagaagcaccctggatggacgagggctgatccgatcatctgccttctctagcgaggcagttcatgcaattgaagcgagaacgcaacgaggcagcttgctccccagcagtacgagcccgaccaggctaccatgaatgtgctggtcgtggcgatgttgtttacggcctccagtggcgccttcgatatcagggaacaaacgggaccgtacatcatcctgcacaagggcctttggcgtgctggttgatgaccagcccagatacagtcccacaaaggcctgggctattgtcaagctcgttgcgctctgccggggccggtcctccgattcgctcccaacagtttcaaggctgactgcagatgaaaccagccgactgcgtgtcttcttgaggagcaagatggagatcaggacaatgcataaatcagcaccagctctgtgctctgaggagcctccagtcggctagcagtcgttgccgaagacaggctatggctttgtggcattactgcacagagattaccgcgtcgccgcgttcattgccctgccatcgcgctgtccgcgttgcccatgcgtagctgtaagaactgatcattgagcgagcccaggctgatgacggcgtggcagaccgccggctgctctcgctgacctggtatcctagaagtagcgcgcacactgcacggcggtagtctctcggaaaaaagcctaggtagtgttgctcggttgagctcagatccactttacctgaaagcaatacaagcgccgggcttctctatctgtctggcgtccggtctcccagacgggcagcctgggtcgtcgcatttcttatggcggcttctattcgtcctatgagtggctttaccccggtctacttgtgcgaagaccatacttgcataccgcacagtcagtgcccattttcggtcgactatcccgagtctttatctcctatcaaccttctggctaggtgactgcctcattctcaggctctcgttattcaagtccagctctgcggatgtccaaacggccgaagttgaccccaagtcagccaggtctcacccgctccagaaagcaaataacaaatggccctaatcaaaaccggcgtaggtaactgattggtta

SEQ ID NO: 15417 - DNA, 2394 bp, Emericella nidulans
  unsure (1)..(2394): unsure at all n locations
ttttgagatacgctgccatatctccatatctccttatttcccgattctcaatggcctataacccaataacccaataatcaaataaaccatcaaccatgcaaaagggcatctggccgatgcgcaggcgaacccttacccgattcaactcgacactagtcgtctagtcaaagaggcccagaaaagccgccccgagggccgtcatcattggcgcatacgaccaatggccccattctccctttccccagctatagcagatcgcgccgtcggcaaacgcgaccagactgccggccacgagggtccagcccgtcgacttgcgggtcccgaacgcgttggcaatgtagaacgaaaagccccagaagatgtcgcggaccccgtacacgtaactcaggccctcgacgagccgtctttcggcgggcgaagcgggcagctcccactcaaagaaagagagcgcgtgcgcagggcgaaggagcgcgttgacgccgaatccaatggcgatgagcgcaaacgcattggcgccgatgctgagggccgggtgctgagagacgggcattttgaagtattgtttaacggattggtggcttctgtcagtgttagtattgatgtcaagattcagtgcagcgcagctccagtgcagtcgagagtaattttagtgccagtgccagtgcagtgttgatggatgtcaatagaacaaaatcaaagtcagcttcttacctcgtaaatcaatccagattgatggttaagcagtattgcgacgagagagagatgaagaatgtgcagtgagagaagacgagatttaaggcgaggggtcgggagttaggcacggagatagcagttctttgtcttggcctctgccttgtctcacactcatttccacacaataaatgtcgcttgtagctagcctcgtctcgttggccatcaggtctgttggttggttggcctctggtcgaccgtctgtcagtcgtctggccagtcgtctggtcggtggtcttgcagcgcgtactagtcatctcagctctcagcatctcaccatccagggccgtccctctgccactcccagggctgagatcacaggtaccagatcaagttctattcatagcgcaatccttctcagtgaacccgtgcccggcgctaggatgtccgcccagggcacagttctcaagggccaggaagcagccgcagctcgcattcgcacagtccccattcgtcagctgcctcgtggcagtaccgtaaagccatcgtgagaccattttggaccctgcagagaacgccaccttgcttcctagttctaatttcgtcgcgtggcccccatgcggtctcatcctcgaactctctcgacacctgtcgcagtcattccgcgccgctcgcgctgggttaacgggccatagacaatagccagtggccgcttagaatcgggctgaagggcttcacagccccttcgcacgcgaaggggcaatacgagccgaccagttcgtgatgcggttgagcgggagatgcccgctagatcgtgctgttcataccatggataagaatagagcatcagcagtagaatggctatataaaccacttggtcttcgccgggatgtccttgctcgaccagcaatctcaatatcttctgtcttaccaagaaacttgcgcgacaagaactctcgcgacacaactttcgctatacaatgttgctcaagagcatccagaacattgtctgtggcctcgtgccaacgttcttcctgtttggctctgcagctgccgagctggactttgaacagtggcatccagcgggactgggagacttgcgctgcggctgcccggccatgaacagtcttgccaaccacgggttcatcaaccataacggcagcaacatcacggtcaacgaggtcatcccgttgatgcaagaggtctttcatctcagtgaagagctcgccacgattgtcacgggcctcgccgtcctctcggcggacgaccctgcctcgggtattttcaaccttgatatgctgaaccgccacaacattttcgagcacgacgcctcactgacccgcaaggatttctacctgggcggcgacggacatactattgaccagcccacgctggacgagttcctcagctacttcgacggcaaagaatggatcgacctcaacgacgccgcagcagcccgctatgcgcgcgtcctcgactcccgcgagaagaacccgagcttcctctaccaggaccagcagctcattacttcgtacggcgagacgatcaagtacttccgaccatggtcgacccgcgctcaaacaagacatccgncgagttcgcaggatcttgttcaccgaggagcggctgcccgtcagggaagggggcagcgcccgcgagaagagatcagtggttctcgctggccagcgatgcgtcagctgcgct

SEQ ID NO: 15418 - DNA, 583 bp, Emericella nidulans
agggagagcaccatgacgaggccgatcaggagcaacacagagtgctacgggtttttccccaaacgttaagaccggggaggtgcagtctactacagactggcgctctccatcctccctgaggatacgctggaccatgcgtcatggtcgaccattgatctctagcatatgctcaagcgctctattttggcgagcagaaattaatggacattattatacctgtgggcgctcttgtcgtgagcagcgcggtcaaaacccttcggcatcagactaaccggtcgatcgagcgtggatcactctgattcacaaccttcacccaagattccccatacacagggaccccgaggggtttcataccatgatttgcactcctgggacaaggaccattcaatcgctccccgattccggcgttttgtctcaaagttcctttgggggaaccctatcggttggacaaccttagcagggcatcccttcaatctggccgtattttgcccgcgaaattaaacccccccggtttgtgaagaggacattaaaatctccccggggaaattacccggggcccaaaggtttaagggaactttcctcc

SEQ ID NO: 15419 - DNA, 403 bp, Emericella nidulans
acaccacttcttgttggaaaaacctggggggcagggtctccccaactctcacccacacgtacccccagttttttcacaccggcagaaccagcccaaaggggggctttactaaacgactggttttcaccctcacacattgagcgcgtatcgttcccaccatagcacaaacctattcgctgcctgatcaattctactaacccagccataccaagccatggtggcggacggacacaatatctggacttgctacagctacaaccggagcggatccgtgggtcacgaccgacataataagaccccctgactccaacccacagatatctaccgcaaacactaccgccgtccaagaaatggacatgttcaaaccacctaacctatccgacacctgcttagacccacatca

SEQ ID NO: 15420 - DNA, 1848 bp, Emericella nidulans
aacatgaaggggaagcacgagctctttaccctccttgccggacctattgctgtcctttctattacttatgtgtccccagaacacttgaaggccgccatgacagttctggctcccaaagccttcgggtatactgcgcccactcgaagagcgaaccccgactggcacgagcctcacgtccagaatggtctgaacaaactgagcgtacttgctgcacgcctggataaccagttgttcgatgttgaccagacgaagtgggttggaagtattgaaggtggtatggacggtctgcgttctcaactcattatggcattacagagtatgggatccagtattacgagcactctggagggagctggcaagagtttgtacttcactcttgagagcaggagaagtgtgcttgaagatgagcagaagggcaccagcggtgagaataaggcagagtagacacgctgctatctttgggtttatctgtataataaggacttgtatttttgatcttgtaaagattatgattgtcttctagaagaattctctgtttagcctcaatggcagacttcttacgcatggtagtcgttttgaaatataaaagtcagttgtctctgaacgttaagcatgaactcaacctgtttaattgagctgaccccaaacagcaacttacatcaagttacacccgttctcttatttctgctcatggtccttcctctcattctcctgctttacctgcctcaccatgagcttggcattaaagcccacgatagccctagcaaggtcccaatcaccatccagaccaacccagtccgtaactagaataccagtcgaccaatccgcgccctctttctccccatgcttcctgcaaaggtaatcaaccgtcgccgggttcaccttttcggcgatcttttccggccacgtcccgagcttgaagaagttgctcgcgcttaaaaagttaatgtagaatggatgggcccttgttgccttaggtcctgggaggatcccaaagggataacatgtctcgctggcgcgcttgcagtgttcggtcacatactggatcttcttgttgatgttctgcgtttccatgacttcgtaaaaatcttggataatgatttggccgctgggacacgtcgcattggcacagttgtccgcccagcctgtcgcgttaattccccagcctcgcccgccgtgaatttccttgagttcctcgaggatgttgaatcggcgaacgaggacaattttgccgcgggcttcgccaagagttggaatcttggggtcggtgtaccacctgctccctgggcgtgcgtaatggtcgcggatgatgcggctgagctgttcgtccgtgtgggttccaggcccttcgcgtttcagtgagatgatgagcgtttcggaggggttgtgttccaggaagtcaatgacttcacgctccaagtcgcgaaagtacttgtcgcccgtaagggatatgggaaatgtgctatgcactaaggcaagctcgtccttggccttgtcgttggggaatttgggctgcacgcggatgtcgaaaaagcgcacgccgttcttgagctgctcgcgcgggctgacggcctggcagcggacggagggtggtgcgatatggcatgtgggggagttgtgcgttcccgggatggataacgacgagagcaaggtgtcgtccttgagctctcgcatccacgcattcaaatttgcagatgaaaagacggcaaggtgggactctgccggcgtgaagatacccgtgaaccggagtttgcgtccttgctcagcggtttcatgctggcggtttcggttgtcggcactggggtttgaatctggtgccgttcgcccctggactcgaagaaccagcga

SEQ ID NO: 15421 - DNA, 831 bp, Emericella nidulans
caccacaactctcccccaatataacccccatttttttcacaccggcactaaagacccaaatgttggctttactaaaacagtgctttctaacccaccacatcaaatcaattcaaccatcatgcaccaaactacactactccacaattccagaaccccaccaaccaaaacattcggtggggatcaccccaaaaaccccaccaacaaccgccacacccagtgcgcatccacgttccacgacacgactacatatgctcacgctgacatccaacctgagataccccagcaacaactatcctatgcccccatacagaacctacacaaaccaccaaaccaaatgacacctacctgacccaaacacctctcaaccggacacatgaaccataccctctggagagacgcctaacatttgcaccaattctatctccaccgaaacaaacacacttctccaaaagggaacccccctttcatccaaaacattgtcactccaatgtccccatacccccaaaagatccacaactcccgtttctctgggtccctacgagccctccacttagcaaaaatctaacccataacgccatcccctagctttcaaccccccttggatatgaacacattaccgagcctccaatgccaaccccccccccaaaacccctattcaaactaagggccctacctccccccccgttggctactgaacccccccgcttaaacctatattccccccaaccttggagctaaaaacctttccaacccccttttcgaggtttaaaatcctacccaacctctttttcccccccacaacaaaaaaaacctaacaacccccacattccc

SEQ ID NO: 15422 - DNA, 417 bp, Emericella nidulans
acaaggcactgagaaaaccactggctctaagaaaacataattacatgcttttaatgcgcccctctgcgcgtccgagaggactgagtgatactggctagataattaccaaacagatgatgtctgaccaattcagaatacgtggaaaaagtgaaagagactgaccacatggatgggagcattggtcctgcctacgtgacgaacaataacctgggcacgacaatatgactagctgacaccacggaactatcagaagatacatcgtacactactgtcaccaccaaggccgtcacagaattcgcgaggggatcagatgaaaacttcaaaagtgtgacagagatgcacctgctagtcaagagattggtacgagcctatacaacggatttcaacaacacactatcggacattcggctctgtgac

SEQ ID NO: 15423 - DNA, 454 bp, Emericella nidulans
ggggtaggagatgatcattgttggacacagggtttttgccgctataactccaatgcaacactggaggcgaaggggggatatgtctatgcaacctatcacccatacacaaagcataggttcacatgaagctgccacgcacaacggtcacactagcccaacataagcggcgccataccctgccgagtatgcactgagtctaggacgcttgcatgttcctttatccgcgaacgtgtaactgactgcacgaccggcgcgaagccaacagcagaatctgccaccggtaacattaacgagtaatgggcatacagacctaattgcccactccagcactataacgtctgcagcgagcttaggacatattaattcccccgacgcgcttacggcttacggggtcacacagcaaattcctgagtataggacaaggacggccaacaacggttgcttgcttacggag

SEQ ID NO: 15424 - DNA, 878 bp, Emericella nidulans
tcggtttttcttatgcacactgaagtatactgggcctttttgctaaccgcgcactgggaacaccggggggaatctttttataccacgggtatttaccgcaccatgagctttcttgcaaagagcctgtcctacactgagaacctcgattaatagaatacatagagactagatatactggctggagagaatggcctccagactgaggacctgcaggctcgcgtccatgcggaggattccggcctgggaagcggtcggcgaatgactcagctaaattacacccgatctcaaataatgctggcggagcaagacactgatcgagagggagaaagacatcaatccctcaaggggtcacgccactcttcgcgggtcaggccgaaccgactttattctcccccctccaccctacccccctttccagaagaacaagagggcgcaatggccgctcagacggcttttcaagattacaggacatcccggccatctcaagagggggtcccccacaggggtgggactgacaaaagctcccttcaattctacaaagcgaagataacgggcgaataccgccgatccctccaacctaatcgccctgtgatctgacacttacgccccacggccgaagttggtccaccaagactgcgtgatcccctccacatcccgtcacacctacatagggacaccgcctaaacctggccatctcacccatattcacaccccaaccacctcttgtccccactcttaacaccctcccccctaatataacttttatctggaaaccaaatgaccccactatggatgtccactttaatcctagtgcaacacccctcactttatcccccagattatctccacacccgacaatactatcccaaacaactcga

SEQ ID NO: 15425 - DNA, 3620 bp, Emericella nidulans
agggtatatctactggacggggatatcgtgcggatgagcgctttccttggggatgaggcgtccggggttggctttggggagtgcactggggagatttacccagtcatatcttcatagaccgtatcatgacttttgatagtaataactaaggtggaagggaagagcccttcttctacttgtcctggtatccctgaataacaacctttatcacactgtccttcccctgcttcaccaactcaaaggcctcctccgcctgctcgaacctgaaccggttcgtaatgagctttttgacgtcaatcttgccactggcgatcaagtccacggcaactgggtagcaccccgtgctgtaccggatcgagccccggatcgtcaggtcccggatgcaggctgtcgtgatggggaagacgacgttctccttgcccatccctgcctgcacatacgtgcctcctttcttgaccaaatgcaccccggtctggatacagctctgcgcaccggtcgcctccaggacgacatccgggccctcgcccagcccgaacttctccttgatcagcgccgccactttctcgctccatgccgtctcctcaacgccctctggcctgggaggagggagaaagaccccatctgcgccgaacgcctgtgcaaagtctaagccttgattgactgatatccacccctatgaaccttcttgcatgcgtacgccttggacacagcctggcagaggagaccgataggcccgacccaaataccacgaccgtctggttcggccggacattgcccactttggttatctgtacagccactgcgactggttccaccatagcgccttcttcgaggcccatgtggtagggcaacgggtagcagtagtctgcctgggtgatatagtacttttgcagcgtcccatcgtggggtggcgttttggcgaagacggtgtctgggcagaggttgtacgatcctgagcgacagtagtcgcaactgtaccatgtacattagttctttccttctttccttctttttttattttattttttttcttttcaggtgagaaacccccggacgaacaggaatcggacgtactgtctacaaggaacccctggttcaatagcaaccttttgtccgactttgaggtttttgaccgctgatccaatctccgtcacgatcccggagctctcatggccgaggacgataggtgactcgaggataaagtctgcattaaccggtgtaagctaggtatcgacagctcagctgatggtttgagaatggcccagcaggcggcgtacctccaatcctccccctctgccaataatgcacatcgctgccgcatatccctgtctgagcaacttggacgcgcacatcccaggggtcttttagagggggaataactctgtcctcgaaggcgacgtctttgactgcgcggaggacgaaagatgggtttgtttccttttctcgtcagtgtttaagtccagaacattctttcttcggaatgtggcttactggcattgcagaaataccgaaagatagaactggctgctcgtgagagagagggaaagatgacaaggagacagcagctaggtatagaaatggaatagacgatcctagggcagctctcttgctatattgctgtacctccactacaatacttataccactgacaacaataagaacatagaacgagagggatagatgaattgcgatactcagctctgcccctccccgtaagacgtggagtaagtaagctgcagcaagccgtggccagtatcagagcggacgccccgccccgatgcggagaaggaccagagggcgcattgcaggtgatctgatgacgtttgagtttatcgcatgcgaacctcagaagaggacggaagcactggaagttagttcctgggtgtccgagatctagactagcttgactttccaaagcgatgcggatccatggccagcgtgactgtcattatggggctatacttgcagtaaccctaccccgtcaattctaccctaccctaacttatcacactgctctgaggaagcctcgcatgtgcggctctatggataagtctttcacggtacaatgtctctgcctagtttgtaagacaaaattacggtaaaccctagattgccctgtccctcttactgcgcaagactatgtccaccccatccacgacgtgcccctttaccagagccccattaattgcatcattccgatcgactcttagaaaaccctcttctagagtctgctcaattcctgcctcaacatgcctctgcgctagtctctccctcgcctcagctaaatccacatccacaaacactcggtagtccacgagtggcgcgatatcgcgccactgcggcttatcgaggagaaggtagttcccttctatgattacgatgcttgttgtgtggtcgatgacaatggagttcggtatcggatcctttgtgctgtgcgagaatgttggcgcgtacaatactcctgctgtctcctctgacgacgacgatggcgagcccgagtccgcccataatcgtaaagtcctcataaactccagaaaggcaggaatatcaaatgtccacggcgcaccgcgacggacatacgcctcggttctctctttgttggggagggtgtcgagttctgagcgtgggaggtggaagccgtccatggagaggacaagagctctcttcgctatctcatttgtctgactattgtcatcgctttgatttgtgcttttgtgtgagagtagtccagatcggtttatctgtgccgccactgcagttgcgagcgttgtcttgccggagcccggcgcgccagcgactgcgacgaggtaccggggcttctggtgcgatgtagcgagagaagttattttggatgcaagggcggcgtactgctcttccatgatcctctgctgccagtgggctggtcgtcgctggtgaggttgatatcactatgggagagacgagatgaagaaatcgctgggtaacgaaagtgcatctactacaatatgccctagtctagagttaggtatagcagattcaggtatacaagcataatccaactttgaaaaatattgtgaaaggagtcttgatggcgagctgacggcagcggagaccatgtccggacagcccggacaaccccctccgctatgccgtgcggccctaataggcattctgaccttgaccgggggggttttgcgatacgtatgtggctagctgtaaaaagaaaaagttggagaagtttaactggttgtgagttccaagaatccgtatatacaatcgaccctttcacgtctccatcatacagccacaaccacataccaccaaaatggtcctcttccaaccgcagaaccagcacgtcaccaaagccttcgaccttaccggcaaggtcgcagttgtcacaggtgcgctcattcgtaacagaaagagagagaacaaagggcgtatgtctaacttccagagcaggaggttcccgcgggattggcctcgacgtctcgcgcggtctcgctgaagcaggcgctgatgtaccccccttattccgattgaatgattcattcgcaaagtatgctaaggctttgtataggttgcaatgatctacaacacctcctcaacggccaacgaactcgcatcccagatcgcctcag

SEQ ID NO: 15426 - DNA, 4282 bp, Emericella nidulans
cattcggtcaatgctgcatgtgacccagtgcacctgatcaccattgaagacattcgcgatgacccttggtttctgcaagacctccctaaatacctgcaacctcccccggaggagtttatcgcaaccgacaaagcgattgacccacgcaaaatcgctgcggggaagccgcacgcgattcaaaacaaaatcagtcaggtcgccatctccaagctggagaggagcatgggttatggtcgcgaggatattgaagatgcactcagacaccctgagcctagtgctatcaaggacgcattcttcatcatcgtggagaatgagatgatgcagacaaattcacccacggacgagactatgctgagtccatcagctaccccgctaccgccttccgcaggccgtactgctgtaacacccggcgccagggcactccattcagcacaagcacttccatcacggacccggtccggctcccgccggcagtcgggccctatggcgctgcctagtgagtcggataatgcagatgtgccgcgggtcagccacgtccgaattctgccgaccagcttgccgtacgtccatgatcagctcatggagcagcgagagcgagagcgtgaacgggtgcgggaagactcaggggagcaaacccaagctgccttggatgaagaggaccctggtcgaactgctcgctcgccagaagagcaggaagcgacggctagggccctgaaaccgcattcgcggagtatcgtcgaccttgagaagctcaaattggaaccaccagaggcccgcagcgctccgcatcagcccaccaaacggtccaggagatggcaatttggtattcgctcccgtaaccagccatatgaggccatcctctatctttacagggcaataaaagcgcagggaggaatctgggagatgcagcccgccgactcgggtaagttatattcctactatactaggagaagctgactggtgaaaggaaatgccgtacccgtgtcagatggggagcgcccattacagaccaagtatccggatctgccgcccgaccactacgttcctaaagacctctggtttattcgtgcgcgcctgctgaaagagggtgttcatgcgcctggtctgtcatccagcattcacagcagccgaagcgaccttgaagagatgcgccgccggttcaacatttctggaacggctgcagcggaagacaagacaagcctcggcgaatcgctcactacttcgggcccctcctctgccacgcgagacctatccatctctcgtatctcctacggcgtgtgggtctttgtggatatccagctttaccagctggaagagaacaactatatggttgactttaagtgtgacggctatcaaaatgtaatccgctctgagggggataccgaatggcatccgatcagcaagcggttccggaataaggaaaaggaggtgactagtccgtatccgttcctggatgtggcatccgatctggtggcccagttggcggtggcgagctgatagcttagggacggtgcaggttggcgttgggtaatgaatttttgcacaatctactactgtatttgcatgggactgttagcgagcatgtgtatgacttagaaaatagtaatggatttgtgtaccggggcgatgaattttgctggcgcacgcgtgagcagtaatgacttttaacatttgcttttgagcctaacattttcgatatgtcgatcttggtcaattgaaatgcctccattctaaagggagattgcgggcaccaatcagaaaccatgaggtattttcacatgtcaaatcgagtcccctaacgaatcgacttgatgccatcacctcttgttcatcttactgaatcccagctgcactgtatcccccaaccatctggcgcaatggaatcgagctctcgtcctgcgcgtctcaccactgccgagcggaaacgtctaacagaccgcaaggcccagcgccagcgccgcgagcgcatcaagacgtacattgcgcgtctggaaaagacgctcgaagaattgaccgcggcgtccggaaatggcatggaagcaaccctcctcaagcaactggagcagcaacgcgcaaagacagagcgtctcacgaacgtaatcaaccatatccacgaagtgctggaagaaacgcggagcttaacatcaccaacacctggatcggcgccttcaacgcagggtgagagcgcctccccgtctgcatcgtggcgattaccacctgttccaaagcgcctttacagctgccgcagcagtcaccgaatgatcagacagggacacccctttctatcagcgcagacctcgcgacccggatctccctgcacagccagaacccgcggaacagtgggacgaggaactacttccaggtggtcaacgagtcgatctcgagcgttgccaaggaacagaactcgatactgccgtctacgacggaggatgacgaagatctcgccattcgggcgatactctgcggatgggattcggtgagagacggtgggcgcagtctagatcgcggttgggggctgctgcaggcgctggatcaggcaattttctcgcagacggggtttgttgagcgcgtggctattctaaggctgatgaggagtatgattaaggtgcattgatatcgtctagccgcgcttcagtggacaggactaactaggtgaatagtggaatctgtcgccacgagaacatacaattccgtcttttatgtttccgacgtaaggctcctctcattcatttatgttttctcctacaggactgactgaagcaggttaacgcagagcatggtatctcacgcaccgataatcgacttcttcgcatggtaactcactcacgcgtccattcagacaaccaggctagacgtctatgactatactgacgcgatggcggacaggcccaatctccgcgaccacctcattgtctcagggataacacacatatctgaaacaacagcggccctgtacgtctcgcagatccgactcaaatggccctatgagctgcgcgacgtttgcaagtacaatgtggctgaggaccgataccgattctcgagcgagttcgacgctgtatactatgatgtccggaattggacaattgactcgccgcaactgcaaattctgattgagagtgggccggatgtggccggatttgattttgggaatatcaatggggtaggggctggcgctggtgctaccattggcagcgctcaggggggtggattgggtgttggggaggatggagatcgcggtggcagtggcgatggtaatggatttgccgatgatgtcgattcagcttattgggatcggttcttgggtgggtgtgatcagatgtaagataccctatctatcgtaggaacaggggtgaacatgcggccaagcaggtactaggccgcctccgttcccataatgtctatattgccttacaccatcgtctttgtgaagtccaaatagcagtataccagtcgtaggagtcccattagttacctgaacccttttctctttttccagaacccattcagataaaagtcttcccacccgctccgaagcccgtcttaagtacagctattatataccctattcgtcatcgacgaggcccggagttaggagatgtaccaaagactcttctatatagtgagctagttaggaagtattaaaaagtgagaggagcaggcgtgcttaactatgtcagttcccacttcatcgtcacaaaaattgacagtatgctggtccataccaataaagtctgtcgaatccacttctgtacgtgataccagcagctgtacatacgtctagtacaattacgcctcagcctacccattcagatcaaacacttggaactagggttgtctatgaatctgcagggcgcatagaaacatgtagggcaaaccaagagccgcgagttagggcaaccgagccagaggcaacacgtctaatagtattttccctagcttctccgttttcgttatcttttctttctttctttctttctttttttctttttttgtttttggcattttctatttagtcaaggatgatcttttgactggtactctagaaacagaaccagatcgacccttatacttctatagctggatagatatgtggtatttctcccaattttgacatggcattgcttaatgcgctctttaaacggctcttaaaatctaccttactctcttcaagcatgctatgtggttcggttgtccgccgtcgactatggattctgtctcgagcagatactacttatctcgacatacacacccaatgtcaacaaataaggtacaagcgagctcc

SEQ ID NO: 15427 - DNA, 955 bp, Emericella nidulans
  unsure (1)..(955): unsure at all n locations
aaatatttngttcgctttgcacgcatccgcaactgattgggtaaagagaggattggcgattgctgtcctttcgatcattgccacgatgactttagcgaaacgatatctgggagtgaagatcatgcagagaaatcctgcaaaagcaccggagggatcctgacaaccgtagagcgtgctcacttgggcgaagatacttatctatgaataggtgaatgatggcggcctgcatgctgtaaaaggccattttttccagatttttgacccggattgccccctgggggaaagcctttacttgcctagaattcagtgggggcggttaaacaaaaaggttggttaaaaaccttgcccctccaaacagggttggcaaaatgccgccaacctttttggcgaggggaaggacccttcgcaggtcctaaaaaggctgccttccgggctgtgcattggagggttcttcttttccatcacaatattctcttccttctggtggttatctcaccccgactattcctatttgatcaatttttcaaacagggggaaaaaaaaatatccctaaatgttcttccgagccccttgcctttcttttacccccatataccccgtataacctttctcacaattaacttcctcccccaaaattttggcccccgggttttcggggaccctgctcttcccccacccccnatattatgtttctccttttccccctttgttttttccctacacccaaatttctcttttttaaagaaactcttgtggggaccaccctccttcataaacccaacttacctcccttacattccanaagctaattacattcttctttcttcctctctctcttctttctaccactgctttatttttgttttttctttatctatttcctccacttctactctttacataatcttttattncgttaatactttctcttcccctcttttcacttactctaaat

SEQ ID NO: 15428 - DNA, 4609 bp, Emericella nidulans
cttgcttcctgtatcgaattaacatacgactctcacgcttctcaatcatgaaaagaatcggagaatactcacctgtcccgattcgcctcctgaggcatctgaaacccctttccagacccctagcactccctgtacatccaacgaactcgaacgaccaacagcaaagacctgagtgagcatctcagtcaaggcaatagagaacccaatgcgcgccgctttgcgactgctacagagcccgcgaaacaacctctgcagtgccttctggatatcctcatcaccgggactcttgtccggtgtgaactgagagacaagctcttgcgctgcctttagtctgacctcgtcgttttcactggcgaggtcttcatagatctccattaatttggtgtttacattgacgggctcacggcgccgctttttggagccggcgagatgcggcgccattgctggagattgcgcaaaaagaattttggtatttggcgcaattctctttctagattgctagattgttaaatgcgcttcaatatattagaaggaagataagagtgtagtcgtgagctctagaggatgttgggctggaacttgtgctgtctgcgaaaatttacggagattggacgaaaatgggttagcgttatcaaagtatgtatcatagtcatcacgtgcttagaggccagacaacaggcaaagatactcgtcatcataaacaccccaagccagttgcttctccaggatatcattcatttttgactctaatgctacaacccataaagtgggaaaacagctctgcagagatcaagttaccctttcagggctcctgaggaatactccagcatgatcgcactcgacgaccctgcagcacttcaaaacactcgttcccaaactgtccaccattacttcaggttcttgtcttttaaaaagaaagcgactcaaattgccgttgcatgtgcttcatactggtgacgcaaggtcaaatatgtcggtgctaggccaggcgagcacaactgggccacgccccgcccacaactcctaagagctccccacggtagctggaacaggtgtgaaaagaagaaacgacgatttggcagtataccgagcatgacaatactcgaaatttccatcagaccgtagctcggtacccacaacagccgagatggtcaagacctggtaacaccgacaattcaccgacgagaaaggtgtcggcacccgccaatgcagtcggcgtggataacccggttgtcgaacccacaacgctgattcctagtgtcggtaccggcgatccagcgttagcctttggagtttttagcagcagcagcgcagacacttccatacaaactgcaagtcgcagtcgtattcgccctctcggcactctacagcagcatgactggaaagtcttcttgattgacgaaatatctactcgagctgcttgtagccgtcactgctcttcttccgacaagaacgctggccgatgcccttatacagacctattgggattataagtgggcgctttatttcattgtaattcggcatcagagaggcgacatacaatatttatgagcatctacagcgacggcggatcactctcctgttgtagtgagcattataatctttgttctgcgctttactgccgacattgcgaggcgctaccggccaaggagtgcaaggtcacggttggttttcttcgctcgcgtggaacgcctataccgatggataggcaactatccgtcttgcgagggcgtgcaatgtctcctctctcggaatttacctgcatggtacaaacgaggtcctccaatgttggatgagcgtaggataagcagtatgaaaggctcatagctgaggatttacctcttcggtccgcttgcgggccatgccatcaaatcagagagagcatgagcggcgcatccggcacgaattcgtctgactggatctgtgagcggcggttacatcgttcccttccttgtcgcttttctaacttcgcagtcaccgctaactacctagcgtactctaccactggtgattctgaaatgatcctaaactagctcctcaactttataccactgctcttgtgaccgacgatgagctctttgaagtttgaaccgagggttcccagtaggccagatagacggccctgtgtgttaatatttggcatcaaaacagaatggagacgtactgactctagacgaggacctcgctctctacctcaatcacataagggcgaaaagctcaatatcaagctcaggtgcaagcatagttggttcactcccaacttatatttgcatcaactctccagtcaatgacgatgacgtacagaacatacaagtcattgtcctaaaacccctgtctgtcattcggtcctaaaaattggaaattgcgcagctctgtgcccctatgtttctgcattctggcactatatgtgtggcattacatggccgctctttccatccaatctacgaaagctattgcatgcacagcggtaggcagcagcactccaaaattacaggcaatcaatcccacgatcaaacagctcctacctttccggtgtcatgcttctcgaaagctttcacatgtgcttccttacacatcaacccattcattttccgccatgatacggacgacttaaccggaacctcgccgaaccgatatcacttcgtactttacgctttccttgcccatctgctttacacataactgcaatccttggccctttgtgccgccaatgacaagccatctattaactaattaaattcctcactgccgccacgttaatcattaaggcgcttcttgtagagaggaagagaaggaagagaggttgaagctgaagaccctgaatcgtactaaacatggcccaaatcgttacatgtgctgggattctcgagcaggggccctgaagaggtgtcttctacgctggagtgtttgagagagacctggataacatgatcactatggcggtaacgtcagcagcgcataaaccccagcaatcctttatctacccaacgttatattgcaccctcaaccactgcgaccacctgcagcaaccggcaactgcgactcaagcttggaaatgtcaatctaatttagcggggaacgagatcgttgagataggtactttgagattccttctttggcgtcccaaattgtacgagttcacctttatattcttaatgaataggaactgaatacaaaatatatatatgcccagtatttttcaactctgattctaccactgtacagttaaggcattaagatatcagcaaaccacaagtactacccagcagaaactccacagctctattatatctgtacctactatcagtctgatcttgcagggactgcttgaagatacaattagttaggatattcattgatgagtaatggctgagtgggtcagtctgagcgtcggaaggtttagccaatagatagctgtacatctccaactgacgcgtgcggtgattggtcaggttcgctcagatcgcgtgatccgtgccaagaggcccaatgcggaggcggggagctccaaagccggtcatccaactatcataacgaacgtcactctttctctagacgattcccctcatactctctctaaatccatacgagcagtccttctgccgtacagtccctgttgtctccgtagtcaggatcgtcaatttttccccgttctaaccaacaatgggcgattctggctcaggcgtgcatttatccagcataccgctggcgccggacttacccttatcgtccgcagaccctgaggagatctctgtgcttgtgacaggctttggcgtgagtcaatgctcttttttctgagtgattggcagcatcattgaggcgaaatgggctggctgaccctccttagccgttcaaatccaatgtggtcaatgcgtcatatctaatagcgtcagctcttccaccatccatatccttgccaacagatacacctggagggacaactgctatccggcgcatcgcgatacatgtgcacccttctcccatctctgtcgcatactcggcagtgcggacaactatcccatatataatggaagagtacgtgaaaacgcacgggcgccatccggacatcgtgatccacatgggtattgctgcgactaggagctactattcgatagaaacaaaagctcatcgcgacgcatacaatatgccggataatctcggccgcgcgggatatgaggacggcgagaagctctggaaggagaagactctccctcacgtcttgacggctgggcgcagcgatcccgcgagagagccagtagtgaaattggacttgacgccgtcgcgcacgaacctgaaccctcatccgccggacagtgagtttttgaagacatggcaggcgtttgctccggcgggtgcggatatccgtatctctggggacgcggggcggtatctatgcgagttcattttctatacgagtttgtcgttggcgctgcgagaaggtcgggacaggaacgttgcattcttccatgtgccttcttcctgccgtgatgtggacgtagcgactgggaaagaagtggcgattgcgttgattaaggctttggttagtcgttgggttgatgcgaaggtatagtatgttgatttaggaagttacctgcttggttcttatagc

SEQ ID NO: 15429 - DNA, 4442 bp, Emericella nidulans
atctggacagaagcccgcaaggaataagacgcttaaggcatgaaaaaaggcatccgacggtgcaaaggagcaagttatctcacttgttcagagccagtatgttcacacttttcggaaccgttcctcaaccaattagataaagatgtaggaattaacacgatgcggaagcagcggcaatctatgcaatccacggcctgacccgcacggtctccatgttggagatagcttcatcctctgcgatgccggcggtggcacggttgatctgatctcggtataaaatcatagcgctcactccaatcctgcaggttgaagaggttacgacgggaactggaggtccctgtggctcgactttcctcaatcgccggtttgcggattttctgactcgtaaactcgggagggagcaaggttgggacgatgaggtgttgcaggaagctgtggaacggtttgactctattgtatccacgcccttctcgcgaccttgatatgtgcattcttgctcactatttgcaggtgaagaagcaatactccccaactatagacggcacctccggctacgtgatccccgtccccggcctctcgaataatagcgctctcaatgtccggcgcgggaagatcaccatctctgcggaggaaatgcactttatcttcgagccgctcatcctcaaggtcattaaatacgtacaagatcagatctccgcgtgcggtgacaccgaggtccgagctgtccttttagtcggcgggttcgggcaaaacagttacctgaaagaacggcttcgcgatgcccttaaaagcgtggaagtcttgcagccgccgaatgcttggacagcggtcgtgaggggagctgtcatgatggggttggccaagaccaaggcgctcaagactgtggatgtagtcagtcggaaggcgcggaagcattatggaatcgagctgagccggtcgttcaatgttgagaagcatgacaagagcaggaagtaagcaataccttgccgtctcatccccctacatttctcgcccaaagcaatactgatgaacgagggtaggtactggtgctcccgacactgtgagtaccgcgcgcgcgtcatggcttggtttctgaccaagggctcgaccctcgaggaggacaagccaatccccattaagttctaccaggatttccgcgtttccgctggccgcccggacatgttatctataagtgtgtgggtaaacgcagaagataccagcgcaccagtgcacaagaacagtgataccaagacactggcgaagcttaaggcgaacctatctactatcccgcaggtggaccttgactggacgatcatcacgcgcgaagacggccatgcatactattgtcttgatggggtgattgaggctacctactcgagtgcggagacgacgtatgtcctctctgtgatgggaaagaaatacgatactgtgaatgccgagtatgcttattagggctggcctggcgggagccctgggagtgtgcgtttggtttattgtgaacgggagagcgtattgagggatgcttatgagaaagatgggatttagtatctgtcatgcccgaggttctcagtgtgccgtttgattgcagaagcgtttagtatacgtagtaaattggatgattcatcttctgttttaagtcctcatgtactttgacagctatctggttccttttctctgaggacgccctcttgaccagactgatacgaataaagccttgcgagcacttccaggatctaagactcactctgcccgcgtctaactaacatattggtgaaaaggaacatcttctttagattctgacagtaaccgaccatcaaaaactagccagcagactacgcccaactacgcctttagtgcccatgcttgctacctgcacagttccatgagcctactttcacactgcagtgtttcagcccggcacagcgcataatatacgggccctcgttagcagccctgaagatatcagcgcaagatccagttttcagcatatataagccctgttgacgctctgtctagcacaatgcggaattgaatatcacattaaggagagagtaacatgtagatggggatcaagtttccaagcggcttcatgagatatacagtgcatcctcaacaacaagatacggacgcaccctgaagtcactgccgcggtatcataatcatgtagcccgcgtcaaaaaaagtactttctgccgtttattggacggatattcttcttccaatctagcaggattgcggccttgaaatatgcgctctgcacgtccgagtaaaagcattcataacgagaatgagccatagatacagattgctgaaccatgcttagtctctttttatatcgaattatatgaagaggccttattagttccttgattgtgcagattccaggtgcgaaccggtagaactcatgagtataaaaccgtatctactagcgtaagattacgtccctctgaccactcatatgaacctttttatagtggcacagccccaccagaacggcccgaccaacccgcccgctgtgggtctgactgcgattcgtactattatattgatgtatagacgctccagcactaacagcgctaacagcattcggaaacagaccgtcgatgtttagccacaagaagacgggaaagtaataacacggaaaatagtaggtcgacaagttccattatttctaatgacagattctcatcttgcctctttgaactaggctccaactttggatatttgacctattctttcctcagcgaccgctccctctatcgccaccagtgaagagctactccaggatagttctttgcgtggttagaggcatactcgagaaccgctgcatttatcgcttcttatgcacccgctgtttgtgaaagctggcagcgcctttaacctccaattgctcgaaactgtatcatgctaaaaatgagtcccaggacagcataaagtactgtttacgtcttcaaacactaatactacaataattatataccgccagacgggctagtctcacaaactttagctcggaaagagcatcctccgcgtgccgactcgcgcaacatgatggatcagcatccactcccatttctgacgcacagtccaatcgatccgggttccattgatggtgagaaagccaccgcttatgctcgtggtgtcctgaatcgacttaatgccgccttggccgccagcgacactgaagccctcgagaactgtttctattcagaccaggcatcctggaaggaccagctggcgctgacatggcatctacgcacattccgctgccataatacaattgcagcgagctttctggacacggcaaggctaagaggtctctcttctggaattacaattgacggtgagtcggtgtttctttcgaccacgcctgccctcgtatgtccggaatcaccaattgcatacagtccgtaagattgagtttggtcactgaccgacattattcttctgttagcaatccatcgactgtcctctcgtctttagcaagaatcttctgctgttctttgcagaggcaagatgttattgttgcccgttatcgaggacggagccgacattttctggaagatctggataatgagcactaggctcgagagtttagacacgcaggcagaggatgaacagcttttatgagctcctgccaggtctcttcaggatgcaatgaactttgagacagatgtgttcattatcggtgctggcaatgcgtaaggcagccatcgtcctctgctgagttgcctactgagacctggataacagcgccattgctctctctgcctgtctaaaggctcttggtgttgaaagcgttatggctgaccggaacgctcatcctggcgacaattgggcacgtcgatatgactgcatgcgattccatgttccaactgcgttctgtgatcttccctatatgtgtgagtgtccgtatcacttccaccactctgccaatgtttaatcagaccgagcaacagtctatgacgaagagcttcgatctcctcacctgctcacacgacaagacctgacatcccaagtccgtcgatatgtcaactcattcaacctgaatacactccacttggctgagattcagtggactgagtacgacgagctggcgaaaaaatggacgatcgcgttccagaccccggctgggcagtgcaaagctacctcaagtcatctcgtcctcgcaacgggtattggatccctgaagccgaacataccgtatattgcagagccgcatatatataaaggaatcagtatccactcggcagagtacaaaaacgctaagctgctgaaggaacaaggggtcaaggtaagccaacagtgcgtccgatgaagatggccgtgactcaaactgctgctaaatacctggcccaacgtccatagtatatcgtgctcattggctctgcaaacaccgcatttgacgtcccggagaatggccacagcactggccttacgta

SEQ ID NO: 15430 - DNA, 1802 bp, Emericella nidulans
ccctagtattcccccaaggtatctcgcacgccctaaaatcacttcatttcctaaaaaaagagccccggatgtaaacggttgcaagtttagaatgacatttcctacacggtgattcgtccgttgggtctccaaggtacttggacccggcttcgcaaggtccccgtttagggtttgggataacaaccacatttatctgtacccttatttggtggcaatagataattaaggagcatctgaatattggaagggtagaccgtaggtaggttgcaggattgcgttataaggaaactgggctttgggatgcataaggcaggcttaccctaactccgtgaccttaggcacaacccgtccactaccactcacaagccaaatcgttcgatttcccgatacttatgaaccgattcattgcacagaccatttgacagcgaccccagagaacatgggcatccatataggggcatagaccgcctggctgatattcgaacttccaggtgtaggtaggtactattgccaaatacccgcgtcaagctgggaatcatgataacagagcgggattagaaccatactcaatcagcgtctgtctgatactcaatggtaacaaatcaaacaccatgactatgggttaaagcgacatgtacgtacattataactctattgaccccccaccagacggtacccatgccccctagactagtacaaaaaaagacaagagaccatactaaaacatagtaaaagacggcgttaataccaacttgcgcactcgcacgcaagccaagaaaggcgttacaaccaaggctgtgcctggattgaatacgttgccggtgtcgaatcataagagaccttggaggaagcctgcagcatgcttacccctgggtatccccaccggcggtgcattaataataattcctgtgatgcatcccgagataattcccgtcacaggcagcgtaataatccagcccatatagatccatgcaaccatgcgccagttaatcgtcttgtatgtcccgttgcagagaccgacgcccacggttgcaccagtgatacactgcgtcgtggaaacaggcagctttagcttcgtggccatgatgatcgtgatggcggacccgagctccattgtgaagccgcgagagggactgtgtaatgtgatccggtttcccaggttacgcataatattgtacccgtaggtccaaagaccgatgaccagcgaggcaccaccaaaggcactaccatctgttagtgacagaggaataatatggctaaggattgggaacatacaggatccaataggggacatcagtcttcccgctgccgccggatccactcaaagaggcggtgcgccagatactgtagattgtggcgtaaggaccaacggcactgtcaatgtcagcactttgttgcattggtagagacgaaggaataacagtaagggtcgccatacttggacagatcattggcgccgtgagcgaaggaagcagttgaagcggtcaatacttgcaggaatgagaacatgtactcagcacggttttcgaagtggtcagcgtgggcatgggtcatctctatgtcgccggtgaggatattgcgcttgttctgcattgacacgacgtctttctcaataccgcggaagaagagccgcttcgcctgccagaatagcacggccgggtggaagttgccgccttctggacggggaccgctgatgttgatggcgtcaggttccgagtccggctctgacgcaagcacacgcgggtcggcctttggttcgatctcgggtgatccctcggtgctagtggccggggtggatttgt

SEQ ID NO: 15431 - DNA, 2336 bp, Emericella nidulans
gagctccgtgacaatggcctgcttgtcggcagcagagagggtaggggtagagataatgctggtgagcttggggtcggccttaagggcagcaccgaggttgttcagagccttggaggtagcgtcgagggaggaagacttggcggaggcggtgtactatttgcaagaattgcgttaattatcatggctgtacaattggatttgggtgcggtgttgacggtcgttgttttatcgtcagttggtgatatcgaaagggttttcggctcaacggatccggttgggctaggcaggctatccaggcaggtttaaaaggggagggagagcataccagagcagtagcgtaggtgccgtcgacgccgaagagagagacaggaggcttaacctcctgggctgcggtagcataggtgcgcaggccgttaacggcagcagtgcgagggacggagacctgggcggaggcacggaggccagcgcgggcgagacgagcggagagcatggcgatagttcactcgagagacgaggttccggcgtttagaaatagggatttgtgaaagggtggaattggacgcgtagagggcgaagacggtcgacacacaagaggggtgcaaagggcgatgctattcggacgaggtccaacttctcccggtcgggtcacgtgagattccgcacacgccgagaatttcgggttgttttcacagtctattatttactccgtagtccacgcaacgtttcgttgcgtatctcacgcaagagttgttgtcattctcaaatagcagttgatctaactaggaaaccgtgcgatactaccatgcgcaacaccttaacgccagaccccgtatctcagtgtcaatccattgctacgtaatagctggtgaccaagaagggtttcaatcacttcgaagcatgctatccaccagatctcccaacggtccccagaaatccttcccgcttgcgagccgatgttcatcgatgaagaggacatagtgcttgaagctggtgttgaggtgtggctcaaggcccaaatggacgatcacagggtaatggtggcaatagatgtgagcatatacgcggtacatccgcttgaagatctggcgaacaagactggagaaggcctttggaaatgggacgcctgcgtcattcacatcagcaccaccttccgtcgtagggttggaaatcaagcgcacctaatcgactggggaacatctgctcgttgtcgatgttaccctgcacccaactcatgagatgctcgatgtattctggtgcagacatcttcgttgggcgcttataattctctgaatcctgccagaggtactcgaacctatccaccagtcagaataatcgtcacggatcagcttaggcaagcctcgtactcgtcggtcgctttcatttctggacatgtctgtggcgagcaaaactcggtaatagctccgtaaagaaggttgatctggttgtagaagtcgaccactgcagagtaataaccatgttagccagagcaacgtaagtcatacaacaaacacaccgttcacagctagccactcatttaaatcttccccctcagggagcttcacagccttccgtagactcccacttccaagcgtcgcctccgcaaactgtctcaactggtagctggtcgtgcccttcgccgctgagcgcggcttgaaaggcgctcttgttcgagcgttgctgggaggcgtcagtacacataatccttgcttaagcgcgcgaacagcaggcgagaggtaagaagggggccctaatagcggagtatgggatacatgaacggtactgtatgatgtagaaggggggagggctttggatttgcgagaagaggacgacggtggaggggtaatagactcctttgccgatgaactagtgaccagggggacagacattgtggtaatgaatgaagccattgctatctcacagctgtgacaggtagataaagagtgactttgaatagcgaaggggctggaattcctccttccttgactcgtgcacttgtggtattcgaccggcggagatgtgctttgcgaggtaggtttcgcctaggggtactcgacactcaggttagtagtgcatgtagtagtttcgcagtttctaagagagactcaagaaactcactgcgtcggcgcgtacaagatgcgaggagaggaagttgcgacgttgagctgagtctgtgacagggtgactcgaaggcgccgacggggaaattagttagtagttgagaatcaaatcgcgcgcagaatgtgtttccgtgtgcaaagatctagaaataggaagaagctcgatgacagggtagagaactttagtgccaaaattggtcgtatcataggatagtgttg

SEQ ID NO: 15432 - DNA, 632 bp, Emericella nidulans
  unsure (1)..(632): unsure at all n locations
tcccttactncgcagtctgcgacgcctgaggcatatatgtacctacataagggattgcccactcccttcaaactataggagacaaaacaggcatctaggcctcacagacctgcacagggcaggcccacgagctgtttctgctgatcgctaatatatatcgatcataggtgctgtttattaccagattctggtttggtcatacgattctccattctggtacaagagctactatgcctcctttgaggccgaacgcatacctgctgggctgtgatcctccaagtgtccagggctgatagactcaaacccgacatcttcgctgggacatgagtaggggacaacagctccacatactggtctaatacctgaaccagttacactgtgactcattgcctcatacggtataccctgtgcttgcggggatgaacggcacaagcccgatgccgtccggtgactgatttcctgtgggaagctccggattccttttcatgcccagccgncattctctggtatcttctgaccgcagtgcagaggattgccgcatggtcattcaaggcaagccgcgcagtcctttgagcgatctcctcttgacacgagcgctcagccattctcaatatcccggcctagccctataa

SEQ ID NO: 15433 - DNA, 5989 bp, Emericella nidulans
agtatgtctatctccatcaacatggtagtgctgtgacacgctctatctggtttcttcaaaagcagcttcttttcatccctgtatttagagctcatattcgatgcccaatctgccctgtccgaaagtagtcttgggagcgttctggggcggtctctgtgactaggaatagtaatacatgtccagcattattatgccgcactcattcccctttcgaatcaaggctgcctgctcattcatgtctgaatttgcgtcggattgcctacaccgctgcgttaagtaacctgccgattcggattccgacctgtgctgacgccatgcagggcgtcccacgcctgcttactgcgtctgccctaagccaagtataagccagctggggctggaaacaaggtggacttggcgcagccagtggcagtgcctttttatgttaggataaagaagtaaacctcctgtacagtgacactgagtatattgttcttatggaacccgcggttaatagtccacagaaaccctacgggcttttgatctgctcgctgatgaaaatcgaacaacgcggtctttaactgtcttttcaatatatttagaattgctctttcattcaacattgtcttcttcaccttcgcttcgtggcgagatgggagacatctgcgaaacttgcacaactagcgaatacaccacgatgactccgtctgcatccccgtccccatcaccaaaccccggggatgcaaatgtcaaggttgacgccgattcaccgaacgattttattctattcagtcacgagcttcccagcggcgacatccaagacctgatacgacgactgcatagatatggcacgttacctggctatccacacctcgctcgcttcttacaggaatgcgccttgttgctccgaacggagattcagaagctcccacgggcactgcgagattctgtcccgccattccatgatgtggtgacgctggcctctcactgggatcgtctcaagagcggccctttgagtggggcttgggatggccctttcctctgcctctatgagatagctatgctgattgggtaggttctcaactactccctgattccggtattaacgcgttatttatgtgagctaacatgggcctcctactcagacaccatgagacacatcaactctcgtaccgccgtccagcatgcttggtaggaatcagcgttggtctattctcggcagcagcagtagctgtttcgaagtccatatcggacctcgtctcgtatggagctgaaagcgtgcggaccgcgtttgcattctgtgttcatgtacagcgcgtttcccaagaactcgaacctaccatgacagagcaggctgcatcagttagctgggccacggtcgtcataggcgtgccggcagacaccatccaggtggaattggaccggttcaatcatctaaaagagtcagaaagccctggtgcaaatgcaaggcccctgactggcgtgagtatcagtcacgttgaccaaacctcagttggcgtcacaggccctcccagccgcctcaagcagctcttccgccagtccgagctactccgttcctcaaggcactcagcgctgcccatctcaggcggcctctgccatgtcccaaatgtgtatgacgacgaagacgtccgcgccatccttgagatggcggaggtctgggagaaatggggcacccgtgctttgcaggtgccactgatatccccattcaccggctctccatttctctgcccggatgcataccacttgatagaagccatctgcaccgaggccttgaccaagcagctgtatttcgacaagctcgcaggtggcgtggtgacgcaattgaatgggctgtcatgtcaggtccttcattacggagcgtccctcatgtccgacaccatcatcgacgacgttactagtcaactctcaccttgtgacaccgcacgccagtgtctggtagactgggctctacgcgatgcgtttgatcaacttccaggtggcccaaccccgccgcgagacgcgaagctggctgtcgttggcatggcatgtcgcatgccgggaggtgcagacacccccgaccacttttgggagctgctaatgaatggagtcgacactcacacaactgtcccaccggaccggttcgatctggatgctcacttcgaccccagcggtgaaaaggagaatacagttgggacccgatttggcaactttatcgccaacccagggtattttgacgcgggattcttcaatatgtccccacgcgaggtaaggacgcaaacagacgaccaaaggttcacagtctaaccgaccactctcccgccaggccgagcagacagacccgatgcagcgactagcactggttacggcgtacgaggctctcgagatggccggcttcgtgccgaatcgcaccccgtcctctcacctctcacgggttggaacttactatggccaggctagcgatgactatcgcgaggtcaatgcgggccagaagattggcacgtacggcatccctgggacagaacgagggttcggcaacgggcggatcaactacttcttcaatttccaagggcccagtttcaacatcgacaccgcatgctccagcggactagctgcagtccaggcagcctgttcagcgctttgggctggcgaggccgataccgtcgttgccgggggattgaacgtcattgtaagttgggaactgcgtgtctactactgttcaattactgaaaccctttagacgagtccggatatatactgcatgctgagcaaaggccacttcctgtccaagacgggccagtgtaaggtgtgggatattggcgctgatgggtattgccgtgcagacgggattgggtctgtcgtgatcaagcgcctggacgatgcccttgctgacaacgatgtcattttggcttgtatatcagccggtgctacgaaccattccgcagagagtatttctattactcaaccgcatgccgctgcgcagagggaaaactatcgccaggtgatggacagggcaggtgtgagcccactggacgttagttttgtcgagctgcacggcacaggaactcaggtttgtccattgaatgacttttatagacttgtacggctgacatcagcgtctggtgaataggttggagacgctgtggaatcagagtctgtccttagcttctttgcgcctctaggccgccggtcacacccagacaagcgtctgcatctgggtgccgtcaagtccaacattgggcacggcgaagcagctgcagggattgcctccctcatcaaagttctgttgatgtaccgcaacaacacgattccccgccacattggcatccggacggccatgaacccggtcgtggctcagcaccttgccaaccgcaacgctgggatcctgtccgagaaccacccatggcttgccgcgacggcctctaagaagcggtacgctattgtgaacagcttcggtgcccatggcggcaatacgacgctgttgctcgaggatgcgccatcgcaacacagtcagagatacaagaaccactcgcgacgggtggtagccagcagcgaagtcgtatgcacctcggccaaaagcaaagcctcgcttcgagccaatatcagggctttgctcgcctatctcgacactcaccaagagacggaccttcgagatcttgcctatacaacgagcgctcggcggatgcaccaccatatccgaattgccagctctgttactagcactgcacagctgcggtctttcctgcaggctgccgctgacgatgtcgatgcgtatgcaaaacatatcgcgaccgccaccaaacggacggccgtgtttgctttctctggccagggctgtctctatcacggcgctgcggctcatctgtttgaacaagcacctttgtttcgcaaccaggttctccaacttgaccgcatcgttcggcgcctgggattcccatcaatactggtcaccgtagccggtgatgcagcaagtgtttacgactccgccagatgtccccacagagagtcaaccccgagtagcgacgcgagccatgatagcaacacaaatagaacctctacggcaccagcagtagacagtccattgattgctcagcttgccctggtggtgatacagatcgccttggtgcagtattgggggctgctcgggatcaagcccagcgtggtgatcggccacagcctaggcgaatacgctgcgctggtcgcagccagcgttctatcagtagcagacgctctattcctggtgggaaagcgagccgagctcatgttggccgtctgtgagccagggagtcatgccatgttgtccgtccgcggcgcctccgtggatcgcatagaagaactgtgccgagaaagcgagaaacggtatccttttgaagtctcatgtgtgaatggactgactgaccttgtggtaaccggtctgcgaggcgatatggcctctctccgtgacctgctgcagggttccgggctgaaatgcgtcctccttgatatcccctttgcgttccacagcaagcaaatgtcgcccatcctggaggactttgaaaatgcagctcagcagataacttttcaagaacctgcggtccccgtcatctctccactactgggaaagtgcatttctgaagctaatgtcatcaatgggaagtacctggctcgcgcaacacgggagccagtagattttgtggcggcacttgactctgcttgggcagatggcacagtcaatgacaagtccatctggattgatatcgggcctcacccagtctgtacctccttcgcgagcaatcactatggcaaagcagccacacaaagctttgcgtcactgcgccgcggtgacgagacgctatcaacattgacggcgactctggcagccctgcactgcctgggccttccggttgattggaatgagtactatgacctcagggagaaccctgcccgcctactgcacctggactcgtaccaatggaactataagaactactggatcccatatgagggctcatggacgctcgacaaagctcatgctggacaaaacaacaagaccaaggacgacaattccgcggtcactccggccttcttcacctcctcggtgcagcagatcattttcgaggaatatgacgagtcgatgggacggatggaggcactctccgacttgcaccaccccgacctgcagggagcagcagacgggcataagatacatgggaggagtgttgtgactggagtatgatattgcaatccctgattctctgatctttgcacatggacagatttactaactgcatcattgcacagagtatctgggccgacatcaccctcactgtgggtgagtacctgtacaagcaaatggtgcccggcggcaaaatgccacacatgaacgtgaaagggatggaagtcctggaagcccaggtgctgcacccagatatgtcccaattcatccaaattgagggagtcttggacctacccagacagcaaacggcagtccggctgtacgcagcaagcgcaaacggcactcggaataccgacaagccgtttgcctcagcaactgtttgctacgaagaggctcaggactggcaagatcagtggcagatgacctcgcatcttgttgctgcgcgagccaattcgttctgggaaatggcagcaggcggatcagacgacaatgcccggccagcaggcaagggaggacctcgagtgaacaactttttccgcagcatcgcgtaccaactttttgccaatgtggtagactacggcgcgaggtaccgcgggatgcagcgcgttgccctctccgaagacacgctcgaagcaacggccgacatcgtcctagacaaggaccgccacggcacctggcatacgccgccgcactggatcgacagcgcgttccagctcgctggctttgtcatgaactcatttggcgtacaaggcgatggcaaaatttccgggtcgtctcgtgatttcttctatatcccgccgggctggcggcactttaggctgctggaacgtcttgagccggggcctgaagccacgtatc

SEQ ID NO: 15434 - DNA, 2021 bp, Emericella nidulans
ttactcttttttctcctaataatcacttccctttgaaatactcgcgcgaattgacttctctcaatgccaaattatgcacctcgacagttaaacagaatctctccattagctgcactgcatttgagactctagtttgaccccgtccaaaaaactttttcttcgcctgtggttcaatgcttctagaccctgctctggtcatctcccatgcatacaccgcagcctgatccattatataccggctggagcttatattgtctgacaaagatgtagatgcgttgggcgttgggactgtttgtcggtcaggttccatggttggtgtactgcagccagccagatactgttgtttcgtgaatgttgggctgaactgccgaggtttacggtacagtacagtaccggcaggtcaatgattatattatcaaaccacaaactacacctcttcaattgaacacaacacagctaatcgcgcccagtacggtagacatagcgatgaagaagcatttcaattctgcaatttgagaagcctactcgttacttaaacgaaatgaagccctgcgaaccgcgtcgagcaggacgcccccgtcttgaagccagcagcgacgttgtccactccgacgatcgtcgggctcagatccgtcgcgcccagcgcacatatcgactgaaaaaggaagccgtttttcgaaatgcgacggctagagccgagcagcttgaagagagattgcgcactgccgtcgaagaggtagcgttgctgtccgaggccgctgtagagacgcagctgcatcattctcatcctgagatctatgcgcgtctgaggcgtctcaatgggattctaatcaagggtggtgatagtcctaccgatgcgagtcctactgagctatcgccgggctcatccggacatcaagtgccaatgctcaatgcccaagtccaatccgccagacaatcccaactttccctttcccgtcctccttcactcccagccaggcagtacacgtacgcattccaggaaccgcgctttgcccgtcggttactgcgatactgtctcgaacacgcgtatcgtgtctttgcagacccccggtcggatccgcgtgagatctaccgcatgttccggctcgtcccctgcgtaaaagaccggggaaagacccagccgcgctttcggcagctcttgatgggcgggcacacggatcctctggaagtgccaggtctaccgttctacaatgttggtggcgcgggttcgcatttcccggatctcgacgaggatgggaatgcgatttacccggtcaatagtaggatgccgaggcgggtgctgggggtgttgccgtgggacgagctgggaaagggagatgtagatgctttggaggttcatgggctaggtggggaatggttcgacagccgggacgtggaaggttatcttaggctgcaggggtgggacgtgaacgggtctttatttctcatgcagcacataccaaatggcgcagcagagagagttggcagtcaaccatatgttttagatgttgaggggttcttttcacgtgagttttcccactctttgcagttcttccatgctcatggcttctagggcttcttccggggttcatcatcctcggccgcgcgcctgggttcaagaagacagatgtcaggcacgcgttgaaagcttcggtaaagcgatctgacaatctatgacgtgcagcagtgttcggctagggttgtacctcggagttcttggctgattacaatatcacatagagaggacatgattgcattataatctgcagactgtatgatatcaagtcctaagccggcatcttactgcccccctatgatattggagtactagccagcatgaccacactcaaagaccaaattgccgtcgaggctattgacgcggactgttaccgctccgtcgtccccccaatacgcatggcgatctcgccgactgggcttacggcggcaatatccttgccattgcagtccaggccgcttatgcgaccgtcacaacaggccagcacctgtactctatcagcggc

SEQ ID NO: 15435 - DNA, 2746 bp, Emericella nidulans
ctcgcagtagtcctatccggagagggcgggtgaatggatgctcttgcgtggcttgccacgatcccaaacaccactgcgtacgcggcaacggtgcgtaggacggcgttgtcaacgttttccctgttagcccggtactgatgggcgtcggtagaagcgggaatagtctctgggatgcaggataaataggtgataaacccgttaatatgagcgctaatgggggtgtggtgttgctaggctggtcagtcgtcgtaagagcccgaaatagagtacgtacggcaaggactgcaccgccgtctggacagtttcagggacggcgagcatttgcgctgccaacttcgatcgaagctgctccttctgcggcggggtcggatacgatccccataccaggagatgcagcatgtcttcaaagtcgctcttccagagttcttccaagctatagccgcggaagagaagaaggccacgttcatggtctctggtgatgttagtctagctgggcgactcgcagacattgccttgcatacgagaagctgatagcagattcaattacagtcgtattcagcagtcccggatcgtgcactctcagtccgcctgagacctggtcggctcggttcgcgccgattcctggagccttaatccgtttgaaatcggcggccgaaactgaattccttcgtatcggaatctcgtacagcgcatctgttcgcgagtccctgatgtagagcgtgcccgacgacatcgttgaggattcgttggtcccctatacctcgtctgcgtgagggtaagcttttgtattcgtgaacggagatagcccggagagtgtcaatgtccgagtccgaatgcgagtactcacgctcagaagaacaattggccatagtgacttacacaggctggccaacctttatcgtgcgtgtaccctaccaaggccggatggcggttttcgtgtctcacaacacccatgtgttcatctaatcctggtcctgtccggaaatgtgattgggagactcgtgagacgcagaggggctgagtctgagtgttctagcatgtaaggcgcatcttggggattttcggagccgcaggtcgtgctagatctcatgaccttgctggtcgttgagggcaaggatttaggtacattaatacacaagaaagagggaccaaaagtattcaatttcctatattatcgtataataaactggtatcgtccattcataaatcgtctccatcgtcgtttactggggcatgtgctcgaagggcttttccaggtgctcctggcagaagggaagcttgccgacggtccagatctcggtgtcctagaacggcgcgtcagtataatccatcagaatatcatagcagtgtcttgacgaacaggcttcaagttcttcttgatctcagtgtccaaagtaccggccttcagagcgataattgggggagcggcctcggggtcgtgagcaatgggcgagccgcattcggaacagaagatacggtggacagccttgccggaggatccgttcttcgcgaagctcttggtggggccgttgatggtcaaggtgtctttggggacgacagcgacgagagctaaccaaattagtgacgataatcgtcgtcgaaaggagggtacgtacagtaggtagaaccggtctgacgctggcagtcatcgcagtggtcgtaggcagtaatgaggggctggtcaacctcggccttgtaggtaacagcaccacagagacagtgtccagtcaaaggcatcttgacggaaaattctagatagcttgagacgcagcgagggggattggtatctgattggacgagtcgaagaatgtgcgatcaaggtgctcaggattggggaccttttgagaagggaacccgtatttatagcatgggcaatgtcactcttctgcagagttctgcttctgataggaatccatgggaatgcggatcacctctcaccgagagccaccaagcgagacccggagagagctaggttgagaattatttgtcatgatggaggggaacgaccgcgaagacggcgaaggagcaacgagcgaggagcgggggccgcacagctttgcgtcacaactccaactaccgtctagctcgtctcgaggttggctctaccggagtctttcttaaccttttagttgagtacgctacgagctcctattcgcttgaatcctctccgattgactctacttactctatttagatggtttttattcctaacgcatacaccgtgcctggcgagctcgcattgcttgaagatcgcagctatagaggggcaggaagaggaggggcaaccccagcctcagccccgaaccggatcctcctctggagtacttctccgtcgactcgactcgaacaaagtcctttgaaccaataaacgccctcgtccagccatggagctacagctcagctctttctgaatccgacgcggtggaacccctcggtcgcgatagtcctgcaggctgcagcttcgctgctagttcaatttcgaacaccgagctccgctgcaagtatttgtcactgccgctatcgtgcacaatggaatggaggaagagcggctgcggtgataagcttctgccggcaatctgccttttacccggtttactcctgggtagtgtgtcaacgcggatacgcgagttgcgtgtgatctacacaaaccactgtaggaaattgagacgacaattggactgcgcagtgatcccaactgttatgtacaaccagctctttttgaaacgttacgggggatagagtgtgg

SEQ ID NO: 15436 - DNA, 632 bp, Emericella nidulans
tcgagacgatgtttagcgatcctgttgattgttggcgaggccagcgcatgtaggacgaggtacacagctcctaccagactggtcagtgtaccggtataccatctgaaggtctgttggtggctaacacaacacagacgcgggacatgccaccaaaatcaggacccagccgagatcggccgcccaccagttacgtataagtgtccaaagctaacatgcccaatgaaagaatttcataaacagggttggaatgcggaaaattctgcttattgcagcttggctgtgagccacttcacagatgttctacgccagggctgcgaagtccccaccccgccacatacgccctttccatgcaggtcaacggatatcgagcttgtcattgcacaagaccgggcctttgagtagtttctactggtagacctcaaccgttctctctaatccctttacatcttatttctctttttttccatccttattcatacttcgtctttatataaaatttactatccattactatatcatatccaattcaggtaattgaatttctacttatatttttgacacctttgcaaattcttaatattcttactttttctccactttattgtgactagatatttataatcactattatt

SEQ ID NO: 15437 - DNA, 465 bp, Emericella nidulans
aatcaacccacctgccgtgaagacaaacgatggatcaactatattggatggtgattctggcgctatttggaacttttcgacggatgttttcctttagaaagcatgtgggttgtgatagccaagcagtgacagcgtactctggctcatggagaacgcgatgccatgatcgttatggtcagaagtcatggtcccagaaacagaagatcaactcattacacatttgcatagaccgaagctgccataaagcaggttcacctgtcatatggcagaccttcggacgattcactatcgatggataggaaaacgaacctagttatacagagccggttaaagaatccacaggtgggaaatctgactgaaggaaacagacaactgttcccccaacattgagccaggagcttcaacaatgatttgattggggtcaaggatcaccactcccctgggcaaggaatttcgaaagaactt

SEQ ID NO: 15438 - DNA, 2717 bp, Emericella nidulans
ctgccgggttcctagtgcctgtaaatcgtatacaacctgacttttttggtctcgctctcggacacgcaaatcaccgatctttgtagaaatggcgtcagctgcgttgaaccatacatcatacgattgactgatatccaagatcggtgacgtcttgtattgcctgcggaatgatagccctaatcaggaatgcacgagcacaacccctccattccagcccgtcagtcatcagccaaaccagtatagtatccttgtccggcagcatcaaaccgcagagtttagtgatatatgttcatcgatattgcgcaaatctcagcccagaagcaagagctggattttcacatatttcctctgtattcatggtgcataacggcatggctgacggcatttgcgctgcgttgctataggaacgaaatgctgcttgacccagtcaatgactggtgtcaactgacttctcttttaatcatgactcaagcgacgtctgtatgggaagtatgacgtgatagcgaatgatgcggtgctctgtgcactgttcttcagcttgacaggagtatgcgctaccgtaggtggtcgggctgttagggctaagacacagcattcctgacagtgaccggagtggctctctttccagcccctcaattctaaagaacgaatgtcagattatgtcattatcccccacaatgctgtcgataagggtgaggatgaagtaaaaataacaacatctgggtgcctggccagaatcaggtgctagggttcgaagcttgtgagtcgaacctgcatcatcgcatgcctcgagggcttcaaccttcaacttcactgtcggtcttctgtcgggaaacttattaacagattcaggggtgtccgcacccaaatttaattattattggcaaattgatgagcttaatcttaatcaccttctccatgcggcttggtgggtaggcgaacccggtggttccaatagtgcagatggagcccctaaccacaacgagtaatccgtatactgcaccaaaccatgactattagaagctgtgatccagctactgggcaaaaaagatccggctgacagttcattagaagggagatccatacctagcaagttgccaaggcaggtggacgagatccggagtcccggccacgcgtatcatccctttgcggaagtgggaagtgggttagcagaattggcgcacataaccattgtccgcatgcgatcgtcaagcgtcatcggggattgaaaatggagaggacgaggggactgctaatggcttgtcaaatattttaaactggcgtagagtaccgcggggtgggtgctgtagtccctttttcgctactcgtcgtccatattctcccctttactggtattgcgcctccgaccttcccgagtctccttaacagcattcattctatattcatgataagaaaacactttgaaaatgaagctctccctcacctcaagccttctcacaacaaccacgctcctgggcagcgcctctccctcccacagacttccaacctcgtctcacgcatccaagcccggtctctaaaccggcagtcgcatcccctcactcgccaagatggcggccactcaggttctcaaacgggcttccggatggccagcacagccgctgtggcctacagtaacaactgggccggcgtcgtccgcgaggaagcaccacctggaggcccttacacagccgtcagcgcgacatttaccgtgcccaagccgacagccgcgccaaatacagcagggttgcaggcaggttcggcatgggtaggcattgacggtgacacatacagcggggcgatactgcagactggcgtggacttttacatagacaacggacgtgtgtacaacgatgcgtggttcgagtggttccctgattatgcgtatgacttcaacttggccatcaacacgggggatgtgattgtggccaaggtcgaggcgctttcgccgagcaatggggtggctattatcgagaataagaacactgggcagacggcgacacagacgatcagtgcgcccaaggctgatgcgacgttgaaaggggtgaatgcggattggattgtcgaggatttccagtctggcgataaagtcgttgccctcgccgactttgaacaggtcacgttcacggggtgtgaggcgaaggcacagaatggagattcattggggttggacggttcaactatcattgaactcaaacagaacaataaggtgctcactgaggtgacggtgaagggtaataatgagcttactgttgccagtaagatgtaagatgctctgtatataaagcttttcccgtgtcgttgcgttttggtttggcgtcggcgttatatctggggaatttttcggggaatctttttcttataatttgggacggtcaggcatgagaggcatgagaggcatataaaacagtacgatgatcaaactgcacctatcgaggcattctgaaataccgccgaaaggtcttcagggacaaaaattatgcgcttttgacctgccaactgcatcccgacgatctacagcctcgtgtgaagactccgtacaagtgtatacagagtacgtgcaagtaacccaacccaacctcaacctaaacatcactttcgatatatgccctggagcatatccttctttgagtgggcggacttggacagatgttggaatgatctactaacaaggatacaaaacaaccacttgtcacgaagcatgcgatagtagagaaggg

SEQ ID NO: 15439 - DNA, 2081 bp, Emericella nidulans
ctaaacatcagcaaatgatgggcaacgcagcctatgcgagcgaagtctcagaaaccaagatccaactcgacaagttatcctgggtaagctggttatgctaggtaagttactcctttttaatcatggttatatgcattaagtctatctattatacattgttcgttacatcataataaatagtcaagcctcgaggtcgactgggaatctctcgcggagtatcttcccgtacttggtcagcagcatcgtgagcggcacgaagcccaacgctatgaaacccagcaaggaattcccccaccctagtcccattgtctcaaacatttttggaccagctagtggcaatagcgcacctataagagacctcgttgccgtgagcgctgcatttccagaagcagcatacctgggataacaatcgatgatatagatctgaatcggcatccaggcccccatcagtccgagcccaaagggcgccattcccaggatcgggacgatccaatgtgccttcttctcagcggcccagccgtaccagaagaagctgatgggaatccagcacgaccaaaagaccattgccggcagccgcatttccggctcgaatttgcccccgttgcgggtggccagtctgaggaggatcttgtcgctcgtcaagccgattattgctagcccgataaactcggggattccaatgcccaggtacgagaggccggagaggcctggtgagaagccatactggtcgccaaacgtcgtgggaatcgtggtgaagaacagataaagcaggccgtaaagaagggcaatgtacgtggacacgaacaggacgatcggggatttgcagaggagaacgatgggacgtttgaggccgagtttgaggacctggcccggcgattcagtttggccctctgcctcatacacactgcgcaggtcgctccgaccgagttccttggatagcttcgccgtcttccatcgcagcaaaaccggcgcgtaggtctccttgttgaagcattcaatggcgatcgatacgccccgccagcgatcagcaggagccaaaagacccagcgccagccgatagactcgccgacaaagccgccggcgatagggccgacgaccggtcccatcaagggaccgagactccagagcgccgtggccagtccgcgttgctggacgggaaacaggtcggcaatcactccagcaccgagggtgatacagcccgatccgccgacgccggcgagaagacggaagatgatcaaggaagcaaggttcggcgccagcgcgcagccaatctgccagacgtcgaagaaccagttcgcgcagctgagcacgattctgcgaccatagatctcgctcagcggggcgagcagcatggggccgaactagggctcattagcacaggttgccagccatagggacgacaggcaaaacgtacagtatacccaagcaagtaaatgctgacagtgaacgaaagcagcgtctcattcgtgatcctcatatcgagagccagatcttcgagcgcaggcgaaaaaatactcgacgcaaggggggaaataaacgtgaccgcgctgacgaggccgagaagagtccatttgcgcgacggggcgaagttcatcgggttggctgggtcgtcctgcccatcccagccgacaatgccacggtcgaggtcggtctcagggtgtacagtgcgcgttgagggctcgcgtttgaccgaggtcgtcgtgggagtcttctctaggtcgacttgcagccctgactccgccggcagcctcttgtctttacgatccagtgaggcgtctcgactaaggcttgggcgcagagtgctttgcgaagccatgacggatgtgctgtcgttcctgatctctctcgttttcctttatttccctttcttttccctttttgccctttcttaccctcttgcctcttctttcttctgtcaagccgtctggccgagcgcaggcactgcactgcgcaagaagaaaagggggaaggttacaaagaagaaacagggaagcacgctagaagagaagcaagaccaaaggctaatcgagcagcgagcaacgatccttctatagtgggcaagtctctcggataaccaggcc

SEQ ID NO: 15440 - DNA, 471 bp, Emericella nidulans
ccctttgtcatgctacatcaagggctcgagcctagcgttgactttctaatcgaggatgatcaagatagcgtccggcgagtggtggaggacaatgtggcattccttagtgagtcctaggatatagttgaaggcacagtatcatatgcaggcattgattatgtaccattcgacagtgctatctttatatatcttccatttaccaaatatagactcaatacaagaaaccttactgtaataggccaattcctactggacaataactggtcaatcgtcatatgcaccttcagctaaaccaccacgttaggcatagccacacatatagaactgctctacgtcaacatgccactgccctcgaactccttgaacgactacagtccccgctaggtgacatcgcatgaagagtaaatcgctgcacatgatacacgacactcttggtttgtggaggaagcaccatagaaagcccagactcca

SEQ ID NO: 15441 - DNA, 341 bp, Emericella nidulans
ctttttctgactgtattaggtcgcgtcgtctaatatcatcagaaaatcgcttggcgggtctatatactctttaaggcctgtgaggactttcaacgcctgggacccacctcattaagctgatgaatggttttgaccacgagatgagcgctgactcacgctactgtgaccgcctggctgatagacaactacgagattgtggactaggaggacgcctaaagtggctagtgataaccttcatagccattcagatggccacaccaacgggatgcctttccctgtttcattcgttctaatcacctcacagggaccccaaagtgttactcacaggaatatgtcttttg

SEQ ID NO: 15442 - DNA, 3931 bp, Emericella nidulans
gaccactttcacaaatgctcaaaacaaattgctgcatgactacaactcctggatatgttaaggtgtttgatcgccgcaaactcactaccgtgtcgtgtgccacaatcggtcttgctttcaactcagaagttgatgtatgaggcaaggtcgagaggcgtcgaattgccattcctctgggcgaaccacgatgggagcgcgaacgcctaaaagatggcagagggcctagcatacaggtgacccccgatcagctctccattcgacggacggccctcctaactgtcattcagatgatagaaggcatggagcccatgctcatggaagccagcggcaagagccgggacgaatgggaccggtggtggactgccatgataagtgacttgttccagaaaggaggcctagccaatggagagtgcttggaagtaagcgcctggtggggtcagaagaaataagccctcgaaaaaaaaaacagacaggcattgtttggactctatgggagtatttggtgttctggtaaggatgacaagaagaaacgacaaaagcgcagcgcagcaaccattgctcatgtcatattggtgataccccaactcggtttggttgatattattgttcattcggatgtacatttccacggtcttgcttcataccacctgcgaatcgacattatttgttttcatagcgctgttttaacgctcgatatcgttttagatagtacctgtgtacttgttagcctatacacatcctagacttggatggtgatacgatataaacgacaagattgtttcatcagagtctcttgacatgtaacagaagacggacagccagaggaccactcggacaaaacttacaaggtctcaatttctgtgtaatcaagttagcgatgagtgtagcagggtgccgaaaagcgaacctttcttcacgaactccgccctagctattccctttcgaatatcctcttcattcttgagatggacttggcttgcaaatgcgcgatgcagtcgggttctaaagtagtcataacctagaggatactcgcggccgatattgagaagctctataattcaagaatcagcgagaagcctacaaaccggccgatatcagaataagacctttgtatatattgatcacttgtcggcgaagttctggattcgtcattgccctcgataaaatagatatagaatgagatgtaggagctgaaattcttcgaagagggactgaagtcagtgcgggctcgcaagatgtttgcttcgtgaagcggaggtgacgtcgtgataggacagacaaacttgtgactctgctggcctcgtcaacagatacagcaatagttttgctattggctagccgactcgtttcgtgaatctcgtattttatgaggacgatctcatcattgtacgagtaataagagttggtttctcgaatcttggagtatgtcgaagctcgacgctcgagcaccggactgagtggggtaccgcaagccgtccgaaccccgttgcgatcgtgcaccccaggtttcagctggagctgaagctcaatgagaatcgagctattcaaccgcctatactcacatacaacccgtcaataatgatacgcagtccagtttcccgaagtcagttgctggcttctgctttcgcgacacgacgatccacagcaattcgcaaactctcaggctcccctcaaacgaacaatgcccagcctgaagccccgagctccaagccgaaacctcacgacatcgacccccgatggcttacaatgacgaaacggcgcgttgggagatgcatgatgtttggattgaagccacgtcaggtgcaggaggctggggatattgtgcagcaaatcgccagggactggcgcgagctgattgccggtagtgagggatacttgacggatgctacaaggaggggattgttcaggcagagggttgcgtggggtgagatggtaagctcatgcgattaaaccggaatttcatgagccttaataggcacatacatgctaatacagggttgatggtttctggtaataggatagcatggtaaggctgctgcaactctgtcctggcgaaatgtcttgactgatttctgaaagggtatatctgctttctctctcttcgagattctgagagcgtggccctaacaaattgtataggacatgtcaacaacgtcacatacgtccgctacgccgagaccgcacgcgtatacttcacccacaacttcgccctacatattgacccagcacataagaccgaatggatgaacctcgtcagcaacaaaggactaggcattattctccgtagtatcaagattgactacaaattcgtacgtaccatgcataccctgtcatccacatcaacagcactccccctcgctgacggcttgtgtacagcccatgcaataccccgacaaggtgactgtctaccataaactcgtacacgacccctcagcttcgcactcgtcgcagtttgccttccatcttcaagctatgatcctttctgaagcgcgccagcgccctgccgcccgcgtccatgaggatctcgtcacgtacgattacaaaataggtaagaaggcagctatcccaccgtggcttatgaagcagctcaaggacacttgggagcttcaagaacaagcgaagaggcactggcagcagcggatcttggatatcgaggcgagagtgagaaagttggaggttgagagctgggatcgggaggatgctgttgaggatatggggtctgcgaagaactagaacgctttgtcgcagcggaaggactcgataaaggtataatatagaaattcagggtatgtatacgtctaatcaattgtgaagagaacttattttatttgaggctaagtgccaactgtactaccatacacgcttacccatgctgcctcgtgccaccaacaaaacaatacctgatatcactgagacttcgcaaaaaccttcccctaggcgagacacacccgctaggcataaaccttcagtactagcactccggagcacacactcctaaactccttatcgaagtctcagatggagcttctgattggcttctagaagtcacgtgaaatacaattacccctcccccacaatagctagcttttacaaacccctccagctcttctttctgcagccattccatctctccccccagaactacttctatcaatacattcatcatgggtgtcgaagttcagcgcatttctccaggtgacggcaagaatttccccaagcccggggacactgtcagcatccactacaccggaaccctggccgacggtagcaaatttgacagctcccgcgatcgccccggcacctttgtcacccagattggtgttggccgtgtcatcaagggctgggacgagggtgttctccagctgagcgttggcgaaaaggccaagttgatctgtactccgtaagtgcttgattgtttgtgctttgatggaagagcaactgttgataaggattcttttgatatacagggattacgcctacggcgctcggtaagatatactcacactgtttaccctatctcggcgaagcccaatggagggttgctcgatatccgggcattatctcttttcccctttcatttcctctcgctgattcgtgcgatctttagtggtttccctcccgtcattcctcccaacgctaccctgaccttgtaagtctcctccattgtaccatctgaacacttgttaacagccagagtagcgaggttgagcttctcaagatcaactaaatgctggatttggcgaagccttgttgctgggcaaagaatacatcggcatgtctggcgtaggcggcctgtctgtgtggtatttgaacttggcggttcatacaagaacatgtcgtgactgcgttcatgagctccaaaaaataagcgaattaacccggtcccgaatgcagaattcaacctgtaggcacgtagttcttcccaaataag

SEQ ID NO: 15443 - DNA, 4088 bp, Emericella nidulans
cacttccagatccagctcgtacagggtctcaatgtggtcgctagtgaatgcatttggaacaaggacaagatcagtttgtcccctcttaacatattcctggactgtatcgctggtctgaggcgccgagccaagccagacggtccaaacctgagactgcccagcataatcgatacgggttgctgaagttcagtctttgcattactgcgtgaacggttgcggcaacctctgctggatacggatcacctaatgataatctgttagatatatggccgtacagagtagaaagtcatcgtctcacctctgttgaccacactcataggcaaactgtgagccgagaacaataacaccacactgttcctcttttcctcggggtacgtcttcagttggtcttcaatatttcttgcgaacgcttcgataagacccgggtgtgtaggccagcggtcaatgacactccactggatagttcctgtcgcatccacgtcgcaatttgcgcgctttccttccagtcgggtcctccacttccacagctcattcaatgaactacccgttgtagaacacgagtactgcggatattgcgtgaatgcaacagcacggccacctttcccattgccgaagccgtctgctagcagctgcgcgtacatttcctccgtcaaaggcgcagcgtaacggaatgcgacgtacggcttgtgcggggcagactcggggctgagctggtccagcaatttacacatctctgcgcattggtactctgaccattttctgataggcgaacctcctccgatatccgcatactgtctttggatctttggcgttctcctcttcgcaatgagcggacctagatagttttggagacgaccaaggggaatcaagtcgccgtcggcctatatcatggacgttcttgttaggatatgctcttaacaatccgtgtggtctggacaaacgcacaaacagtctgcttagaaaatcttcgacctcagccgtcgtcgaaggacctcccatgttcaggaacaccatcgcggtcggccctttagaccctgtggcatcttgagtaaccggcggcacagctgttgcaaggccacgcctgtgttctccgctgattcccatgggaatgcgagccgctgaccgcagcattcgcggcagggcaatggtgcgccgcagagccatcgtaagctcaggtcgcccgacaggaatctatcgctgtgcgatactatatgaaggtaaagctcaattggaaaatttatgagcgagcggtgtatgtcagtaatcaaaatattgttctcaggaattgaggcagagcaaacgagttggaagctgcccagttcgctgagtttctggcatcatgacggaggccacggcacagagttcggcgttgtcctgggccaatcacaagaaagctggggtcatcaacggcttcctcggagtcacatgatgctcgtgtctccccgcgtcagtcagccggagaaacgcgtctcccgacagagacggaggacggtggtgtacctaggataggcagaacagcttcaacgaccttgatgaacacaaagaggttgtgaggttacctcagatcttgttttcacttctacttttctctcgtcctcgatcgaacccccagttgtattcaagacgccatggccgacgactatcgcgaagatgacgtcgttgaagaagaggaggagctggatgaggcggtatagagctagtctgtatcctctaactgggtcgcctcaggctaacttgtgaggccagggttttaaatcagtgagagatgctgtcctttttgccattgaagttagcgattcgatgcttcagccccgtccgtctgcagaccccaaaagacagagttatgagtcgcccgccacggctgcgttgaagtgcgcataccatcttatgcagcagaggattatctccaacccccgggacatgataggagtactgctatatggaacaaaacaatctaaattctatgacgaggacgagaatagtcgcggtgacttaacataccctaattgttacctcttcacggatcttaatatcccctcagcgcacgaggttctggaacttcggtcgctggttcaggatgaagaaaatgcgaagaaaatactcgaaccgtcaaatgagcctgtttctatggccaatctactgttctgtgtcaatcagatattcaccttaaaagcgcccaacttcttatcgcgacgactgttcatagttactgataacgacaaccctcacggagacaacaaatctttccgttctgcggcaactgtgagagcgaaagatttgtacgatcttggcgttacaattgagctgtttccaatctctcagatagagcatgaatttgacacctccaaattctatgacgtgagtacagttcctgcacgttcggagcactaaaactcacaacggataggatattatatacaaagcctcgcccaacgaccctgacgcccctgcctatctaaaacctgatgcgaagatgaatgatgcccaagatggtatctcattactcaacggtctcctgtcaagcatcaactctagatctgtgccgcgccgtgcgcagttctcaaacatgtccctcgagctcggaccaaacttcaaaatctcagtatcgggttatattctcttcaaacgtcaagagtcggcgagaagttgttatgtgtggctcggcggagaaaaaccacagattgcaaagggggttactacacagattgcggatgattcggctaggacaattgagaaatgggagattaaaaaggcatacaaattcggcggggaccaggtttgcttcacccctgaagaacaaaagtcattgaaagactttggcgaaccggtaatccgaattattggcttcaagcccttgtctacccttcctttctgggccaacatcaaacacccgttatttatttacccaacagaggaagactatgtgggttccacacgagtattctcggctttgtatcagaagctcttgagagatcagaaagttgcgcttgtctggtacattgcacgcaaagctgctagtccagttcttggtgcaatgatggctggtgaggagaaggttgacgagaatggcattcagaaaatacccccgggcatgtggattataccgctcccctttgcggatgatgttcgacagaaccctgaaaccgcccttcaggttgcgccagagccacttatcgatcagatgcgaacagtcatccagcagttgcaacttccaaagggcgtctatgaccctcagaaatatccgaatccatgtacgtgctgaatcaaagtcagaccgttcgcgaccctactaatcaccaaatagcacttcaatggcattaccgcatcctacaagcgctggcgctggacgaagatgtccctgagaagcccgatgataaaacaatacctaaatatcgacaaatcgacaaggtgagctttcttacccaacatattgatcatataagaactaacacttttttcagcgcgctggcggctacgtcttggactgggctgatgaattagaaaagcaatacgcgaagataaccgccgatcaacccaagagtaccacgcttgcgaaacgacctgcaaaagcagataacccagataaagccgctccgccggcgaagaaagtcaaggctgaagctgggtctggcaacatacaggatgaagtccagaaacattttgagcagcacacattgtccaagctcactgtggctaccctcagagatttccttgcatctcagggccgtgccactgcgggtaaaaaggcagagctgctggagcgggtggaggagttacttgagacgaagttctagttgtgactctgttgtcggttatctaggactcgtctcgcactcttcagctgtgctgtgcactcgaattatctactgtagactacttgatacagtttctaaatgagagacataacgacttatgaagatgattggatggaactaggtgcgaaaatctagcaaatctagccctaacacaggtcgccctacgtaaatcgcttgatttgattccatctgcacgccgaagtgtagcttcattaagtctcacaaattccaaatctagatgtaaagactcaactaaagacatgaatcatcaat

SEQ ID NO: 15444 - DNA, 2553 bp, Emericella nidulans
atacagcccgctactggatgtcacatatgctctcttcgagcatggccacagaggacgaggtctcttactcacaggccttccaacgcgcactgcctgactcggtactgttcgcccagttagagcttaccaatcgggagtctcaattcagccggtcgagtatcgtcaggctgtacaagattgccgtgacggtacgacgcgatgttctaggcattgactctccggccgttttgcaaagcctcatcatgagcgcccgtgcggcagaccgggctcaggcgccttgggctaatgagcatctttatgaagcatggacgcgcagtcgcatgcggttgggcccaacccaccctataacgcacgacctcgagcagcttcttgttgccacttccgaaggcgcaggtcgagcggaccgcacagctggtttgaaaacagacgcactccgaggcatggcgttggacggctgggggtcgtcagacatcagtttcgctcagcgattacaatatcttgaccgactggtcaaggcctgtgacaaggagaaccaacacgacaaagcatacgatgtctcgaaacagttctaccaccagactatcaaagtctacgggccgtattcatcggaaacgatggctgcggctgagtacctcaccaataactttgacatcgctcccccagatgagcttgcgttagagctcgcccaggcaaagtacgagaccatggttcgctcaatggatgcctcggatccgcgtcgagtagaatattcactctcactgaccaagatgtatgaagaaaactctcagccggcaagagctgaggaggttttgaccaagttgtggcagagtttgtgcggtccggataaagagcacaaggcaccatgggaccaaaagacaaaagtcgtgttctactattccaagtttctcgagcgacaaggccaccatgatgaagccgctgcgcttctccgtcagttgtccgccgatttagaggcagaaggcggtgttcggtctgcacaaatggccagccgtgcgcagcagttacggcgggaggctcgtgagatgcaactatacgatatggatcggactctgggaatgcaattatggaagtactacaagtccacaaaccagcagtatcatgcggatgccgtgaccttagcacggaatctcattgaaggagccataccaaaggaaggacacactgccgagatgggtaacctttcagtagaggagagtaagatgctccctgaatggatcgatagtatcgcttctgccgtgacgactgagacgagttcacgaatgcctttactccggctgtgccaccagctggcgcgccagtatatgaaagacagccaatggcgccaaggaagcgagattgtatgcgcggtgctgaagcatacatggcctagttttgaggaccccggatccaaagagaagttctcatggaacgaagctcctattatggccgacttagctcaggaccacgcctactgtctattccgtcgacttgatgtcccgacagcgagtattgtctacggaaatgcgttcaaggcagcgataactgccgagcaggtggaagtgcagtctgttacgacagtagtcaagactgtggtggacttctatgagaatactttccaattcgataaagcgttggttctcctgcgtcaggtcagcgagttcttcgccctgcggttgggcgagaaggataagcacacgcttgatagccgctactatgaaggcgatcttgcatttcgccttgaccgtcgtgcagaagccgaaagcagctaccgtcacatatacaaggcgtgcattcgggatggcaaaatctcatcgtcaggtgtgcgtgctgctgtagctctcgttgcaatttacgagcaaaacaagcaatgggatgcagctcttggggtgtaccggaacttgtggccgaccttagtgcgctttgatgaaaaggacggctacgatcgtgctctcctcgagggtttacttcccaagacataccctgcttacatgtcccttctaacgcattccgctgtcaaggcggaccataccgagcgcctgcaagtcgcctcggagcatcagcagctctgccgcaagttgtacgggccaacacatgcccgaacgcgcgatgcgacgctccttctagcagagctttctgcggagagtgatcaacattcgggtgatgctattcatctgtaccaacaagtactgaacacgcacgactgggttccacagtctgaagcctcccgtgctttaccggatatgaaggaccccctctcaattgacatcaagcaccggatggcccagttgtacctgcggcagggtcaagcgtctcctgaggcaagaaagttgtatatggaggagctcactctggctaagcagcagcagggactgtcggcgccgacaaccctgctatggttacaagaaatctgccggatgcatgctagctccgagtctgccacatcgcgtcaacagggggccaaaatcctcactgggcacgttgacgaggttattcgggtcactggaaatcagcagacccttgccgaccggggccgaaaactggcagagatttcttgag

SEQ ID NO: 15445 - DNA, 655 bp, Emericella nidulans
  unsure (1)..(655): unsure at all n locations
tgcaggacttcgtgatagactgccccgatgggatcgatgacggccagtcatatgcactccccgaatatttctttgacgaagtcgtcgggaaccgatctatggtccgggaacggtacttcttgcggaacatcttttacggattggggttagatgaccatggcgacggcgacgggcactgcgaggcgcagcggcagggcgattcgcatcttgagcgaggccaaaatttcgataagatgttgcagacctgtacgacgggttcccagagactcaggccgtgtattatagtgctggagtcgcgcatgataactacaagatggtatgttcgctgatgcttggccgggggttcagtaagggccctgaatcaaggtaatataaagggtcaacttgtacagtttgttgtatagcccatgcaccgcaagaggtccttgttagaccctagcaatgacaccaaggacgtcaatcccatcagggacagcgactaggcgtacctcaagcggtgacccgtccatctacgatgcctcgcntctataggatcgcgctacttcgtcgctgcgatggatgctgagaatataccattcattcagataggcataatagaattattactttgctttacgtatgacggttgatctgcgtagttaattattagaaactc

SEQ ID NO: 15446 - DNA, 520 bp, Emericella nidulans
gttgccgacccggtttgagcaggtccacaggccaggcaaaggacctttgagtacatcagcagatgatggtcactactgtatgtgctgcgggccgattttgcgagactgtaaggtttgccgagagcgctagggggagcttatgctgctacatgactccactttatatcttggctgctatctgccacactatagcacctggaccgagaactgactaatttgctgtagaggttgacgcctagcacaggggcgggatttggccatatgctagcccagtcaagttaccgtgtctgattgcaacagaatctttttgttcgcatctcgtcatgacgtaatgactgcttatgtacattgggacacggtttctggggaatttgaacaactgggaggcctagaaaattactttatatggacctttgacctgcgaagaaatggaattgggttaagaaacggtattttttaattggcgctattgcaatgggctacttaatccaaacattttcccaaaaaattaactttttcc

SEQ ID NO: 15447 - DNA, 4924 bp, Emericella nidulans
gtgaaatcgtgacgccagtcaaggcagccgatcgcgatatcgggataggacaagtctctttctgatgtcgcaaggcttgacgagaagcctgttgcgtcaccggcaattgtgttgttaagatactgggctagggtaggccagttggcgctcgagcgcttggactgggctctttcatagacgaggtagggttgggcgttgatgaggatgtcttggccggtgaccgtggagcggcaggcgctttggtcgccggcgcagccgggagcctcgattggcgactcgttagcggcagcgaccaggtcgtcaaatatttgggggagatcctggcccttgagcgggcattcgtcgtccgttgcggttgtgttgcaccacttgaagaactggttcagaacgtcctcgtaagtcgacacttccgtctgtaaagctcccgtttctgactgcgaatgatccaggttcccgtcgaggaccatgcgtcccacgctctcgggatacagctctgcataggcgccgcccagctgagtcccgtaggacagtccgatccagtttagcttctcgtcacccaaggcaatgcgaacggcctcgagatcccttgcagcgctcgtggtgtcaacgtgatagaacaactctccagttagatttcggcagctctccccgagcgcccggttcttctcaaccagtgcatgaaactcctcttcagtcgtcggaaacagcgaaacccgcttgttatagaggtctggatcgcacttgactcttgtactcaacccgatcccacggggatcaagaccgatcacatcgtagtagtccttcgtgccattcgtgtagtaagggatgcctactgcctgtgccagagccgaaatcgagccgggccctcccgggccaccagggttatagatgatactgcccagtcgctttccagggagcgtagctctgtagcgagccattcccagagtgatgttctctccatgaggccggctccagtctagcggcacctggagttcaccgcagtcgagatgagacgcattcccaatctggtcgatatacgagtctacccctaagttcgctaggccaggaaaattggccacggtgcagttcttccaagtgatggaagacgcggtcgaaatggatgcaattgatagaagcagtaatgatagcatcgtggtctttgaacgatgataagaagctgagcgatgtgccagcaagagcgttcttaaggaggacaagagcaagagatcgggtccacctgcagagcagtgtcgatcaccataagcaccagcaccaaaatctgactgcgtcatgatataatcccagtatccagctcaaaaggtcattggaagaaagtatgtggactgccttgagatagattgatcgctcagcctcccatgctagattcgaagaggtttggtcatgctagacggagctgttggccaacggagacaggatcctgctggatactggtcccgctactcatagattagcagtctgatgtcaataggcaaataataaaccatatggagtaacacttgcttgcctttgccgtctgccaatgttcgagaacccattgcgtggccgcgaggtcagccacttgagggctgaggcaggcagcaagatatcgccagccgtgagaattgggggctgaaaatcaaaacatatagagcgagatggctactcgatcctgcagaaggatggcgttcctagtgagagatctttgaaaagaggttcaagagtgggggacggtagatacaaactgtgcattaaccacctttgggattactgttactcataacggccctctgcacacttacatactaagctatctttcagcaccataattattcagacctattcccactgtttgagaaatctagagtatcagcctgaaatttatctgctctgtgaagaataagcagccacaagcgtcatacaatgcagcctacgtaggaatcccatggagaggctgagctaaagccagggcagtgcagatatggagtaccagactaaaaaaaccgggagccaaacagtcggtatgctagcagagtattggacaacgaagtatgaacgcagtgtgaataaagtgtgtaattaatagatactctgataagtattgtgtgtgtcaacccgccgcatatgtactcttcttcctcagcaacgccccaaacttccaaagaaatactggcgccgggattcccaaacccaagctgatgaagcctagcaaactattcccccatccataatgcaacgcgtcatacatatacggtgcgaaaagcggaaacgcgaagccgcaaattgaccgcaaaaacgcactcgctgccaacgcgctcgccgcgaatctcgtatacgagtcgatcatgtatgtttgcgcgcattggaaggtgacgatcgttcccatgccgaaaatcgccgcgccaatgttcggcgctatccagtgtgtttggtactgacctgtccagccgtagatgaagaggccggcaggggtgaggaaggccgggacgcagaggagtgggacgcgaaactcgggtttgccaacgccgttgttgcgggctttcaggctgcggtaaatgcggtcgttgagtggagcacagatctgagagcccagccagaagccaattccgagggagatatagtttaggccgccgatgccgatggattcattatagtattgttcgccagtccataggctcgggaacgtggagaggacgaggtacattattccgtaggtgtaggcgaggtacacggcaatggcttggacgatgggctgcgtaaacaggaggcggaaggggcggatgagagctgagcggatggtctcgctgagggtctttttttggcgctcgacttcggtttggtaggatagatcaccggtctccttgcggagtcttattgcccgcgttcgcaaaatcttgggcgcgtaggtctccttcaataagatcaggcctgcgatctgaatgacgccgtcggcgatagtggttgcatagaacacccagcgccaggttgtgttctctgcgataaatccaccggcaatagggccgactgctgggccgaggaggggagcaagactgtaaatggcaacactcttgcctcgttcttcgggtcggaagcagtctgataaaacgccaccgccaatctgtcacagttagaacgaacagtataacgaagctacgggagacacgaaccgctaggggagcactgccgcctaagccagcaaagaagcgaaagacgatcatctgcgccttggtcttcgcaacaccacaggcgatattgaacaccaggtaaaacagattggccagttgcagaaccatcatcctcccatagatctcagacagaggcccgaggaagagcggtccaaaggcgtaggctagaacaaagatggacagcgtaagctgggactctatcgcatccgtgatccccagatctcgggccaaagtagtcaacgctggcgccaccatggatgatgaaaccggcgagatgaacgtaaagcacgaaaccgttaccacaatcgcccatttcttcttcatgggccaatttttggggttctcaggatcgtcaggaccattccacgtaacctgcagcggatgccgttagcgcagttggccagctctaacaaatgcagcaacctaccagtttggggtctgaggactgcgccgagcgccctgttcgagacttctctatctcagctgttgcaccctgtctgtttgcctccaggtctcgatctttctcggtgacgattccgttgtcgacctccacttcgggattcgcatctttctcattactctcctcccctaaactatcatgatcgtcctcgccctgatagacggaatggtcgtcgagatgcacgccagagtatatgcgactgatctcagccggtctcgttcgagaactcgacctcgtctgcagagtactagcagttgatccttgtctccgtcgcggctgcgtatctatagagtctgaatccgagctcgacagaccggattcataactggcgtcttcgactcgagacaactcgtgtgcatttgcaggtgcatgctcatgctcatggcgtcccgccatcacgaatacgtaaccgagactttcgaatgaagtaagatcgtcgcccaaaaacgaagcaaccctaagagaccaagatacctgcgggcgagtcaggtcttataccacggcgaatagctccgtgtctgtgatgtcgattcaactccccgtgaaaaacagagcaagcccggtgatagagacatgttaacaccgatgtggagtctgcttcaaggtggcattggccacggcaaaagcttgacaagcgaaggggccataattctgggcctctccacgcctaaaaccggcgataacacgtacagagtgaagacggaaaatttttgctggcgggacaagccgtcgcaggaaacggcctctggtgccttgtgttgaaggcgagtccagcgactccatcaacgtcggtcgaaactgcaccgtcattggttggacgaggcaaaaggtcggatcttcggcacgataagattatgctatcttatcgataaggtcttatcgaagaatatgcatagcgtatgcagggattagcataacctttgcccaactaggagatgaagtcattgcaacttggggccccttgaatacgcttggtgccgttacccggctgatggtgacgtgcaatagcacctcaatacgagagctagcattagtgtctaacagggctccaatcaaacaggatcaatgcacttattgcatcggtcatcacgaatggcgcacgagacctgtcgcagagacaaagccgttggctcccgatccagattctgagagttgtgttgacggaataagacaccgactagaccatactccatttccacgtgttagaaaacactaaagaaactgtgcctatatcaacgagagaaacagaaaaccagatagaaagagagagctcaaatacggt

SEQ ID NO: 15448 - DNA, 510 bp, Emericella nidulans
gcctttttcttgaagccaacgcgcaccataatcactctctgcctcctgacgtccgggaatgccctccatccctacgcactcttcgcgaaccgcggtgtgtgtgttccttgagacgactgcagcgacggaccacacaaagggcggcccgatgccgcggacggcctcgcctaactgcaatacgccacatgcacctcaaccagtcactgaccatgagccatatactagcgctgcgatcctcatagcggaacacgagggccccactgccgaacagaaaccagctgctggcgactctacgtatgcgacagatcagcgcgagacttgacactgtactcgccgatgcacccgacgaaagcgacaagcacacacttggggggagagccgccggatggaagacgcttgcgtcaccgaacaatcgatggagccgcaccgacagacagaggacgcccttgccccaggctgccatagcgcagagaaagctgaactcgctgaggaggctatttgcaccttgac

SEQ ID NO: 15449 - DNA, 207 bp, Emericella nidulans
ggggccaagcagccgcgagggatcgtagacggtgcacggttgaggagcaggcagacccgccagcgctttctgcctcggtccatatacctgctacacgtggtgtgagtatagggagagtggcgataaacaggcttattatgcttgggaccgctcggggagcggcatgcgactgcaatataacatctggctccgatgcaggcgcctgtg

SEQ ID NO: 15450 - DNA, 1481 bp, Emericella nidulans
tgatcaggttggtgtcaccgatgggactatggtaaaagttgttggcgccgaaggacatgttctgagcgctggacggcacagctagggccagggcgcctgagatggcgagggtaggttgcacgattcgcattgtgagcgtctcttagttcttagatctaggaaaactgcttgaaatctggtgaatgaatgtgagaaagattagagtagggagggtattggtcttatactgcagttgaggccgctgatctttcttgagcgttgtggtccagaataagtaagcataagccgatctgcagacttaagcttaaaattaccacgtcagtggagccttatgcaagttgctgatgcgtggtggggagggggtactttcgcctggatgcatctcactactgcagaatactggtgcctgcagcgaaagtcggtgccgggggggtatttagatgggtcgacagtatgcactgcacacccctatacctgaattgattagagttgacccacatatgctactggcttattggcgttctgccctgacgtttccagggacttttcttttctttcttcaaagctcacctgtgacgtatgaccaatggtgcgaggtccactgagtattcaaaggctgtagccggctcccatctacggccccgttgcagccttacttcaaggatttattaatggatatcgatcatctttccaatgttaatttgcacaattagtcctgaaaatgaaaagctagtgctctgcatatagtgacatggactaaacggcatgatctgctcatcaagccttaagtcacgggagatttagaaatggcttattcttagatcaccggggagattgagactgtaaaacttaaggtgaggtatacttgctcgcgaactgtagaggcaagttaaggctctgtcaactttactaagtgttttacctgaactgcataaaagacaataaaccaagaaacttcaggttactgagcctgataaagcacttatccgataaatgaatgcaatcctggctttgttcccataatgaactcactatcacaaagccttgcttttgggaaggatgaatgctattcatgctttcgacatagtatactgtgattgtgaacagtaccccaagactaacaaagtacttttctgggaagatgaaagacatatacggctttatatgtgaaggtcaaggtaaggatacatatacgtcgaatacaaatgcataaatagccttgtagaggagtccacgaagttcaagttgccgtttatctgatccatatctactgctcattcataacctttatacctgcaaacaaccacaaacctggtagacgcccaacatttaacaaaaaccaaaaatgtcatttgccgacgccttcaccctaacgctcctccgactccctaccgaaattcttcctcatgatagtcaagcaaatggtcccctctgcgctcgccggctttgtccacaccttagcccggcttagaacgctcaac

SEQ ID NO: 15451 - DNA, 1315 bp, Emericella nidulans
gtaaaccacagcattctgctcaatgcgatgcccatgcccatcaccccatttacgaggatcatcgtcacgattgcaaacccaaaccgaagaacaacccagtctaaccgccgcttgcccaggtatcgtccatgagcattgaaatacaactggcacccgaaaattggtttccaatatggaaacccattacacatgtgagaaaaagcgcaaacctgcccgggccaaaacatatccatattccactcattctcaaattcagaaatcttcccatgagaatgcacaatatgttgagccaaactagtcttcccagtacgggaaccacccaatcataagtagtgattgtcgacgattgggcctcggtgatataaagttctcaacctctcatttatatatacctgacggcaccacgaaccgagtcacatcaatatctgcacccaattcaaatggaagaagattaccgttatcacgatgcaaatactgagccgcacgaatactcgaaaaaccccaaaaagatgaatcccatattcccgcgtaatcgcaaccatattcgcttcaacaatcgttcttaaaaatctgcaaccatttcctccgcctctccgcctcctcatcaccattctactgcggccgctctccaaacgtcataccctgattttcaactaatttcacgtggtttatcttgaaacttggtattgtctgacactgacatggagcaacactatgcaaagaagaactcatattgccaggaattgcaaaacaatcccgagcagtttccataatccacgtaacctttttgtttaatgaatcagtacatgaaagtgcatacctccatcctcataaagttccaaacacccgtaatacgacgcatcagcaagaccaatatcagacaaccgaccttcgagctattaagcaactatatacagtactcctaacactattgtaattactagcgtacaatcgtgaccagagcccctcatacattaaacctattcgggaaatatgcaatctcaagccacagttcttggcctttttacgaattctggcttagttaattacataaggtcaccggtcctcaaagccaattcgctcaataaataacacgtaccgtcttaagtaccgccggtattgtaactttcagggccctacgtgtcctaggcctctggaagccaatcaaaccatcttcctgcatacgccatagaaccgcgctatccctcccatggggggctggctcatgtcaagtacagtataaatttcccaagtaacaccacatctctctactctattctttttgatcataaagaacttacatacaaatcaagca

SEQ ID NO: 15452 - DNA, 6187 bp, Emericella nidulans
aaggcgacgattcccagtcgatccgagcgcaagtgacgagtaaattagtcgaacttcgcacatacctggaccgtggagtccggcctttggaaggcagactgaagtatcaagtggacaaagttgtcaaggcagcagaagaagcggaaagggctgaaaagagttctcaggccaccaagccaagcaagtctgaaggcgacgatgagagcgataatgagggatcagcatcggacaattccagcagcgaagaaggtagcgacagcgaggaggacgaagacattgacgaaatggcttatcggcctaacgtgtccgcattctctaagaagatggtgccagaggcaaaggcggataagactgcgcgaaaaacttcgagcgacggcatctaccgaccaccgaagatcatgccaacagccatgcctactactgagcgtaaggagcgcaaggaacgacctatccgcagatccaatgttatcgatgagtttgtgagcgctgaaatgtcgtccgcgccgatggctgagcctagcatcggtagcacaatcgtctcgggaggccgacacacaaagagcaggaaagaaagagagcacgaagcagagcggactcgctacgaagaaaccaacttcgtccgtttggcaggtgaaagcaagaaggaacgtgcgaagaaggcggcggctcgtcgtgctgaagggacattcggaggcgaggaatggaaaggcctcactgagggcgcagatcgcatcacacgactcacaaaacgggccaaaggaagcagtagtgcgctggagaggagtcggaagcgcaaactcaccgaagacgggcagcgcggggatggtgctggagttggtcaaatctttgagaagcgccggaagaagattgaatcctggaagcgatagtgccttgctgtctcaaaagtcaattgtcttgaatcgatttggagtacgtctgctctatgtgttatccatagattacccttttgcatcagcgctgtgattctgacgccagccaaatggtgttagacaaccaattccataactcaaatttccctcagtcacgtacaatgcggttcctagacgaggaccgagaactcggtcctgttcctgggagccgtcctcctttcacgtggaaattcaaccgtcatgacatcatctcccgtagctctatttaatctcatcgagctccccaattaccccagaccaccggtgtcatcgaattcaaagaaacaacgatggaagatccaggtaattacctatattcttgtccccactctagtctatgttctagccctgttcgaggcgcgcactgcatccaaccctatatacctatcacccactaccactaacatcatgcttatcgagtttgacaaaacatcattctaacatctaacccagttgcggaaatctcaactgtcgttcatctcctcacgcaatccccaccttccgtccaaggggaaacagttgaccgcttcttcactcgcgatgcagagtctatccatccattctgccgcatctggaagtacaatggtagccgatggggcgtaaagaaaatataccaatggtacaagatcatgtcgccacatatagacctagaagtccgctctattggtaggtttgcgttgcgcagccagccgttcaccatatcccttagaacgagatgaatgttaacaatatatttagcatacgataaagacaagctcaaactctacctctctatgcaccaagtattttccatctggatcgttccgtttcacactgcacctgtagcactagtgacggttctggatctcgctacagatccaggtgatgaaagacaagaaagcgcaggcggcaagaagcagtattatatccggaagcaggaggatttctaccaaacgtcagagtttatcaagtttgtggtgccatatggagggcatatgcttgttatgatgtggcatgcatttgccagtctgttttctataatgggcgtcttcttattatggccggtcatgtgggcagaggagagggggttttttgaccaccattatcgcatcgcgaacggtgcaagggagggagttgttggtgcgttgaacaatcatgtatcgaatttgaagaatatatgagctgggggctcgagtaggttttaaataattcatatttggcataagtctatggtatgtcatacagggttcattacatattgaagaagtcagatcataaggggacttctcaaaagccttgattcatccagcttggtcgatatcgttcgaagtatctcctatctaggagtctaggagtctcggcagtttaggttgcgtactgcttccttagggcattgcggaaagcttcctcttgctttacaacttgcgctggtagacctctcccgatgccgaacaagacaaaaggtgcccatttccacctaaagggattgacaagaatgacaaagacaaaccaatagatcagctcggcataggtaaagaagtcgaatgctccaactggagataggcgtttcataaagcgggtgaagtcaatccaggtcttcatgcggccctcggtagggcgcgacaaggggtcaacaaggaacatgagtaaaaaccgagtatagatgccgatatgcatattaccaacagtgccgattgcgttgacatatgtactgttgttggcgcaaatgctggggtacgacggagggaaaacttgaaggtaccaactaggcgggccgtatggctcctcaaacgcatcttcaggaaggaaagcaagcgaaggacgcttgaagccagttgcctggatgatcacatcgcctggaatcacggtttcgcggccaggaccgccttgcggaacacccttgctacgcttgttgaataagatgccttcttccttgacagagaggatgtcaccacgcaaccagcgcgccttcccttcacgaatttggtcaaatagctcgctgttcgccattggggtctgagtgtacagaccgccggaaggggcgatatcctgcaggtcgcggtagaagaatttgtgaagtaaactttcgggaatccatgataggaatgtctcctgcccgaaaatgttcagtgccagaagggattggacccaaacgttcctcggaataatccatttgtcggaacgtgatagaacgtcaatctcagaggcaccagacttcacagcgaattccagagcctcgatcgcacttgcgccaccgccaatgatgagcaccttcttgcctttgacttgcttcccgtctagctctgatgaatggtatactgagcccttgaagttcgtctgatccggcagggagatcatcttggggtcaccgcagacaccaacagaggcaacaacaccgtcaaacaaaccccatttttcttcatcgttgttgataatccattttccggtcctagtttgcttgacagattcgacaggagtctcgaagacagtgcgatcctcgagcttataacgcttccagaggtccacaatctggtcgcgaatttcctcctgggtgggataagcagcgtcgtagtggactgacggatggaatcggtacataatgctgtggatctgaagagacgaggtggaattgactcgctattcatcgttagaaagcaggcaattagagacgtcagagcaggctcacactccaaataccacctagacctttctccttagatctcttctcaaataattgcacgtcgaagccatgaccgacgcagtgtgcggctgaagatactccagtcaagccggtcccgattatagccactcgttttttgggaagattattggcaattgggcctgacggtgggggaccaggtgcaaagatccaattgaggatattctgaaatatcacgtaaaagaaggtgaatgtctgaaggaaaggctgcctggcaaaggtcgaaagagaagactgggagctggacttgggcatgatgaatttacatgcgattatggcctgcaaggtgggcagcggtaggtaataagtctctgcgagaattatacggctctcgcttgatattggtttcgaagaagaatctgagagaacaagaaagctatgctttttgaagtgttggatggggcaggatgttgcactttgtatgacgtattggcgaattttcacatgtaattacgttgacctagttcaaggtacagtctccatagtgtttcaaaagacgcatctggattcttgtttattgaactgtaccttgtcaggacgtctgacgtgatctaagtcgtacgttaaatgccgtcaatctgtcaacctgatactctagttcccggttgatgtatactcggctggagatatatatagagtactctgtgactgaagcgtggcctgatcgacttcagcacaataggctggatagtcccccgcagcttttagaaaagccgtccgaagcgggcagccacagggtaaactgataaacgcaaccaaaaaaacgaagaagatgtgtactcctgaatagataatgggctttgaaaacaatccttagcattctgtagaaacagtccaaattaggactagcgcccctcacgcggaggtggtgctgcgggcttcaatgaacgagaactctactctcccgaccacgagctattccttcaccaactacgttccaccattgcctagacaacctttcctacttcacaggacacaagtgggctttgctagatatgctcgagcttcaatgatctcgctattcaggctatccgcgcagtgattgcagcctctatgcttttcgcttggtttcgtctatcctcgccattccgccgacgcgcctcttacggatagcacaatggcttttcagggcacacctgtccttgaccggtttcttacttcgctggccgaaatagtgcgcgaccgggatggcgcaaagctccaagacttcttgcaaattgaaccaccgctgcccgacgtgtacagacagatggtcgatgagttgcgacaacactacgcgaatggatcaacaaaagaagcagagttgcttcggcggtgcgaaggacttgtccccaagtccaaagggagtagcgcgtggacggctttcccgacattcatgaagctttacttctgcttcttgcgcgatgtcaatgtcgataatctgctcgagacttatgatatgttgaaaatgctgctcaagtaagtttgcgccttgcactccctgcgctcctttgaaagttgttcgccactgacctaaatttgttgaattctatagtcagtgcgtaatggcactcggtgacagccaattcggtatcgttgttttgcccacggtattatacctctccaaggtattggcgaagctggccatgggcttggaccgccgacctgaactaattgcccatctcctgagacttgagggaggcgccgatcaagacgagagtacagagaaggttacattagtggaaaagtctgcgaatgtggttcgagaagcgttcatcaagtgcctcaccgaccgcagtggtacacccggggttcatggaaagccggagggcaaaagggtcgggatttatctcatggctaatctgtgccttaagctgctctttcaggtagtactgggattcttcgtgttctatcgatgaatagctgacactgctatagtgcggaaaacttagaaacgccgagcaaatgttcgcaagtatctctgcgcagtctcccccactgaaacacttccctgcttcccagagggtaacctacctctattaccttggacgatacctgttctcaaacaacctattcttccccgcacagatcgcactacaatcggcttacgaccagtgccaccgtcaagcgataaaccagaaacgccttattctcacataccttatcacatgcaacattataatgggacgcttcccgtcactacaactgctccagcgacctgaggcagagggattagctgataagttccttccagtttgccaactcatcgttcgtggagactacattgctttccgagatcacctcactgtaaactctccggcaacagaatggttcgctagaaaaggcatcctcctgccgctgcgaaatcgatgtgagatacttgtgtggcgctcgcttgcacggaaggtcttcatccacggtggctttcacggagacccccagggccaagctcaaagaggtccggctccattcctgtacctaacaaaacttcaagctgctggacggtggttacaggcccaacatccacaaaacatcctatgccaaccaatctgcctacggaacaaccttccttaacaacaag

SEQ ID NO: 15453 - DNA, 1090 bp, Emericella nidulans
agcattttagtcaaattatcctgattggcctcggtcagatagaatttgtactcgggattctggatactatgttgcagagcagtaatatgtgtttcccaagtccagcgagacccagaggctctgagtgaagaacttattcactggtccagcgggtggcagcagcaagtgaacgtgtgtcgactgagccggccataccacaataagaaaaatgtaagtctccttactggggaaggattctcttccgcatccagttgcaactggtctatacgtaagtacattttctagggtagcgcagaaaagaacctgtgtctagccgagatactattagccaaaggacaatactgccctaagaggtcactcagagtatacggcaggaatctcaagcccagcatctctcagtctccgctttagccgcaaattgagcgtggtctgttgtatcttttcaagaatagctttgtgatgatgtctgccagctccttggattgaattctgttgcattgttagttgatacatcgactggttgaatgaagagagcgactggacagaataggaacaaatgaggctattgacaaggtgaatctgcttctagaggagcaagtagagttggtgttatgtttctgtcttggcagcaaatatcgcctccagcactattcactcgctctggtgcgagatgcttacctgcactagagtagtaggcccgacccggcccaagagcccttttgccatactcctgatatgctgctgatattcaaaaatcatacagatcagtagctagttgtaaggtctaattcctgcgaggtgctgaagaatgccgacattattcgctaaccaggtgaacaagatcccgcataacgttgataagcatgccggtttccatagctctccgctgacgctaaggtctatctcactatatcccctaatacctcgtggtgccgcgtggtgtggctgtgcatataattcaggtttcgctggtcttttttttttctggtcctgtatacttcaagcggaccatcctttcaagtataatgtcagtaagacagtaagccagtaacatgcgttgtactcttcctacggtctgcgccagcctcac

SEQ ID NO: 15454 - DNA, 2760 bp, Emericella nidulans
taaagggtatatgatgagatgaaagtagtataaagaagaggtggggccacggagggcattttcagggacaaagaggggagtggtaaaaagggaaaaataattttaaggagacatttgagggacggaaagtgaataactggacactgggatggtacaaactggttgactattgagcggaagttcccctcttagggggccaggtagatactcctcaaaaggtagcacggcatcaggggtctaaagcaaaccccgcaagtcagtttggaccgtcgtagatgggaagcttccagcagttgcgttttcaatcaagtgaactgtctgctgctttgtccagttaaaattctgatggtgatcgcctagtttggggggcggtgctcaaaaaagggcccgtcgaaatctacgagagtgaaagattcgaatcatccaccgacgttgcctttaacggggactttacagggatgcccggtccaaatgacagagatacccaatagaaggttctggtgagagcagatgtcaacgtaagcaggagtgttcatcaccaatcaacctgaaaccctgagccttgcatttacgcaacgctgctttcccttctccatagcctcattatgagggtatatgtcacccctgagttgggaaatggcagcagcaccagtggcttgacttgaacagctaatggagtctgtcaagagcgtcatttcttaaggatctgcaggatctgccgctttctctggaaccgcaggcatagagataatgaaattgagttgtccctcggaccgagcctgccacggcataagagaagcactgagtgtgtcgagattgtttacttgatgcattatctacaaagtctaatttatcgcaggccatccatggagtcccatagagcagtgcaggacaaccaaatctggcacagcgaagctctgcacccaaccaagccctatcgttgcgcggcgtcgacaacacactagtatgtgcgttgcccaagcgtcaacactttttctggtctcatagtagtctatgagaggtaatgccgttgaaaatgtactctcgtcctcttgcgagactgctacaaatcggaattatcatctgatgtctgatccttggacatactgcttagacaaaacaccttcgacagggaagctttacgcaataagacttggaacatttcagcgtgccacaacagcctttatcacctaagatcatcttggtttcttagagccgttcagctgactggagcttctcagcttgcccgaggtggcgagcatctacttgataattgacaccttgtaatgacccgaccagatcgatacgagcgctctgagccgcgaaagcaagctagatttggcgaaatacatctaaaagcagtctttattgcatattgaacttgagcattggctgcctacgaagaggataatggacattgttggttgcttgatgcatgcttatgcttcatcgactagacagactgggaacgcccaatatgcagcagccctagagcataggcaaacagtaagttcctccccaggattatataccaacctagagctttgtttacctcagattcaaagcgtcaggaatgctgactaaaatcgtcacggtgacggcatgccaaactgtcacatgactgtatccagacgcagacctacagcttcaaatttcgtttcgaagttctgccgtgctttctttcaagtgacttatcaatgcttacaatgccatcctattgagagtgcaccaggcatgttcagtgcatcgcccgcggcatggaatctccccttccaacctttgattcatcttgtagctagatgaccctctcgcccgcctgaccgggttgccagatcctctcaaagccagtgtgatgttcccaaatgaacgattctgggcatacaggctttgacgagacttatttcatcgtcacttgggttgagttcgtcatagccatattcctcttagcagctagatgtcacacagccctctgcattgtaaaaagagtcgctgctgacctgccgctggcgatcctcaccttcgtatgattcttctcctcttttttactaccaatatatcctggtcctggtccaatgctaactcgctcagatcctcggcgccgccagcatggtaatgctcacactcgccgcacaagcaggcctaggcgtccccgggccagtcttaaacatgaccgaaaaccgttatgcgctcctgttcgggtggctcaaccaattcttcgctctaattgccattgggctcggaaaacttaccattgttgccttcctccagcagatccagggttatcatacgctctttcgcacgatatttctgtggacgctagcagggagcaatttcatcgtcaattgtattgcggccgctctggctattgtgcagtgtgatcctgttcagaggctctgggctgaatctcttcctggagagtgtccgggaagggaacgcatccagattttcggatatgtgcagggaggtaagtataacctccagtcgtgctctgccaaacggctagtcctgctactgcgcaatggtaactgtcagaactaagaccaggaactaaccagtacttcatatatagcctggtctgccctctgcgactttgcgttggccctcttcccggttgttctcttcgctagaatccgtgcaatttcgatcccaactcgtatcggattgtgcctcctgatgggtagcggggtagtgtaagtcaaacaaatattctattcttgccgtggctctccgaaacaaaaatcatctcttgaggctgttgat

SEQ ID NO: 15455 - DNA, 1766 bp, Emericella nidulans
agacgggtgtacgagagaataaacctttttagagctctatgatagcataaatggttacccttcgaggagatggacagtacttagcagaaggtagtcacctggaatgtgatgcggaacattcaagacaagaaataaggctctggttggcgatgagttgttggattacagagcacgaggtgatgattggctgcctcgcttatgagacagcgcgtccacgctcttctgtcacctatagcagctgactacgtagattagtcgccacttgctgcccaaagccgcgtggataagcgagccagaaaaggctctgggatcaaggtgtggccgctgccctctgacttgcagagacagaccgcgttcgttgtcttacgcatggtgacagcagaaaagtgcaaaccaccaacaaaagctgctaccgtttattcagctccaagcctggcttgtacttggatagacacacatagtcttaacaggtggttgagaccgctggttagccgagagaacgaaggcagccctagttcccggagtcctgacaccgactttcaatttgcgctatccatcctgcaatcaaaagctcgaaactttgacgtatatcccgcttcctagatctccgactgtttgagtagtcaagatgcctcgaatctaacctggcgcattccgagggggcgccatccgtgcggtatccgcaatcggtcccccttgaagaatccagaagtctctgggtcgcctccatttgagcccatgactttggaggagtttcgttgctgctgcctggttgtatgactttaagtatcggagggccttctctgcaagttccagctgctggggaggttcgggctcatcgtctagctcatctggcaacgacaacggcgtgactaggtcagagaacaatatcagagtatcgtcaccttctccatgactccgcataacatcagcgagggtgatacggatccacaaaagctctcggttattgtgatgctggtcgccgttacctgcttggcccaagcgacgcagcaagcggcatttaccatccaagtagcggccgctgtcgaaatctatcagagcacgaagatgatcaagctgacaagcacgttcaaagtcacctggaaatatgcccgacgttactacctcgccaatggtatcaatggcgcttgcattgtctcccaagtcccgccataggatggccagctgaatgcccgaatccacagttacattattcccaattgtaaacaagagcttcctctccgtccaggaacgttcaagcaaatctttcgcctcatcaaactgcccctgctttctgtaggcggaaccctgggctgtttgtgtcatcagggcaattccattggttttgccggcaatggctgtccacttatgccagatgtcgttgtaaagagtagcagccgaacccaagtgcccctgtgcctctagcgcatatccaatgaaaagctctgcctggatggcttccagttgcactgacctaaaactgtttgaaacccttggcaaagttttaggggttgcggtcgcctgaacagggaagtggaacctaccgcccaaaagtaaggggatttagccggagtcttttcaccactagatgaatttgaaggccgaaacttcttggttacatgcggttcaaaggtcctaaacaccgcctccaaagaaaacgtggttccaaggggtggtaacattttatataccccctctgaatatccctttgtaaactccataggattatatggggcccctctttttatattagtgtaaaaataaaa

SEQ ID NO: 15456 - DNA, 4567 bp, Emericella nidulans
aatgtactagtccttcgagatgtcgctggacaggaacaaggatcatctcgtacactcggcttgggatgttggtttctgagaggatcgcggcaatcaccgacagagttacatagagcagccgtgtttgagatccgggttggctgaacatatgacaaaagaagtaaagccgcatgaacagccacagccgccgtagatttcgtcccatgccaaattggccatcggctacaggccgttggttgagtacggcgcgacgaactacattttccataactgctgcgtctgcgttgggctgcgcattggcatgttgcccctcggcggaatttgccgtctcggctgtactcactgtaactggtgtccgatccccatctgttgcaacgtaaggtgtgcatacggcttgataaccattaggtgaagagatgaggtacaaaggggctgtcggccgatgtgagggacgagaattgtgaggtaacaaatgacgccgacggagctcatcggcgcgagtagatatgtcaaagacccgggtgattaatggctcaacaaattcgccacgttccgacggatgccgtctaagctggtcgtcaagaatcttgaataaatgcgtgcgtagctgaattacatggtctatcgcgggagcaatcccgcagtttatctgttcttccgcaaggcttatatgctgtttaagtagcctcagtcgtgcctgagtctcttctggaagctgaatgccctctccgaaatccccaactgggaggtttaggagagtagtaaacggcgaggtaattggtgtagttgcgcccataggccctggtatgtaggacggcgggcgatgaagctgctgtgacgtccacgccgatgttcttgtccaagaggcttgagaataagcattatcgtgttgtagttcggccaggcgacgggtagcattctcgtgtagtgactgtgcaatctcatcccgccttaaaggattaggttcccggtacctcagttgcggcgcatgcagttcaggatttcgcgattggttgtctctgggagtgtcggcccggttggaatgatatgaggcgtttgcgactgtcttggcagggtccgcagagtttgtcggagttggtggaagtacgagatgtattgagtgctcagagccctaaatgagaactacattaatcctggtgaactatgattgggacggggttgcgctcacgttcactggttcgaatagagattgcaatgtgacactgtcgttagaaagcagttttcccagatacaaaagcttctggttgtctggcacagggcgagatgggactgtttgcgaaatgcgaactttgaggtcggcgatggttgaggagagaggaaggttggtgaaggtgaagcgattcggcggaggcagggacggacacaacacatggagaatgaaacctccagagccattgccgccctccgcctcaagcaaagacataggttcaagcaaaagcggctgtgtcgtactaagtaaagctggagatagcgaaaaggccaggtaagtggtgggaagtggtgcggagctcagttggtagtatattacggtggccttttgagaataggacgaagtgtcttgtacgcggtcacccagctaggtttgaatgtgtccaggttgcaagtataggtaataagtacgcaagtaaagagagagtcaatgagtaatatgataccactatagcagttgatgaaacggttgaagcggaggatggggccgtggaggaaggagacgatcgctatcagctgattctgccgagcggtgagagactagaaacatcattttcccccgaaccggcattacctgttcacatgagtctatcctactgaaaatcccgcgcctcgggagagcctttacctgtttcatgtcccgttcgggatgactatcatggtgtgacgctcgcattatggcctcgggcctgttcagctactccgctccgttgcgccgcaacctcgcttgtctttcaaaagagcgcattgcgctatcagatatggtgtctttcggccctcctgagcggcttagggccggtgtcaggttcttttcgaagtctcgcccttcttacaataataaccaaaagcagaactcgtcgaccaaaagctcttttggatcccgactacgttttgctctacgaaataccaaggtcgaatggtatccaattccggttgggttgggaattggtctactaggtatactgcattattacaagtctcagcggaatgaacgaatacgacaagaaagggaagctgaagctgctggggaatcctttgatttctcgaaaccacccccgcggccaaagatccgacctagcgggccatggcaagttcagattatgtcaaccctgccattgaaggcaatgtctcgattatgggggcggttcaatgaaatagaacttccctactatttgcgcgtgccgggattcaagctatactcttggattttcggcgtcaaccttgacgaagtggccgagcccgatcttcacgtatatccaaatctggcagcctttttctatcgcaaattgaagcctggagtccgtccattagacccagacccgcatgctattctttctccctccgatgggcgtatccttcagttcggactcatagagcgaggggaagtggaacaggttaaaggcgtgacctatagcttagatgcgctcttaggttccgccactccatctcaggcagatcattccaagaagtttatggatcatcacaacgagccctcgcaaaaggatgccgccagtattgcggctgatgaacagtttgctaccatgaacggcatttcttacactttgccatctctcttttctggggagaccggaggtctaaggaaacgctcatcgtctaaagatgcgtccactgaatcccaaataacgtccgaaactctggtgcgagaagaccttgcccgtggcgatggcaccccttggtatgctccaaaacctacgtctaataatgctctctattacgtggtcatttacctcgcacctggtgattatcatcggttccactcccctgttccttgggtcgttgagagccgtcggcattttgcaggggagttattctctgtgtcgccgtatctacagcgacatctgcctggccttttcactctcaacgagcgggttgtgcttttgggccggtggcgctggggattcttcagctatacaccagtgggggccacaaatgtaggctcgatcaaaatcaacttcgactccgagcttcgaacgaatagccttctcaccgacactgcggcggatattgctgctgcggaagctgcacgacgtggcgaacaataccctggctttgctgaggctacttaccttcacgccagtcggacactcgggggccacccccttcaacgaggtgaggagatgggtggattccagttgggaagctctattgtactggtcttcgaggctcccatgggcacccgcaagtcattcgatgccggctggaaagagggccagcgagacggtgggttgaattggacgattgagaagggccagcgcattaagatgggtcagaaggttgcatacgttgatatcaaggaatagaatgtgaatataaggtccctgcacttccctgttgctacccgtgttacgctaggctgtcatagtattacattatttctttctcagacaatatttaataaaccatagtcttttatctagttacgttgccgctttgctgtcaccgacccagactactctatactttctatcccgtcaacaatatataactcacgtgacccgggaagtcggcgagagaaagagctcgatctagggctccaaccatcacaaacacaaacaactctgaaagaccacttttagcggggatatacaatgggagccccctagatttggccaaagcatcccaagcccaaccacccaaagcgcagccatgcctcgccatctcctccgccgacaccccaccgcttcctccgactccccacctcggcagccacaacaacggcagcgcccaagccatatgccagcacagtctcagttccagaccccatcgcctagagggatacccttcccgcagctacatccttctgctggggccgcgattgatacttccgctgatgtagcggggcctccggagccggttcggcgcgcggcgcaggcgcaagcggcgcttttttcgttgtttgggaggggtgtggctgggaggccacagggtcggggaagggagccaatgatcggtgaagatgtagacgaagagtatgaatttgatgaggacaatccatttattgaagacggcgatgacgatgaagccctgaatgatgcggaagtggaaggacggactgatctgagtgcggaagagaatgaagttgatctttcagaggaaatggagggaattgttgacggggaaattgaagaagagggtgcagaagaggacgaggatgaattgatgcatgatcgaggtgcataccccagtatttctacgtcgcttcgagggccaacagctaactgaattgcttcgtcgatatagataaatcacccactccgctatcgaacgatcttcgtgagatatcctcattagcgtaatgaactgtctcaagccacaa

SEQ ID NO: 15457 - DNA, 1283 bp, Emericella nidulans
gcagctatgcttagtagcgagaatcaatggcttccaccgttcgactatcattccacgtggccactaacgctgggcttgcacctagattgaatttccctcggtcctcctcccacaaaatatcacctcagggagtatcgtggatatcaccgtgtcgcgtaacaatgccgcagaagctgccaacgcggccgcttttcaggctctccaaaagcgcatccttaacacctatggaatcaagacaccttcaccaccagtactccgcctccgcaacgctacgcaaacctcgctagtcctcgaatgggaccctatcgacctagcaaccgcatccctgaagaccctttcactttaccgcaatggctccaaagccggctctataccccggccccttgagacgcgcagcaccaagatcagcggtctcgcaattcactctgaatacaccttccatctcgttctacgtacgaccgcaggcacataccaatccgaaaagttgacctgccggacgcacaaaatgacggatctgtccggtattacagtcacaactggcgtgcttcatcctcagcgaaaggaagccctcgccgaggcccttgatcgcattggtggtaagcttattgacactgttcgaatcgataccacgcacttcgtctgcactgaaggcaggggcccgttatgggagaaagctgtcgaaatgaatatccccgttgtggtgcccgagtgggttgatgcatgcgaagcggagggtaccatcgtcagcgtgagaggctactacctgaatgccgaccccaaggcccggcaactcggaccaattcatggctcgacgcagcaccagcgtactacgtcctccatagcgtccccctcgcgacaatctcagtcgcagtctctgtccctccctgcaaaccagtcagagcgggatcagaataccttcgagccggccccgacttcatttcctggagccaatatgagcggacagccaaaggcggaagacgatgacagggtctcattcgaaaactcagagtatccttcttcccggccttcaaaggatgaggaaccccgagccaaggagttgcagacaccagcaccaccaagcgaattaactggagcgaaccgggcttccgtatgagaggcttttttgccttgagaagaggcaaagaggaatccaccaaagcgcgcatgagaacatggcgagccagaacatgatagatgaataccctttcagtctaagggtcccttaggcaaaacaagacattcggggaacagattaacaggtgcttttgatctaaaatcactgt

SEQ ID NO: 15458 - DNA, 5579 bp, Emericella nidulans
cgtttagagacagcaaggttttcctggtcatcagatttctcgtgcgcacgaactagtgcctgccatgcgaaaagagttagctgtctgtcaaggggcaagctgaaaagctgtacctctttgatcagtaaaccccctaagctatgaccaatgaatattattggacggtgacgagcctgggcgaggtcagccatagtccttcagcagccacaagagtctcatacaatgtctgaacgaaaagccttgactgactccagaaaacggctgcctaggtcttcgattgattctttggcatcattgtccagaagtgaggtgtcataaccgtaaagtaatactcaaatattaggcacatcatcaggcaggaagtcccggagccagacgcgattgctgctgggtgacttccaggaaccgattgcatggctcccaagcccggggacagcgattacactggattttaaggagcatgtgtaagcgctgtagcattttttttgttttactgactggaagacttactcgacctctgccgtcggggctacatagagcggcgtgattccgtagaatttaagatcaaactcatattgaatacggggattcgcttgctgtaatttccttaagagatcattcggtgggattggagtatcaaaggtggcagttgcacaagccgtcttctgatcccttggtactattgagagttgtgtaatggaggttgcataatcattatttgttgaagttctttcaagtacgcattgaagctcgctttccaaagccttcttcgtcttctcgattggaatctgttcgatacgcaatgtaatggctcacttatgttgcgatgtcctctttggcaaccgccacagaagtctctgccaccaaatagtgaagactagggcgaggaaagcacctattagtagcacgctcccgtgtagctcagccatgtgtccattcttgacggtcacacagaattcaggccgaatctgaagaaagagaaatggtcagaaattactgacaatctatttggagccgcaagtggcaacagtcagcaggggagacctgatgcttactctgtacgacctctggagcggggttggctttcacctgcagagatgtggcagcagatgattcgacgcatttcagagcctcataatatgcgtagcatactatgctcaaaaacccattcttcttattttcagttttggatcaggctcatctgctgtgtgaaattctaacgattcttggacgaactgaagagtactgtatctctattttaggtataaagcctcttgctcactcgatacagatggccgcttccaagcaaattcgagtgactgagccaccatttcctgttacagatcagctgagcgcagatttagacgccggctgtcttaccaaacaatacctgcagagctatccgttggtacaactccaggaccaatgtgggttgttggactttctcgagagggagtactgctcaaccgaattagaccaggtggctgataaactctggtggatgtcaaagcaagactgcggaaatatctccccccttcatcggcaatatgtaaaggggcgaactatcactgtgaccgaggaccccaaattacaccttgtatggatacataatcgaatcttcatgaaacctctccctcgatatatcacatcacacgttttttggcgagattatcttcgcgatgatgtgaaaggcctagctcgagatcgttatagacgtgttcgccgggcagctctaggcttcctcaggacatacctataccttgtgaggtcagaatccgatttctatattgcacaagaacccagtttgcaccttattgcaaaagacgtcacgtgggaacagttttgcaactttgcaaggcaccttacgaagatatctaacaaagatgtttccggccgctacgcttacggcgagatcagactgacgagactgaatttctacgcaccgctgcttttaaggaagtggaatttccaacgcgtgcaataccagtacggggaatattttgctcgtttctatggtccgatattatttgtagccggaactgtctcgatcttgcttagtggtctacaggttaccattgcaattcagggaatggaacctgcattgtacgatcgtgcgtcacttgctgtcactttctggttcagtgcagtagtaatgctctgcttctgcagtattcttgtggtactgttctttaccttggtctataaagttgtgaaggagtggaactatgctattcgggaccgcctaaggctccttgaggaaggacgaaccgaatcctccaaatgaatggttgtggacagagagatagttcgttagccgatgtgagcccttgattaaatgtatctagcagttttattcgatttcgaggtagcgaaatataagagttgcagaaagcggtacacgtgttgctgcagaagagagaactagtcgatcccctgcgtggaattctattaacaagcttctgccagccagacttacatttgagctagggtatcaaagacagcaatactaccacatcaaaaagccatatagggggctacacatcgattagccggttagtcatcgaatgttggaaagctttcctcaagaagacggtcacatagcgcatcaagcattagagcaaagatgcttgtttagccggcacgaacaagacgtggtctaccgggcagtgcaatatgtataatcgcaacttttgcgaagcatggtgacatgctgcgcattctagatggcagtctgggtaacccgtgtgttgtttgctacgtatgttatggccaaccatcctaagccttgagggtcaagaaccctaattccagagccctagtgttcttgtaaacagttaagtctatatttccggctgagaccggtttgtgaatggtaccacgttaggcagaaatttggaacagtaccgtacagtaacagctaaagatgcacccggcttagctattacggtgcctccttattcgcaagatcattataatttcaccttgcaactaatgtcaagatggtactacaaatccgttcgtctgttaaaacgtgaaaggggctttcgactcggactgtgccgtttcttcaagttcatcctgggagctgcccaggatctgaaactgtcctacaggaagagtcgggttggatcgatggtgggaaccgacactatccatccgactcagccagagttaggtctctatctttgcgaggccaactagcagtaggtagactgctattacgagggcgagacgacggagtaaaatagactgggtagatcagaggttcggctgctgaaattccatgtcaggtccagacccagaggcacgcctggctttgcaagaccggcatttcgtgcgtatcttttaacgagtcattatcgttgttgaggaaccgcgggttactgtggagtggtggactgctggtccgagcatcaggctcgagccccagcccagcctcgttctatgaagctccgagacagcaggctggggaagaggtcggaatcttctaccgttgacgtcggctgagacgtcatgcatgcagagtgctaatacatagctagggctatagtacgagatgaccattaccgggattaaacggcgatgctaattcggaacgagcaggtacagacgcagcagatctcattagagtcacggtcagctcctaaatggcgaggcaagtcaactattaggcatccttaacctgttcgtggctggtagtgctggtctagagcacggagtacgcgtacctgaaaatcaggtaccttggcacttgttcgtcgcgcgcaggcagccatcatgccactgcgtggacggtgagtaatttacattgtagatactgacgagtgcgactggcttcgcctgggctttccattgcatataaaatcgtggaacgagcctccgagccggatgcggaaacttattgcggctgcgcagacatcgagtcagttacgtagtcgcctctagccttccacagcacattattcaagtcatgagataacttcgataaaatccgctccagccacctgttgacagtgtcagagccggcttccatggccctgaccaaccataccgcgggtattgtctgccactggggcccgccacgcaagccgaatcgtcagcgtccacaaaagcttttaggtggagacgttgatggatcgatctcagtcttcaactcggtgcacttgacagcccggcgaatcggagtcggagataattactctacatacaaacgtatacactgagactatagtcaatggactgtgaggtggattccggagccagatgtgagaaagtttacccaccattgggagatggctccggtcatatataagtacagcagaaccaggcagcactcataatcggacaattggtttcattttccaggacaatcttctatttacgatactatgaggtttaatttgagatggacagccgttgcggcggcagcagcgattcagtcgtgccttgcgcagacatatactgattgtgacccaacagagggtatgggccccctcaacaccagcactggactgtacttacaaatgattgtcgatacgtagagacctgtccagcagataccggcctcgcgcaatggagcttcacgaccgacttcacgtccggcgactcggcctttgacggctggaacgtgacgtctggcactgtaccgagcacctcgctcggcgctgcatttacgataaacgagcagggagatgccccgaccatcgagacagaattctacatctttttcggctatgtcgaggtcaagatgcgcgctgctaatgggacaggaatcatcagtactgcgatcttggaaagtgatgacctggatgagattgactgggtatttctccccttctcgagttcgagtacaagtcaccatgaggtacatggaccggcgatgagatgatgctaatttggtgtgcctaggagcaaatcagcacatttgacaaccaaatcaccacaaactactttggcaagggcaatacgacctcctacgaccgtgccaccaccgtctcggtcagcaatccgagcaccgagtttcatacctacggtgtctcctggacagcctccaagacagaatggtacgtcgatggtactcttgtccgcactctcaactacgcagatgccgttgacggcaccaattatccgcagacgcccatgcgcgtgccgatcggcatatgggccggcggggaccccaacaactcagagggcacaattgagtgggctggaggcgagactgactatacggctgggccgttcacgatgtatgtcgacagtgtcagtatcatcaactataacccggccgagagttatacctggacggatatgacgggagactatacgagcatccaagctagcaatggcacagacggcacgtcttcaggtacggcatccactctcatctccactcctactccctccacgcgtccggcgtcgacgtttgtagcgccttcgaccacaaccgtgcactcgagccagacgttcactccaacctcaatcccctgtcccaccactagttctagttccgcgctcattccgattcctgaagccacaagcacgatctcaacatcgacctcgagtacatcctctccggcttc

SEQ ID NO: 15459 - DNA, 585 bp, Emericella nidulans
aaccgaataatactaacaagtccctgtttcatcacctacacccaggccagtccgcagctagcctcattgatgcagacgtggacgacccgtttttggcggccggcatgatgggccgcggcgcggagaacaaaggagagcgctttcgtcggcgtctagtcgagaagcagaaggaaaaagaaatcacccagatgataacctccacacgcgctggaggagtcgctggagaatatctgcgagcacagaataatgagaatacccgcattacagactcgacccgatccggagcacagcacggaaggacggactccagagatctgaaaccacaacttagctccctcgccggcgataaaccgctcggcatgaacttcagacgggctgaggcagtgcgcctcagccctaagaagcgtgcgcatgacggcgataggccctatggaagcggcgtaaagaaaacacgctttataacatctaaggggatcaaagaggctggcagggacagcctgggaggcgtctcaaacgccacgcctcgaacggatgattatgatgacgatgatgaattggaaattgtctgagtcgagtccttgcacg

SEQ ID NO: 15460 - DNA, 790 bp, Emericella nidulans
  unsure (1)..(790): unsure at all n locations
gatctcctgccttcttagacggctaacctcgtcaaggccccagtggcttaggtattggattaagagcatctnncttcgctgcggttctttctgcgaagagaattagattgtaggtgctttctngacagatggaggatcttgctgattgtattgaggcaggatggctgtgggccatggattactgtaatttcagtttaacttgcttgtgctttggttcgtcggttaggtggcctgcttgtgtgctagtcgcttagttaggtaattgcttgtcaagtgtgcttttttgtttactagcactttttagggttgctcatttactttgatatctgttctctaattgttcgctttactattcttttacttttcttctactttgtatatttattcttttatttatttctttgttatttcctattaatttttttattatttctttttcttattatatttttctttttttatattaattatatcattttttctttttctttatttattatttcttttcttttttcttttttttcttatttcttttatcttcttattttttatctttactttttattaatttttttttatttattttattatattatctattttaattgtttttaacattctctttaagcactttatctttacatattcttcctatgttattatttatttattttctcatctctttcttatatctcaatttctttctctttatgttttacttttatttctatcttcttttatcatcatatcttgtagtttttttttacttttatatcattctattctttta

SEQ ID NO: 15461 - DNA, 643 bp, Emericella nidulans
  unsure (1)..(643): unsure at all n locations
agtaaagacttgccggtttgtatgctaaccctaattcagttcgagttcctccgcttgctttcagcagacccggccaatctcgtcatcggccttgtacgcaacaaacctgcaacagaggccaaggtctcccaggacctgaagagggaaaatattcgcattgtcgagggcgatctcgccgactatgattccatcaaggttagcctatccaggctgtccaagacacattgcttcttaccgggtactgactcttctcttgcttcttagagagcagtagaggccatcggaaagattactcccagccttgactacttgattgcgaatgcggcattgatctcgtcatggtctgcttatgatggactcggtgacctgtaagctattccatcaatcattccatatcgtatccaatctatccctccctaacagccttcacagggccgtcagagatcctgcaaagctcgacgaagtttttctctcttcaatcagaaccaacgttcttggcaatatccacctcttttccctcctcatcccgctgatccagaagagcgacatcaaaaaggtcatcaccatcacctccggcatggccgacctcgacttcatcacgcagtacaatatcgccgttgcagncccctacagtatcagcaag

SEQ ID NO: 15462 - DNA, 528 bp, Emericella nidulans
actagctgcctgcggacagcgttggatattgggatcaagtccgacaagccggccattttccgtgcccagctgtccaaggtgacggccgagccgaactacacgaccgcatatcgctctcgcggggcatcacgctcattcggcgatcgtaagtaccgctggtccatgtactcatctatcgatgagcaactcccgtctgctgggacaaaccaacccggcgaggaacagcctacaaacacccatactccgcgcacccgcgatgcccgagtcgcagccctgaaagccttctataaagaccagatgaccgcaacaaacaccacaggtgttgacccaggcgacttcgtcgggcagttctactccccaaacactcttcaacgcttcatggtcatctatacccaatcgcgcctcttcacgctctacggcagtagcagcaagaaggcgcgtgccaaaccgcccgttatgcgcgaagccctgaaccaagcgagggcctctttattcccagttgcccccaggtgaaattggcaatatcgg

SEQ ID NO: 15463 - DNA, 539 bp, Emericella nidulans
cctgcaggcgcttgttcgaaaacctcacccgggctcgccactcatcggtcagggggctctgacaacctttttttggctggaagggcctgcccgtgcttgcaggatcaggtgcacaatactatgaacgacatgctcggactacgagagggtgctacaaatgactggttgtaccaagcatcttgaacttgctcgatgtaatcccgaggtgctcatacacctagctgcagctcacagaatacgtgtcagggatacggttgtatgggcacaaatgctgcctggcctaaccacttgcgggtgctgtgcggtgaaactagggaccagaccgtaggaaagagcacgcactgtattggagaaacgaatgtggcagcaggcctaaaccttctagcggccctgtgcaaaggacatactagcgtggtctctgaaggctgaagactagcacgtaattgcgcacctagtgagcccctgacttggatcgtcttgactctggcgcccgttcagttaaactctgacgcgcaggcccatagattaccgtgcgggca

SEQ ID NO: 15464 - DNA, 894 bp, Emericella nidulans
catcggccgcgggagagacaaagctcccattgatctcagccatcttgagcgattgaacggaccccagaagcgagtgtggtaggaaggtcgatggagagagatgggctctcaaaatacgatccagaaaaggggaggccgtcggataaggaggcaaattaatcgtttagagtgcctagtctatcggatagagaaccctgctccacttttgtcgcctgtttttcttggcgctcatccctttcagttacaattgctcaacttttctttatcttaagcccatttttttttttttacttatttctatcgtaccctctcttatctcatcttctctctctttttcttatttttctttaatccctcacttccttactccctattatctaatcttttctttacctcctttcttattttcctctttcctttttctatttcatctttttatttttcttttcttttgtttccttatttttactcttttctatttctctccactcttttcccttcttctattttcttctaccttctttcactttatttcttattattcactattctccttctcttctttcctcctctccttttcttactcttcaatttcattcttctttcttcttattctctttctctatatttctatctattttcacttctcaccataattcttattttattctcctcatcttttctcttttcttatttatctcttaactttcctcctttcatttatactctcttatcttatctttcatctacaatacactttccttctatcttctgctatattactttctctcatcctttttactctattttttttattccttacttttttctcctcttttacattctatatcatattctcttctattcatctccatattatcttcctctttatca

SEQ ID NO: 15465 - DNA, 2153 bp, Emericella nidulans
  unsure (1)..(2153): unsure at all n locations
tctctccgcattctcttactctctcattcttccaaaactaagaaagcaagatgctcggcaagatcgctctcgaagaagccttcgcgctcccacgttttgaagagaagacccgctggtgggcatctctcttctctacagaccccgaaacccacgttaaggaaatcacagacatcaccaagatgcgcattgagcacgcggacaagtatggcgtcggttaccagattctttcctacactgcccctggtgtacaggacatttgggaccccgcggaggcgcaggctctcgcggtcgagatcaatgactacattgctgagcagatcaaggagcgcccggatcgatttggggcttttgcgtacgttttcatccgtgccttctacttctgtgatcatctaggaacaaagacacaaagttgggacgggtaagctaagttagctttgtggtaggacactgtcaatgcacgatcctcaagaagcagccaccgagctccgtcgctgtgtcgagaagtacggtttcctcggcgcgctggtcaacgacactcagcgcgcaggtccagacggtgacgatatgattttctacgataatgcatcttgggatgtcttctggaaaacctgcacagacctcaacgtgccgctctacctgcacccgcgaaaccccacgggcacaatctataacaagctgtgggctgaccgtaaatggctcgttggaccgcctctcagttttgcgcagggcgtttccttgcacgtgctggggatggttacgaatggcgtctttgaccgccatcccaagcttcaaattatcctcggccatctaggcgagcacatacccttcgacatgtggcggataaaccactggttcgaggaccgcaagaagcagcttggtctggcggagacgtgtaagcggacgattcgggagtactttgcggacaatctgtggattacgacaagtggtcacttttcaacgaatacgctcaagttctgtatgggcgaggtttcggcggatcgtattctgttcagtattgattatccttttgaacattttgaggatgcttgtgagtggtttgatagtgcggagttgaaccttgttgataaggttaagatcgggagggagaatgcaaaacgactgtttaggttgggtccgtataaggattcggaggcttgattctgtttatatctgaatcttgaatgagttcatggatgataaagtgacaagaaaggactggattgaattgagcagcaaaataggtataggagcagactatctatcgcaagcttctatctatctagggtatcaagaatcgatttccgaagtgagtcctgcgtgaacagcctggtactgtacattgcagtacaccggatggcaacctcaagattgactttcgtatcctgaccactcattgcttccagtctcctgctgatgaaaacaataaagcgttggggactgcaaagtgggcgtttcacaagatttatgtttttcgactttttttttcccttggaatatctgattaggcttnttttgtggatttgctttttcgtgctatttatattgctttctcttaactgttcttagctggacctcatgcggcaggccgctttgtgcttgaacgctccctgacttcatcccaccttaaatccaagtggcatctgcgcatgcagagtctccgttggtgacagcataatccaaacgatcacaacttagggttttgacgaggcgcctcatagataaaaacctcacgctcacgctcacaatctgaagaaagcccacgacgagtaaccgggcatggcaaagcgatcggcatggcggcgggacgaggctgagggcggactataccaacaggcacgggatgatcctcgtctgagtccaaagagacggcaaagcgaggatgttcaggcatgggagggagaataggcgagttattgtcgtcacgtgcgacaacacgacgctccagagcttggtcctgatcagaggcgtcctcataagcggggtactggaattgcaacatagaacgagagatagaatagccagagggacgaggacgggaggccgcgaaggaggggacattatttgagggatcttcgtactcgccgttctcgatagagttctgacgacgtatatgggctagcgcctcaaggcgagctgcgaaggtgttagtacag

SEQ ID NO: 15466 - DNA, 1769 bp, Emericella nidulans
agcatactgatctcgcgtgtgatgtcgaggggtatctctttgactctccgccgcctggaatcgtggcggagagcgccccgtgggcgacggcgctgggggcagtcgcccattccagcctgactcgcacagtcgagcgctggctgggtggacgatcgattcggacgcctctcgcgtacgaccagccggggcctgcctctgagcaccgtccaacgaacgagctgattcatacttcaatcaaggatcgggtgcttagtggcgcgccatccggggccgtgcggtgggcctcgcctgtcattcgagggcggcaggatcaggatgcgcgtacttgggagctgcaaaatggccataagctggttgaagatgtgcccttggagctagaattcttcatgagggggaggatccggacggtgcacgtagatgaagaggatgagtcgtagtttagctctgcagaccatatttttcaagggggaagacgggggataaacggctggttaaggagtcgggttcctccaggtcttacaaatgacttaattaaaatctataacgttgcttgcctgactcgtaatcgggctaactccgaccctagctgacgcggataagttagggctccggatatcggcacagtgacccccctcccccttccctttggggctgaataaagaacatgtgggattctagagacgagcctggagttgggtggagtttggggcttattgatcaaagattattggcagagattattggtctcgaatgggaattcatctccagatacaaaaactgccttgatctcttttccgcgtttgcgttggtttcctcaatttttcttgccctcacgctaagccaccgctaccaactcttggtgtgcttgtcagtgcttgtttccgccgccgagtcaagtgcgctacggaatttgacttcatagagggtaccggtagtagatgttctgctgaggggacatctatttacattacgagtaccgggcttgttattgtcccaggtagttgcaatttcctcagctctaggaccaagtatcctaccacctcagctgaggtttacctgaacagtgcaactaagtagttcaacggagtagtattcgacctggccgcgtcactgtcacgagcaccagatggcgccgctagtcatttgtgcacccaggcgggcagagacacctgagacgtgaggtccaaggtgagaccatacaatgagagccggctgggcgtaatcaagctacatagtacacgcttttcatgtcttgaactccgcttattaaccgtggggcgctcttggcctgctcactaggcatcctccgaacattgcattgaccaatgccatggaaggcagacgacagcatcgtagtcaaatccgcaaccatgtgcatttaatcaaagccagagccgactcggtcttgatgtccatgtcgggattgggcccgagccccatggcacagatattcctggcacggtcaagcatttggctcgcaaccggctgttgaccccttcccagacaggactgatccagtcgatccgatgtttgcccggctgggctgacagtgcccttaccaagcagtagtagtatcctctggcctgagtcgcgactcgtcgcgactcttccccatcatagaccatccccagacgggtttttcgaagaacctagcaacctccgaagaagatatggtaggtccccactaatttgcccctcccccgatagccacgcgatgacagccagcaaaagctaaagtaaccgagcacgggaagattcgatgatggtgc

SEQ ID NO: 15467 - DNA, 4216 bp, Emericella nidulans
gccgcataatacgaatctcactatagggatcaggatgcaactccatgcaaggcgctaaggatcaggatccttttcttcaggattgtggcaacggcgccagcggccagcgggcgctatcgcgtcggtggtgatggcgttatttggatttcggaggatagaatccggtcagcctaatcaagccaactccgtcggacttcggcgggactgtccggtcagttagagctagagaaggaaggaggtagagtcccagatagacaaaagacttggctgctatatatcttattattcaatcctcaatcccgctagctgtcaatagaatgatcctcagccgcacttgaagtcttgtctacatcccgaatccaggcgcaatggctgagacggattcctcccacacccgtgggcccgtagactcaatccagaagaacgacgcctcaagcgacgatgccgaggcagagaccaagatccagtatccctcgggctggagggtcacgatgatcctgacttcggtgacattggggtactttcttttctttcttgacctagccgtgctgccgaccgcgactcctgccattacctagaagtttgactcgttagacgatgatggatggtgcgttatgtcccctactgcgctcttccctaggaacatatgcgctggatgctaaaacccaccttgccggcaggtatggaggcgcctaccagcttggaagcgcagtgttccagcccctgacgggcaaaatctacagccagttctcgatcaaggtagttctccctcaaccatttgacgcagttggaggcttgggtgctcatgaatagcagtggacattccttgtcttcttcattgtctttgaactcggctctgtcctgtgcgccgcagcacgcaactcgcccatgttcatcgttggtcgggtcattgcaggcgtagggtcggccggcatgtccaacggcgccgtaaccacaatctccgcggtcctgccaacgcagaaacaggcgctcttcatgggcctgaacatgggtatgggccagctcggtcttgcgacgggaccgattatcggaggcgcgttcacaacgaacgtttcgtggcggtggtgttcgtccccctgctccctcctttcaaatcccacctactaggcgaccatgcagagaagatgcaccagctgatgacgacgcaggcttctacatcaacctccccctcggcgccgttgtcggcggcttcctcctcttcaacacgatccccgagccgaaaccaaaggcccctccgttgcagatcctcggcaccgcaatcaggtccctcgatctgccgggattcatgctaatctgccctgccgtggttatgttcctcctgggtctgcaattcgggggcaatgagcacccctgggacagctccgtcgtgatcggcctcattgtcggaggaggtgccaccttcggtgtcttcctcgtgcaccagtggtggcgtggcgatgaggcaatggtcccgtttgccctcttgaagcacaaggttatctggtctgcggccatgaccatgttcttctccctgtccagtgtgctcgtcgcggacttctatatcgcgatatacttccaggctatccgggacgactcgccactcatgagtggtgtgcacatgttgcccatcaccctaggtctggtcttgtttactgttgtttcaggggcgctgagtatggtcttttctcctgcgtgcttgaacaatggctaaccgtccagtctccgtactgggctactacctgcccttccttcttgcaggcggcgccatctccgccgtcggctacggcctcctctcgacgctgagcccgaccacctctgtcgcgaaatgggtgggataccagatcctctacggcgtacacgtggctgcaccaccgccgctgtatgtcttcagttttacatacccccggaaccctttgccttcacctttaccaggtagaatgccgctgacaaggccgaatgcagccctacgtcgcaatccagaacctcgttcccgcgccccaaatcccgcaagcaatggcaattatcatcttttggcagaacattggcgccgccatatctctcattgcggcaaacgccatcttctccaactccctccgcgaccagctagcccagcgcgcgagtcagatcaccgtctccccgggcgcgattgttgcggccggtgtccggtccatccgggacctcgtctccggctctgcgcttgcggctgttctggaggcgtatgcggaggccatcgacagggtcatgtacttgggcatcgcggttagcgtgatggttattgtgttctcgcctggtctagggtggaaagatattcggaagacaaaagatctgcaagctctaactagcgatggagcgcagggtgaagcgacggagaaggagactgttccggttgccctgggttaaggcatcgtctacaagcagatgctaggcacacatttctttctgccgctaaaaattgggtaatgcagagccacctcgctttttttttttcgaacattttccatcttgtggtatttctgggttcatttcgctccatataacgaagattggccttggtacgggctagggttcgcgggtgggatagttatagaatgagaaataatacttttatatgtaacaatttcaacttctcaagatgaatataccattcggatagagcagcttctgagtatcgacagacttaggtaggcttatgggtatgctctgttgaatatcttgtagatgtgacaggcaatagattgttagattatagcctacaatccacagctcagctcagcacgagtttgattttttcattataattggaataagcactgagctcagaatgaaaccaatagattactagggctatgcgtagacgttgaacgggatccatcaccaagcgcagtattagggcaccttttgtcgtgggtatatagcaactaaacacattctcttcggtcctgttcggccctcttcggcctccattagccagtcaaaataaacagtaaccagctacaaagtgacaacaagcttctttcccgaaaccccctttcgctggatatccagcgcctcctggatcttctcgagcccctttccgacaacgagcggcggcggtgcaggcacaaactgccctctctcgagcgcttggggcagaaagtccatgtaaacccggctgaccacactgtccgggtccaccagcccgtcaacaaggataaacttggcgatgacgcctgtgcggcgctgccggatgctcgatttcaccattcctcccagcatcccaatgaggtaagtccccttgccgacgaaggtggttagcttctcaggcgggatgatctcaccggcgacggcgatgaactttctcgtcagcgcaggatcatgcttgcgcatcacgagggtgcaggcttccaccgcaccggcgccaatggtatatgcgccgacgagctctctgcccttgagggcggataagagatccttggccaggaacttgctccggtagtcaaagacgtggctcgccccgagccccttgacatagtcgaagttcttgggcgacgaggtcgaaaggacctcgtagcctgctgcgacagcgagctggatcgcattgctgccaacgctgctggcgccgcccgtgatgatcaccgcgcgcggggaccccgacctgccccgctgcacctctcccctgcccttttccgcaagctgcggcatatcgagggccagatagtccttgtggaagagaccaaatgcggccgtacccagcccgagtccgagcacagatgcctgcgcatcgctgatcccagcgggcaccggcgtgagcatatgcactcgcaggacggtatacagctggaacccaccctcggccgggtcgttcacctctttcgcaatcgccggcgcgctttcacagaccccgtcgttcaccgcgaccgggtgacgcccgtccgacctgacgacttgccgaacatagtccaaagagaacgtagtgataacccgcacgcggcccatgactgcagacacgcaacgttgtagctacggcctttgacaccccgccggccggccggtaggggcccactttaggaccctttgcggacccccgcggtttgttggccctcctgaccgcctctcgtctggggattgggcaacggccggacgacgggagaacatgtgacgtagtccccaccttagggtgggccctatcttaatatattatttttcataatttcatcctctccctataatttttttc

SEQ ID NO: 15468 - DNA, 1565 bp, Emericella nidulans
actcagaccggtctgacctctccaaacgcggaaggcatggctcagtcgggagattctccgactggcagctctggccatagtatgcccgccgtggacgattctgtatatgagccgccgtacgatgataccttgcaatgggcattagcggcacatggtagcagtttagcagaaactccattgtcgatggccgaaacaccgggcaatgacgaagagcgtgttgataacccattgaatgcgaatgcctttgaactgctgaacgctcccatgatgagccccctactaactgctaccaatctatcgttcgcacatgccactggcgcaacggtgccctgggtagtgacgacaagcaagctgtcatgttccattgcaaggtccttgctccctcgaaatccacgcgaaattggagctgctctgcgcacacgctatttcttaacaaggcctataataggagtatggcccttcattttcttcttgctgttgcccacagcgagttggctatttattatggccagggacctcaagctccccaagaatctcgagagcacttcgatcgaggatcacaaatgttcctgcaagcgcgtaaccctttcgcttctccggatcatatcagtatgatgctctcatatttgtacatgtatatgttctggatgcgacgtgaccatctcgatcccttcaaactccaagacctgagcagggctgttcttgttcatatccgaacgtatggattagatacgctctgtgctagcgatgatgttctatctctcgaaagtactagtgccggggtgattaccgtatccgagcaggttatgctggctaggattatcacgtacctatatgatcgagacggcttctgctgctttttcggctgtggcgggcaaatcgcggactacatgaacagcgtccctcagaaacgtcagaggatctggctacgctcgcgtgctgctttcttcctccctttgagcgaggttggttatcacgaggcaagctcggagatggaagatgcggcaattctcgatgtatactttgagcttatcattttacatcacgatatcaacgtatacagtcaagcttccgcggcgcaggcaatgaccatgaaacagaaccttcagcggcggttagaaactatccacaaggtaagtacaataacatcgcagagtgcgctataggcgctgatgaaacgcagtatcaagccgcattatttcatcaagtggcagaccaagcgcatggcccgcagcgtacactcatgacctatgtcgcagctgccgtcttttatgctttgcaaatctatttttaccgtgctcgcgagtcttcatttggaagtaggcctatatctattgaactccaaaatgctctcaactcacttgtgtcggctgcataccatgctacgaaagctggacaagtgcagttgcttgagcgttttcaatggtctctcttcattgctgggctggagattaccgatccggtccatcgggagtgggttggaaacaacttgactgaccctgcaatcagggaggcactcgactgtattctacgcatcaaacaacaatcttcaggtggcattacta

SEQ ID NO: 15469 - DNA, 533 bp, Emericella nidulans
tatcgcaaaccactgcttccgtttgcctgctcctagcacaggggctcctggaatgagggctacccgacgccgttccctcgtgctttttctaccttgccgactttgtcgcacgcgatgtgccacccgacaaccaatacgaagtttcatcagcttatccacgcctaatagtctgacgatgacagccggctcttggtagcttatatacggatggtttctccaggctgttccgtccctgaccgaggccgatcgcttgactgcgatattattcttccttggaaggcagtacgtgcgattaatcctatgtacatggtctgactgctccttgtgataggtatagtaggcctcctattgcatgttgcatcgtggagctatacacacagagtgcagagggggtgagtcctgtaggcactaacagcatcatcttccggagtgacctgcttgttcctcttctaagccgactctcagacgtctagactagagcgcatgcattcatttgctcagagcgacaaagcacctgggacggatgttgcccg

SEQ ID NO: 15470 - DNA, 903 bp, Emericella nidulans
  unsure (1)..(903): unsure at all n locations
cgccctttccacgacttttcatactggcaagatttcgcncctcgacatcttggcgattttccacaaaccagttcaagtctgcgcttgaatgacgggaattccatgancaatctataattacatatccctattccaaaccccacaagcatcacgcaccccaccacaccaccacaccctcccaacactccatacccaccatcactcactcaccctcctacactcccaccctcatacacccccttacaaccccctcccccccactttctatacccactctcacaacaacccttttctactacttccaacacaccctagctttcatccccctcacacctaacacttatcaaacaaatttccatccttcataccccaccacccccacccaaaccaaatactcaatattaaaacccaccacccaccctcaccaaccacacacctcaattacaccacttctctccaccacaaccacctaccccacccccttcccctatccaaacccctcttccctcctaacacacacattaactattcccccaactctccacacacccctactctacaccaacacctctccccccattcccatacataacctatccaccactcaccctcccgacttacacccaatccaaacaatctcatccaccaccacccatcacttcttaccacccactctcactctaccccaatcaacttaatccctaccccctaactacctactaccccatctaaacaaaacccctctcctccaccaccacaccatctcaactcctcccaactcatactttcacaacctttcccaccactctacccccaccctccccctctatccctcacactaccactcctcacttccaaccctctcctacaccttctccccacctcctctctcacaacaataaa

SEQ ID NO: 15471 - DNA, 1899 bp, Emericella nidulans
aatcttcagcaattcgcggccgcaattaaccctcactaaagggatcttgcaacatgaaacgtttcggcagtgggaacagaatcccggaggaggatgtttgtggatccatggcaaaccaggtaaaaagcactcttttcttggtgcgaaaccacgtacgaacttgaggcattacatatagggtgcggaaagtcagtcatggcaaaatacctagcctcaacagtaaacgatcagtacgtcttcatccactttttccgcaaccatggggactcgcgattggggctggcgtccaacttcgctttgtctctgatctccaaggccctgggaatggccgatattatcgataacccgggggctgaaaacgtaatagccggtatcactccgcttatgaacatgccatcgagtaaatgccaactgcagcagctcttgtcaatcctggatcagttgctagacctgctgcctacagtcactctgctcgttgatgcactggatgaatgttgcgatatccagggtccaggcggggatctcatctcagactttctccgtcgcgccggtacgcggacggaccgtcgggtaatcttgttctgtcgcagtcatcattatgccttcaccggatcgctgggaaccggctatgatataattatggatgaaaatgccatctcgggggacattcgcgccttcataacgacggaaatcgggaaggccgggctcgggtctctacgggagatggtcttgcagaaagccacaaaggagagtcaaggaatgtttctctgggctaggctgatgatccaacatgtcgcagcagggcgtaacctcaaagcatgcaggagattggttgacgagtttcctccagcgctgttccatgtttacgagagagcactcgcgcagtcggcagaaagcttcagcgcagacgaccacgacctgcggtatgatgtcctcctctttctgcttggagcccaggagaatcccacagctgccgagatttccacggctctggcgctctcccccgacacgcatcagctcgacagtgaattgaaactgatcgatgcggagacacggattgctcgagtatgttggccactgattgagttcacttccgatcgccggatccagttcatccacgggacagtgaatgaattcttgctctcaggccagtatcgccctcgtcggccccaggtggaccatgctcccttcccgctctctttggaagactcccaccaagcactggcacgtcggaccttgcagtgtttgtcccaaaagccgtatcagacttggcagcattccgcgagactgctccataaacacctcttaccacaagagctcgaggccatgatggagacggacagcactgtcaacgagccaaatgacttctatgagtattcttgccgtcactggcaggatcaccttacgcaactggccgaaccaggccccattatcctcgagctgctgtccaaattcctcagggaaaacgcgttcgtcgcgtggtctgaggcgatggccgatttgctgaaattgagcaccccaactgctcaggtctctgtgcgcgcgacgctccaacaatggcactcggcgaagctgaagcctattctgagacctagtgttcccttggaagactactttttagtggctcaccaagggctgagagatgagctggaaaaacgggcgcgcagcgctatactaccttatctcccattagttcgtctcggcgatttttacaacgtagggggggaaactattgcggagtgggagttagggtacaaattcaagaaggaggtggttgctggatacgaaaccgttctaggcaaacgcaatcggtttactcttagtgcaaggacaagtatgtatcaggaatacctctggaagatgcaaatggacgaagccagagaaggtctacaggacgtc

SEQ ID NO: 15472 - DNA, 2143 bp, Emericella nidulans
acgcctggagtatgcttcggcctagctttaagtcttgcactaacatatctcggcctaggtgctcctgttttttttgtcgctgccgcacagtcgaccataccataaaactgccccagcaactagttggagctgttttaccacctcggtatcaacatggaggcagcctcgcttcgtttctcgcacttatatcggatgaggaacgctgaagatacatatcagcatgcaccagcgacatctgctgaggtctgcaaagtgacatttgccgcgaccatatgacgagggctgccgcaagtacagaggactcatgccaagtcaaatccatctgggtctccgatgaccgttatacccaccatcatgtactacagtggaggatgaactgaccgtgcaaccaggggccgtatcaaaagcggtcggcctatgtcgtcgtggtggatttttctgatttctttcttttttttttgcgcgcgcatacccatctgcttatacttggttttagcgaggtgtttggggtttatcgtgcttggatcgtttacattttgaatgttctccagtcggcattcgcctataccaatattgaaatttattttgccgaaccacgccctgactcgattttgcccacaaatactacgtactgactcatgttccctgacgagccagtagttggtaaatatatacgctgtcaactccttggagccagcacccgacggatgtccgtattgcagccggaagtctgtcgatcacacactactgcaccaaaagttgacagcgaaggaaccacgcagcaagctccgatttcaaaacgcgagctgatgaaccttttgtatagtggtgccggccgagacaaagcttactttgagtgaagatcggcaggacaacgtctcatttagattgtcgggagttccactagccaaatgaatagcctacattgcaaagcccacctcctgttcatgttggcgtacccatcagtccgggcaaaactgcatactcagaatagcaccggaacctctgggtagggatctacatctgacagcgacagttccactgtggggaaccgttggtgttgaagatggagactgagacgctgggagtttgatgtttatgctaggtacatactccgtctgctccacgctccagtatcctctagtttccgacatgaaataccgatgatacttgtctatttcaacctctttattttattttattttacttatttttttttttttggaacgtttaacttgaccgtccaatccaccatgcctaaaacacaccaagaatcaagcagagtcgtcgcaatcatgaaaaaataccttctctcccttctcgctgcggtgacctacaccaccgcgcagtccgtttctggatctgctgagggcttcgcctcaggcgtcaccggcggcggcggcgcaacccccgtttatcctgctgacacggccgagctcgagagccttctctccagcgaaggggagcaggtaatcgtgctcacaaagacctacgacttcaccggcacttctgctaccggcacagcatgctactcgtggggtaccggagaagggtgccagctaatcctgcaggacgactgcggcgacacccccagcaccacagtgacgtatgatgcggccggtaaaaccccgatccccgttgcttcagacaagacgctgttgggtgtgggcagtgaaggtgtgatcaagggcaagggtctgagcttcacggacaacgtgagcaacattattgtgcagaacatcaagatcacggaactgaacccggagtatgtgtggggtggagatgcgttgacctttgacgggtcaagtaacatctgcattgatcatgtcgaggtatgccatattggtcgttcttactgcattccgaagggtaaatcgtgtccaattcgaccaactgacaatgaacaaatagacgtcccttatcggccgcgtccactatgtcttcggctacaatccgaacagcggcatcaccttgtcgaacaacttcatcaacggcgaaactacctactctaccagctgcgacggataccaatactggggcttggagctagtcggcaagaacgactccatcacattcaaaggtaagcccgacccatggcgcatgcgcttcgacaccagccaaccgtatatatataggaaactat

SEQ ID NO: 15473 - DNA, 2271 bp, Emericella nidulans
gggagtagggatatgggtgaagcaccctcgacagatgtccatcgtctgctgatttctccgtgagttacactttgttggaaaatatttaggctgcgttgctgatgttttcgcagtacctctaaagcatttgtgaagaagaaggctgctcttaccctccttcgcttatatcgaaaatatcctagcattgtgcagaatcagtgggcggagcgcataatatctttgatggacgatccagacatgggcgttacactctcagttacgtcgttggtcatggccctggcacaagataggccagaggaataccgagggagctatgtcaaagctgcccaacgcttaaagaggatcgtcgttgataacgacattgcgccggactatctttactatcgagtaccctgcccgtggcttcaggttaaactgctacggctgttacagtattatcctccatcgggtaaatcaacttctttcgcgccttgatgatgcgagctaatgcaacgcaggggatagccatgtccgtgatattattcgtgaatcactgcagcagataatgcagattgcgatggacacgccgaagaacgtgcagcagaacaatgcccagaatgctgtgctctttgaggcgatcaatctcctcatccaccttgacactgaacacaccctgatgatgcaaatctcctcgcgacttgggaaatatatccaatcccgcgagacaaacgtacgctatcttgggctagaagctatgacgcactttgcagccagggccgaaacccttgatccgatcaagaagcatcaaaacattatcctgggttcactacgagacagggatatcagcgtgcgtcgaaaaggtcttgacctggtctacagcatgtgcgacagcacaaacgccgcgcctattgtgaacgaactgatgcgataccttcagtccgctgactatgcgatacgtgaagaaatggtcctgaaagtcgctattcttactgagaagtatgccactgatgcccagtggtatatcgatgtcacgctgaagctgttgtctcttgctggtgaccatgttaacgacgaagtatggcagcgagtgattcaaatcgtgacgaacaacgaggaactgcaggcgtacgccgcccagacgcttcttacctatttgaagagtgactgtcacgagagtctggtcaagattggctgttatgttcttggagaattcggacatctaatagctgataatcaaggctcaagcccgatcgaacaattcctcgccctgcaagctaaaatgatgacgagtacagacaacacacgtgccatgatactgtcttcctttgtcaaattcgtcaacctgttcccggaaatcaaaccacagcttctacacatcttccgactgtatagccactcaccagatccagaactacagcaacgcgcattcgaatatctgtcgctggcgacacttccaactgacgatcttctgcgaacggtatgtgatgaaatgcctccgttctctgagagagcttcgatattattgtctcgtctccatcagaagacggccggcacaacggataaaaagacctgggttgtgggaggcaaggacgcgaattcggacggagcggaaattttgatggcacaaaacacaggtctcaagcggtcattcactacgattgttcacggtacatcaacaggaaccaacggaactgctacttcaagcgcgacaggcgacttggccggactagacctgagtgcgccgacaccaccgccaccttctacgaacatggctagcgcggcaaacctgtctcccgattgggaaattggatacaacaggctgtacttctcggacgaaggcgtactgtttcaggatgcacaaatccaagtcggcttgcggtcggaattccggggtcatttgggtgtgctgaagctctacataagcaacagatcttctttccccatcggatcgctgacgacgactgtgacaacccatccgccccgcatctcaggatcgattcgaagagccttccggagccttcagttccggcgtctggtcaaacacagcagaccctgttcttcgaggccaaagggccgttctctaaggcgcctacaatccgtatttcgtatcttgcaggcgcattgcaggcttacacattgcaactcccgatcctgatgcatcgctacttagagccctccactctcacgcctgaagatttcttcaaacggtggcggcagatcggcggtggtccactggaagcgcaaaacacgtttgggcttgtggcgaaagccgggggcatcagcgagggtttc

SEQ ID NO: 15474 - DNA, 1828 bp, Emericella nidulans
aacggcttcacgatgtcaggagtacccactcgtggagggcagggactgtatgtcggtagaggtgaggcggaggagaaagaggcggagagaggcttcttggtgtctttgcggcggcagctatgaaatatgttaggaaaatgatggaaagagataagaacatgagggatgctggctttatagggctggcaagagataaggtgtcatacctttcactgcaatagagaaggcggtcgtcaggcacagtgatctgcttctcacacatgccactgcagataagttagcataaatgcagtaaccccgataagcaagaatccgacatgcaagggctgaggacgataaagagaccagggcccgctccagcctccggaacaggggccgggaaggatgcggcggtgtaggggtgacggatataaacaaactatacgtaccaatagttgagaaaaggcgccatttcgggcgtccagttgccgtctggttcaattgtctgacgcacttgaccagaccccaacttcgcaatagagtgtgatacgcctttcctatatgatgaaggcttcgacgtcctggacttggacgagctcgatcccgaagaggaacgacgatgttgggaaagagcgtggctttgagtcatggtggcggtgagggtctttgtatagtttcagatccttggccggctgattgatctggatcaatcgcccggtgatgtgcaaggtggagcacggtgtccccctgaggaccccagtatgtactttccgtactatgagggatttccagcagtaggttcgatcgcccaatgtatcaccgcagaccagggaattattttgtgcttgatgatggactagggaaaacgccgatgagaacggatgcgggaaaattgcaacgacagccagtggcaggcaaatatgtacagcaaggcgtatgttcacggggcgataaagaggtgataagctttcaactgtgataccgcgggtcagctctgccattggccgagataaggacaagatcccgagatagggcgcagctggagttatttttacctgttttgcctctgttattgtttctctcagtcgtgcaagggctggatatgtttcctgacgtaggctttgcgggattattcgtcttgcaccacagctgatggaattcgctcggaggattagtgaccgagaaagacgataatgagagtgtgctaagcacgacgcagtaagggtccccgagtaactatacgacacagcggggaatatacctgatgtgaaagagagcgtggggagtatggagcaaatagcgaatttaaatagagaagcgagtgacaaccttgggagcgagattgaatgataatggacgtgaatgtcgagcgaggttctagaacactgcagtgtgtgagtaacttgttacctatggatggccgaatgcacctgcctcagcctggcactggtagtggtggatgacgattccggtcacggcaggagcccttcaggcagtaaggcactaacttcgatcagttcatcgtggatatctagtaggcctcattcctaattatagagcgggaagggttccttctatgactggtctattattccacggacctttccatggtattcttcgttcacctttgtccccatcgcttccaagacttaacttttcaaggtattttctgtttgctaatggttgtatgatccatctagtcgagacaatcatcagtcgccgaaccgttgcaacaaatctaaggctgaacagggccacctgatggatgcagaaagtcagtgctttgcagacacttctggctgcatcgattagcaacgttgggaaatacgattgctgaccaccattacct

SEQ ID NO: 15475 - DNA, 3077 bp, Emericella nidulans
atcccattcatatttttaaaatcaacgctctcgatggggtgagagtaagcgcctagtggaacggtgtctagaatttattttgccctaccctctgcatctgtatcctgaaaagaccccgttacttttgaatcgccggccacgttgacagcgttagcagtgccccattcgcctgagaagggcctgagtgattgtcttctgatcatctcaggctgctttgcgacgcgcacaacctggggagcggagctccgctcgcggggttggtaatttgggtagaccaaaggctcccgagagcgaccggcatcgccatcatacaaatcgtaatccgcagacgattcgcgatcattatcaggagtcattagcggatatcggaagttggggggcaggtcggtgggaagccggcgcctgctcattgtcgcggtgcgtgctgcacgcgctttttgggcaagggatcagaacaaagtcattgtatcccagacaaagatcctgggaaaagacgaaatcacacgagatcgagagaacaagcgtcagcgaaagtgtggctgcgctcgatgagcgccagtgagaggctcagcagatcgggagagcatgtgacccccacacgagcacaagaaccccctccaggtcgatctctgcatcttcccacacgtctcgcaaagatcctcatccgaggttcgcgcgtttcagacatcgcttgcaggccatgctgccacgtcgatttcttcactaaggagctttacattgaactgactgtcttcgacgctgttcttgctatcagtaaccgggaagcgcgtttgaatttctccctcttcgaccttcctctgtactgtgtttgcggcccatgcacagttccgttgtggctttaattgcgcaaggtcaatgtccctcttagcagttcctacagcgaagatccaggcagccaaccggccgatgtggcatgatcccaacaaagtgaacgtgacacattggcctctcaataccgcattcgtagacgtttggaagaccaggtttgacacctctattaggatcatggtccttaaaaccgggcgatttcaggagacctcatcaagttccagctgctctctgagcgctaccgctgttaaaatggtggattctcatgaaaacgtgggaattctcgtttgcgactctgttgattaccgcagccttttgcagtcgaggagattcaatgttggagataatcgtatccattggtgcgacttttaccacatgcacagaccggccgggataaaggcgtactagcctacaagtccaccagccattgcggcatgatgatggtgggtgtgctgtttgcaaggataggtattggtaggttcaaagtgtacggctacaccaagtctacgatggaaagatcgaggcatgtcaggttgtctgtactggctagatattgcatgatatttcttgcatgatatttcttgcatgctgattcttgaatattgtagttcctcgcagatagagtataagtgcttttcgataagtttccttgaacaagcacttatattgtacagaagacggatctgctacgcgccgagttcagactcctgctatttgtcaaatatcaaaatgagcctatgtcaagagggcaattgccagcactggcggttgccgggctaccaagtctctgcaaaacatcggtaactagaattgctctagcagagcgtgagaggcacggcagcacaccttgctgttaggagatgagatccacactcatgatctgtcttccggaagcgagcagcttttcaatggtagagatatctgacttgaagaatgcagcgtccaccgcggtatcaaggatgggtgttaaagaagggcctggtctacggtcctgtaacgtaccggcgatggttgcattattcgactggatagcggcaaccaaagcctcctgctcattgaagccgcgccctagacacagctcgaaggccggagatctcctcgtgctgctgcatacgccagcagattatgatcctgcaactgggtcgcaaaccgaggattgtggtcaagttcattcaggaggagcttggcgattcttggacggccgccaaagatggtaccgcgtaaagttccatcacctagttcaagcacatcatatctcagcggctctttgacaatatcttcatgcccgtgagcgaccgccacagacaaagctgagcctccagcgtagccgtttctcggcacgtagctaatctcagcgcctcgatctattaggacttggaccatctggagatggccgtgtctgacagcggagataagggcggtagggcagctatttaactcccagaggcggagggagacgagtgaagtgtactgcgacgtcgactcatgttgcgaagtctactgtgtattcaaaaagtccactaagaagacaatagcccttacttaactgtcatttttgtattcttaacgggtatgccagctgtcgaaagtgaccttcgcgctgcctaacgttgacatataggtgattgatattgaacgtcgagtactgctgccaaacaggtgtttcgattcgcataaggcggcaggagcttcctacacctcattagaacatggctagagccatgaatacatgccagtccatcacaagggggtatattcctaccacgaatatcaatggtgcctaccaggtgaagttgtctagtctgcagacgcaaagcctgcctgcctggatacgactgagttagaaatgtacggtatattatcaggtacaaaactttctttcaaagttatatataaagaaggtagtactatccacgcgtccagcctatgagtagctagtagtaccagccatataatcgggaacaattcaagttgagtcctttggtggtatatattggtgtatccccataggagactttctcaaatatccattaggaatccagccttgcttgtgacatcgccctcctcatgcaaaagggtcatcactcccgtgtaatatgcacttccctcaacacgtacaactaccgcaggccacttatttcccttgaaacccgtgacactgacagtttggtcaacgagcgtgcctacaaacgccccagttgcgaactggtttgacacgagagagttat

SEQ ID NO: 15476 - DNA, 675 bp, Emericella nidulans
  unsure (1)..(675): unsure at all n locations
ttttttgtagagtaatcagatcggagtcagtatcgggtaggccgcgatccatggtttgcaagtgttaatagagcaacaccaacaatgctaacgattgatttcactgtaccacaagaacgtactcagaacgcaaaggcgaaatcagggactcggggcgctgcagagctaaggttgcgtatgcttcggatgcttgggccagcggggagaaaggagcgggcggaatagcgttgaaccagtctcagtgaccgccagaggttttgggaacgcattcttcctttaaagggtgaagcaggaacaattgacacgttatacaagaaaataagaggacagatgcgaggagaattcggtttggaaggacgtgttgttatttggagggatcgggcagtcatcggagttctcagcggcttttctcaggctggatgatatcattcccatctcttctatttttccatcctgctcaactaagtcggcgacgccagctacggatagacaacttatgatggaactcttggtttatatcgctcaatgacctccgaaccgccgatttatctcccaacgaaatagtcattcagattctggacgaggttgctgcggataaaatcgccgncaccaacacttatgcgtgctgtctcgtttccggcaatgtatacctgtgcatcactctctttgggcgga

SEQ ID NO: 15477 - DNA, 446 bp, Emericella nidulans
cagagtgcttatgagctgctactcacgcaggtcctggccattcatgcaagctaacctatgctcacccttatttacatcctagagcgcctggacctcgtgggccagcgcataaagctatcctaaccacctctacatcagagactcatgctcattgtctcgctattaccggcaagtacctgttctaatagactacaacagaaacccattttcatcttcaaccggaataaatttcttacggatcttgatccatgttccccaagctgagattgcatctacccaaaacgtgtgccataccaatactcaaccccgtgttaaaatgaagcctctgctcccgactaatatacacgttctacttgctggctagccagtacatcccagtataggcgcactgaccctgccatagctactctgactccgtgagtctggggttagagtctggatcttgc

SEQ ID NO: 15478 - DNA, 1457 bp, Emericella nidulans
gaaaaagaagcggatgtggtattcttccacagtcagactgcaatttatcaagattacatggggtggaagcgaggcgaaataaaagaaaaattggagttaaccaacggtcagctctgagagcttccaatttgattgacaccggggtacaccaaatgagacgggtcgggccaaagacaccggaatatggcagtgacatcctagtagaagaacagaaggtggtataatgaacataaaacaaaatcgaagtgggaacgtaaataaggcatatctttcgactgcgcatccaaggatgaaagatttcggccgtggcgcagatcggtcagcttggtagatccagggcctcagtgaagaggcttgcatctacctctgctatgcatgcagagcctcaaagcgtgcaagagccgcgcgtcgaaagtcggctccggcttaccattttgagcatgcttgaggccgctgcgtatcgttgcagtcagacgttatcagaagtcgtaaaggccgagtcgagacagggaccgcgggataacaaggtctcccgtttcggctcaaggggcgatcagaggtgccaaggcagagccagcatcgcacgaccgcacaagaagtaaggaaattggagaagagaaggtggggaattgaatcaaggaaaaagtcgaggtttttaaaagagagagccgaaaagtgcggtaccagttaccttggccgacgtgcaaagtcagggccggttctgccgccgaatgatcttggctttggcgaacgaatagcatcgtgacggttcaggcggctggttctccagcgttcataccagataacacggctagcctcacgcagttcagaacgccattcgctgaacacggagtctttgagtttcaggaagtcgcagtgctctggattgtacgggtcagcaaaaccccaagggaatttgcgaccaatgggaccatcgccctggagcgagtatttgtcgggggacagaatcgagaaaggaagtagaggaacagcctgggaaccgacgtcctgctgagagccttcactgcgctgtgtaggggattctggcgcttttggctcggtctcctctttagtgtggccgccttcggtttcgccggcggcatcttcagcttctgaagtcttgccgggctcttcgtcttcgccctctgaagacgcgtactcctcctggactttaagagtaaggatttcaagagggacgttgttcggctttttaaagctgtccacactggtttctaaagtctgcccctggcccgcggggattgaatctggttgctagtcacaggaccgccggaggcttgccatacctgtcctaagcaccggggagggaatttatctaagggtctcccaaacttttatttgttccccccgggtatttggggggcgctttgaaaaaaattttttttcttttgacggtcggaactttagtgccctaagtgggttttgtgtcaaaacggcga

SEQ ID NO: 15479 - DNA, 3355 bp, Emericella nidulans
ggtctacctggactaaatataaccagatttggctagtgcaatcgcgggcaacctggagcatgggaaacaaaagaccagggatttgcttgatgtttaaatgacgcagtgaatcaatcattcgtaagagacatgtaacatacgtccgtgggcaagccttgcgtactcgggtatcggtaattagcgcccgtagctacataacccctgtggagtagcagcttcatgaaacaggaatgatcttcaaaaggaagattaagtttttatgtccgttagtgaagccgtggttcgggattcgccggacgtccttgtcgagtcttgagtctaggcggatcaaccccgagtctggacgccagaaatggaacggggactgggcacttggagacgtggtcagcggagaacggcatggttacggatcgacctagcggtgggtatacagttagcttccggataagtttccccagagaaaggggaagcatcccgacacagaccgttttggcaagctcgtggtccgcccggtcgctgcagccagcgtgttagcgtactggtagtgttgcgtttctcgcttgcacctggcaagttgtagcccgaaacccgtaagcgtaacgatgggactgagatgcaaggatgttgacattggaatgtagggattcactcttgatggcaaaacaacggaatgatgagtttgcagggatacgacgaagcgtgaagatgaaacgccgatgagatcgagccatcgcgaggcagagaaggagacggtgcgaaacctagggagcccagccagcccagggcaggtgacaagtgagccttgcctgaggcgccgacccacacccaggccacagggctgcctgtcatggccgcaaacttgatgcatcagaactggcattgagcagacgtcaaaaagggagtggatagccatcatttaggtatcatttaggtatcaatcacgaattgcagaattgacagaactgacagaattacatctgtccactggccacgcaggaacgtcggaaggaagtagagtgcttatctcaggagcagtgctaagtcctccttctagaggctgttgtggattgacagtattgactcaattgagtcctactgactgtactctgagtactcttctgatcgggaagccagcgatcgagtctgcctgccaagacgaggctgacccgcacccgtcgcgatcgctctgcgctggctgctcccatggaccagcgggaacatcgactttcaatctgatgcagacggaatatctcaatcgaggactttaatcgaggactttgcacatactgccgtcactttcctcttcgagggttatcgagcgcgtgataaaaataacttgttcctagcctcatggcgaaggcagtgtttgtctgcgggcaagaacccggtgcatgcgcctggccgcctggcagttatcgagtccactactctgtatgtagcgcgcgcactaaactatacgaggaccaatcagagcggtccctgaaccaacagttccagcacaaaccgcatggtcgactagggttcgtgaactgggaattatcccagcttaccacccttgcattggcccatccatgctaataacgaattgcccggtatgcgatatcgtccatggatcaggctcgtggtctcaggccaacgtgccagtctctgcacccgcagaccccgtggtctgcacgaggcggccgaccttccaggtaggtccagctaggcctatctaggcctagttagtcccagttaggcccagttaggtccagttaggtccagttaggtccacgagtatgcagaaattctgctaaaaacagctagagcttacggccccaagtatgcactagacagcaaattagcaggcggcaaaacccaacagaaagccgtttatgccagacccctgcagcatccaaggaaattaaaaataagtctccatacaacgcctgttccccgtctttgattgcgcctcagccgcaccggccgaattgttgctatttggcgaaaaatgctaatttactgcgattctttggaaacactctggtagtgtctggtggctgtagtctgtcgaccgtgacgatcgcatgcagaatggattatttttattatcgtgaatattgctattatttttaaatcggcgtggtatttatattatggtagtatggtgattatgaatctcagcttttctcaatttgatactatattatctactgcggcttccagcccggcctggtctggtcttactctgccctatactgcgtgtactcctggctcctgcatctcgctgcatctctctcgagtcactgtcagaactgccaccatccgccgtttcaggatcctgccatccccagtcccattccatccgcgtcccttgcccatacccatactggcagtcaggtctgacctcattctatcgatctacactagtcctcacacagcccaccaccctgaccctgaccctcctcctcatctcgtgccgtctccacagactagacgtttgctgctatttcttttgggactgttcctgtcagtccatgcgatcttcttcacaggccagaaactatatcttggaccccatcgccaatccttcaatccttccgatcactccacccaactctcttcttcacaacacgcctctcttgtctaccaacaactccaacctcaagctccctacaccgtcctccgtctgctggtaaaccgtaagcttctcggttggtacagctgtgcacaatgcctcgagccactgcccccgcagacatttctctccccatcacctacacttccaccacccaccgcatcagcaaagccaagaaggggaagcgcgtccatgcttgcgagtatccaggatgcgccaaggtcttcactcgtgccgagcacaagaggtacgcatttccgtctacggtctattgttcttggtgctaaccctgcgtaggcgacatgaactgaaccacaatcccgaggcgctgtaccggtgcacccaaaccggctgcaagaaatcattccaccgctctgatctgcttgcgcgtcatatggaacgacagtatgctgcccagctcgtgtttgagtgtctggtgctaatgcttctacagtgaactcgaagctcagatggacgcttcagcgcaatgggaccacccttccagcagatcttccgtcggctacattcccagataccccgtggtgactcctacgccagcgccgtacatctccatgccgcagccccagagcgcagtttccaagtcttcagtcatccagcccgacctggcaattgacgggctcatttggggtaccatggatcccccccagcaccagcacatggtctcgccccaaagaatccaagagtccgtcgaagatactgccaggtactattccacgc

SEQ ID NO: 15480 - DNA, 926 bp, Emericella nidulans
accagtagtaacttccagacagcgcagccaagcagataataggctcttcactccaaattttgctaatatttcttgactcattcatgcgtggacgagaatgtttaagtatttctgccgtgggccaccgccgacgtaaaatgcggagagcatccgaaatcgctcttgacctagaccattgttagcagcacaactatatctgcatctccgattgtcaaatagacatgccaaactcccagacgtcaaatagccagccccaggtatctgaaaaggatgtcgataccggcttccgaaaaggagatgatacctttacgcattggcgcaacgtcttcaacatcctcactggcaggatgacggacgaaggaatagaacagttttcgcgttgcgcgagatcttagaaatgaagcagcagactgcaagcgctgtgaggatcaaagggattatttattacaatggagtgagctttggtacccaccctaataaatgaaaacctttaaggtgtgtctaacagagatgcattgaagggctcttcattccgtatttgagcgacatattcccaagttgggggcaatttgtcagcataataatattggccccttgtacaatagtaagagtcggttttcttctaatacgaaactctttgttaacctaagaagataagtcctttctatcctttctatatatttcctcttttcccctaggttaacttatgttttctattctttctaccaaaactataatgttccttattttctataaatcaaaacacattcaatattctctatcatttttcctacacattcttatccatcttcatcttatctttatctatattatcatatcatcattctattcttttctttttttatctccttttcttattcttcttccatttattctttcattttctacaattacaacatactcac

SEQ ID NO: 15481 - DNA, 1936 bp, Emericella nidulans
gattccagccagccagcatctcagagacagaggaaataggcgaatcaataccatcctcgctggtcgcgacagaggtcacacgcatcaaagctgtcgtcttctccggtatgccagagatctggaaacacttggaacgccactggtaacgcaacttagagctattggcaaatgtgctgcccatatttcccactaaccggaggaagccattgtcgacgagatcctgcccgattctctcggcgtagctgatgctagtcgcgttcaagtacttttgggtatattccacgatatccgcaccagtcgacgtattttggtaagtgccaataataggcactttaatctcaccctgagggatagtctctagcatgtgcacgagaagcttcttcagatcatctggagtatacacccggtcgccgagttccaccggctcatcctccacaggctctttgtcgggtaggattattttgggtgtcggcttgattttagggctagtttccggcgcctgaaatgcgagcttgttctcttcctccagatcctcaagtacacggcatttgttgaagtactggctccgcagcttcttcaccaggtctacctgcttggtatgctccttgatccgagcctggaggtcatcatgagagttctcaatccgtgcctcatgttgatcgcaccagcgcttgaacggcgaaacgactaattcccggatatttgacgctatcttcttgtggttcctcgacgcctcaaccatctcggtacgagttccttcgtaggcctgtaaggattttaccgaatcagcatatgtcggagcaagtgggtagtgatgtctgcgtagcactacctacctttctcacgcttgctccgtcatccttcgcaaaccccgcgatcattttgtcaacagtcggtgcgatatcccccagcttcgagctgtatatctcctcagcatccgcgcgcatagacgcaatcgtaagtatctgcttgttttccacgatcccctgctgcagcttgccgtacaggacccccagacccgtggcgtaatctggggtccagaacgaatctgcgaacccgggcattgtttcgtaactcgaagcgaagaatgcagctaatgaacgggataaaacgcaagtgaatgtggattagatcgcgtcgagcgctagaaaaactgaagccactcgtcggcgagggctttcaatcaacgcgcaagcggaaaggcccgtaaaatgagcggcgatttgaatagctcgggagcgaagattgaagggagacttcgatccggatacagtagtaatttcaattcgagttttgagacgtacgaaccgatggaataggagtaggagaaacgctgagcaaaatggtatgcgtgggcgcctagaagccaggaaagagaaaggatgcacgaatatgaagcaaaaaggacggagggccagcaaaatcaagcaaaacaaataagaaacgggcgtagtcctgcgttaaaattgttatgatactgacagattggagagcaagtagaaaggaagaagagtcccatcaggcctcccacagtactgagccggcccagcagttcctggtgcaatctccgtgatccgtacgtaattacaggccgttgccgctcagcctcacgtggccctttgtcttaggctatttttggctctctttccgttatgataccgtaatctatgctgtgggcaagacgactcgcctgttactacagtgactgatagttattgtttgggtatagagtctgtatctacttagtgcattcataaggtagtatatctgttgagaagatacaagatataaccaaatacgtcacagctcgcaagtcaccgtggtagagaacgtataactcaaggtgattttcattgtgggtatatcatgatcgtcgtcgggttactattgggatttaacaaaatatgaaaaaacagcatgaaggagaataagaacg

SEQ ID NO: 15482 - DNA, 2421 bp, Emericella nidulans
agctggcatatctttctggtggctgtattagaccccgcagagtgtcggcgcaatgtggcatgcttcaatgttttatatattgacggtcccctgggaactgtagtggcgcaggtgcgtctaaaaggaaaagaagaaaggtattcttaactgtgctcaaaattctcaccattcatctagcagctgattctttatggattggcttatgagtccgggaggactgagcagcctgggtggtacagtggctagggtagagtctcagaaagtggagcttgacttgcgagtcgccataagattttccccggatactgatatatagaattttacagtcctccgacagctacacttccattttctaagccgtattgtgcttgatcaaagaataccatgaaagtaggttataatcaaattgagtgccttagcaatcgggccttacgattagtcacatcggatcacgtgaatatcgtctctttgtcaccaggaaacgaagcaattatccaacgttgatgcttttgatcatcgataatgacattataatcatcgaatagatccctatacaatgcaggaggcgtgctatacgtgtcgccgacgacacatccaatgtgatcggtctcaaactccgtgccggaaatgcgagaaggccgggctgaaatgcctcgacaaaaggccgatccggtgggtgcagggagtcgctatccgagggggtatgcgaggtcgatcgcatcagatcgagataatctggtcgactccggtcagcgcgatcgagatggcgttggaaccgtcaatcaagattcaagaaccattggacgcacgcgcctctacgcagatagtccctaaagatacgccaataagtatgccagtgtccatggaagatgagccacttgcgaagttagacccaagtgctcgatattacttgaattactgtacgcttcttctcatttatatgtatctgtactctgacgatccgcagacaatgaccggatatgccaggttttcatcgtatacgatagcaagaacaacccgttccgaagtctcatatccctcgctctgagcgattcggttcttcttgacgccatgcttgctctggctgcgcgtcatcgggcaaactctgagcaaccgttctccgccaatagagcagatgtttctaccgtctccacagacgcggaccgtgaggctcttcagttcaagtatcgtgccatccagggactgtcacggaccgtcagttcgcagcattcctatcgggttgcaacagttgccacggtattcttgctagtattccttgatcttctagagtccggttgcgatcgatggaactaccacctggaaggcgcgaagaccctgatgacattgacaccaagctccgaccctggccgcactatagagcgaatacgaaagttcatcgtcaagcagattcacttgtactcttccctaactgaagatgttggaaaccactgactgttgactttcaggatcgaatctctaggagcgacctttgttcgacccgaacttctatcgaaatgcccgtcgatcgacgaatcctcgaatcttctggacgatgttattgaagaatccttccttgggtgtcctgagttcattctcaccgctgtgcaattcttctctttacagcgggatacgattgcaaatgagaacagccctggccagcctcgagctgaggatgtcctttcaatccttgatgctgtaagaaactttgactgccgcgcgtgggcttcggccctcccgcaagagtctgtgacccatgatcttgatggtctaacaaaattggcgcgagcgtaccaactcggtggaatactgtacgggcagcggatacttgatgccgttgagaaaacccgaacttctcgcgagacagtcctatccgaattaattgatattattacctcattgcagccgaccaacctcctcaagtgcaccctctggcccatcacaatagcgggcctagaatgtcaggcacgacggcagagagatctgcttatacaagctctcaagaagttctggcaagataccaagtgctcgaacgtcacaagcgccgccgacattctgcaaaattattggagcaagaccgaccacaatccagacgtggcgaatgattggatcttcgacattggccggtcaagccatgactggctcctcatctagcattttgccccactccaatgagctgcctaaaacggtttactggccgccgacgtcaggattctggaaacagtggaaacgcccggtcttccccaccagagcctggcttaagaagtttacggccccgagctccttttcggctggctcaaagccaagccttgagccagccttctctctccgctcgactgctccaaaaagaaggtctggggagtagggttgtttgcattacgaaacaaaaaactcgcctacaaatcttccggactatataaaacc

SEQ ID NO: 15483 - DNA, 2173 bp, Emericella nidulans
tctaatacggacgaagaagaaggcttgattgagagccctgctgatgatgataatgaattccaattagtttacagtgccaaacgcaaactctacagagcaatataatgaagttacagatggcttacgtttcgtaatatatgtctgaatatagcaattggcgagcttacgagtcaatcctgctttctcgttctctcctcgcgatgaatgctccaacttaagataataatgtttggtgagttgggacatttagacgatcgaactttcgctgtctcactatcaacgtagtactgtgactttcgagcgggtccgggcctccaaatcagatcctcatatttctagctgccttaaaattccaaacatgatccggtgcatccgactggatcctggtctgtgctggcataataccgatcagcagtactcagtactgcacgttgcactgaaaccagggcaaataaaccgacaaaccaccgcagagctgaacctgacctgaccacgtctcctcgtcttctctcttctcttctcttctcttctctcctctcgcccctctccaccccacgtacgcgtccgtcatataatgcgaatgctccatccccgtcgcgtacgcctatgataacgcttcaatcgattacggacgccgtcggtttgggatcagcccgctatggcggattccagtggtcggtcgcgctggggtggataggcctggtttggtactctacggtgacgactgtttgtgctttgggatattacaaattgtactttattcgtgcttttttttgcgacttgtgctaacgcgataatctcagatggaagcactgtcttagacgccctcagagttcctactgcgccaccgctcaaaacgctccccacgtcactgttattcgaccggtcaaaggcctcgagccgcacctgtacgactgcctagcctcaagctttcggcaagaatacccccgtggcaaacttactgtgtgtctctgtgtgtcgtctcggagcgatcctgcctacgcgactttggagaaactggtcgccgacttcccccatgtcgatgcacgtatttacgtggaggaagaggatccgctcctccagcctgaccataaacccatgtataacctcggtccgaatcccaagatccgaaacatgagtcgcgcgtatagagaggcgaagggtgatatcgtttggattgcagactgcaatgtctgggttgggaagggagtctgcgggcgcatggtggacaagttgtgcgggctcggttcaggctccagcacagaatataaattcgtgcatcatctgccagttgctgtggatgttaccggggttattggcgtagacgagcggcgtgcgctggaaacaagcggcgctgccagagtgaaggacggaaagagcgcctgccgccctggtgttttggccatgggaggtggccggctagaagaattgtttctctcgtcatcacatgccaaaatgtatactgctatcaacacggttcttatcgccccgtgcatcgtgggcaaatcaaatatgttccgacgctctcatcttgactaccttaccacgactgccagctgccaattcaacccaggcatcgattatttctcggacaatatctgcgaagaccacctgattggcgatctactgtggaagaacagagtccgtgaggagaaagaggacggtaagcacctgggcaagcatgcgctggtctttggagatctcgctttccagcccatcgcaaatatgagcgtacaatcttacatagcacgccgggtacggtggctgcgtgtcaggaaattcatcgtcatgctggcaaccctagtggagcccggcacagagtcaatactctgttcgctatacggagcatggggcgtcaccactgttttggcggagtacttccagaacaagattctctccacatggacgacatttttcaccttcttcggcttttccatcctaacatggtgcctcattgactggaccgtctatatcatgctgcactccggcaaaaccgtcgaacgcgacgagaataccccatcattcgcgcgtccgcctcagggtacaactaggcggcgcttttcacactggctggctgcctggcttggaagagagatacttgcctttccgatttggttctgggctatctggggcggtatgactgttacctggagggatcggcagttccgaattg

SEQ ID NO: 15484 - DNA, 502 bp, Emericella nidulans
tcccagccccgaaatacacccggaccaccacgagcggggcattctaactacggattcaactatcccgatatacgcatacgacatcagctaaaactggagagtcggaccagctccatctaagccaaggatacgacccgaatcccgcactgcaactatccgacgttccagcgccatacaatctgatgacacctatggccgagacgacattggcatacaccggatggaacacaattttgctaccatgcagctcatatgttcatactaagtatgggcatggtgtatagcctaaaactattgatcagtcagacaagccaggcgacatagctggcgaggcatctggtgtaaacacgatcgggtaaaaggcctatatcatctaactatacgctgcaattgtactaaaaaacccagttagtgaaaacactgttgatgatgagcatcgaggttagggcgcatatgccgtacatgaggatgaatgcctcacaaaccggtggggatcaatatg

SEQ ID NO: 15485 - DNA, 550 bp, Emericella nidulans
ttatatatcgcgccacgctccgacggcgcttcagggcttatccacccatgtttattgtgaatccagatggttcgcactaggtagcgaatgccggagagtgacacgctcatggacgtgggcctgatatgataccacgatgtgaacaatcgcgccaatgatgtgacgaactagacattatcgcctttgtactcatgcgcgcgtgtaatatggatctattcttaccaccgatcactatacgatgtagaaacgcccaccatatctaaagattagacaactgatacgcaagcaggactttcagaagtggcctcctaatttgaagcacctgtgaactaattaggttctcgttcagaggaccgctgatttaccattgagacctgaatctcgcatatgacgactggccagatgaatcgacagtgagatcgtgcgagctcaatgctgttcatgtgccggatatatttgattactgcgcgcgtgtagtgtacacgcagtcctgaggcacaatctctacatgtaacctaagtccctaactgtggacctagggcatttacac

SEQ ID NO: 15486 - DNA, 2633 bp, Emericella nidulans
tgtctctgcctctgagcttgttggtggtctcctggatgttgtgatgcagtaaatggtgtcttaggggtacttgagattgtcgatgcagacgtaacaaagaagaagtcctccttgagttgggtttgattttcggcaacatgttcgccttcgtccttcccgtcttcagtgccggttgacgtgttctgctgtgaacatgcatgactgcagacacgtctaacgagccctcggtccagaatatccagtgcgaggagaaagtcattgggaaatatgcaatgcagagtcagcatcagcggtttgaggtttgctgcttgggatgttggaaatgcggatctcgatttggtctgggttaggcggtaataaccacggcgttgtgtctgggtttgtgcttcgaactcatcgttccctgacggacgtatattttgggtggtaacgtgggatatttgcaagagaaggttattgataaattgagcagtttgtgggaatgtcatgttggcggccgtcctcggtcatagtagtagttccatgtatatgttttggatgataccgcggatgcatggaagataagacccatcagtgaagatccggtctgcgagagatagacgacccagcatctataatagcaatgcgaaataaacagagatccatagctcgatggactttccacagcgtactcggaaacatcagagctgcccaggcggttgaatggctggcacaaacaattgctgactcagaaattctccgaagtgcatgcaaagccaactttaatcttacatcgtctgtaccacatcataccatccggctaccgagagcagagacccgagtgggcgcagagctggaaatacgcactgtatgatacggtacccacttgctcaaagttcccaaagtcatcccaccgagtgcaataagtgtcatagtgggcaatcgatcgcttaccactccgataaagctttgaaggatccagtgggctgccgctgagtcaagtcgatactgctattggcaaccagcaaaatgacatcaatagaccgagacgaggcgtacgaggagaagaatgtacacgaggtgtaccagcaaatcgcgaaacatttttcagcgacaagatacaaggtttgtcccacaataatgaatatcaacgtctcagcgcagcaattaacaggtacagccatggccgattgtggaacgctttcttcaagaccagaaacccggcgctgtcgggcttgatgtaggatgcggcaatggcaagtacctgcctgtaaataagagtgtctatatcctggcatctgaccggtatgtatatgtataatttatcattcagttggcctgcatgtttggttcgtttcgtctatttacattgaatgagaattctccctacccatcataacaaaggaaaaaaaaaaagaaaaaaagaaaaagaaaaactggccaagcgagatatctatcgcaacctgaattgacaacccaactgaccattctagatccgagaacctcgcgcaagtcgcccgccagcatgaaccgcactcaaccattctggccgatatcttgaatctaccacacccagattcgttttttgattttgccatttcaattgctgttgtgcatcacctgtccaccccggaacgaagggtccaagcaattcgtgaaattctgcgcactctgaaaccggcatcaggcgataccccaggaggtagggctttggtctacgtctgggctctcgagcaaaagaatagccgcagagggtgggataagggagacgaccaagatatcatggtcccctgggttctgaagactcccaactccgataatacatctgacacccaaccgaaagtattccatcgatattatcatctttatcaggccgaggaattggagcgggacgttgaaagtgcgggcggccgtgtgctggagtccggatacgacagagacaactggtgggcgatcgcgactcgagtagaccaaaaaaattgaccgatttgtgcgtgacattcactccgagatccagcctcggagttgaattcagttctgtgacagtaaaagcagaaccaatcagccaccctgtaggggcttgacctctcacatgtgtggagaagaaaactcgcaaaatcatctatgagaagccctccctatgaatcaaaacacctccagcgctatgcaaatcgtaacaacgcaaaacggacaaaagaaagttgctacctctagggaagcgttcgaggaggaagcccaaggtttggacctggatgactaggatgacctcttcccagatccagcggtggtcctatccggtaggcatctcgcggcggtatcggaggtggaaatggtggtggaggagcatatgcagggacaccagcagcaggaacgccagctgtgagctcttgaaccgaaggaagctgagggggaaggtggatcgatcgtgatgcggagccttttcttggtcgggatagggatgtactcgctctgcgtgttctggtggtggggggatcgatcgctgaactggaaagtgagaatgggaccacgccagctcgacgggccatctcttgctcgcccagctgccaatgcatcgcttctgcagcccgccaaggaatcgccatttcctcggccactttggaccacatctcggccttgaatctgttatctaacgt

SEQ ID NO: 15487 - DNA, 591 bp, Emericella nidulans
  unsure (1)..(591): unsure at all n locations
ccgatgtcggaggcgtgaggtcagcctgcagctcctgccaaatatgccactgcttgttgataaccttaatatataaagccttacttatatatatatataaagaaaaagaaagcagcggctatcgttcccacataatgcaggtgaaaaaaaggaagctatctgcactatatctatgatgggttcggcaacctgatgttaaccatgtcagcaaaaagggcaacataacctggaatcctaaacttaccattgctatggttatgcacggtgtataatgagagaattacaggaatatatgctacagcatatgagctggtttatacctacttgcccgtctggatctctcaaaattactatttatcangaagtaggaccagactatcaaatacctctgccggatatctatttgccgagcacacccgttgttgacaagccatatgcgtaagcatgagcatgccaattggtcctgggccctcccatagtgacctgcttggcccagtgaggttgtgatcgaacagaaacaggcctagttaggtatnagtgggacaatcaacagacaatgcagacagagagtttacgccatcacacacgctt

SEQ ID NO: 15488 - DNA, 1907 bp, Emericella nidulans
ttatgtagggggggggagattaggttaacccaagtcccctttcgggggtgtgaaagcaaatatttgtccggggaaagaattggaggatttgggttgtaaaaaagaggggtcctaaggcggtcgtgggttttttcggtggaggttttttttacgggaaatttttgtagtcagggggcatatgtggggtccgggaacaaagccccgaaagagcgaaatcccttaaagtacacttggccatgtgcttagtatcttaaacgcatattaaagaaagttgattggtgttaagaaaattcatagatttatctgtattggacattagagaggggtgatctcgatagggcgtgcattcactaaaaatgatcattctgagtatggtgtgccaattgtacaagtcaaatcagagggagggtatgactataaaagacgtgccgttttcgtaactatcttcagcgagcatggttgaggaagtgatataaacaagaaaacggctatcaaaagggctatgatataggcttatcaattctccaaaagtacagagcaccttagctctgttcagtgctgcagaacatgttaattgaagaataaaacggctgtaggcaatgtagcgctcttgtggtggatagtttgatatccgcttgacgaagtaacgaaatctccaacccatttcccacccatctttccaccgcctgattggcaggctcttgttcgaggagagaataaagagcaatgatttggctgttcagagctgcagaatcgtttttaggacctggagcgccggctcctgcaaccgatattcctgatcttctcccctccaggaaaaattcagctggccgggtgatagaaatagcagacagttagccgcagccagtaagcgttctgagagcaagagagcttgtgaggcaacaagaggatgtgggtcagcaaggttctaaggcgtcacattagctaacatccaaactatgtatagatttacgatctgacacttaacggacgggccagaagtcccgagcgcgaacgaccaaggtgtgataagacgaaagaaatattctagagctgagaaagaagagcaaaatgagagacagagagcaggaaggaaccagtggctcgagccaatgatcatggtcaccaccatcctggagttccaaccgccgcccgtttgcgaaacaaacgccatttgagccatacgtggtggcatttttctgacaggaaatagtactaaatcctgcagctgtattaaactgataatgttagaacgcacaaaaccatacatgacgaacctggccgtttgcgtcttgtgggggctaggaagcgggaagccaggctgaaaacagtctttgccaacatcgagaccaccatccctcaaggctaacgaggggtaaaatgggagacggttgtggccaagctactctggagagcataccgacggggaagaatggcggtgggttaagaatggggaatgacacagaaagactttggagtatgggcttcctctagcgagcgcgtctttttttcttcgtatgagatttgccagcttttttaggctcgtaccagaggtttagggacaccagacagcagtgaaaaaaacaagagatgactgacgatggtaggcagggcacaggttcttttccaaggagtccgcacccaaagttgacgctgtcaataactgttagaaccacgagagatggcgagttaggtcgaggagccctatgtgaacagatgcctgtcaggtctcccagagacaggaatcacaggccatctcccggaccgcgcagcctatccgccaggtttagatgccatttgcacgatgcaggtaagagattcgtggtcaccgctgatgaataagttgctctgggcgtatactgtcgtaaaaatgttcacatgaaactctctggacaagccgtggcatg

SEQ ID NO: 15489 - DNA, 4931 bp, Emericella nidulans
gggctttgtggaacagccagccagaggccaagggaggcctgtttaggctagcgtcggcatagctagtttacatgactcccgaatggtccaacttcttctccttcatatgccattctgcacccatcgtacgatcttctcagatcgttatataacaatcaagaatgcctcaatgtcctttccaagcaaagcaccccgcgtcaccaaggacgccgctagtttacatcagtgccccgagtgtgacagggcctacgagagacccgatcacctagcccgccatttggactcccgtgtgttacagtatatatctctttagagagtaaagctaacaggcaacaagatcgtaatgagcgaaactttcattgtccgacctgtcatcgcggcttcaaccgtaggcacgttgccatccagccgcagaaggaatcagactgactcagggcaagggatgtactgcaacggcatcgattgatccacacaagtggtacgcctctcagcaaacacgcagggagagcggttgaggcgtgtgaacaatgcgcaatagcgaaagcgagctgtgacaacgatagcccatgcaatgtacgtgcccaaagaggttcaatgtcggtttgtgctctaattaatggtcagagatgtcaacggaaaggaataccatgtattccacgaaagcaacggcaccgctgctttagaacaatggccaaggctacacccgaagctgagacaccccaaggtcaaggaggcagcgaacctggtgtcgaccttagcacaacaccgaggactgaatccatcgcccatagtgaaaaccgccaggcaccgccagccttggaagccgggatgaatccgctatattcaacagcatcacttgcttcgcctgttatatcatttcctactggcatctccgatcagagtaatcccgtcgataacttgagcgagtttccagcattttttgagcatgtcatgatgccatccgaccttttctcaactggtgtcccaggcgtgcagcagccgaggggcgtcttggatattatgtgtgacccgggatttactagtgctgatgctaacttattcggttccggtattatcacggacctggacaaaatattagaatacaatctatcgcctgctccaacatcatcagaccaagaactgaacactgaagaagaaagcacgaagaagcgcgtcgctgcatttcgaaaatctttgtggtatgcacatggtctcctgaacaaaacacactatcttacctggctttaacaggcttagggtacccgaaaagaaccagaatggctttagcggggatggccaaatacctctcagagacggggacatgacggcttccatctcttcgctgcacagatctcggcttgaagctctaaatatccgtggtaagctcacacagcagatgcgagataacatctttcaacttgttctcgctactggcggctcgcggctttccgttccttcatttccaaccgccgagtcgcttgacgctttgatcaagatcggcatctcgaaaagaaccgaaacagatgcctggatccacccgtataccttgtatcgccaggactccagacctgaactcttgactgctcttactgctgctgggtgtgtatgttctgctattccgtcagtaggcaaggcgggtgtgctccttctagaaattgtccgagtcagcctggcagatcttgtaagcgtatcgactcatagccccgagaagaatcactaaccataacaggttgaatctgataacagcgttctgcgtgatttgcaatattttcaggcttctatgatgtggttggatattggcattttctgtggctataaacgcaaaatgcagatagcggaaagccacctacagccattatgcacagtatgtaccacgaccaatcggtgaatatttctgacaggatcaggctttaagaagggctggaacttttgaccgctcattctactcagataatcagccagtacaagccctaggtggtgaatcaatagaagacgcctggttacaatggatacagcaagagtcattgaagcggtaggcgggcactcttgagccaagttaacgctactgacctgagctcagccttgcttaccacctttttggacatgacgtggaggtagcggcagccatgaacaggcctgcattgaccagtacgccgagttcactgtgccctttccgagtgcccgtgatctttggcttgccccgacagcaactgcttggaaggaactcttggaaaccaagtactctcatgccgtctcctcgaatttatctttgagagatctattgtctgatctttctattttaaacgatctacctgtcaacattgacacaggtgtagtgaattccgctgtgctacacgggctgatgagccaagtcttgatgttccgccaacaagcctcgctctcggacagccgtaccaatgatcagcctgtaactaggctgtggctacagactcgccaggatgatttgtacggtactctgttgtctctggaagagctcaaggctaaccaggatattgctaggtcccaatgtatcaaaacagtgagcgaaaatatcgttgatgcgccgccactcgcaacacttatctgcgaatttgctatgatgcaccttcatgttaatttggactcaatccagcgattcgccgggcaatttggagaaatggaagcaaggcgcgagtacccgaagctccgtgagtgggccctaactaaagaggctcggacctcgatttggcatgctgggcaagttctacgcgcagctcggctagtgctaccatttcaacttcgagggttcgatagcctcgcaatctaccatgctatattagttctatgggtatttgggctactctgttgcggtgaaaaacagcgcgataacaacacaaatccaacaagtggccatccgaatctggtagtcagcctggatggcccagaaacggagcttattaagtcgttcattaaccggagcgtaggccaacatggcctgaccctccactttgccggtgctgagaatagcaccgttttctgtccactcagtagtccccgcttagtaatggatgtgggaagacaggtttacgaaggcaactttcaaggagcaactgattatgtgccgccactggtcgaaaacttgcgcaacttgattcatgagctggggagcttgccctaggaattgatggcggccaatattgtcaaggcgagcaaatcactgtggtgggcatagtttgtggggggcgcccacgcttcggcttgtccacatccggtggtcgtgatggtctcgcccgtggggtctccgcacttcccaagtctccgcttctgcgcaggatgacattgatggggtagatatactctccgttctccgaaccaagacgttctgaaactggcacttattctacgccgcttcgcaactaatggaggagaaaggggccattgagctagcagagagtgtggaagttggaaaacctgacgttgaactcggacaagttcttgtcgatggtgagggacaggtacagcgattgcctgtacccagcaaggacccgaatgatccattgaactacacaagatgggagaaggtcggtatcattgtgagctgttgctggttctgtaagtgattcgacactaggcgcggacgagatcttgtgctgatgatacctagcgacaatgtctttgtcgcttgttggggcctaggggcattccttgacgtccttttcgagctttacatacccgatggacatagtaccaatgaaatagtctggttgtctacgttcccatctctttttgtcggcgttggtcggtcaatccactcttcccactgtatgttccaatgctgacctagcaaggtaattttcttgttctcccgctcgctctgctttacggtcgaagattcacaacaatcctttcgacaatagtccttctcgcagccaccattggttgcgctgtttgcaatacctgggagcagcatctgggtctgcggatcctccagggtctctcagctggtgtaactgaatcggtaagtttcgtgcctcataccaagagttgtcaactaacttaggctcaaccaggtcctgcctctcattctagctgaagtaacgttcgtgcatcaacatggaatggtatatggcatgtattgggcagcacagagcaccattaccggatgtctcaatctagctgcttcctacgaagtggcagctcttggatggaggtggtactactgggtctttgcgatcacggtcgccgtcggccttctccttgtcatcgtcttcgggcttgaaactagctaccagcgcacgtcccagtttgtccatggtcgcatggttgtcacagaccagttcggcgtaactagggtgcttagcgaggacgaaacacgacagtatctcggcacccatggccacccatatagtcgcgacgacggccatataccggaagagctccggccaaagaagacatactttcaaatgctaataccatgggcatcgccaaccgaaagtcctctgatcctcatcccccgaaccacgcttcagatcttctcagccttcttgtcccccggcatcctgtacgcaaccctcgttgcctctgtcgtcctcggctcctcaatcggcatgtccctctcctacaacacagtcctgcagtacaactaccattggcccgcaaaatccattgggctaatcaacctcggtggtgttttcggtggcttcggcggcatgctctacgcaggcttcttcggcgacaaattcatcgtgtggatggcgaagcggaatggcgggattcacacacccgaacaccgcctccctctccttattctccctggtatcctgggagtggtggcccttctcctctacgggctcacagcggatggaagcgcaacttggagcgggccatatatgggtggacgctcttccaaatcaccttcgtgtctgtgcttattctgtccacgtcatttgcgg

SEQ ID NO: 15490 - DNA, 655 bp, Emericella nidulans
gccccaatgctgacccacccgctcaagggatggtggctgctatgttactgtttgagaccgatcgagactgagccacataacgcaaagtctagatagtcactaccttggcacaacgtgctagatcgattctcacatatgaaaggtatactggcccccatctctactgtgacaaatccaggatacacaccttcgactaccgttatctaattttgcactgatgcacatggtgcaggacacctctaatctgactagtgcaactctttatctcgtgaacataagacatacttgtgtctaccatacctagccatgtgagagataagtgaaggcactccgaccatacacactgctagtacacctcgcacctgcaaaaatgcccactttcctgctgccctgatactagtcatgaccagataatcgttccacatgacatattggcgcattgtcacatcctaatgtgaacaagaagatgtccacagaccgactgtgtatgctccgcattgtaaccgagactaatatctggcgaccgcgcccaaaggccccttagcaagaattgatgctcttcactgatcctccccttataaatactgcgggaaaagcaagccaaagatgcttatcccaatgaatgcccaattgactgagagcacaactgtttacg

SEQ ID NO: 15491 - DNA, 2796 bp, Emericella nidulans
tacggcagataaatccacccaggaactacgaatatgaaaaggcaccaaggcaacgcagcagactacaccgaaagacgtcaattagccccgatttcatcatttcagggatcattctgggtccatgcggtacctgcggatcttctccatagaaaagcgcctttcagaagccgatctggactatggtggagtcgtcaatcccatctcgtgattttctcctccggcgttttctccgcgaacaactcctaaacaagccagaatccggattggagaaatggcacgtctcctcaaggccctgcggaatttcctggggacgaactcgtcgtcaataccgacaccgtcgccgtcgacgccgtccccatcgccatcaattgcaagtgctcgcacccgctcaatcgatacagatttttccgtatttcgaggtacctaccatgtccccaggccccgcgacgagcccagactgacgtatccatatccgaatattcgcagagggcgatcgcgttgtgatcaataatgtgaaaaaacgacaaccgatgttgacggctccccttcgtaagggtcataaaatcgacacacctagagggatcctggaccctgaccggattattggtcggggacctcgcgaaattatccctacgcataaaggtagaggcttggattctttcttattcgtgtcctgttggatagatgctgatgctatacccagggacgcgcttcctagtcacacttcctaccctcgaacaatatatctctatgaccccgcgccacgtaacgccggtatttaaatatctacattttatgttgtcgcgagccgttcgttaactggtagtttatagatatacgcaaaagacgcaaacgtgattgtctcattactcgatttgcacgtcgcgcaacccggcgaaggcgacctcaccaatggccctgcgccgctacagattctcgagtctggaacaggtcacggcgccctgacattacatctatcgcgcgcgattcaagccgctaataccctccctcctccgctgccgacagcgtcccaggtgaaatacctcgaacaactccccgaagaacacgagaatgcagaggaagatttagagcaagaagaccaagaacaacgacagcaacaagaacaagaacaagaacaatgggacacatggcgcgccacccgcagagctataatccacaccgtcgaagtctcgcccatcttctcccgtcacgctgaaaaactcgtccgcggcttccgccgtggtatctacgccggcaacatcgacttctacgtcggccgggtcgaaaactggatctcggaccaaatcaagaagaactcctcacaacactaccagcctttcctcacccacgccatcctcgacatgccctccgcccacttgcgcatcccgcacgtcgcatccgtcctcaagccaaacggcatccttgccgtgttcatgcccagcgtcacacagatcacggagtgcgcgatgtatatccgcaagcatgggattccgctcgagctggataaggtagttgaactggggacggggattagtggcggacgcacgagggatgtaaggtttgcggtgaagaaatccaaggcagacccaggatgggatagtgcaaatgacccttcgggatctgaggttatggctgaggaaagcggctcggagtcagttggtggtgatggtggagaaccagcgcaggctgggcctgttgctaaccctaaggaagagcccgtccttgtttgccggccgctggctgggcagttaattggggctggaggttttgtggggatttggaggaagttgcatattccctcatcgtcaggtgtttaggctacttcttgtgcccttgtattatagattttgtatactacgagcttatagataatgcatgaagcagatgtataacagagagcaccttgattgtactcaacaaactacaggataacaataccgaaagcagagcaatcacagtagtgaccgtgtctcaagatcgtcaagttataagcaaatcctaatacatacctagagtaccaagagcaaaaagaaagcgaaagatagactgacaccacgccgttgactattcactttccaagaagatgattgaacacgcaggtgtgaactggctaagatcccctccagccagatacagtaccagctctgacagcacgaacgaaacataaatcacatacaagaaagatgatgagacagacaggataaactgagttaacaccgcagacaaccaggcagacacacgcaaaagccccccaaagcgtacggaaacgtagaagtagaagaaagaattccgagataacaagacaagaacaggaataaccgggctacacaaacaccagtcttcgtaagatccgacatgacatgctccgctcccatggtctgaagagtaaagtaactttgagccatcgctcagtttcgttgcggtccaaaatccgcttccacaaccttgccctttttacctttaactgaaaactccgctaacaatgcgatatgatcacttgggaaatgatagttggggaatccaggcaccctctgtagatagtccttgtccacctcgcctagtaatcccgagacgtgcaccgtattcgatgagtaccagatgtagtcgagtatatccttgaagtcgggggtgtaatttgtaaagctcaattcgccaatggcaccgtatgccgacttgagcttgaagggatgcgtcatgccacctttgcttagatttccgtacatacgtttctccaggtccggatgctcttcaatcagccctccgttggcgatgagggtgttcgcacggatccagggc

SEQ ID NO: 15492 - DNA, 397 bp, Emericella nidulans
  unsure (1)..(397): unsure at all n locations
cgacagcgcaaacaaccagttagaggccccacagcacgcgtcattcataaagcggcgccaagagcccggaaaggggaagagcaaaacaaagganaccgccggagaccgccccagcgaaaacgaggaggacagacaaaaagcaacgcaggagccagagaaacaaaccacaccggacaagagcaccaggagacgaggacaaccagaaagcacagaacaggcagcggcggggaacaggcaccgcacgcaaagaggagcgcactgaggaggcaatagccttgactgcgatgcccacacaggcaagacgcagttgggaaaaggagaccgttgcacgcacagggagcgcgaggagcacggaacgggaactgcaaaagccacaagaggacaaagcggggcaaca

SEQ ID NO: 15493 - DNA, 471 bp, Emericella nidulans
  unsure (1)..(471): unsure at all n locations
gacagccgccgcggcggacattgcgttatgggggcncgaatatactactttcgcgagangcagaagnacaccgaggacggggaccgacgaagngagccggcccagcgacggcgggagaagacgccggaggagaaccggcagacgaagaancggggacgggccacggagcgcacgaccagaacagagcaagggacagaaacaagcaaaggcgaaaaccacaaaagcncaaacaaagaacggaccgtacgcaaaccagcaacaccggccaacgcgaggccncggncacgggcgaaaccggcgccgccgcgcaagcacgcaaggagacacacaagaaccgcaccgcagagcagcagaaggaaacaggagaacgcgaacccaagaacncgcaagaaacacccggcccaacagggcaccagacaccccaagacagcggagccggcgcggcggaccngagaccgccagacaacgacc

SEQ ID NO: 15494 - DNA, 416 bp, Emericella nidulans
taggcgtttatccaggaccttcatcgcgctcgaggtgctgcctgctcgtcctcgagtcttgaattgaggctgctcgctggtacaggggtggccagtgcgtcagacaagctggcttctggtggtcaggagcctatataggccacctaaataatacgtgagactgagatactagggtcgcgtctatgctgggcagaacagatagggctggtgaggacagcaagtctatagtccttgtccaacatacatacgctcatacgggcgctgttcggctgaggcacattaagacacatggaggtgcttgacagtgagagcccaaggtctatagccatccagacaaggagtggcctggttatacttgcccagagcattcaacatgagttcacacacagggaggtattcgtcagactacgacagtg

SEQ ID NO: 15495 - DNA, 340 bp, Emericella nidulans
ctcgtccgccctgactcatgctgcatccttgctgaacttctattgctgaggcgtgtggtcgtctgccgctatgactacactatttactgtgaatctgagaataacagctgagcggtattggctaccgcttacttcattcatcttctgtgatctggataccttaagcacattggtttctgtgtggcttattcttgatacaaacttgtgttgcttccagattacgctagttacattagctcttaggtagtggactttttcgatgtggctacgcagagtcgacttttacaagggccatgttcgatcaatcacatctgcgtcctttctgcatccacttgataag

SEQ ID NO: 15496 - DNA, 615 bp, Emericella nidulans
tgtaagccggtcgccattattcccgcgtactcctcctgtgcctcagctatgtctgtccgccgcccatcgcgccgtgccatgtctctccacatgcgcgagattactatatgggcatgaaggccagtagtacaccccgcgtctctattcaaatgacgtgctccccatccggctagaaatataaggggccgtgaggctgtcactggatgaccgcacactgcaccgtatatcagaggggcggaaaatgacacatacgctcgtgcggttttatggtgaagtctacgcaataccactccgtattccatgctatgatgaccgacagacggaggttatctgcaatgccaacacttggctaggccagggtgtacgcagaaaggggggcagtcagccacaggggggcccattttttcatctatggatgcaagaacggctccccacgaacccatggttgtagccattcatctatagctcggtatatttcgtagaccccggatagttgacgcactctctacggggcggctgatcacggctttgaccgacgaggaacttcgtcggtgattcggctaccatgatgcgaattgctacatttggatggccaccgtgagcttttgctatgga

SEQ ID NO: 15497 - DNA, 478 bp, Emericella nidulans
gctgctctctccgttctctgagtcatgtatggtctgggaatgatatactgaccctgtgggcttggcttttgctcatgtgatagcactagccgtgcactttatgcatacttttcacggacagagtaagctgagtgtagggccattcatgcatcatgtgtctgatctaactatcagataatctatactgttctcaagatcagtagatgtggcattatatatggaaacgctcagatggttaaccgtatgttttctggctcgaccaccttatgtcttgccaacgatggacctactctggaattgctttgatcacctcaagagcatggagtctgaaccgcttggtcacagatggctgactgacgaatatgccctcgtcgtccttgcactgtgacgccgacaccgagacagccggtaccttcatacacgactcggttgacatcgtaccctcttgaccgctcctggaccccggatagatctattc

SEQ ID NO: 15498 - DNA, 583 bp, Emericella nidulans
gatcccgtagctgaaatgtcagtgtaggacatgctggctggaagtgatgaaagacgcccatgcagatacatcatacatgaacccactggtcactgtccttctgcgccccatgagtggccgtggtagcggtgccagcaggacgctagtgttcctacaagcccgggaggtctaaatgccgcgtggctttaggtgaaaccttagggagaccggacgtgcgttactgtactgcggcattcatgcggcatgtgatcataggacgagtttaggcgtgtttgcacgggagcgcttgcatgtgccgtatgaaacctctgggaagacctgcaagggaaacttcgagaggatcgagctgcccctgcggattgatgaggggagaatgaccgattctgctcgttagatggtggtgcgaaaactgcaccagttgttctgaggatccataccctgtcccacgctagtccggttgcggcttatcataccgccacgagacaaccatcaaaatgcctgcctccgactccagcctgcatgagggatcatgtcatagcaatatagcactatggagtgtaagggctagcctcatacgggactg

SEQ ID NO: 15499 - DNA, 907 bp, Emericella nidulans
cggcggggaccagcatgtcgcaaggcgggccccactgtactgactccgccatgaatgtgactgaacgcgagatctatttgtctgtactggacgaggtcctgttcatgggcggaccatgcacttacttgagtgcagaggacgcccgagtacctctcataatctctcaccggccgcagctctatcacgaacccctgagatcggcgctatagcatgaatctcaggcgcgcactatattctaaacaagctgtacatagtagataggatacgcctttgatccagattacacatctggcccgcacagatcatagaggacgtgcccattatgcacatgacacagctgatctgtggagttatacccgtgccatcgattacgcatagaccgcttgactggggtccacaactgggggcattaggacatctatattccggcctgttgtgtttaacgccagcaattcttaggttcgcgcatcaaaaattgccgttaagatagtgtgatcttgaatttccttcccagaatcctttaattgactgaaacctaggttcccttgttttgttttcccaattagtgtgtaatccatcagtcgttgagtgacatcttcattagatcatcaagtaaagcactctcagtgtcctggttttacagcacaacctatttacatgaggggttctcaaatctttctagactttaatggatatatacaatcttgtggtgttcctcccgaatagaaaataaatacctaattgcttttcttatgaccaactaatactcgttatctaaaatactttatcttgtcttgttttcactaatttatatttctatttaatgttgcagcggtacttaattacgctgataattaacactcctactgtgttcataaatacggcattagacatttgattccaatac

SEQ ID NO: 15500 - DNA, 4686 bp, Emericella nidulans
gatcctggttagagatgtatctcggggctgtctttgatattttgcagcagtttggcacgaatggcgagtgtctcctccaaatctgatatgtatcgcgtgagctcgaatcgcttgtcatgcaacctggccagtgcagcatcgtctgaagaagatctccatgtctcgcaattgaaactgctcgcttggccgcgtttattgactcatcaagtatgaaggtatcccgtcttgtcgttcgcggtctgtagccagagaatcttaaaaatatggcatagtcctggcttcccttatcaacatgaattgattggcaatgttgcaaggattttattgcgatctggttctttgccaccatgtatctgaagggctgcatccacgacttcgagatgcaggcgcgatatttgcatctgtatctccacgggccaaagacagtagtcaatttcaggacttcttggaccagagcacctggacgtgctcgaatcgtagatggcgactgagcgagagagagtcagggagtggtaccgtcgacgtgaacagggagaagggcagattcacagcaaggtctcgatcaaaatagcataaggccttggggagaaacttatgggaatatacgggatatgccagacctcctgatttttgctggcaatagtgataaaaaaaatcaagacgagacggtgtaggccttctgcagggcaggagaagagaattaagccctaatcggcctggtcttgacaccgataaagttcctcgctcatagagcagaggcgactgccgaagcgggcaggcttgggcttcttataaggcagcctgagggaccgaaatgttggaataacgccttgcctaggcacttggctggttacctgggctgcgacacccagctcagcctgcattagtctgcataagcccggcctcacattgatctaaatgccctccccgctctgcccctctctaacggcctttccgacacaaaacacctttacacacattatttttatattaggaactggcaaaaagaaatccatcctcttgccagatattggatatgtacccctggaaagctctctcgacatgggcccccttcgaaatcgacgctctcggtcttgtcactctcctcggcgccaacgaagttgatatcgccgtcggccgtttagcgcccagctactggctggaatatatgccgctgctggcagggttcgtctttgccggcgatcgattccgcgctaaacagcctacgttcacgctatataacgtgtccagcggcatcgtgacaggaacctcgcagcgtggttcacgcggtggatgcagacgcaggaattccatgtctcgcgcagcctcgtatattgggaggtcgacaagacgccccggccccggtggatgtatttcatcgtcccagccctaatctcagctaccttcaatggcttcctgcttgccatgacggtcttgtctggcgactggtacgggtttgcgaatacgatagctattatactcctcatcatcgtgcgcgcatacatgattcaggagaaccgccacgcaatcaataaaaccgtcgcggctgcaaagccccttcctaccacctttgcaggcgcgctagaagaatggaaagagaagcgcaagagggatccgcaggcgccggcgctgcggcgggactcgcgacagtggcgaccagaggtcgccaagatcctcgtcgtcatgcctgattcgcgagccgtcacgatgtttatccccgagcatctcctgcgcggtgtcttcgtcaccgagacgcccgtccggtcacccgggatctaccggctgttgcagtggaccggctgggtggcgtttaccgtccacgtcgtcacactaggcatggcccaattggcgacccagctatatgtggtcgcactgatggtcattccaaccgtcctgatatgctacggctatggttgtgacgactctaggattgcaaaagggtggcggtggctattgggggaggaggccgcgccgtacgtctaccaagcgggaccgcagctaaaagcaactgtctttgagtggccggaagatgtggaatttgccagggatggcaagggcgtcttgtacagacgcgatccgggaccaatttctccggacaagcgatcaaccgcccgtcaggacttatacgcgtggctgaatctgaccgaagaggagcagaggagcctctgggactggcatttgctgcctcatagacggggccacgatgactcatggtggaatatctttaacgagaagcagaggctcattagggagcgaccgccggatctgaaggccctcaaggaccgcattcaggatgagctcagagcaccaaggttcaagcgcagagtctcaaactggcggtataaggatctagatgttgaaaaagggtttaagtagattaatgtcgttccaagcttccaagttggccttcttcatcctctctttttctttatccttctctttttctgattgtgtaagttgagtctcattggctgggcatatgcgctttttcttctctacatcttctctacaagggaaaaagggctcctaaatgcttgggaatgctatgtcgatcacggactagaatgaatctcactatactgcaatgaccagacattatatttctaaacaagaattccgacgaaagaaacttggtcaaaggtggttcagaggaaagcgcagctcgatatccagctgagcaatctacgagagttaattggctgttatagaaccaagtttacttataccaccccgactttggaggtaaagaaagggaattgcagccgatttcgggtcaaatggtggcgtggccagcttcaatgaaatgattaaccagatcgtcatcctatacaagggttatggtctcctccggcaaggcaatatcatgccaaacctctttgaaccactgatccctgctagcatttgacccatgagaaatgacagccaagtcaactctttcaaacttgttttcgtgaggctgcagcttcgtcaagaccagaaatgcatcagacggtatacgctcatccccgactatctcagggcgtctctctcgaggaacatgaagtagataacatggcgcaagcctgcacgcccctttgccaatgcattccagaacccatatttatctcggtcgatgtaggcatccgcatagaaggacaacttcgcacccataagatccaaggcaggctccgcaaatgtgcatcttgtccagtcttgattgagtggcccgtcggcttccacagtcactgcgctgtgtgccctgcgtcttcgtcttacttactggagtggcgcaacgtcgacaccgcgtccgccagaatgctgtccccaacgatgctctaacacggatgaagcccgaagtcacttcgcccacgggttctcacccgccaacgcactctgcacgttctatcttctcgttgaagaaggtcgagaactttttgccgggctcaataaacccgagtccttcgggggcgtctatactcgcccaggaccacgacggcgctcgccaatcactgtctccccatactggccggggccgagacgggcgccctctcacataccaaagcaatccttcttccatgaacgtcgctcgccatattccagctaggtactcgcttttcatattccgagaaacgatttttgcggtgacagatatagcagaaaatctgtcggacggtaccgtgatatccagcttcgcatagctcaccactatatctacccagttgcgatagatcagcatcgtgaaatcatcaccaaccaacccgccgccgccctcggctgcctttagctcggacagtgtcttgagcttggccacattcatcacggtaggcacgggcttgaaatgtggtgctatcgagtctccgccgcactcgtacgacaggcctccctggcagccgacctggaactctaatttgtgcagaagagaatccgtcgtgagagcatccgttcctgatacacccacgatcgcgtgaagagcgggaagtgggccttgaacgatcgttccggcgccctggcaatcccgtacaccgagatatacagcaggccagcccgggtccggaatcaggatacaactgtccggtattgtctcagaaaaacagccaccagaggactgcgctgacgccgacgcagagataactgtttcggtagatctcgcccattactgccatcttccatagtcatatccagggtaaagctcgagcccagccacttgaatgccatgcccgccagctccagctccgtataggcgtagactgaacccactccggccagcacagccgcaagaaatctgcaccctctacacccgttttcagctgacgaaaccatatcgcggagcgtaaaaggctctgtcttgtataccgccgcagcctgtttttcactgtgcacaagttagcattattgtccgcgcaagtttgtggtccgtgaaagtaggagctttgtgtacactttcgttgcagatttgatcttagacttcttgctacagttgagaaggcagccctggtgaactcagtttgaaaggggtatatggtatccagacgaagacgctgctcataacgcgcgggcaggtttatggctatagcgtcttggccagatacgacagagacctgcattgtatgacaaaacaaacagctcagttccaagtgccttgttctcgcagagttttgactttcagaggaaagtgaggtatcttccaaagtccaaccaacattatct

SEQ ID NO: 15501 - DNA, 607 bp, Emericella nidulans
  unsure (1)..(607): unsure at all n locations
gcctccttgcacctggtccaggtacctctcctagcccatgattgccgacgctcatcttcccgtattcacccttcgcagcacacccgcaccagctttgcctcttgctcataaccgctagctaacaagtgaccgcagacccagatggagactctcaaatggcgtcatgccctgattccacccattccttctctgacatggacgccgggtcgcgcaccccaacgcaacaaatgcagaccacatgtccgcagtttgcaggcgcctcggagctctctccgccaggctcgcatacccagccagccgggggcatagcagatataacgcagggtatatccggtaccggggaaggaacggaggagtcatagcaccccggagcgtcgtggatgaatcaacgagcagagaaggagtatcagcgcgcgatggggtacgtgattgagctggactggagcttgnttagttaccctgttatcatgtcgggcttgcttatcttcagngtagcngcgctgatatgtggttctctgtcggtctattcatatggtgaaaagatacggctgagcgctgaggctatactgtttgtgagatgaatcgagacctgtcgccagcgcgattg

SEQ ID NO: 15502 - DNA, 4313 bp, Emericella nidulans
tccactttgtgaaaccgttcttcaggaagtagtcgtagcgctcgcgacctgggccgcggaggatgttcgcaacgatgttcaggcgttgggcgcgctcgtgagcctccttgacggcggcatcaatttctcgtttggagggaccgcggttgacatgtacgcccttctggctggttttagatttgctcttcgctttcgagctgttggcgatgaaagagcgcttgactttgtcggggtggagcagtcttgacattttacggtaggctttgttcaaatcatcctgattggcgtgtggcttaactcctagaaagtctggacgttcccgttagagtctgatttagttcaatagggctttcgagaggtaccgtaaaatgtaacatttgcgccttccgttgcggtaacttcatcatggagacggaaaatctcatagtctgagtacagaaccaaagtttagtctgattcgcagtgtcaattgacattaaccgaccttctttcgtccaagccgcagcgagaacgatgaggaccgtgaacaggaacagacggagtgttgctgtcttcattgtggaaacgttgctggagcggtcaaagctcaaaagcccggcgacgttggggcagatgcgatatttttttgtgaaaggacgaataagacgattgacccaagagtattattccatcatcagcgctgaccccttcgatgtcgtttgtctcttgactccaactgagcacacttggaaattctggcctctagaaaatatacaggaaggcggtcaagactgctccgctcgccgcaagacgatactgtactaggccccccaattgatagtgggtcacggtccagaacaaactactccagattggacctcaagagtccttcgtagtagtctactcttgcctagtaccacggactctcctctacagggacagctcaagtacgtcttaggcatgtggaccaacctgcagctttgacgtgtctaccccaagctgggcgagagaggtgtttcaggatgccctacggatcattgctggacgccggcatgtccactgcttgtacgccgacaagatttgcaggaacctatttgacaaatctcccgcgagattgctttttatgttctcagatttcaaattctgtaggctggccctggtaccgcatagaagtatccctataaccagcagtcgactggcatgacaagtctattgggctgagcgccatattggcgctcaccttcttgttggccaaactaaagagcactatcgtcagcatggtctgccaaccaggaggtgtagaattaagcgatgtggttgataagtcatggtggcgcaagcctaatgtagctggtagaaaagacctgaggagctgtggcatgccccatatctacgggcattactgctccccggcagatgtgtgagattgaaagccaaccagttcttctgtacgcatttacctcttagcttgctaggacgtcgcattgcattgcaatggcgacatcagcgacagcgaatacacatgtttacttgcagaatgattgggcgttttaccactctaatgggactccaggcactgttccctgtaatgatacctgacatcataaataatccacgcttgaaaaacgacgtggaccaatcgtgagactgaacctagagcaatgagagctataccattacctttagtaggacgagttatagatgtcttgggtcgtgcgccgggtctataaatcctgggtgcgtccacctcacctaaaccagtatctttactatcgacaaccccaggatggacctgactctgaaacggattgatcgtctgcaagaatcgaataccttctagttctcttagcctcggcccttagacggcgaggctacgagacattttcgaatacgtgacttttggcattgaccgatgagcaacattccgcactcagcgaaaagctctattccggccgtcacattgtcatctggaatatgatcatcgcaaccgggattacaagctcagttcgacttcattaattctacgctcacccccgtcaactgaagacattactcttacaagaggatacttctctctttgaggttggggtggctggcggcaacaaaaccgataagatacgagggcccagagaggctaaacgctttttgttcctgacaacttgacacctgggcaataatttcagcctcgacctaggcaccccttttccttcagctctcacaacacatttcttccaatcattatagaacttcttgtctccttttcagagactctatactttctctcttatcgaaatcggatcatatcttttacgttccacaatgagctcaatccagattcccatcgacgcgattacctcgcgattcggagatcggttcaacagtcttcgctcccaatcactgggatcacggtttgccaatcttcgtccaatttctgagtttctagacttcaagcgactttcaaagcctgccaattttggcgaagcccaaagccgggtcaactacaatctgtcctacttctcgagcaactatgccgccatctttgtgttgctcagtatctacagcctcttgaccaacccgctgctactttttgtcatcttcctggtcagtggtggcctttggggcattggaaaacttggcggccgtgatctcgacctaggatttgcccgatttaatacctctcaactctacactggactgctaattgtcgcggtgcccctgggtttctgggcttctcccattgccacgtttctctggctcattggagctactggtgtgactgtattcggtcatgccgcgtttatggataagcctattgagaatgctttttccgaggaggcggtctaggtggtcggccgcgagctccttatggtatgccccattggggaagaccaccaggggcacatctggggagacagaacggaaggcggggtggacagttggtggatggtgcgatgcgagtagaagagccgagtggtgaagcggagagtcagtttggtttgcgaagtaatcgactggatacaagacaattagctgggttacggggtaggggggacatactgcggagctctgtgctggaacacgacgacaggcagggatcatttgacggcgcagattacgatatgtacgaggacacgaataaaacagttgcatatgcggttcagttggcgatggaggacaatgaagactggttagtggagcgggcgttggagcgcattcgacgcgcacattctgaagggcacaagaacgtcacgctttccaatagggaacttgaggcgcttgagcggaggcgactacaggcggcaccagatccggctgaaagtcaacaagtgaaggggtctggaagcgatattggcgccacgcccgcttcgccataccccttggataccagtatctatgacacttgggccaggacaagcacttcagttagtccgcaatcgtcgacgacgacgctccgatcaacgcaccagccagcttaccttagctctgcgagtcgtccgtcggtgtttcatgcgcctcctgcgattcccggctcccttccagatgactaccagcagatgcctctgcaccaaacagcgcaactgagcgagtcccgtcacaacctgcaccatccaatcgacactcaatgcgggtctctgactcgtctagcaaagacgccgtataccagcgctcggtctcacgctttgcatggttcgccggaccttggagcactggcagcgagattcgttaccaacagagacagcgagagatcgaaagcagccctcgaaaacgcagcccagccagtagtggcgatgacattccagtgatggaagtcataaaacacaaagtgcccagctcacctacccgtgtgattaacaggggcattcgccaacgcgtgagccgaccatgaattcccagctctgtgcccttcattatttgtttagattcttgtttacggtttaaactcgcgggcatggagtttaaatagagggcttactttattcttacctacttataataatctggacatagttttatccacttacacgatttctatagagaaaaaattccatgtagtatgaggtcctttagagcccaggctctgaatcacgaagtcttctgagagcgcggagttaagaaagccgggttccggcagggctttcacaaccacaaagatgacgttgatctccgaaggcagcagtgaagtcacccctgcctgcagatccgaacacgacttcgccatgttcagttttagtcagtttagtggctgattcagaccagttcaccatttgccaagagaaacggctcttggaaacaatgagtaactcctctgatcactgtgtcgtgagccagcccca

SEQ ID NO: 15503 - DNA, 576 bp, Emericella nidulans
acggcgggacgtgctgggagagtgctatcggatgtggctggcggagctcgggtctccgggggcgcgctagctaataagatacccttgcggacccctcctggccagaatgaaatacgggtatgcgctgcctagctataaagagaaccatccttcattttaccaaacacggggagtctgtaaagctcgacccggggataccctcagattgcctaagagtctcagagaccttatggcagggacaccttgacgcctattgagagagaccattgacacttcgcccagagacccgactgataaatgagactccgggtcatggcgcataactctacagactgctctgatccaagcacagtgaacccccaacccgggtaaatcccccctgtccgaatagatagactatcaatactcttaccctgacttaactgactgcgtctgatacttaaataacgtctggctatctatcactttactgcatctagcgccattagcgaaacactgcattttcagttctataataggcaagtgcgccatattcggctaacccttgccgcaggcatgattgttgctatcatactc

SEQ ID NO: 15504 - DNA, 618 bp, Emericella nidulans
  unsure (1)..(618): unsure at all n locations
gccctgccctcgaaggaaggcctgcgcgggtggagcttgtagcatggtaacacgacggggatccaccccaggggcacacaaggaatataccgtctctgccggcctgagcacgaacttcctaggcccggtcattggtcggtattcgcacagtcgcaggatcgtgtatcatctgcatactatcggcttcatgcgacttcagagacgttgtatcagctggggtagagtgatcagtcccatacttctacctggtgtacgccgggacccctacattgttccaaattaagttgctgagtaggtgttaaattctatgcgggngnnggatctacagtctacgattcggaccagcgaggagatcatctccgctctcaacgcacattgtcttgtattcaaagactngggatcagcaagggattcnncaactgtattccatgctaacggccgtaattctgtgggaaaccataccacctcgttcctttgccagcatttgcttcgcncgtctgttctggggtattgaagcaagcctcgaattttgttcgcagagggaacgtaaactcaaacccctgaagcaccttcccccgcaaggtgttaacgggataaggtgaactttgcttggcattg

SEQ ID NO: 15505 - DNA, 3847 bp, Emericella nidulans
  unsure (1)..(3847): unsure at all n locations
accgataatgaggggcgaaggtgatagcgcattataccctccgtccacactccggagtatcccgactcagtcctgtaccctaggtatgaggagttgacaggcttccctcgataaaccgtctttgggaatcgcgggaacgtgggtgtgtttgtttgccttgctcggtcatactgactgttcaaattagtgctgagaccgagacgagggtgcagctagatacataatattaatacgaagaggagtctacaaaggatggcaggagccaccgggaaaatcaaccgtaccgtggcttcctcgtaggtcacctccatcgtcttacatcgttcaaagaaacaagaaaagccggatgcgcgccacggggcttgagcgttaaagtttagagccttgatcgctggggcctgtagggtacagcacatggaaagcgtccatcaccaaaaattctcatcgatgtggaagttatgtctttgtgagagccgaagcttctccacgttgtccagcgtgacctgaattcagcattattcatccctgctcaatatgggccggttcactcattctttgttccttccatgttgcgctcgggagacgagatgaggctgaggacacggctagggtaagtgggttctcgttgggtgcaaacacagtagcctgaggcgatatccttttctggataacccgagggaccgggatgactcggatgagcagcgctgggattccgctaccgcccctggtttccagtacaactccagtaagaaagggggcatgagtccgagagtgtgatggatagaccctaaaaaaaccatagggtttgctttttcttactggaaagccacgagtcaaagatcctgactcctgaggaggagaccaaagcaaacggaatcggacgatagctggaacagattggatagcgtagctcccagacaggggtcttctttagaaacaactcatttttgagaaagggagtatgggtgcagcaatacgtccaggcggcgtttgctcggctcgtgccatctaggatataccggacatgctccgctgacaggggaatctggaatctgaaaaccgactgacatgggaagcagtcctgtttgaaatgtcgaaggtgaacgaaccagaatttcggcaaaggaagtccagctgagaagggcagattcatccgggaccggcgtctcattggaaggaagcttgaatcgaggatttcaatgcaagcccactctctacatatgcaagctgcaatgcaaggtgctcctttacagtcacagtcacatcaaatcaataccgtgcattgtggtagtatctttcgggttagcatgatgccggccgcctaaaagcattctcctgacggattcaatgtcctgaagctgcacctgaagccgcagctgaggctgcagctgataggggccaggagtcagcgagttcaggatagaggttgcagttgagccattgactgcaaatgctgagggacgggtcggacaaggccccttatagagaaagtatgctccgttgagttcctttactttgaggggtgggtagcatcgtctcgatgctgggagcctcggactggttgcggccaaatcatgatctgattgaagaaccgagtaatattaatcttgcctgtgacttgggaagcgcagggccacgcgttatgctcgcttattgtataatccgacggattctagaagtaaaatggttcaactctcgtcgcacgcagttgcccaacctggtcatccgtatcgatccgccatcgggcaagctgcttgactactcggagaagtactccgtcctccatctgagtgataagaagggttaagtctccccgcctggcacaccgggatgattaaaaaaaaccttttcagcacggcatcggtatagttcggtaattcttggtcttcaagagacactgcatattgaggattcgtatctagatatgatcctgtatcaaatccaagctagtccactgcagggtccataaaagacgttgggtacctgtttcattgtagagaagatctcagtgaactccgtagagctggggctcagtggctgacgccgcagtccgtagatctgatgtcgatgcattgcgcgtacaattgccgagcgtccacgctcactctactcgagacaaagtccgcaaaaagacccctgtgatgcatgaaccaatcgtaacagaaaaacatccagggtaattgaagcactccttcgttcttttcggcaacgctttcagcccgtgaccggaagaggagggctaggatccagcaaataggaactcagggcatcagggccctgagggcctgacgctccgagaaactgcgcaggctgacaacctctccacactgcactcatagggatcctgccaaagcttgtctacaatgtccgtctaaccctaagttcgttcatttgagccagaagggaaagcctatatcctgtaggaaagaagacccgtcaagactattcacgaattcagctctgttgctctgttcagagcatatacaccagagtagttgatctatggctggcgcagtatgtgacaagatgacacggccggaaccggactggttcagagtccaaagcccctgaggaataccttgtaggatgcccaaaggatctgaatttttgtattcatttttcgtactcaatttcactcattttcgtattcgatggcttccaagaatagcatagacctcgctctcgtaattgtactgcatatggagttctgacatgcccctggaccgatacttgggatgatgaatgtttgatatccagattcgaccaagtcttaagagtggagtcacaagactgagtagcgtgtttcaaatcactttagcttcataccttgaggaatgtggcggttttggtggatccatgggtcctccaactgcaccgaagccctttgcctgggctgcggggtgtcgtccgactattgggcggggaacttcgagattgtgggaagagacaaaggagaaaagcctggcaagggaaggtacagcgcacctctgaacttagatgctcaagagtcttgaggagtggaagggttccctccccttcccccactgcagacacggggaacccttgcgggcagaacctcaaagtccgaatcaggtaaagcgtcatcaggaaaagcttggtcattgggtcaagatgaattgtgcacgcgtaacgtcctgtggggcagactgtggggcacaatgcatgattggatgatcgaaaccgggccaagctcggctatcgattatctgccgtgcctggggaagccctgtttgatgaagtgaggccaagcaagctacttgagttcactagggtctcctggcgggacagaggcgttcatttccgctgtcgaggccggctcggtgtggtgatagcctgggtggcgttggtggcttacaattgtcctcgatatcctcgccttatccatattgctgaccacgtccattggttgaataccagccacgtcaaattttgggagtctgcggcgaatgaacgtgaacgctactcccaaaactgaaaatgaatgctcgttcggtgtttgttgaaccttctcaatcagcggtacgagtccagatttcgagaactcaatgaccaacccaatttcccggccgtcacgcggtcacgcacggatatgtccagatttcaaggttagaggtcagggttcggggttgagccgctgtctgcagactcgagagtcttggaatcctggcaagaagcggcctggagacggcctggagacngagctcagtggtctgaagctatctaagctcatcacccacccgagtcaagtcggtcgttcaacgccaatcagcgacgaatctgcccgcttggaatcgacccctatgccagaatggacaggatggggccc

SEQ ID NO: 15506 - DNA, 2921 bp, Emericella nidulans
ctatcgcggtcatggctaccgatctggatcatcttcccgcggctcggtcttctcggttctactcgattctacctcatttgcgatcctcataccccgcgcatgggtattgcgctcccgcttcctgggaacgacgatcatgtacattagacactgcaataagggcgcttttcgagttgcctctatttgctatcatatttggtgctgtataggcaatacggtgttcattctggcgttttagcaaacaagctcggtcaatcaatatacatcattttcctcaatcccgtcgctttttacatgaggctggtttcctaatcgtacatggtatattatcggttatagtgtctatatcagtcagtttgattcacttcccggcgcctcagctaagtgagcgcttctgtcacctggagtcagaacctgcacaattccgcaaagagagcagaaccggcccgcattccccgtcctgcccctctcttgcctctgctagaggctcatcttgtcagatttgggctagtgacgaagtacgactgctcccataagtcagtctcatagggcttctcttcaatgatcgcaaagcgcggatccgctccttgtctggcattgtctagatcacaatgccggggtcagctgctgaacaaaacctctggtacctggccgctggtatccagaaatgcgtgtggtactcgtttggctcttcttccatcgcttgtcgtcgcctcacagctctcaactgatttcgctagccaacgagtaccaaaagacatcaattaccaagtctgccaggcgcttgaatggccgctcttggtgggtgcaatttgttgcctcttatttttgtttccttttttttaattaggcgctttcccttcctgactttatataattgaccagactgctctggcggacactgcagcaggtgcagcaggatgcatatccagctcccgactcagacacaattctcatataagaatcaggtcactctgcaaaaagtctaggtaacacaattttgtgtgattcatttcgtgacagagaaaggaggtttatcaaacaaggcgtttctgcagacccgcccagttgcaaagccgcagtccgccccattcggactatatcgggcggtgttgatgaaggacgagggatgtaatcgccgttcagctcaaactaacataccattggttgccgcgctggaccatcaagggaaaggtccaaaaaagccaagatccttgtcacaaccccagcgcctacatcacaaagtgacagccatcggtgcctcctgattggttgctgaagcttccccctgcggcatcaaacaaaccctcatgccaatccaacctgacgattctgcagatatctgggatcagagtttcgagtcgacttgcgtgcacctatcatctgtcgccgtcacggtgacttgatcctgcagattcctgaagattggtggttcgtgcgactacaaatgttgcgctgctatatagagacgggccatggagccccccgcgcccatttttacccaaataattcccgtctctcgcaggtaactacattgttataaaaagactgaattcgattcgcgccgtcgagcccattcgcattttgttggtcatctcgattatgcagttctaagcgagttatgtctcctacgtatctatacagctctcttgtggtctccattcttgtcgcccagtcggccgctcagggtgaatacgatccaaatgacatcgaggctttaaatgctgctggtgcagctgggaagtcgggcggtggaggcatgtccactggaggcatgattgcgctctgtgtgattgttggagtggttgttatcttaggatgttcgttcttccctaccggcgcccattcattaatgcaagtagtcgtaatgctaacatcctctccttgttacagtctcttccgccgctctcttctacatagccaagaagcgtcaatgggctatgcgcgaggcgctccgacgatccgccaaacaagtggttcgagccgtcaagacgcctctcacgccccggtttcccagaagccaacggccgcttactccggatggtgattcagacgccgcggatagatctgcaccaagagtgaagccggcgaggaagccaacggacgtggaaaaggacgctgtcattacatcgaacgaagcgtcgaagagttcagagaccaagcctcgtggctggagctcttacttctcattcaaccgctcgtaatgccagattccgtctacgaactccatctttaacggcgatggctggcaagtacattgcgtctcccctacgccggttgtaggacgggtattttgtacttcattgttaatgcgggatctttatgctgtttttggtaatctggggataataagtgtgcttctctactcgtggatatatgctagaaagaggtcatttgtggcttaccaaaacaagactatgtttgcacctattagccttttcatgtgaagataccaagttgttatgcattttactctagctgattcccatgcgtaaggtaatcaatactcaaccttgtgcaattacacgttatgctcgttgtccttgccatagccagggcgcaatttcttcagcaagagccccgagtcccttgaattgccagcagtccggattcgttttcaatctgcggtaatgattgtggagtgctttcttgaacagaatccttcaagtgtcgggcaagagcttaagaacaccgcgggcatttctcaatacggacgtggcaaccgcttagggtttgtcttgaccaggttgtaaagtagattgagatatacccttcttgattgaaaaacccgcagtgtaagacgcagaccatgacgccagcgcctaaacagattgtcatttgctatcatagtatgttcaatgccagaagccgtatatgcaagaaaataaagccagaacaacaggtcacatgtacaagtccca

SEQ ID NO: 15507 - DNA, 1887 bp, Emericella nidulans
ctccgtgacatctctttccacctcccgcgaatcatctcccaaagagaaggaacacttgtcacgcatcactaagcgccacttaacaccctggccgcaagacgataccgccagcgcaagctcgacaaggtagctcaactcgaggaggaactggcagccgtgaagcgcgaacgggacgaattgaagatgcgtgtttccaagttggagggggagactgaggtgctgaggagtatggtcaaagataagaattaggactacgtagttaggatttggaaatggattgttctctggtgacctgaaaaacgtagcatcagtgtttatggtcccgtacttgcgttatcgccttcattgaccctccaataaaagcaatgatgtttctaaccatgcctgaaatggaaatgggatatgtgtacataacgcctagaaggatacgtacacattcaatgctttaacagcagttatttttgactgagaaatttccagctcgattacgagaaggaactcggtgatccgggtatgctacacctctgattccgaagaggctaggtatgaacctcgacaccagggaatgtaggtagggtagcacgaatagtggcttagcaggcactatgattaccagcacactaaaggaatacacatctatcatggcacaaccgcactacatcgcaaatatacaataggtcttaggccgttgtgctgaactaggtgctatcaagcctacctgggttgttctttactctaggtcccggataatgactgataggaagcatggcgttcaagtcgacttgagagaggaggaatggatagcgtgtcggtaacgcctgcttgggccagtatgcgtgatcaaattctaggatacaaatacagtcacactaaagttcattaacgagctcgaacttgaggtagatggtaacatggaaggtaatcgatctatgagatgaatgtgatatgagaatggtcaacctgcagtaggtatagaatgtacatgattaactcgccaaaaaccaaacgaatccagtcaaattaaaaccaaaaatcgctcagcaaagttttcttcttcctctttccaaaccagccccactgaggtagatcaggcagctcgtacccgaacagcgtccgtttcttccgctcccacggccatgaccatgattttgattgactcgagaaaggagatgtccagtgactccaatgccatgacttggacggcgtggcgtccctctggaacctctttatgatatggtcgaactggcggtcacggtcctcgagctcgcgttgatgcttctgagactgccaggcctgctgtttcgcatggtcaagacaccagactaccacatccccgcgacgacgcgagtcgtcgtgccaagctgagttgaaggtacgccagcattcaccatacgaggagcctcggagggcgtctttcagtgtaggttcgagttgcgcgaagaagacgaggtagtccggccattcatgaggcggaaagagttgggtaggttgtcgttgggaactcggaggggtcgcataggagggtcttcgggggatgtgtcgcagaccgccaaccatattgtcctgaaggaactgagttgggttgtcatagaattgatctgcttcgtcgcggtaggctgctttctcctctgcagttaagcccacaggcggttcgcaggagagggcccaagcgtgaatagtgggctctacgaggtgcgaacgccatggggtgctatgacagggcatgaggaagcccgtggtgattccaccgtaggacgcaggactctcctttggtaacgacgggatgtttgctgttccatgaatctgatgttgttctcttatatacgacaaaacagagataaccccagacgcatggaagagagtcgtgtatatagctatggcgacgtt

SEQ ID NO: 15508 - DNA, 3364 bp, Emericella nidulans
aggagccgctaaggccccgcaaagccgcaaaagagccaaaaagaccagagaaagagcatgaagtccgcgatgatgtggaaatggaggatgcagatgaaagaagcagccaaagagctccaaaagagaagaaggacgctgaggccgagggcgacgacaaggtcagaacaccgccctcaatcgtatagctgatgctaataccacatctagcctgctaagacgcccaagactggtaccaaactgaagctcaccacaccaaagaacccggctgaagagaagaaagcgtccggctctgccaaggcgaagcagagcaccagcaagaaggggaagaaggccgctgcaagtgaggacagcgacgagtcgagccccgcgcctaaagaaccagagcccaaggtcaacctagaggaggccaagaagaagagggagagggaaggtatggtttgacccaacgtcattgtgaagacgaaactaacagcctccagttctattcattcgccaccgcctccagaagggcttcatttctcgtgaccacccgcccaaggaggaagagatgtcccagatgtccggctatttcaccaagctcgagaaattgaacgatcttgaagtgtccatcatccgtgagaccaagattcacaaggtacttcggatgattatcaaacttccaaacatcccgcgcgacgaggaattcgacttccgcaagcgcgctctagacatcctttccaagtggaagaacgtcctcgacagtgaccgtgcaacaccctctcaggagaaggagaaggagaaggaggagaagcccaagtccaacggtgtccacaaggaaaaggaaggtagtgccgaagcgccggtcaaggcttctgaatccaagtccgagaaggaggatgacaccaagctcgacaccccggatcaggatacacctatgcctgacgccgatgagaagaccgaggaagcaccggcgcctgccaaaggcgaggatgagaaggtagagtctgctgatgctgcaggtgagacgggaaagagtgagaagaaggaaacggagacggacacggagaaaccggccgaggacaaggccgaggacaagaaagcagatgagaagactgctgaagctgaaactgcggcgtaaggctgccagcacgataaacctaaccacccacctactacaccctactatttacgtgcatggcatggcaattcttggttggtacgctgatgagatactctcctcgctttctttgtttctgcttttctttccatatcgagtctcctaccgtattgtaggtatgtatgtgtgcgcacgagtctgtatctttcatcttgcaaggtagtttagtccagtacagtccagtcagtccagtttagtttctccgccgttagttccccgaatcgctcttatactcgttatttgtttccacttatgtctcgtgctctgaaaaatattgcttgattacttacccatgtgcagtccctcagccgcgctttgtctggtggtcgctttctttgggtggctgcaatatttagatttccgcgaaggctaagggggagctagctatctgcgcaatgaaaagccttgcgaatgatcgtattaaacttgaataccactgctatagaagtgcaagtaacgaagggcatttttccgcatcgtaaagtttgctgacccgagaatccacaaaatgaaacacaagagaacaagttcgaaatatcaattcgaaacatgaaagaggacgcggtgatgagatattctattattattaagacgaagactaggaaaaagcatgcgatagagggcgacaaccgaccaactggcgaaaaccagagagagagacagacacggacacaaagatggggagaaggaaattggtagagcttccaaacacctgattgctactcaaacatcgtatattggagtcgttctatgttcgggcacgctttcgtcgctaattacattgccaaccaaccaatacaagctacgcaggtccttatagccagagccctggacatagaggtgtgcatttgggtttaacaatgaaggcttgaccgtggccaactatcaatcagggcaattgccatgaagggctagtgagactcctccatctccttctacgtttgtccgcatgtttcgataccagccgcttagagattactgtaaatctaaacttgcttttagatcaagctcaacagctgtcaaaaagttgataattggtgggtttctctgttgacgacagcccaaaacagtgagcactgttttagttcgtggcatctgagtgttcgacagagataggtatagctgggcataactgagagcaagacagtcacgtgtagaattgggtccccctctctgattcgggtggttcaatgaagctagatgttgctgattggtttgatagcgttgaatggcttactttcttgctctttatacagtaggtgttcgtttcctggacataccgaaccaagtcgtattgcagtcaaacaacggagggtgcattgacgcggtttagaccacacaaggaagcaggagggtgacgtctgactatcagcttaggtacgatatcacacataaaaagacgcagtatacaagcgtagagggctcgcgctgtagaattgtgtctatgtctataccggtccgtacctatacttaagagaacaagccatccatgaaatcagcaggatcaaggctgcgagccgtccttatcaaagcaacaatatgcaagtgcgtaacgatgaacaaaccctcagttaatgcggagaggataaagaaaagcagtaacaatgctactcctccacagcaattataaccaaaacagcgatatcgtcgacctttccgccgcggtaatgatcaccagggtaatagcgttgcgcttctttcgcgaaggggctgtcgcggcggggatccaagcttgccagtttcgcctcgccggcaatggaggcagcaagaagagattgcagggtataaatgtggttgttgggattggagacaatggtggatttatttgaagttgattttggcattgctgagggaacaagggtggcgacaccctctgcaccagtgaggcgatcaagggtttcacggtctgccgggatgattccggtgttgggggatgtagaagctcttcaggcacctgtgtagatcatgcggccggtgacgagtttcaggatgtcttggttgttgagattatcaaagacgccgtctgtggccagcataaggacatcaccatggtgcatatggagtggtgtggtgtttgcgtcgcgtggaaaacttcaagaaaccaccgccgagatggacgcttgtgggcatgcgcttagggagagctgattgatggagggttgaagcttgatctggggatgagaatgggaccgcggctggcgagaaaca

SEQ ID NO: 15509 - DNA, 556 bp, Emericella nidulans
caggagccgtgtgcgggggggcgctgaggtctgccttgaagcgaaggctgggatgactaaaaccagggcggtattgtcactataatacagccataaagtgagggagctacggtagttgagagacataggtcgtccagaggaccagtgcggggagcgctcaaccagttggtatgactgcaaacacgctgcgcgggcatgaagatggatgaatcggacgactatatggaatgagcagtgaaacattccacaaggccggctgcccgtcgagtgaaaaaaatgttctgccaggaagacgaccaattaaccaattatgacagaaaacactcagggggcagcacaggaaacagggggctatgagtatatagattatcaagacggtatgtgggaagaagccgattatgtattgaaggaaaaaacggccggggccattccctatgaggagaaggagagagtaccaggctgggattgcgactcgtccaagatacatcaacctattgattcaaactcgtctaaggaaaggccaaagggggaaacaccatgagtggccactgaatcc

SEQ ID NO: 15510 - DNA, 360 bp, Emericella nidulans
gggttgggccgagaacggaccccttatctcaactgttggacggttaccacgcaaagaattagaggggttgtgggtcgcttcgtcaaggggccggccctctgcgtgggctaactgggcttggaccgaggaatggtaccttagcagcaggtaacctgtcaccatcggcccggaaaagactctagggacgggacatggtcttaccagacaatcggactaggatgcttaggaaggtacttaacactgactctatgacagcccacttgtgcatcagtgcgaacgcccagcgatccgcaatccgcagatctgtctgagactctatccttgcaatcgcggacgatgaactccggctgctggtgcaca

SEQ ID NO: 15511 - DNA, 633 bp, Emericella nidulans
ccaagcatgtgtattgttaacccccttctcatgtacaccgatcgacacagtatgggtgccgtcgatgggttctcaagatcacatgaatacaatcggctgccccggtgccctcacgaagcgagacgcgaacggggatggcctacatatgctcgtgtatcgcacggcaagggccagctactatggctgtgcataccaccaggaacagctggactatctacacaggaactattggcagactcaccgctatatgtatgtcaacatgtcgaggctcaagagcccggatggcagatggatgctgcggaggctaagtgctgcaatgacctgccccatacacatactgggtgcatcacgactgccaacatgaccggttggaagggaactaaacaattgccgatgcaacatacactagtagaaacagttgaccgatcagttgagactgcatagacggatactatggttgaatgctggatacacgactaactactaatgctcttccgtaggcgcaacgctggaacgtacagcgagactcgggagatgatcctgacacggacatccgaccattgatactactacgtggagaataagatgtatatatcactctaaggacgacagcgactaatgagtgcgctagga

SEQ ID NO: 15512 - DNA, 591 bp, Emericella nidulans
gtgtgggtggttgaatgttggggttggagaggcagaagaagcattggtcaggccctggagggggacgcgccctcttgcggcgtttgctgtggtggtggtgatggtcgtctgtggttgcgaagcggctgtaggagctgttttggtcggggaggggtttgcgtttggtgggaatggagcggagcggcgtagctgttgcgccagcaggtacgctgagtgggggtggtgtgctcaggtctagtgttaaggcttacatgcattattgcttgggtgtattgcaattggccaatgatgcaaagctgacgcaactgccttactggtttagagtccggattgtcatatgactgaatactgaaaaggggacgacgctgctagataaagtcccatagtgaataaaaaagccaaccctttttaaggtccaaaggggttatgaccccgccgattacctataatttatttaaaaagccctgtgctgggataatcccatataaactgggatgccataacacaggacaattttttttagctaggatttttcctttacagggttattggacaaccccccttttctgaattattttatactacacggcg

SEQ ID NO: 15513 - DNA, 894 bp, Emericella nidulans
acggcaagggccggagctgatagctttgagcactttctcttcacgttaacaatatttttgcttgtccttggaccctgcagtgccccggtgcaggcagagtacgagaatctactgcctggacatagccagtccgctccccttaactgtacatcccctctggaaatgtatcatgcatcttgagaaactttaggaattcctcgactgccgctgcattggacatatgctcttgcctttccctttacgggaacactacagtggaatggtgttcatatatatattgaggatgtggattaatcataccatttcataccagtccgtcagacatatcgtaagccgctaacatgatacattccttaaagcacacctctctcccacttgtatttccttcccagtcaaccaaatggactgtccttcttattaccagcctaccctcgttgtcaccaaacctccttttttcagccttccttattacctacccctccaccttctcctctttttccccatctccctccactccttcttcacccttcggcttccatcggctcacccctacgaactccccacgtgccctcaatccactttcactcgtgccctccctcttcccctctctttcatcctccgtccctctttggcacactcccttcttcccccactcactctcccatcccatcttcccccctctcacttctaccactcctctatccctcgaaatccccccccccctcatatactttcccccctttcctccccctccttttctcctccatccatctccttgtacctcctccctcctattcaccttactctccctttactcccttccctcctcccttctccttcctacccttccaccttcacctcaccccctccccctctccctcctacttccctact

SEQ ID NO: 15514 - DNA, 3341 bp, Emericella nidulans
tcatctactatcttcacgctaacgtcaagaaagaactcacaatagctcgcatcgagtcccagagagaacgagagcagcagctaaaggccgttgcagctacaatggaacaagcgagacgagcgagccaggctcgtagctgtgcccaagctcgtacccaaagtcgccctccaagtcgtggtagaagtcgtcctcggtcacgtccgcgcgaggcttcgttgggaaggacccaggatcaagctacgggcaagaaaggcaagaaatggaagaaaacgcaagaccatgaacaacaccaaaagcaggaagaggcgcggtcccgaaggagttcgaggaagcctaatccctcacgggccgggtctctacggactacgcaaggggaatggggagcatcaggtgctatgcctacgagtggaggacaatttggacaatctgagaatcagcagggacaggatccttggcctgcttctgcggatagccggggagatggccagtggggtgatcagactcagaatgatacttggggtcaggcaggaaataagacgcagggtgcgccgggcaatgggcaggatgggaatactgttttgaacggagatacatggggtgatagcaacaataatgagcagggcagtggaggaggccgctggagtcctcacagaaaccagaataagaataatgggtcccgagacaattggaacagtggcagcaacaacaacaacaacaacaatgacgatagtagcggcggacagcagcagaatgttcggaagtggaagagtcacgatgatacagcgaatgtccaagactctgctcaaaaggatgatgagatacactggtgataaatcggcgagatattagtgcacctggtaagattggagcctcaggaataataataatttgaaactgggaatgacgtttgtggatctttccccgcgagtgcgggcggtgaggctccaggagtgccaggaccagcggcaggtgacgatgccgctcccaatttcaggtcgagcttcaagcaaatcttcccccgcttcttcattctgtcaactagctggcaattttcatcgtgccttgcacacacacataatacaagactctttatattgctcaagttgatctcggattacccgcgtatgcgaacttccgaccagcgctccggatcctgatcgaggctgcctgaccagcctccacccaactatgtggaacgacgaagataacaacccatacggcgcattcgacagcgaggcgcggctgtcagagtccctgcactcaactaccatcgaatctcgtaaggatttggctttgcgaaacaatgcaacctattaacgtccttagctttcaatcacgattacccccctccaccatccagccactcatccaaccccgacatttccgacttctcacagcacccagaagcaagcgatgacgatgaaggagactatgtcggccaggcaaaccgcgctgggtactcccacaagagtgtatacgatagccggatcgagcagctgctttacgagaacccggacatgccgattctcatcaccgacgccgggaagaaccacgagggcggcgggagctttattgtgtacacaatacgcactggggtatgttctatagccggtggtcttacttttggctaaagtaagcaggatctagaggttcggcgacgctactctgaattcgcttcgttgcggcagacgctcgtgagcctccatccaactctcattgttccgcccattccggagaaacactcgatggccgattatgccgcgaaacccacaaaggcgaaagaggatgcgggcattatcgacctgcggaagcggatgctagcggttttcttgaatcggtgtcggagaatgaaggagattcgcgaggatggcgtttggtggaggttcttagacccgaatgttagctgggtatgtgcagcaaagaaaaacgcgtctgggccatgctaacagtgcctagagtgaggttttacattcccaccctgcgtcttcggtgcccaagaataatctcaaggcgccttcccttgaccctgcgaatcccacacctgctcatgcttggctgccggtcccgtctgcctctgcaaaattgaagagcacgtcaggcacgtcctcctctccaaatgcggaggctccaggtccagaaatcctaggtcgctttccgcccgagtcgcggaagctgagcgagaaggacctggacccatactttatcaactttgaggcctctactcgagaattggaacttctcctgcaaggtaatatggaaaaagtgaatcgaaggacacttgcacatttgtccggactgtctgcagacctgatggagctgggagcgcggtacaatggattctcgttgtcagaacagtccccaactgtggccactgcaattgagcgggttggacaagcggcggacacatcttacatcgagacggaagagctgtcacttgcgctgggcgcgaactttgcggagcccatgagggagagtgctcagttcgccagtgtggttcgcagcgttctacgataccgggtgcttaagagggtgcaggaggatatgacgagagacgaactgagcaagaagaagagtctactggagtctctggagaggagtgagcaggaggcgaagcgtattgaacaatacctcaaccgtacctcaccacaggctccgacaaaacaacgctccctttccacgtcgtcggccactagtagccaggggggcactgacgagtcgcggccaagtggcgaggagactgcgtctattgattctgacttccccccgacgcatgcagagcacgtttcacagcgataccccgagtcaggacagacgtcaccacccgcacaccgtaagacatcgagtggaacgtttgttgcaaacaagattttcgggcgcatcagtcacgcggtccatggattcgtggatgtcgatcccgagcggacacgacgggaccacattggcaaaactaaagaaagcttggtccaggtactagccgcgaaactcccgcactcatctaaccctaacgctaactgagtacagctggagcaagcactgggggtttcggagaaggacgtcaaggacgccagcgcaggagtcctgcaggacctgaagcggttccagaaggataaggaggcggatcttcggcggtacatggtatgttcccttctggatcccttgcttgcggctgatgtggctaacggagcaggtcgcctacgcgcggtgccacctcaactgggcgcgcaagaacctggagacgtggaccgaggccaaggacgaggtggataaaatcgaggctcggtaatgtactcgtctgcaatatcttgatgcttctgactgtactgcactcggcgttggtggac

SEQ ID NO: 15515 - DNA, 483 bp, Emericella nidulans
aagaccacactacgagtgtgttctaacactcgaagacagcttttttttattcaggccctacaatgctagcagaacaccgccggctaagagcacgagactgcaccagacgctacttatcatcgggaccctgaactgacagccaaaaacccacagtacacgaaccaacgcactaggcgccaaaaccgccccgtgggatccgcggatcttgagactgttccctatggagaaatgacgttggggctgcatcgaagactgtgctattaccagtggagacttggaaggggccggggtggatgcacaccgtcggagatgcttgaaaattaccagacagacatggaaagtactgcgggcgccccataagcgggaggagacttgggaccggggaaagccggctggatcacatgcagaacctagctgcagcatatggccatagcgacaggcgtagccgcattcatgtgaccacttaaaagcgatggctggagc

SEQ ID NO: 15516 - DNA, 446 bp, Emericella nidulans
gtccaaaggacacataataaacagtacctgtggaagaccgcgttttttcgatcatgcaggatatggaccccttttataacgcgaagacctatacagaaagtgcggactcgagatgccggagactactggctgtgagacgcccaggcgaaaggatgacacctactggcacaggcgggcggtgcttgactatggttgccacgaaaagcgactgggagcgaagttcattttaacaggagtgggaatcaaggatagggacgagcctgctgacagccgctggtagcgtatggaacaggtacatggacgcagacacgcatgtgccgagggactgctgaacaggggaacaaaatgccacattaacgccccgctatgcgatgtaagctgaaagctaaccttagtcctatcgaccaggattgaccaggacgagatagatgaacccggcatagtgg

SEQ ID NO: 15517 - DNA, 3240 bp, Emericella nidulans
gcccaaagatttgggccatatggcctcttaacctaagcttaggaggcgaagaccacgttttgtatatccgcagccctattggcgacgccagggctgtgaagaatgaggttgaattggcaggcatgagggcttgccacattcgagacggtgctgccctaatcgagtatttcgcctggctcgaaaacgaactggttaacaaaaagtcgactttggacgaggtcgatgcagctgataagctggaacaactcaggtctaagcaggagctcttcgcaggtctttcttttgacactatctcctcgaccggtccgaacggagctgtcatacactacaagcctgagaagggaagttgctccgtcatcgaccctaacgccatctacctctgcgactccggaggccagtatcttgacgggaccacagacgtaaccagaacttttcatttcggccagcccacggagcttgagaagaaagctttcacattggtcctcaagggttgcattgggcttgactctgccgtcttcccaaaaggcacgagcgggtttgcgcttgacgtcctagctcggcaacacttgtggaaggagggtcttgacttcttgcatgggacaggccatggaattggttcctacttggtaactcaagagcgccccggaacaagcgtactccgctgactgtttttagaatgtacacgagggacccgtaggcatcggcactcgtgtgcagtatactgaagtgcccttagcgcccggaaacgttatatctgacggtatgcatatagaattagtaccatgagctctgtttactgactaccccagaacctggtttctatgaagacggcaagttcggaattcgcattgagagtaagtcccttcaataaactctctggattcactatctgactcttgaaagacgttatcatggtacgcgaggttcagactactcacaagttcggtgaacggccttggctgggctttgagcatgtcacaatgtgccccatcggacagaatctgattgagccttcacttctgagcgactccgagatcaaatggctgaatgactaccatgcggaggtatgggaaaagacccataagtactttgagaacgatgaagtcactcgtaaatggcttgaacgggagactcgcccgatttcgaaatgaaattggtaagaagctcctactatagaatgtagatagattctaggatagaaacgtccatacccgaattgagtctggcattggctcagctctattgcttctatttacccactcagctcatcttcatgatcatttatgaagtatacagtagagtagctaatggcaactcaacgaggcagctacgcttccgctctcgactatcaggttgcggattgtggctggcggctcgtgtggggatcgcgcggaccacttggagtcgcgacctggccagctaaactggtgaacttccggcacaacggccttctgacgaccataagcttccgcgaatcttctgcaccttggcggatctttggtgttcattttctccaattgagcgcgtgagggtttaagccttatcctagttatcctcaccggcaactatgcccccatctcctacctcctgattgcatcgactcctagacaccgaacttcctcatcccaacttcctcatccctccgcccaccgacctcgcattcgccgactagacttaacgctgggtacactaccgatagtgtcagagatttggtatgactggcaggagtggctacgcgaacggttacgggtactccgacaccagtcgctacgaccgcggcgatggtggatacggcaataatagcaaccggggagtaaatggatacgaatctggcggagcaagggaccgaaggcccggaggttatggtggattctatccggaagcgttgcagcaaccgtccttgtcacctgcaccatcgccggagcgtcgccgcgagaggtacgaccgggatgaccgttcctactcttcgtcgcgatcacgaacacggggaccagatgcggatagagaacgaagagctcaacgtgcgggtgaaagcagggctcgcggagacaccagccgagtgccgggtagcaccatcaaccaaggcgcgaatgttggagggtcgcaagctgtggaaagtatgttttgaacataatgcgcgcccgacttctggactggatacgttctaatcatcgatctactctctagatgttttgcagtccatacaacgcgaatgggacttcgtggcgaccgacgactgcgtaccggtgcaagtcgccctgcaattgatggacacaagcacactggggaaggcggagcgtgagccggacttcctcaatgtacatcagacgattcagcagaccctgaaggccatcgtcaacgagcatcatcaaggcttcaatagttccatcggcacgtaccacaaaatccaggcgagcattcaaagctcccaaagccgagtgcgcaacttgaagcatgcgctagaagatgcaaaaggtggtctgatgtctaccaagcccgagctgaaagagctggcgacatcttcccagaaatatgacgacataatccagctgttcagtcagatccaggaaattcagtcccttcctgagaagctggagtctagattatccgacaaacgattcttaggtgctgtggaggtattacatgacgcactgcgacttctacggcgttcggagctagaaaacataggcgctcttgcggacatccgagcgtatttcgagaaccaggagtcttccatcaccgatatcttggtcgaggaattgcacgatcatctttacctgaaatctccttattgtgttgatcgatggaagccgccggctccagaaacagaaagcaatggcgtgaacggtgccggtgcaggcgcaagttcctgggagaggcccgtctacgggtttctcgcgaggctcgacgcatccaaacctatggtggaggatgcatctcgcaatccagaggctgacacgttctcctaccttcagcttctcattgaagctctaaacaaaatgggtcatctggatatcgcggtcgatcgcattgaacaacgacttccggtggagctcttcacggtggtggacaaaacgaacgcggagattgacgctcgctacccgctaccacggggatttatggcacaagatgggaagacggattccccaacagaaatgatccagaagcgcggtcatgtgctgtccgagtttctctggacactttatgccaaattcgaagccatcgcagagggtcatcgtg

SEQ ID NO: 15518 - DNA, 159 bp, Emericella nidulans
acggaccgatccagggttggagggtatttttgaaacgagaagttttctatatatactacataaatggaaaaaaagggttgggatctatatacagttcggaacattacctatcaatgagaaagtaccactacaccactttgcaaggctatagaaataaac

SEQ ID NO: 15519 - DNA, 825 bp, Emericella nidulans
  unsure (1)..(825): unsure at all n locations
gttgggcacaggtccggtaagggcctttttagagtgctagatggacagactgctggactgctgaggaacagcctggccgagtgaggattgtacctaccatcggagccagcgcacgctgccgttatagtcacgaatactggaccgaaacatacagcctgcgcttaacttgtggccccacctctgcatgcaccgtatatgaactcagatcttgttgtaacgtaaccctgcactcgatctgcttatatagttcacaatactgtagaagctcaaagagaactccatccatccggagttattacaagcactacatgtggagtatggccatatgaagctatgactttgatgacacccttaaatcatgattcttaggcgtaatacagatctcgtatagtctgcgtcgtggcgtcagtgttcatgcaactcgcttgctaggctctcttcaatcaaagttggggggtccctagccttcatacaccgattttaattggcgaatcttaaccgcacggtaatgaatattccctcacattatattaatctagggcaaaccgtcgggaagttgtaattacctaaaatatgcgtccaattcttggnggggccttgtagggctatggaaggcaccccttttataaccttggtcacgtatccccccaatagcagcagtttgcccacctaccaccctattttgcatcctactcttcaggcccgatgaatagttttttatgggggcccctggtcccttttaaagttgcaggcgcaccacgaacgctaaaaattggatccccaacctggaggcctgggggactattngatccaaacagggggccc

SEQ ID NO: 15520 - DNA, 518 bp, Emericella nidulans
cgatggcgtcgtgtacctcttagtcaaccttggcgctgaacagaatctagcggagtgttcacacaatactaataagcacaatcgacctcggtagcgacctggccaaatggatcgaccgcgcagtatacaaaatccatgtggaccttcagggactactccctcaataatcccaggatctgggcgaagcttctgtctttgactgtccgcactacgatttggagtgcctgatactctgcatacggcgggccgaacggccagcagaaaaagtccattcgctatcgacaattgatgaaagcatatttggtgtctaaatcctattcgttctaaactgcgacgctccggattccgataccattatcagctgaaggttattgcaccatgaacgatctttccaccgttcttcgccaagcagaacttggaatacgtaacggatgcgtacactgcttgaagtacgctatcgagcgaatcgaggccctcaaatgcttggaagccttagttgcttgacgtagccttgaaac

SEQ ID NO: 15521 - DNA, 4165 bp, Emericella nidulans
  unsure (1)..(4165): unsure at all n locations
ttcgggaactttgattccggccaggatgagtcaacccaaatagattggacccgccgtccgcgaatagccgctcgttatctaacaggttatggacaacgtggaggaatgggtgcgcaactgccgtatttggcttggcatctgtttaagatgcgagcttcgccccggtgtcgttaagaacctggggatttcctcggacagaaattggagaaaacaaaggagcatggccacgcaacatacttacgatgtcgttatcgtcggtggcggcattgtaggctctgctctggcctacttcttatcgttgtcgaatgacggtaaaaaggtggctgttatcgaacgtgatttgtcccgccttaacggctcaacgggttatgccccagggtttgtcggccagtttaacgagtccgaggtgttaactcgtctggcaattgacagtgttggggaatacctaaaggttccagggggatttgaccaggttggaggtcttgaggtcgctacaagtactgccggagtggaaaagctgaggtggaggctcgaaacagcgcgtgaaagaggtctcaaggcggagctgatctcggcccagagcgggcagaaatggcccatgatttagtgaagggcgacaatgtttcggcgctgtatttcccagcagatggaacggctaaccctgcggcaatcacgggttactttcagtccgaagctcgcgctagaggagtcgaatttgtcgagggagacgtctccgaggtctgcagaggtagcggtcgcgttaaaggagtgatgaccttttcaggatttatacccgctgagagagtcgtccttgctactggcatttgggcgaggaacctctgtgattttgaagtccctataccagtcatttccgtcgcacacccatatatgtatgggaaataccgcgagcccaagccttacaagtccccattcgtaaggtaccctgaacaccatgtttatgttcgggatcatggcccattctttggcttgggttcttacgaccataaacctatagccgagaaaccaaacgaaaccgccgttgggaactgggtcgaggaattcgatacgacactccaccgggctttgcgtttcattccagagaagacgaatttggctcctcgagaaaagttcaatggcttattctcgatgacgcctgataacatgcctttggttggagaaatcccaggaacagagggactttacatagcggcagcgggctgggtcacccacgcagctggctcagcgaaattcttgacccagatgatcaagggtgagacactcgacgcagtggtaaggaaagctctcgatcccagtcgattccgcgggtgtgatatggagcgcttggagcgggagtccctgcattgctacaataacatatattcgactcacgaggccatatagtatataggttctgcagaaatcaaaggtgtttaaaggatagcgtggctacatcagtcaacttggatttccgacaataacttcaatcaatatattctcctgacgtatgacgtcatcgtagtgtttgtatgggtgacggagacttgttgaacgaaaagtcctatgcgcagcaatatattgaggttatctaccagagattgaaaactcagtttgttgaatagggtaagagcatcataactcgagtgcttggttttggagaagtgtcggatccgggaccgacgatgtgcgcgctcacgtgacaccgctctacgcgtcaggtcacgtcaagcgcgaccaagacacgcctccaaattattgttctgccccagatcgcccatcccaagttcaacccaggcgatcgcagcaaagggtgtctgtcggcgttgtgcaccacaaattgtattatatatgcgtctatgagtgttcatcatgactgaagctattgtcatgccccagaagcgggttctcggcgacgcctcgaataatccccgcggtgtcgtgaattctcccgacacaataaagaagcgcaagatcgatatgcagaatacggttaaaccgagccctcgggccccgaacggacagaggaaagtcggttcgagtcagcagaaaagtcaatttgaggaggaggtgctcgagaaactgacgcaagatatcagcggcttaaaagagaacaactcggaaaaggaccaacaatgggaacgaccgccgctcggtgagtttgaccctacgaaggacaatatctgtttccaacagattgatgcggaggagggtacaacgatgggaaaaccagctatcaggctgtttggtgtaacagaggtatggccctcgcctgctccattaccctctcatatttttctgacccccaaaaggctggccagtcagtacttctccatgttactggatttcagcactatttgtatattgccgctcctgttggttttacaaaagaggattgcgacccctaccgagcgttcctagagagcaagattgggcaatttcctcccgtcatccagtcagttcaaattacgatgagagagaatatatatggctttcaagggaacaagaagagctactatttgaagatcacagtgacggagccaagacatatctccaagcgccgaagtgctcttgaaacaaaagcccagacggtcaactacaaaggattgtggacaaatgctgatggtggtatactaaccttcgacaatattcaatacctgctcaggtttatgattgatacggatattcagggaatgtcatgggtcgaagcaccagcgggaaagtacgaactcattgctccccaggacaaggtctccaactgccagctcgaggcgcgcattgattaccgcagtctaatatcgcatgctccggttggcgactgggcgaaaatggcgcctttgcggatcctctcctttgatatagaatgtgccggccgtaagggaattttcccggaacctaatcacgaccctgtcatccagatcgccaatgtcgtcacccgctacggagaatcgaagccctttatccgcaatgtgtttgtaatgaacacgtgcagtttgatcgttaatacccagattctggaatttcaacaagaagaaaaaatgcttatggcttggcgggatttcatccaaaaggtcgatcccgatgtcattattggatacaacattgccaacttcgattttccgtatcttttggatagagcaaagcatctcaagtgcacaaatttcccttactggactcgactcaatggcatgcgatcggaagcgaaggacacaaatttctccagcaagcagatgggcaaccgcgacacgaaggcaacgaacaccaacggacgactgcaattagatcttctgcaactagttcaaagagatcacaatctgcgaagttacacgctcaactccgtctcgtacgaatttctaggcgagcagaaagaggacgtgcatcatacgatgattactgagctctataacggaacgccggattcgagacgtcgcctggcggtttactgtttgaaagacgcatatttaccgcaacgcttaatggacaagctgatgtgtcttgtcaactacactgaaatggcgagagttacaggtgtccctttcaatttcttgctctcccgtgggcaacaagtcaagttcctcagtcagctctatcggaaagctttgcaacagcaactggtcattccaaatatgaaatcaacggacgaacaagattacgagggtgctactgtcattgaacccattcgcgattattacgacgtgccgattgcaactcttgactttgcctctctatatccttctattattcaagctcacaacttgtgctacacgaccttactcaataagaatagtgtcgctgggatgaagaaggatgaagactacattgtcacgccaaatggtgatatgttctgtacgcctaaagtgcgaaaaggtcttctgtcccagattctggaggaattgctgagtgcaagaaagaaggccaagaaagagctggctcaagagacggacccatttaagaaagccgtcttgaacggacggcagctcgctctgaaggttagcgccaacagtgtttacggtcttactggagctactgtgggaaagttgccgtgtcttgccatcgcgagtagcacaaccagttatggtcgtcaaatgattgagaaaacgaagcaggaggtcgaggcgagatatcncattgcgaacggttattctcatgatgcgaaggtcatctatggtga

SEQ ID NO: 15522 - DNA, 620 bp, Emericella nidulans
agccgggcgctagaaaaaaaaacccgtgaagcaggaaacacgggacgaggcgacgcccaagaagggctacgcgctgtcaggccacagccgagcacatgaccgggtgcgtccgttttcaaaggaagaagcggccaacacacaagacccgagagccacacgaccagaagacgcacgcaaggagcatcgcggaccgaaaaggggcgcgcaggcgaagcccgccgcgcctctataccagggcggagcaccgagcgcggtgaccagctaagcgactgaaaacagcccgacgcggcccaaccagactacctgacaaccgggcggtgcatgagcaggccaaacgcagaccagagggcggcaaacccagaaacgcaccagtcacgtgccccaggccccaaagcaccccaccactccaccccgggagctggctcccctcccagcccaggggccaaccgcctaccgtgccccggcccagcacaaccagacccaaccggtacccatcccccaagacggcccaaatcggaccagggcccccagggggcacccaggcacaaaccagcaccccgccgcacagaccaccccgcgcaaaatggccgccccccagcaacccccaccctgtccacccc

SEQ ID NO: 15523 - DNA, 2186 bp, Emericella nidulans
  unsure (1)..(2186): unsure at all n locations
gataagtcttgatgctatacgcccctaatccttggtgtggcttgatgattgtagcatctgcattgtcttatggcaaagggctctggaatctcagtgcttcagggctgacattcttcaacgatgacaattatcattacatccaggcggaggagtacggacgtggggtgctttttaggctccctgtcgccaacattcgtcactcgacgccaaatatgctcaaaaaaattacaagttctggatatgtgacagacgtccaccctgtcacatctaaatccttccacctactaatctccagtaacagcttagtagacaacagcatatggactgtggttgaccccgcgaaccctgctgatgcccatgtcatctcttccattggccatggcggagctgcttttggtctttcggcagctcaggtggacgaaatttggtacagaggggcagaagacaccccgatccacgcgtgggtggtgaagccgtccaactttagaccaggttccaagtaccctctggcatttctggttcatggcggcccgcaaggcgcatggaatgatcaatggagtacgaggtggaaccctgcggtttttgctgagcaaggatatgttgtcataacgccgaacccgcgaggcagcaccggttatgggcaggaattcactgatgcaattcgcgggtcctggggcgggttaccctatattgatctcgagaagggcttcgactatatcgagaaaaacctgaagtacgtcgacacgaaccgcgctgtggctctgggcgcatcctacggtggctacatgatgaactggattcaaggccaaccgctcggacgacgattcagagctcttgtgacgcacgatggcgttttcagcacgacctccctgcttgccaccgaagagctgtattttcctttgcacgatcttaagggcgtgcagtggatagttcctgagaactgggcacaatgggatccttctcgtcacctggataagtggcagacgccacacctcatcatccacaatgagaaggattatcggctgacgatagccgaaggcctctcggcgtttaacgtgctgcagatgaagggtattgacagcgctttcttgacattcccagacgagaatcactgggtccttaacccggaaaatgcactgatgtggcattatactattttcaactggatcaacaagcatgtcggtctccctgccgcctccgagcgcttcgagcagttttcaggtaatgaaaaggtggcgctccagaaccgtctggcgaaagtcagcctttcaaattgaaacatgtataagattggcctcagggatatctggagccgcagacatatttgagcagacgttttgtttatgctggtctattttggcgacaatggatagtttctgtctgtgtttcatttctttgttcgactccacaactgctcaatccagtcaagaatcggagtcgggaactgacttggggctgttgcattgtgttttcggtcacaaaggcgaattgttccagcgcaggctttgccacgtttgttatgctgcttataatcttttgcctcgtcatctaatcagacccattactctctctatatctgataactcaaccgccgcatttgtcattagcaccctcagttcattgcaggttctggaacttctggaaacccttcacgctcacctacactactatatatcttaccaggactaacataacgatggataaccacaagaaggacaagtttagccactgtccggaatcacacccaataccgccccggaccccaacgttgtccccgtctcgagacgagccgaacggattgcctctacctgaccatatagatgagatgcttgagaacgcccagcagtcaccgatcgagtcggagatcatgggagaaagactgcaccgagcggagcaaatcgaaatagaacaacaggaagggcagcccaaattagaaccccaaagctggtgcccacctagttctgcaggggaatcaagggaattgcctactgcagccgcggccatagaccatatgatcgaacatcccagaaattcccggtgcgaagctgaagaaatccgaaaattattgcaaggacgtggcgagattacacgactagcacaacaggcgaacgganttgtatccaacacccgaaaccggtggctggctatcggccacacatccacagagaccaaaacccaggatcgtt

SEQ ID NO: 15524 - DNA, 2057 bp, Emericella nidulans
tgcacgttactacgcggtggtctgcgttgacagcctctcgagcgttggtacatcccagaaatctatgtcgcttttcgttggccgtcctgtatatctcggggtgttgtgtcagcatttaggttgtatcgcctgcagggaataagagacaggaatgtcatagcgtacctctgcctcgtctaggcggttttgaaaggaaggactctgtctggttcttttccttggtcttgatcttggctttaaaccctaccttttgccctaaatggactaattagtaagagaaatcaaggtcgtcttcgacaaagaatgtggcagtaaggggcagtgaggaatgcgcagatgagtgtaggtgtaatgtaagtatttgcagagacccacttcaatattcggagtttgaagtctcgaatagaatttccagtcaaattatgcctcatgaaatgggacagttcggtttgcgatttactggctctaattacatcattgcagtatcccaaacgcatagagaaaaaggcacaggaataacgccagaatgagaatcgtaagtaggatccagatccatttatactcaccgcgtttgaggtagtgattcgtgtcatcgtcaaattcatgctggtaaactggcgagagctctttgtgcacaatactgatgcttgagctactgctggcccgggtacgggagctttcgccggtgctagagctgccatgggagacggccgaactctgagaatctacgcttgacttgcggcttttataagtgtctagatattttagtagggtatatcttgaagctggaatcgtacgtaccttgatgtccgtatgttctagctgctagtgacggccgcgcatagtcaggatacttgaagtgatagtcgtcaggatttgatgcagatattgcctctcgaagggccgcataatctgagggtctctggtccttgaaatgcggtggtggaggtggaataggtaacgggtcctcaacattcgcgacaacaagcgcatacgggctgttccagatcatgttcctcatttcctctcggacaattgggtcacggagagagttctggagatatcggtaggcatattcgtgtagtcgggcctcgtcctgcccgtgtttggcagctgggccagggtcgaattcccagcgcagcgtcctaatggtagaaggcgggactacctgacgcggatgagaagccgcttgctgcggatccgctttctgaagacgaattgtgtgccgactcatggttggtcactgggcggaccggtcgaatcagccagcgcggtgtaggtgcattatccccaacatagaccctcggaaagcgtgtgggcgggattctgtcgacggggttcagcgctggcttagcgtccctgtttagttccggtaatcccaattctttgccattaactagagtcggcgcatccagttcgggagactgaatggggcttaggcgttgtctctctggccagtatttcatccgctgtgcagcgcgcgcaacgtggttagatgtgggcaccgatgggcgaacatgctcgtcaggattaggcccggggagttttccctccatttttgcttttcggtaaggaggatgactcaagtctgccaccttccccttccatggatccttcttccaggccttctttctatctcgctttgacttttttgcggtttgtggacgagcagccatcttctatcgggcacggttagttcagatgttccggttgtgaatgtgtacacatacctgtttagctgcagtcttgccgtagcagttactgcttattagggttggcgatgtattggcagatgtcggaagctttgtagaagcgatcctcgaagatgttggcacaagaatatcaaacttcgctgaattttcgacaagatacctcactgctggtacgcagaagctggttcgggcagtcttcttcactcgatagatttcggtaagcaaaatgcgttggattgttcgaggacaaagaatctggatctgaaagctagtgagcaaagctgagctcctggttctttattccaattcagacctcttttctaacaacaagcggacttatgacga

SEQ ID NO: 15525 - DNA, 5020 bp, Emericella nidulans
gcggtctttcagtatagaagttaaacagcgctcaagctttgtaatgacggcaacatgcatgtgtccacatgttacttcgctccaagccgcggcacaacctcagattgatgggccaacattcagggacttattggataccctgaatgacagtggtatacgcgctttgcagtttgttggagtaaaccctggctttgtgaactcaatgtacggttatccatagatccatcttgaacttccgatactgacttctgcagggttcaaagtggtgcatcactgaaagaggacaccccggaacaagtgactcaagcaaggatatatcggcgcgcatatacagccttccagctccgtgatctcagcaacgaggttccattacctgtgatttcaagtcggtacaagattccccgtggaacaatccagactctagcgcagcagtgtcatggattcgccgcgggaatagtgaagttttgtcagcgcatgggctggggtatgttagccgcagttctcgatcatatgcgggatcggttggaagcaggtgcgcgagctgaccttctcgaaatggcccaagtgacctatgtcaaaggctggacggcaaggttacttcgcgacaatggatttcggaacctgagagcattagctgaggccgatcccaaggatgttgtacccgtattgaagatggtaaggcacttagactgtaactctattatcaaactaaccctatttctaaaggttaatcctcgtaagacccagcgaaaccagcttcacccaactgaagctgagcgctacgctgggaagttactcgctaaagcagaggtcattgtcgcatcggctaataggatttggggtaagcatactgaaacgcttgatttcggtgtgtgaggctaatcacgaccttgtctatccagaacgagaaatgcaggttgatctggatgagtgaagacgaagtcgggcctcattccgtggcaccccgagctgaagcttgggtgtttctgcacgggatgtactatcggcattacaaaggtatgatctagacatagatgggatttagcgcaacgaaatcggtatattaggttgttttcttgattacgaaactggaggaattggctacgatactacaaccgaagtacgaagaacaatgatatgcctgatagataatgtgtatatctctcacagcacatcatcaccttggctagaaagaggactaacaagtaacccagccgggtaagaatgaataatctaacaccagtaatgtatttgttgaattgatctagaccgcaaatatacaaggaaagaaatgtgatgaccaaggacgcctttattgctaactgagtgactgaccgacccgtacttcatgcccggccgccccttcaacgattccaatcccaatgtgtgttatattgatggtttcctacattagtaggctagcctctgtacaggtgctgcgctgatttgagggcccaccaagataggtgagtaggttatcagttcgaatgcaatttcctaaccctactaactccctcgtaaagcgtgcgatcaatagccgccgcaacggtaagcgtcccaccaacgattgcgcatacacccgtcaagaaaccagtgaaggtcttcggcctcgcctcacgattgataaccttcatcggcgagatgtcgtagttgaaaaagacgccgggaataccgcccgctgcgtggatgcgctccttatgagcctcgtctgaggcatcgccaccgcgcagagatcgcttgtgcgaggttacgctgtattgatgtgtttcgatgctgccttgtgagccggcgctgaggccttgcgcgccgagcggggtgtttgtgtcggccgcagcgtggagagatgcagaatagagagggtcccagccgaggggcaggtaggatgttgagacgaccttgatgaagtacataaagctgtaagcgggctcaggtgcttcttggctcgtgctatcgagtgggttagtatggtggtggtccgtccattgccaacgatccgagagctcgtctggtaattgcggtccgaagcggaggctgtgaatgatatgagacattgtgtgctgctcagccggcgacagacccctttcctcgtagttcgcgatgtcgtggatgtgcacgttgttagaggagaagctgcgcccaggcgcaatgtgaaagttgccaacaaccttgttgacacggataacgccttcaagccggcatccttcgcggcgttgcgcgtcaatccgctcagagtagtgctcgcgctcgcattgctcaatgttggtccccttgccgaatccccattgtttctgggcgtacgcttcgcgcacttcgtcgcaggtgctgcagcacccgggcttgatggcgttgggaggtgggggcgcgccgccgcattcaccgcagtagtctgggtcgaggtgcttggcttcttcggcgtggcttggacctgttagcggggttctatgggaggctgatggattggaagctactccgcttacagttgcagtgcctggacgtcaaggacgcggccgccctccgcagcaggcgcaaggcggaccttgttcacaccgtgcgcgacaccaacctgctgctcgcccgagacatccatgacatcgagagttgtgagctcacagggaagtcgagggaatgtgatgttcaggtggatctccatcttctctcctcttgacttgtcgacgacgagctccggcaaaactgccacccgcctgtagtccacccactctccccacgtaagccatattatgataagcagcgaggcgatagtgatgattcccccggaggtggtgcggatgcgagcctcatcgactgttttcgcgaaggcatctagccttgtgaaccgtgatttggccgccatggcttatggcaatcgaacgtcgatcatacgagggcgggtgttgatttgatcctagaccggctaggctgtagtataactcctaaagagaaggagagttatcagtctgaagtgatctcgaaagtgtcggtagcagcagcgaactacgaagccattgaacgatctacacgggtcctccagcatgtcacggagaaccgggcacgcacgcacctaatctgagcaagccgtccgcggcgagcagccaatcgtgagttttcgccgtttgctttcagtttctgacctgggcgaaagctgtccaggagttgcgctggatgaattggagtaattttagtcggcgtcgtttatctcttagacccgaataaagacacgtaacgcgtaatctatttatgtgtcggaaattcctggcgtgtattggtattacttaaaggacagaccgcactataccattggttagagcctaagcccaccttaatcctgccccgctgtgcctggaatctgtcacgtgctttgagccccaacgccgcctaatgcacgtgactcatctgcctgcagaaatggattcaaacgaacgtcacttttttttgctgttgactcagttcgctgcctaggcctcaaacagtaggccaccctttacattgttttggatcgcaatataagagcgatacctttttttttcattcagtcctttctttggtctcattccctgatacatgccgatacactcattgagagactaaggcgctcagcgctttgttttgctttgcgcagccaatctaaacttcgacgagtggcctccttctacccttcgatcctctacaccttaccttcgcatatcgatccgcttcttcgaacttccacctctacatcatcatgaaaaggggcagatcttctcgcggtcgcaccagtacccgcgcgaatactggtgatcgtgggggaattcgcaagaggggtgctcctccgacaaaggttgaccgagatggtgatttggcgatgggcgcaggtgcaggcgcaattcgtggccaaaaaacccgttcaggttctggtcgtcccgcttcctctgcaacccgagcaaacaccgctctcgatcggagcatcagtcaaatccaaaaggccctatccagctcgaacgcccaagcgaacatccggcaaggagggcgctcgtctcccacggaacaggttgctgtacgtggatggaaagaaagcaaggcggcgtccaaccgcgacggtggcgtcgaaagtttggtcgcttttctcgagaagaagctcacctcacccgactcgaaatctggcccgcgcgtaaaaatttctaaggtatgtgcaacactactgaactggcggccaccgacatgaacacacattaccaacgtcccgtccgctcttctccgatatgttctcgttttcaaggatggtcccctccagaaaagaacgacgatcggcggatgcctaggctttatgggcgttatgtttatttgatggctgcctgcggttttcaaggtcccttaagccttgctaacgttgattagtcgcgggttgaaggcgacgctctgatagtgtccatccgaccggaatcattagaaagaatgcttcagcttaatggctttacttttgcaggagcgcctcttaccatcgaaaaatacgaccaggaaaccgctccattattgaatcactcgattccggcacaaaacggtacaactccatctaccgcagacacaaaatcgaaaatgacggcgatactggggaggcggtattaccaacaatccaaattgctcgatctgtctaagctggggaccgacccagatctagtggctatgggcatatttggcacaacttccactgaatccaagttcttccctgcgctcatgaaggtgtgggagctgaactttgataacgccacggcgcgacgtgatgctgtcgaaagtgtcagccttgctgacaatcaactctctaatatctccgtcgttacgacgctttcccaaacattccccgatttaaagaaccttgacctgtcgaacaataactttgccgacgcacaggcacttataggatggcggtggaaatttcgcaaactgcagttcctcgatctcactggcaatcccttcagtgctgatcccaacttcaaggatactatgcttaaatggtatccgaactcaagagtttgatcaacacccaggt

SEQ ID NO: 15526 - DNA, 666 bp, Emericella nidulans
actgctgatctggcggtagaacgcgcatagcaccgcgggagacatccagggacaagggtggcgggggccgagctgcgcccgaccggctcgaaacaccgaggccgtgttcgatctttcagggccaagaccgcggagctccccgaagcggaagcccgcccacgcgaacccacaacacgcccccccacccgcgcggccccccgcccccgcccgccagagccccccaacagcccaagcccgaccacacccaccaccgaccacaaccccccccacacccccaaacacaccaccaacaaccaccaccacagcaaacacccccccccccaccccaaccgggcccccccaacccccccacccccccccaacaacccccgaccccaccaccccccacccgcacacaccacaacccagacccacaaacgacaccaccaaacccccccacccaacccagcccccgcccaacaccccccacacaccaaccccacccccccccgacacaacgccccaccatacacaaaccgccacacgcaccaaacacaccactacgacccccaccaaaggccaaccctcccacagacaccacccgaagagcaccaagaccacgaccccccccaccaaccaacccccccaaaccacacatatacaccacaccctaccgcacacaccccg

SEQ ID NO: 15527 - DNA, 4202 bp, Emericella nidulans
ggccatacattgaggaacacgtgcgccgcatcgccacacaagacaacgcggccatgagaccacttgttgcagctgcgtgcagataaccggaacggtctcgacctaaggacgctgatgcagttcccgggatattgcacatcttgcgtgagcctgtaaccatagctcagctacattctctcaccatcagtaacaccacaatcagcttacccgtatcgtttcctgcatgcgtcaggtaggggaagaatgacttctcgcgtcctttaggcgaagccatctcatcaccatcctcgcccttcaagacaacaaattcaaacctccagagccggtctgatgggagaccaaatcgcgtacagatagctgggcgcttaggattgcacagaaatcgaaaattcgagtggaaaaaaaggtcgtatacctgctccggcgtgtacttcagcttccagagcgggaaatcagggtgtgttgccatcgtaggcaatgttaccttccagtttagcgctacccatgtttcgtcatagaaagcactacaacgacaagttagtagtccaccttcgaatgccatctggcttgcttttaaagacttgcccatgagcttgttccatcagtatccccaatggttcgaggtaatttttactggtgaatccggtcttgccgtcggcgccgacgaaaaacctggatcgtatagaacgaagttcaccatccaatccgcgataccgacaatacgtccaatcgtcgtcctgctggatctcaaggacagtggaattggctcttagttggcagaagcatgaggatgccatagcatcccgaaggtgtttctccagaactggctgtttattgctgatgaagccaacatgccccgtgtctccttctgtctggaagacagtattcaatgttaatccttgtatagagtcaagagcaggaaacagaccgtagaataatccatcttcaggaaagaatcccgactgagatctttctcagtccctccaatgaatttgattatctacatacctaaagttcgttttagtatcttcagctgtgggtatgggtttgggtgggcttcaaggcgtccaagcaacgtacaactcccaatctcactgtgaatttgtctatatatgccaagcccttgtatcaagcggatgccatcttcatccaaagcaataccccgaggatctgtcgtaataccgttctctctctcaaggaggacgtgatttacggacgtccgacttaaatatcccgacagcatggcccctgtaggcccgcatccacagataaccacatctgtagtttcacatccttcagaagtagtacttattttgtgtgtaacgtaaatgagagactgcgatgtggccagcagcggcggattgtgttctgatgatatatcgcttgaaggcagttaataccgttgatctcgcccccaactaatcagattgaatagtactagtgcagattttgttggaaatcaatataacaggcttactgggatgtaagttgaaaataggtagccttgtccggatgtcgaattatccagcgacagacttgtatgccgcatggatacggagtacggagtgggttaaattctgtttggcagtatgccgtttggtcctgatacgagcccagggtatgatgtgtcgtcctctccacgcgcaagaccttgatccatggtgtgacataagtgtaggcagcttcttttgaccatagagaagcaaatctatgattggcccagaatacgccgaggggtctgagcctgatgtagtggaccttcaatcacggagtaaagtctcgaggaaaacgtcccgtttcccgatctgtcctttgaagaacggaatgatgatgatactgatgatgatgatactgggaaattcaagtcgtctatcaatagatcaaatacaaaatatgatcgaagaacaagcatattttatagaagactggatcctcgagagatggacaaatggcgagcttctcataaagcactcttcagtcccattgctgaatgtatttaaagatgcggatcttgtagatgtaccacgtactaatccttaggagtacctagatgttgtagtacatctacgctttcgagtctgacttcggcagagaatgccgaatagcggccgacgggacgggagcgcggtcccgctatcttttacagcacgtgactttaatatagcagcatgactaatctcaaaaagaggatccaggacggcgcagaaagaaatcgactcgacccatcaaacaccgataaactgaaagcttgcaagactcttcgctctcaacgacgctattcattacatcactgaactgtacgaataccaaaaccagttacgatcatgtcccgtgaagcctaccaagtcccctccctcggcggcggcaatgctttcagcaacgacaacctcggtgcgggttctctcgacggtcctatcgtcgcctacctgtgcggtgactgcaacgcccgtgtgtcactcaagcgaggcgatcagatccgctgcaaggagtgtggacatcgtgttttatacaaggagcggacgaagcggtgagtttttcttccctactgtatccgggcgtgaatgctgattaggacattctagaatggttcagttcgaggcgcgataggacaataacttagactgtggtggcttgttcgagctttgttatggttgtttttcgcattttcgtggcgctccgggagttaggattcaaaagacagcgaagcatagtgttgcggcttcatagcggcacttgcgcgcaagagtattgctacaaagggatggctgaaactatgcatcctgtatccaagagcaaatattctctggtgaaatccatgatttggtacgacatgatactcattatacccaatcactttttcctggtttcctaaagtcaaaattcaagcacccgggcttggttctctcattatttcataacaagaatgcagccgaaaggccagagagaggaagaggatagtaaaggacaaaatagccgaaaagtgctcatgtctggctcttaaagcttgtttgtaacctcgatgaactcctcaaagcatttcaatgccgagccgctctcgatcgcccagcgcgctcggcggacaccctccttccaacgaccgcctccaggaccacgttcggtaatgacctgtccatcatcgccagggcccatgttagagctgtctgcttcgcagattccagaggttaccaagagcgcggcgacgttcatgagcacgaagctcaggattggatcatctcggggtagctcattgcgtaaaatctgcatcagtttggccgcattgtctttaggcatcttccgtccgtagacagcagtcagcgggtagctaggcagaccgaaatcggcgggctcgagctggaattcatccagtttggctattgtggggggagtcctgtactcctcatcttcgtcatcctcttttgacagatcgtagtcggggttagggatctcggataattgccagcaattcgtctttcctgcacagctaatctcatccagatcctcttcaccgcagataacgagaccttttgtaactccgttctggcgcagcgcttctacaaacaccggcccgagagccttgtaggccacaccaacaacacgagcttcaatggcccagtccacggggtttgcgagcgggcccatcaggttaaagattgttcgcagtccaagatttcggcgcacattgtcagcgtacatcataccataatggaagttcggcgcgaacaagaaagcataattcgacgcggcgtacacttggctcaggttctcggcggtgacagcgccaatcttgggcgggacgggagtaatagcattcaacacatcggcggatccggagaaggatgtttgcgcgcggtttccgtgcttagccatcataagaaggggggaagcgagaatagacgaggtcgttgagatgttgaaggtggaatgcgaatcgccgcccgttccgactatgtcgcactgcaacaaaagcacgagtgttagaacggtatacaccacattcgaaacatagacacataccaggccacctctgtaatttccctcctttctcccacgagattggatcgcctgtctcagagctgccttgtcggtttggcgagcggcctctctcatccgatgcgaacatttcgcgatgacttccgcatctttgtccaattgagttgaatgcaaaagtgtaagaagagctgcggtctgaatgtctgaaagac

SEQ ID NO: 15528 - DNA, 694 bp, Emericella nidulans
gtagtaagcgactttgatgagttgaacatgccctactagacatgctcgcgtctcatatatttcagcttgagctggctcatgaggatgtcccggcttgagattcactagcctggacggactgatcacgtccgtggatgcacctagcttgggggccgatagagctcaactggcctatgactgctggaacaggtgggccagttgaggctgactgggcatcgtgatcatcaatacgatccacgtgctgtagtgacctgacaacatcataccgtatagggctaccctgcggtaggattatcacaccgtaaagacagaggagaaacgagtaggcataacgcaggccgttttgtgaatcgcgctagccaaatccggatagactagcgagtgctcacgcattgcggcctgggttgagggcacagatcgactgcctaaaccgcctgatggctatgcgaacaaggcttatcatgcaccaaccatggagcggatatagtagcatgagccatgagtggtatcgtattctctaccggagttgcctgattgtactccacgtaatggactaacgctacatcaaccagatcgccaagctcaagcgactatcatgtgcatatgcgacgatcaactatgcattcgacgctgaggcactcgtgcttggttagtgagttgcagcggatcactacccattctatctgcctcgcgt

SEQ ID NO: 15529 - DNA, 2085 bp, Emericella nidulans
ttttcgaagcggagagtgggcctgacaacaaggccgtcgatacatgcgtggcgctatggaagatttgggcggtatgcatggaacggtgaccggatttcaatgcggaggcttcatgcttggtcgaagacacctaatgagacctttcagctggtatctgttcaaggatattcaattgtgatatcttcctgtaggtcagaacagcagagttgtgtactgcgtgtgaggatgcggaaagcgcctcaattgaactgtcaaaacctgaccgcctttacgataagaacttcactgcctgagggcccaggcattagtaaccttatcgcttctccgcggtcggcgaccgcgaattttcccattcacgcgcatattcagaactcctttaaacgcttgaaacggcattcaattacggattctgggtcttctgattttccgctcttcgttccgtcgtccagacgccttttctagccggagacaggagctcctcctatctccgctagtcactcagccgagattcactcagattcgcattcaggaccagattgcctggctttatgattgcaggaattcgcagggcgttctatagaactgcgattctgaagggcatttgttctcgctggattctttttattcggtcaaatgtcactttcctaagattcatcccttcaacgccgccgccaaagactatttgcgcatgtgatctgatatacaagaccaagctgtccacgcatatccagatcgcacttttacctactaaaactaacttggaaaattgactgttgcacttgatatatccgccagtttcaaataggaaagaggtgttgcagtccgatcgcaggtccccggcccgcagctcgaaatggtcaatccgtatgagaccgatcctgcgcgtataccagaagacgaccccttttaccaacgaagtccccaatacggccgctatctcccgcgggatgatgattttcaaccccgctatgatgactggtgccaattcgacccccaagcgacagaatattgggaaagcaccgtgaaggccctgtgtactccggaaaactcgttgcatttacatggagaaaggcaagcatatgctgctggcagagttatcatcagggtcgaccaagaagatgcagttggtgcggccgccgagaggttcttatgcctgaatgcaaatgaactgagtgcatccaggaaagctgataacgctttcaaacacctgggggtcgacgttccgaaaatatattactgcgggataatagatgggaagaatgtcacagtggaagctcgaatccctggcgtttctctggatgtcgcttggaggtacctcaatccggaacaggttgaggtcatgaaacaacagtgtcgcattgtttcacaagagctcagcggcgcagacccgggcttggaccatccatcctatgtctgcagtgagttgaactcacatatatcctcagagggcggacaatatgagcgcgatatactctttggtgacgaaacacctgggaactatcgacttgttcataacaatattcttatgtctaacattgtcgtgaataaccatcgcatcgtgggactcctgggttggcgacacagcggttattttggctttgcaagggcagacaaagtacatcggcagatcagggttccgcgcctaatggcagagtctgaatcagggcctttacagaacgtccaaacttgggccaacctctacgaaagccttccagggactgtgctggctgagccagtatatccaatcaagatcgagccttctagcacgagcctggatagagttcctttagatgctgaagaagtgaaaaatggcatagatgcacttgaagaacatccaacacctaagaaggttgtgagtctgaaaaaccgaggaaattcacgggcgtcgtcgtcagaccggtcatccccagccaattctaccaaagcaccaggcagacgggcaggacctggaacaaagaagggaattgggaggaagacttcgaccaagaaaagcaaacttgataatcaggataacgagagtgtcagcagccgccgctctcaaactccctcctcttctcgcacaagcaaggtgccagtgaagaaaca

SEQ ID NO: 15530 - DNA, 520 bp, Emericella nidulans
tccgacgccttagtacacagctcctagtgttcgccctcgcacaaagcaacgcccactgaccttgcccgctcgtagtcatcgacttccgagatccagtcccgcgccttgtcatccttccgcgacgaactcctcttgaacatccccgacgacaccagcagctactcccttctggaggggtgccaagctacgcagaatgaccatgaacacagaaaagcacatcgccgggggaggtccaaggggaagaagcccctgaaagataaagagggcgagcaggctgaccctccgtacaccttgaccgaactgaagaaagagcgagatctgcccagccggcgaatggagtcgatgggcgttcggaaaaacatgtgcagatcggagaatgttgacatcgataagaagaaggcaaactggcatcgcatgcgtcagataggtctgaatcgggtggctggcttggggatggagggagccgaactagagcagaaaggggggcaaaccttgagggtcaaaacccccgcaaataagt

SEQ ID NO: 15531 - DNA, 588 bp, Emericella nidulans
agacaaagcgcacattccccccaggggcgcaaacgccgcctatagcccgagctcggacactaaagacgtccgcgccctaggaacgacaacaccaccgtttgacccgatgcggggggacgcgcggcacctgcccaggggcacgacagagaagcaccgtggacaccgtgacaggagcgcagggaccggcagactacggaagaggccgcggacgggggcagacgaaatcaagagccggctggagcaaaagaacgaaggaaggtacgagccggaggcggtaatcggcaaatggggaaaaaaaaaccgaatccaggcacagaaggcaaccgacgctgcgggaaaacaaaagaacagcaaccaacggaccacaccaaggagagagaaacaacagagagcccaacgaaacaccgagcccaacagcaacacaccacaaacaacgaaaggagagacaaaaaccaggaacacaggacgaaaacgaaggagaattagccccagacaccaccccaagacccgacaggcccacaatgaacatactaacggcaacggaccacacaacaagcacacagaaaaacaagtccacaagaaaaccag

SEQ ID NO: 15532 - DNA, 556 bp, Emericella nidulans
cgaatcggcctttggagaccatcagacgtctgcctccctggtaatactcaccgactctgtactgccactgacgacgcccttgcctggcctgacgatacaatactccggacgactagtgacgtgggcctggcgaaatcctgctgtcctggcttagacctccctgctcagcttgacgatattctagaatacgaaggcagagttgtccaatacacgctacgctggagtctcaaataagaccctcatgcatgcatgacccatgacttctagactgtgtccagtgcatggaaccttgccccacgagctggactatattattcccaccgtatgcgttgaactgtgatcaatgaaccttgggagctgatccgcgtgtgagcatttacaacttattggacgaacagcccaccctgatcccgatctagagagatcgtgcatctaagaccactgaataacgatactcagtacttataacgtacacatggtactatacgtctggcgatcaggaacgaatgcgtaccacttagtcacgccgccataccgatatggggacaggcgtaac

SEQ ID NO: 15533 - DNA, 208 bp, Emericella nidulans
tacaagcctaccaaacaacaccgctaaaaattacctcactgtttgattccaccccctactgacccccagctggtgagttggacatacgaacctcgaatggcatttctgacgcagaatttgagccacactagcgcctttcctgcggtgcgagcgaacgcgaatgcggccttaatgcggacaatttccctatattcagaccttttgcact

SEQ ID NO: 15534 - DNA, 3221 bp, Emericella nidulans
cgggaactataagccatatgactgattagcccgggatcaaggtggaagaaaaggatttgtcatagacatgggatgggagaagtatagagatctttaatgctgtcatgtttgttttaacaagggctttcttcgcgatatcatgaatataccacgcaaccatgcatccacaacgcatcacgtcccttctgaccttttcatgctgagcatatgggcgccctagactcctgtcccagattatagggcttgtctactgtggcatcctcatctaggcaaacattaaggctccaagggcgcctggccaagtatcatagctcggtcagggaaagaacctaccgtatagacttaccagtccttcgagcctcttcagtggactatagctcaatatttgggtaacctggggagttctgtaggtagccatttctatagctccgtcctgaagtctttttttataaaattgtgtttgtgagcttgtatagcttggaatgaatatcgcgtcgatgagcaatgacactcatggagaagagccgggtatgattgagatctaccacattacaccagtccacgttccccagcaggagaatatatcccttccgtgatttcgagtgcaagctcgaggcgagcagatcgcggcatgtttcccctcgcggagccctaaatagtggctgattagattgccagaaattgatgatcaccttagttcttggatggtcataaactcgctggaaactgtgtaatctgaatggcgctttctattgccttgtaattaatcagtcttctcacttcgtacgtacttggttcagctacttaaaactccttgttggacctggaattgacacacttcagtcagtaaccacacttgaggctgtctgtctacttcaacgtaaaacccccgtcagtcctcactagtgcccccgtaatgttcccatctttcatcaagccaagatacgtttccgctgtatcctcgggcgcaccaacccttccaagcacagtctgctctgcgtacgtctccaacatgccctcaacaacgtccttgcttccaaatgcatcaaaaattgccgtgcggaccggccccaacgaaaccgcattcaccctgatcccgaatggcgccagatcaacagctagagtgcgcgcgaggccctcaactatagccgcgccgacaaggccaagagacaatccgggcctgggccggacgagaagaccaccggatgtataagttatcgaactggagggcgtattgggagactgtttaggcatatattctggggcatgtttcgcaacgagcgctcccccgatatatcggattgtgtgtagtgagcggagataagatgctgacacgccaggatctgtaggtggtagtgttttaggaatcgtaccagctgtgaagacgatgtggttgattggaactttgccttcactttcagcttcctcgccgaagaggcctcgtttcgtagcgaactcgaacaatcccacgacctctgcctcaatactatcatcgtctttgcctagatcgcatactttcccaacgattcgtgacacgtagggttcctcagggtagagagctttgagctcggaaacggcgtttgcgactctctctgggttagaggaggaaacgattacggaagcgccgtgctcgagcgaggcacgggcaacaccgaaaccgatgcctgatgtgccacctatcaagaggatgcgagagttgtgaagtttgttggttgagatgtaggaggacattgtggctcttgaccgttccgggttggcttggtcgatgtacgcttgaggtatttagggtttcggattgatgaccgtacactaaatgttattgtagtagggataagggctaataggaggaatacacagaagtatgatgaggattttatatgtagttactactccgtactgctagaagctatgacagaatgcaggcaattgtattttcaaagagatatgcttagcaatatccctaggatttgtcagcggtatagcctatctccgaaggatgtttatctccatccgaatgagacacggagatttaggggatgagacgctggacagcatagaggagatctggggtttatgcatatatccggtatctccagaggctcccttgaaataagagggtctacgcttttagcaaaagagatgctcacgtgacccacgaagttggagaggcacaatcatccactgctagcaggattcaggctgagtgctttttgctggagctggaaattggcaataaaactagtgggattgcagccgcctcaatcatttaggtaaaatcagggtgaagttaagattgcaaatatgctggaattagaccaaggtacctaaagtacaatacaaagcactccgtgcgccacccaagtataccaaatatcgtaatacaatcgaatcagtcattacacactgacttagtcccagttagaaatcttcatcgttccgttctcctggaggttcttgtgcatcttgaacgcgttgaagagcaggtggggctcgtgagccatgcccttcttcaagcactcgaactcagcacggtccaggtaatctgtcaggattggtgtgtagtcggggtgagagcacttcttgataatgacacgtgcacgctcacggggactcaagccacgcacatcagcaagaccttgctctgtaacaatcacatcgagatcgtgctcggtctggtcaatgtgtgtagcgaagggaacgatgcaggagacaccggtggggtctgtcttggagggccggacactaggggtgtgcatgatactgtacttggaagaacgcaggaaatcgcagagccgccgagaccgttgagcatgcgcgagcccatgacgcacgtgctgttagcgtgggcgtagatgtcgacttcaacgggagtgttcatgccgatgcagcccagacgacggatgatctcaggagagttggaaacctgttgagagcgcaggagaagcttgccagcatagcgctcccagttgtcgtagaagcgcttgaagccatcgggggagaagcggatggaagtcgccgtcgcgaagtcgaggttgccgctgtcgaagaggtcgaggaaagagtcttggaggacctcggtccataccttgaggttggtaaagtctgcgccacccttgctgaggccgccaatgacggcgttggcaatgtttccaataccggattggatgggaagaaggttgggggggagacggccatgcttgacttcatgcttcaggaattca

SEQ ID NO: 15535 - DNA, 526 bp, Emericella nidulans
aatgatctggcgccgaacggtacagctcggagaactcatacagggaacgccgcgcgaccctcgagctacggtcactcgtatagcaattcacttttcctgatgtgaaactgatatcctgtctacccattccaatgcccagctaccagtaatgccagggctgacaaatctgactgcatcgccaatactaggtaaaaggagcccaattcccttccctctgaccctcagacatcatgatatgaagcgtgtagaacgtactggcgttgtgatatattgtaccatctacgctccagtagcagtatcacactcaactttataagcctcgcatcgttccagggaactctccaattacactactatttcacaatgcacggcgcccgcatagatgaggatgcctcgtgcaggactctgccggccattgtactcatcatccatctgctgcgatggctcacagactattaaacccttgaactccggcctattttgcagattacatacattcgcaactaaatacagccccaaatggcca

SEQ ID NO: 15536 - DNA, 656 bp, Emericella nidulans
  unsure (1)..(656): unsure at all n locations
cgttccctaatgancggaaagccggttggatgatccttcatgaagtccaaaagcgatgcctcctgttacggttaaccaatacgagcgcggacattattcggtgtaccccacgcaaggaccggaatgggttcgggtggctgaaacactttccgatgtggagcgagaatacatgcatctctgcctcgattgataacacttcaggacacgcgctcagtcccagaaccatctacagcctgataccccggtcatccccgcgctcactgacgtaagctcatcttacgaggatcatgagaggcctacaaactgtgatgtcccttgaccttgaacctcaggcttgatgatgcggagcgccctgccccggcgattataacttgtgacgagggcgctctaatacatacagaggactcatgatgagtcagcagcaccttgaatgctctctagctactgaactgtgctagactagtccagcacactgcctgaattctctgggcagaacttccctctgcatcgagtcctaagaacacccctgtagaatccgggagcttagaatgcgtcgagctcgatgtgggtcataagactcgcattggagtcttgctaaaagtcactctgatcgtcctggaactcaaacatatgtgaacaacaaatgtcagactgca

SEQ ID NO: 15537 - DNA, 2048 bp, Emericella nidulans
gtttgtatcctttggtctaacgagcataagcagtgcctgctgcggtcagcacatgcttttctccaatcccggactgtcgagcaacgtacttgtttaacgaccaggcctcccaggctgtgacaaacccagattatcttgggggccctcgcagcctaaatggaaatcagtctctgtagaatcatgacaattgtccactctccctaccctctgctccttccgctccagatccaccagattcagcaaggtatccgcatgatccttgatactggcagtggacatggttctggcatcggttacggtggagttgtagccgtagacaaagacgcgagagtggttgatgtctcgcggaagaagatcccgcggccagaacgtgccattttcatgggtccaagtctggaacgggtggtcattgcgcgcgcgagggtttagcccatggacgaagacgaagctggccagcaaccaacattgttagtacggagtaaaagccagaggcgtcgagacttactcaataagcggggccccggctggagtatacactctctcgagaaagggatattccaagtgcacagtggcctggaaagttagccgcccggttgagacatgaccaggggaaacagtacataccatctcacgataaaaaggtcgctttcacgccgcggacgtgatgaaaaagggctcgatacagacgagtctcagtcctggtgagaaagagactcatcttcagccgcgagagacctcgtcaggtgatgaacgaggctgtttcgcgggggaagacgagacgagccatcttgcccaatcgcttggctgagcctgcttatggccttcgtgatcatgaaatgaaaatgggactgagtctgatgaaaagagagcaaaagcagtaagaagaggcgagcgcaggctaatcagacagaaataatgctctcattggagtagacccctgccagtttcctgttccgtcatccttggcgcctactccaacgatcttgatcttgcctagttatcatcactagcagacattcacagccttgcgggatatgatggggccaaacgatgaaaatcctggacgtagcgcaggcaaggacctgcttcctgaacgtggctaatgcaggtttgattgctgtctcactctcactatcgcccacttccagactcccattatctgacaagctacagccttcacggttgctaaactgctgatgtgcctgccgatcgtctgatcggccattgctaataatgatggaatcaagcattcgaatcctgattaccctaagctcttgtcactctttgtcgatggcgttcggcaacttccgcgcgagaatcacttttactatttgctgttgtgtatacaacactagtaacactgagcccgcgggatcttgaagccagtgcacagcctcttggctctcagacaatctcaagttcgacagctgatgacttcagtgggacgagagaccacggcagaatttcgattgcgatcccgattgtccgttccatatatagagtcgaaatggcgagaatgaggaaagaagcaagaaggggtctgtggttcatgcagcaagcagtcttgccgatcgcgcaaacaaggaagcccgcaccaacagcaattttcctgtttaaccgacagtttgccgttgagacagcgtcgccttttgtgcgaaacaacaagatcccgtagctccatgtgcgctgagtatgttcagtcgttgctgtctctggtgggcctctttagaatgctattcttctataccatttctgtcttctttcttctgtattctggcctcggcgcatcagaactcacgactctggtgcggacctttccttctcttatcaatgccacgcaaagcgagcttcaggccggcctccggctcggctgctttagcagtacagatcttgttaaggtctgtatctatccattaatattttcatgtcgtgcttatacggcaaccaggcctataccgcacgtatccgcgaggtcaactcaaggctcaatcccgttctggagatcaacccggaagccatgacgattgcagagcaacttgatctggaga

SEQ ID NO: 15538 - DNA, 3235 bp, Emericella nidulans
tgccatgcttatgggcattcagatccacagtcgagatgtcactcgttttgttcgaggaagagcagctggcatctaagactgggtgtaggcggggtgttgcaggcgttttgtagttgttgtaatgagtacgctgttcgtactgatgctggttactggacttcacgaacgaccggattttcaatccgctgtcgccgccaaatttagtcttaccttcgtctttgaccctgagatgcgccaagcccatgctgtctagatcgattctgtcatgctcgcaacagtgatgcattctgaaaccgctcctcttcaaaggcctgaaagcagccggttcaaaagcgagttccacgtcagcatccatctggtcagtgatattaccgttagcattgatgaaaccaactcttttgatttttatgcccagagtctcgttggcctcacatgcggtggtcggtactgctgggaagggtgctaggagctggttaagccgcgttaggcagcggagggtgcgggcatgagtgcttagtttggtggtactagaggtgaaggtgacagttcccgattgtgttcgagaacaggcttgaatagggtacattctgcttttggggaggaggtttgtgagcttgaatagtggtccaagattcggacttgacaaatcggtatatgaagggctgtcaaaatgagtatgtcttggaggtctactatgtaggatatggaaaaaatcgaatacgaaaactagatgaatggtgaaaacactcgatttatatcacccagctcgcttcagaacgtcttcggggcatacctccagcgcggtgaattataatctgaacgtggatatcagcacctaatgcacgtatgtccggaccaatgtccagctatttgtgctgggattaaagtctttcaaactaaaaatcagacttcaaagcccagaaccaagaaccgagaggatcggagcattgagcacgttagtcatggcgaggccatgcgtcaccggtgctggtttccgtaaccttcgtagtagcccaggatgagaactcaagacccgggagtcatcactccgtcaaggtaacgctatcttcaacattaccgtaccgtcttgaatagtctcccgtgctttctctccgggcctttccgccacctcgaagcaccaacagtgaggcgctggtttcaaagaggatagttccaagcgggatcattagagttacaagaagtaacttctcgaaacagccaacttggccgagaacacgaaatccgtgagcgagtaggctaatgctgcgccaatcgtaggaccgacatgggtgttttggacgaagctataccgaggctataatcaatcccgtagcgttggagcatggcggcgcgagaataggccggcaatgctgccgacatcaaacttggggcgactttgctcaaatacacttcattataaacaaatcgttattttgttccctaaagagaaaacaaaatgaaccttgttgcgttgacggaagtgcatccagatggtgtgttatggcaaagtagtaaactgcggtttagtgccgaaccaagggaacaagagatcttcaagttgaaatgccgacttgcacggtagcctgactgactcgcagtttggtccttttttgcaactcagctaaattttaatcacaaatgaatgaatggcgggatttgatgctcaacgctgcaggtaggctatacgcacctagcgatctgcgataaacaaaccccgatgtgcgggggaacggaacaaccttgttccattccagatcaggttaggcgcggtaaagcacgtggacaaaatgcttttgtcccctcacggctatatattgcccttcgagtataccccgcttgcaccccgactgagaataaacgaagaggaagatgtcgaaactcaaggtcgccatctctcagtcgcacacgcggcagactctagcagatacccttattgcgctcaagcacactgctttggctgcggccgctcggggtgccgacatccttctcttccccgaggcttaccttggaggttatccccgcactgccactttcggtacacgctttggcttccgcgaagcccatggccgtgaacagttcctgcattacttcaatggagccgtcgatctgggagacactccagctggagccggggatgattgggtggacaagaaactgcccgtggccaaagggaaacagtaccgcggcgacgggacgcgagagactctggagcagatcgctaatgaaactgggcttctgataattgtgggagtcattgagcgagcaggtggcagtctgtattgttcagcattgtatgtcgatccccaacggggcgtcctggggaagaggaggaaggtcatgccggttagtcggtgtctttactttgtgcttatgctacgctgacacgcagtagaccggctccgaacgcctcgtttgggctcaagggtcgccttccacactcaaggccgtcacgacagaaattaaaggcgtgaaattgacgttggctgctgcgatctgctgggagaactacatgcctctgcttcgtcaaagtctgtactctcagaatgttaacctctacctggctccgactgtcgacagccgcgagacttggcttcctcttatgcgaacaattgccctagaaggcagaaccgttgttctatctgccagtcaaagcggtcgtcacaaagaactccctagctgggtcacccaagcgccggaaggggagaagatagacgcaggtacgtatcgcgcaattattgactgtaagatactcattagcaatagatccagaagaatggactagtgggggcggctcttgtatcgttgggcctctgggggagattcttgctgggcccatctggaacgtaaacgatgatagcgatcccgataccgccctgcaaattgttgaagtcgactttgatgattgtgttctcggtagactagaccttgatgtggctgggagctactcccggaacgattcattcactctcaaggtcgagggcttggatctgagtccacctgctctataagtgctttggtagctagtatcacttccgatttacttgataccatgatcggtcactatcaactgctgtcatgcattaagaggcaaatggattcacatgatttgccatgatacgctttccgacatcatcgcggtaggttgacccaagacgagttacctccttttttctaagccaatcacaataaaaggctcttgacatataatatatgcatcgtgttggatgctctctcc

SEQ ID NO: 15539 - DNA, 797 bp, Emericella nidulans
  unsure (1)..(797): unsure at all n locations
ttcctaatganccaaaagcagagtttgatagccatgataagtcacgagacactcgaatctaattacagatgttctgtccataatgtgatactattttgtgtcgccacagatacgctactatgttgctcggctagcttgaatacttaaaggtcgggatagagaacactttgttttcagacttgtttgatagaacttcaaggtaggcggtaattatatgaacaaatttcagcgactttcggcttatcacctggcgcgaatcatactgtttacgctggatacgctctataacaggaattccaactggatggctagggccattgaaaccaaggacagatcttgcgtagcattagtagtcaggctgggatacctacaccctttgcaggctcgtcatactggcgagctcattcagattcgctagaccagcggatgcaggctagctactaaagtacgctagtatactcaaagacctgcttagaccggactgacaaagtctaccatatgccatctcttactgagcataaagagggagatcagggcatgtacatagtgagtgcagaggatatactcatttacgcatgagaatacggtactactgagctggaatgttatacacaggggatagctagctctgacacctacatggatcgctcatgataatagattatctgtatgataggctacacagctcaaagatgctcataaggagtatttcaagcgacacttggtgcatgcttgccacccncaaaaggcgcactaactcaagatgcacgggcattagctacgtgagcatgtgacat

SEQ ID NO: 15540 - DNA, 1880 bp, Emericella nidulans
ggggtaaaagaacaaaaaatacggtccgtggagaaaggcacaagaaaaacctccaaagaaaagccctaaggggttgatagaagccataaacccaatcccccaaggccttccgaaaagccctccacaaaaggcctccccaaaaaggtaaaaataaaaggtgggaaaacaggctaggctgtttcgtaaaggggatataaagcaggggcccaacaaaaaccttaaaagcccaagatttggttccgaccaaaccctagggaccgggcgacccctaaaggttcctaaaaacgggggaggatcttcgattaccttccaagctggaaatgaagacgtttccaacccctattacatcgatcaccagccagcccatgagtggaagatgcgcggcatcctggttgactggctcatcaaagttcacactcgcttcggtcttcttcctgaaacgcttttccttgccgtcaacattattgaccgtttcctctctgccgaagtggtcgccttggaccgtctccagttggttggtgttgctgccatgtttattgcttccaaatatgaagaagttctctccccccatgtcgccaatttcagccacgtcgccgacgaaaccttctctgataaggagatcctggatgccgaacgtcacattctggccacgcttgaatacaacatgagctatcccaatcctatgaacttcctgcgccgtatttccaaagcagacaactacgacattcaaacacgtactcttggaaagtacttgatggagattagcctgcttgatcacaggtttttgggctaccctcagagccaaatcggtgcagcagccatgtacttagctcgtctgattttagaccgtggtccttgggtatgctccgctaagtattaatcatccatgggatttcatacactaactgatgcataggatgccactcttgcccattacgctggctacaccgaggaagagattgatgaagttttccggttgatggttgactacctccaccgtcccgtctgccacgaagcattttttaagaaatatgcaagcaagaagttccttaagggtaaggtttttatcctgaatatcctgttcgtgcgttaacgtctgagcagcctctatcatgacacggcagtgggccaaaaaataccaccatctgtacattgacagcgcgctcacagagccgtacaactccatcaaagacaacgaatagagaaaagtggtcttcgacagtctgcgtattcgttatctgaggctaggagttggttgatttatgttggcattttgtttgtgatgggttaggcaactcttgcatatgtttacgactgcatcctggttcaattgcggacattggcattcttcggttcctcgggggggtgtctggcgctttttgttttaatggcttgtttctattcacttctctataacttcttggtgtctccgggatactttgcctttgcttaatgaacttttctgacgttcagcaatactacatgttatcatattctaccgggccggagtgcagtggccatgttaactttgagctggtatggcggcgttgatgtttagaagattctttatatatttaagcggggcccgacagcagccgaggttctcagtctactgtgtacctcctacctaccaccattttttagactgttgattcttcttttatcacccactattccatcaatatcagttgcagaggatgtctccagcatgtcccttttgtagcatagccgctgcccacccgcctgtgcgcccatccgcacatcgccaaccaacggactccacgctctcagcagctacacctaccccaggcgaagatggccacgccttcatcgtactttctacaaaacatgttcttgcattcttggacataatgcccctc

SEQ ID NO: 15541 - DNA, 813 bp, Emericella nidulans
ctcgttatctacagatcggaagggtagtggtgcttcgaaagagcacgcggtgtctgaggtgattacagttccagctcgtatagctgggggttttcgtattagctctgatcgcgctcggagcagccgccagctcaccgcaccatagccgaatctcacgatcctttcattataactacctctggacgtcatatcgcgcatgagatgtacaactcaagagaggatcatcgcatctcgactcaggatcactgccctgataccaccataaacctgtaaaatgactcgacgacgcagctgtgtccactgctgtggcatgacgacggtatctcaaggcatgatgaggcgacccggctgggactactgcactgaggtggtaccataagacaaacgatcacatattgtacttcatccatggattagaccgtctgtatattgggacccggactctggtgctggggtttgttgatggaaataaggtaagctaacgcctcgatcatcgtggggatctctgcggacctagagacgaggctcacgccatacatgaatataggtggctcagtgctatggtatgacaggaatcgatacccaagcagtggcatcacatatacctcatgatctccgtgtggcaactacaccttctgtgcttttctcggacctataaagggtgtagttagacagagggctcgctccatagccgctgcgacgatagaatacggcaagcatgagagctgagggagcatgcacgactgaagagtgcccaacgagaacggctgagccgaaatgcctccatcagtgctgaaagagctgcgcgcactg

SEQ ID NO: 15542 - DNA, 644 bp, Emericella nidulans
ccggggtaccgggccggaatttccgggttgacccacgctaatgacccatgttgaaattgactggcagtgtgtgctttgttgcaaaatctggcaggtatactcgtgggagaggtagatagcctggagctcaaccatttcctcaccgaagcgtctctgaagaggttgctgggctggataactattccgggaggcggcggcactgagcgcaaggctagtgtaatgggtgggctcggagtaaacagaaatggcatgtgtactctgcatctgcagaacctgtgaccgccactggcccggtttacactctagaaaagtgcttgactggtttggacagggataaggccgtgggttgtctacaaagaccaatcaggctccgtagctgtgatgacccataattctggcataaggaagatccttccagagtctgagaaatgagattaagagtgggaccctgtggcacctcgatgaatgcgatcgaaggagctgacattctactattcatgtcaccccccaagaagggattagctttgcaagcttgaagccgtggaataatttgaagatagaatttaacagttgtcggaggtgtgcatgcttaaaccgtggactttttataactacttcacgtagagtgtcatcatctcacttct

SEQ ID NO: 15543 - DNA, 2873 bp, Emericella nidulans
acgcgaatcggctttggggtgggctagttcgacttttctccgtgtcgacgacgcatccctatatttgagcccttaccaccgccaatatccttcgcggaggattttgataatcgctggctactccctgcccttttcagcgccccggaccttctcatccttgcctgccatcttctctgcaaagagaccagaaagtcccttgtgcgtttggcattttcaaaactctgacccagctcatccagtgccctgaagcagagattcagataagccgtcatctcgctgctacttccctcaagttgctcaagacccgtcctgcttgctagtggcgtagtcgagatcgtgacgtagaggaggatgagtgccgcgctgaaaatcatcgacactacctgattgttcatgcggcgaaaggtatagtgttgttcgtagatgtggaggagacgcgcaatggcaatagaggattcaatgcacattttgcgcgcgtggtggtagcctgggccttgtcgcggtgcgcgcggttggatgtaggactttgagacccagggacggtgtgtgaagattactatttggtggtattggaggctgcctcgcgtcagcgtgtacctgattactcattccggtttatgacttactgtagcattaagaggtgagggagtcgaggcgttgtatcatcagcgaggtcaatatcgaggatggagggaaggttcgctttccaagcaaagaggtcatctgttactctgtggcagaaacgctgaagttcgtggcgggggatatcagagcagccataactataatagacatattagtctcttgcagtgctgctagaattcaggtggtgtcatacaggacatgaccgagtggagagataatctcccagagcacggcgaattgcctgcttatgagctcgttgggattctttaactcgccgctgagtgcctcttggtttgctggaaggccatagggacgccacgtcccctctttgccaactgttaagctcgatgcgggctttggaacggtgatatcgcccgcgttcatccggaatgggcgacccaggtaaaaaccccagaagctagcatagtcagaggtaactagttcattttcaatatccaagacaatcgactcactgatccgcggcataactcccccaaaacgcaacccgccgtacatcggcctcataggcactcatatctcccttctcgacatatggcgtcatgtccaaatgcaaacccagatcaaacgcaagcctcatcgacatcccactatagagccagccacgggcatcgcggttagacgctccctcatggctgctcaggattacgagcgcttgcactgtcgcgacgcatggcgaatccagctcgatttccagcagggcttttgctctatccgcaaagaattcggcgagggatttgggaaaggtaatgaatgtggggtgatagcgcgcttcgaaagcgcttccaattgcgcacctgcagtcctggtcagtgtgctctggacagtgagaaagggttaaggagcggcgacttacattgcgttggtgagaacctccgagtagaagggagtatcatcaaattcctccctccacttctgtctagccgtgtaatacatatctttatcaacgacataagtactgcagttttgccatgtaaagtacagctccaagagatggtcttcgagagcctggtctacagactgtccaacgcgcaagtgattgaggatatcctggccatcgtgacgcacagtccgggcgtcaggacgctggcgttgttgcgttgcagatacatcgacaagattaaggttcgacgtggcgccgaagaagcgcaggtgaccgtcaccagcgattttcagcgttccaatgcgatgagagatctgctcaatgacgtccttctcggcttcgtcttcttcaccgctgtcgctgtcttcatcacggtcccggtcgttttgtgcctgttcaagaagggcgcccggctgttgcgcaatatcttgggataagtgaaagctctctggactatagccgttttcgagcgacgcctggtatccgcctcctccgttcatgtttgcgtagagcgagtctaagctctctgcggtcgggagggcaaattcccagcttgtctgaggaagctggaaggcgaatgagttcagagattcctggttatttgcgccaggttgttcagcatgtgaggtactgagaacgttctgcaatggcagagctgaggattcagacctcccaatcccattttcgggagattgtccgttgaacagaggaactggaaggggactgtgagcgggctgctgcaccggcgatggttgtttaggagcgaccaccccatcagaggacggcgagtccttcctcctagacactccacgggggatctgtaatgtgtccagaaccctgttgatacccgcctcatcctcgggcttcatggatggagggtcgaggccatggtcgtagatgaattgaacgagctgatcaattctcgcggagaacagctctgttgccgcgcgtaacgagactctggaggaggtcagccttgtagcacgttccacaactcatcccagtatcttgagaaggaacatccggtcggtctctttcaaaacagacgtcgtgcttcgcagtgggcctcgcaataaacgatatgggccagattggacgtacttccgcttgtcgtctccatgctggtatttgcagtgctttcctttcctctcgcaattgttgcagtgcggggaagcgccgtcacactggaattaacaactcgattagtgtttttctcccatcaagacacaaagaaaagtgcgtactctgatcttactctcccgacaaggcacgcatgccgtggtgacgtgtttcctcggggccgtttcggctttcccgactcggacat

SEQ ID NO: 15544 - DNA, 475 bp, Emericella nidulans
gccttcgaactgttactgctcacctaacagactcctcaagcgatgctgggaagaccaggattctgacagtaccgctatagagaccgattctgggttacttcgggctcgacaatctctgccttcctccgttgccgcaggatatccggatggcggctatcaagcagatttgtctctgctatgaaagtgcaacttttgtgttggtcttgggaaagcacattctccgctgtacagcctacacccctggcgtcgcaatcgagcctctccttcaaatcattatttaagattggcgatatcgagtcttgacgctgcaggaagccatctttgcaagtaatctgcttttccagttcggcgacgtggccgtcaacgatgctgaattggtttacacacattttgctgagcattcatcgaaggcaagttcttacactgaatgctctttctttcaggctggccccgattcggattgaaataccactca

SEQ ID NO: 15545 - DNA, 2121 bp, Emericella nidulans
gagtccataggtaggctttgccactcgttgtctcttctacttcaaagaggccgtgagagaactcggttgttattttatttggtgggctaccatctctattcctagagaacctgcagctcgcaggaaagcaattcggagaatggacaatgacttcgaatctgcgaaatgcaccctgatgcacgatcagtatcttgtcgatgtcccgtgggctgaagacggctctccctgcctcgcccttcttctctctccatggttcacccgagtctagacagcactcgagttggccctgtcgagtgaagtttgaataatgttcaaagacccctgtaagaagaacaaagggttatcaagaatctgcggtcggaaatacttgtcaacgaccgtatctattgttctcgcaatcatttgatcgcatctgatgttatcgacgccgtctggagaccgaaattcgactctatttccggcattctatcgggcctcaaaaacagaagtacctcaaagacacgagacaatcttatagttgcggctctgcttgcaggtgtgctatctacaccgcaggcaagagatagcatgcctgcagctaacatgcctgccgaactcgccaaagccatccttcgcggaattggagcaatcaaaagcacatcctttttccatggccatgctacactcacacaaaagggtggcttttcatagtgcccattcgatttcctgcatggcactgatgtatcctggtacaaagagcgaaacactgatcatcaaattgatgcgtttgtcgatgggaatcgggcagttattggaatattttggtatggggtactagaagaagcggatctggggaccacttttccatgggtctacatacgacattcgattacaagatatctgctgcaatgcagaaatggagaaactgtctgctgctcggggagggttgaagaccagcatccggctctcctggtcaaagccgtcacaaccacgacggtgacacttaccgattcactctcaaattctattgactcactgtaccttggtactgttcttaccggccttgctcccaaaaagggtggagataagttcataatattggtccgtttagggcaaatcgaagccgatcagatgtctctgcagataatatcgtgaacaactatttccagaatagaccacgatttggagaatccatggcagaactacgcgtttctcgaaaacagaattcgcctcttcggggagtcttgttgaatggagcaacgcctttggtttgctcaagaactagccaaacgcccgcccgaaacggagcgaaacggacagactgacatcctgtgacagtgttatccaccaacaggacgtagatttagccgaggtgtctgctttgaaatggaaggacaaaatatataatagattgacaagaaaatcataaaaaaaaaaacgagtaaaaacatgaaaacgacatggagcattagccagtccaccagcattgtatggactggccgctaaaactagatattttatagccagtgccggcaaggtgagcctcaccttcggctggacattttaggatacctgagcttaatgggcccttacatccagcgcggaagagttagggtactcttctgcctcatcctcctgacaataaatttagtccgtgtgattcgttcaacaaactaaaacacctccccgcatcctaagaatacatcctcccgctactagcagcggaatcttctaaggattgcctaaggatcgttaacaacatccgatggcctgctcgccgcacctaccataggttgctggaacatgctcgggaatggaattattctttcttcctacagcctatgacatatacagtatagtgtgcctattcgcagtcaaaacaccactctcctttttcgtgcattgaagctagaagttttcaccgggctcgatgcagagatttccgctatacctacaactcaaaagggttatctccttaagctgtttatctaatttaagtcttttttattttgtatattgttggatgtactcaaaccactgtttgtggccgattgcagattcagcattcattctttagattactggttgtttcgaataatcacgactttagtgaagccaatctgttaaggcctgccatgccgt

SEQ ID NO: 15546 - DNA, 483 bp, Emericella nidulans
gagatctcaccctctacgaatgcgtgatgctatagatgctctgggttgagccctgagacgagagcgcttgtacctcggacactaattccatgctgatgctcaagggaatttgtatcaaccaatcgaggatgtccacgaggcggattcccctgaataccctggcaacagtattaatatgccaaacaaggacgatggtatacagactacacctgctgtgtagtcctaagtcttacgagactcttaccgcgcgttatactatttcgctttttacacgcatatgctaaggatgttgggaatttggccaactcgagtcactcagtcaacgatgctggtcatacatgccctgcgaccaatctactggatatcggtgtgagctatgatgcacgctctactgtgtaactagacagtggatctgcaattgatacatggcgttcttgatgaagagtcgatagcttgcatgcatgcgaggagctagctgctgct

SEQ ID NO: 15547 - DNA, 3676 bp, Emericella nidulans
tgaattctcttcttggtctcgcctatccctatccaacaattgcaaagccatgtcctacaatcaagaccatctggcctatggcaataccacaaccaggcctctgaaggcgctggcgaaggggaaagtgcgagaagtctggtgggagacacattcaacatgctgaagagcaaatacaagacacatcacagctctcagcagggccaagctccagggaaccagaatcagccgccttctcagagctataacccagggacagggggttacggtgtacgttgaagcaatcgtagcgttatacggataaagactgatctgtcggtagggggggcaaagctatccgtcatacaacaggcctggctccaggccgtctgattcgaaccagatttcgagtaagccgccaaaggataaaacatccggtttgttcgggaagctccaggacgtcgttgcagatctcggcggcgaagtcgctcagcgtttagggacagctattgatccgcaggggtatgcacagtacgggaagccgcagccccagacgcagcaccggttcggcagtttcgcccccgagcgtcacggcaatgatgtccagtggtacgtcgacggatgctcatatttctacgccgtctccaaagcgctagaatctgcgagggagtccgtctggatcctggattgtaagtggtagcagagaatatcctggcgcagactaactgtaaagcagggtggttgtcgccggaactgtaccttagacgcccgccggccaaaaacgagcagtaccgactggatcggctgctacaggccgcagcacaacgcggcgttaaggttaacattatcgtatataaagaggttacccaagcgctgactcgtatgttgccccgtcgtcttcctcagtagtggggagttgctgatgaagcacagtttcctcggcccatacaaaacaccaccttgaagcactccaccctaacattgctgtcttccgtcatccggaccacctgccagacggtcaaggcctggcggcttccattacctcttctctgcaaaacctgtctctcgacgcactcaaactaggacagatgtctgtcgacgccatgaagggtgtctacggtatccacgaaggtgtcattctgtactgggctcatcatgaaaagctctgcatagtcgatggaacggttgcatttatgggcggactggacatgtgctacggtcgttgggacactcaccagcatgcccttgctgacgttcacgataaccctgcagacattgtattccccggccaggactataacaatgccagagtcctcgacttcagcgacgttgctcatcccgaccagaacaagcttgacaggacgcagacttcccggatgggatggtccgatgtcgctgtcagtttccacggaccggctgtggaggatattcgtcgcatgtttgtcgagcggtggaacttcctctacgatatcaaatacaagtcccgaaacgactcgaggttctcaagactggcactgtatggtcagccgggctcgtctagtggccatccccaggcacagcagggctctcatcagcagggcccccaccagcatggccagcagcagcccagtcaacagaactctccctcggtccatccgggtaacactcagcagacttaccagcccgcgcaacaccaacctggtcatcagcactatcctgacacttcgcagactactcctcagtcgcaaccaagctggtctcagcagcaaccaacgtatcaaccctaccatcccggccagtcgtactcgccgtctcagggtgccagtgagctgcctccgacaagccctcagcccaactggaatcaacaacagccttcatatcagtctagtcagcaacagtcgcatcatggaactccgcagtcaccgtatactggccaatccttcccacctcctccccccggaccgcctccaagccagggttctggtcaagctcatacgccgtacttcccgcctccgcctactcaggccacccaggaaaatcaacactcctcccaccgcggcttaatggatgactacagcgaggacaggggcgatcgagaaagggcttctggtgggaggccagcaggatctgcatcaaacttcgtgcctcgtcgtttccgagagaactttgattcactccgtggtgagctagctggtcagatccaccaataccaggaccgtatcaccagcaatgctctaggacgcccacagcagcgcggaaacatgtcttgccagattgttcgtagttgcgggaaatggagcaatggcacgccaaccgagcattcgattcaggatgcgtatgcggagattatccgccacagcgaacactttgtctatattgaaaaccagttcttcatcacagcaacgggtgataaacagaaaccggtggagaacaagattggcgctgcaattgtcgagcgtatcctccgggctgcccgcgcaggccagaagtacaaaatcatcgttgtgattccgagtgtcccgtgctttgcaggagacttgggcgatgaggctgcgctgggaactcgtgcaatcatggagttccagtacaactcgatcaaccgcggaggaaacagtatcatggagctgattgcgaaggaaggctacaatccaatggagtacatccggttctacaaccttcgcaactatgaccgtctcaagtacaccgttcccaaagccgctcctcagagcggaggctttgggcctgagcatcgccccgcctttgacacatccgcggcctatcaatcctattcatccagtcatgcaggacccaagtcaggatctgtgcagtgggatactgtgagctcgtgctacatgctcaatgggcccgaccttcggagtatcccttgggatggtcccaccgaggcagagatcgacgcattcgttacggaggaactatacgtccactccaaggtaggtccaggataatatccctattttctcactgcagctaacgaaacaggtcatgattgccgacgaccgcatcgttatctgcgggtctgccaacatcaatgaccggtctcaagtgggcgaccacgactcggaaatcgccgttatcatcgaagacagaacgcccgttccatccaagatgaacggtcagcagtggacagccagtcgcttcgcatcctcgctccgccgccacctattccgcaagcatcttggcctgcttcccccccaggactacgagcatgttaatgatcactttgacttcgactcccctgaaagccaagtcgtggcggatcccttggcggacaccctcctcagcctctggaacacccgtgcccacaaaaacaccgaggtctaccgtgaagtcttccactctgttcctgatgacaccgttcgcaattggaatacgtacaaggagttctacggctactactttaagaacgcagacaagcaggcgttcggcgagaagatagacggccctcccccaacatacaagtacgggcacgtggtcgctgagaagttccccggtcccgacggcgtaaagcgagtcaaggaactgctcagtcaggtgaaggggacgttggtggagatgcccctaatgttcctgtgcgaagaggatgtggctgaatctgggctgacgctcaacgacttgacagaaccgctttatacctagttagattatgactgagaatatctttgtattatttagaatatatggcagtcttcttgtgttattc

SEQ ID NO: 15548 - DNA, 430 bp, Emericella nidulans
atggaacgcttggtctaccgctatgaactcataacgttcatacctccggctcatgcgagcatgtacggctcgaagccgaatccaacttgctgataagaaatgcacgaagccagcccagacagatgcatacgcgagggatgtatcttaccggaggcggaaactaccaccattgtctaagcgggtgctgagtgccgcgtctggggcctctatgcatattacgcaggactctactgcatattaccagatgccatctatggcaggcccttacgctgatgagcccggcaccagcctttccagtaaagtcgtcggtggagtccgctttgttgccttgcgcagacactctatcaggccatggagaatcggagtgccatcagcctatctgcctagacggatggccaccatgcgctgcacgcattcgtccatagaaaga

SEQ ID NO: 15549 - DNA, 553 bp, Emericella nidulans
  unsure (1)..(553): unsure at all n locations
accgaaagatcttagtctcatcaagtgcggaaacgaccgcggacgtagcttacggcctctaatgcagcgcccagctatttttatgtgacctgcgacggtgtataccaatgaatgctacctcctactgccatgaccatatttcaattaatctcccacaataattactcctaatccactaccctcactaatcaacgtcagaacgagagctgctcagcgagatacctgacttttcaagcccctccatttgctctactctccctccatgtttctagactcaagtccacaccctcgtacccgttgctcttgcgcacgccgggacattctcgcatatgttaataccctacatataccgacacacgcgcgctagactggtacaataatcaccagcgcatcngcccactttctagacaactcaaatcgcggagttcgggactacacacacaccccttagtgtcgactgttttggatacataaacaacgcgccctaagacgaccgtcgactccctgcggattgtttaggacgggagaaatttgggaggccactctattcaga

SEQ ID NO: 15550 - DNA, 2295 bp, Emericella nidulans
aaacggttagcccggggtacgagcctgtgcggcaaagagcagggtctcgccagcggtgagattgggaaagtgaatctcggtttcagcctggtagatcacctccccgcggaatcgactgtgcatctcgtcccacgaaattccttgatattgtatatccgtcccgtcgtcgagccagaggccgtgagtttctccggcgatcgttttgagaaacgtagaacacccactaaatgacgaaaaagatgtaagcaacattgggaaaattgagcaggagcgagtactgtgttaccttccgggtcgcccaaggaccaccagcatctcaccactccgaacaaagccttcaaagtcgcgcaagatgtcaatgcggaccctatctacgaaaccaagcttccgacgaatccatccaaaccccttgagccacatattggcaacatccatctggtaatcggcggcagtcccatagccaaaggcacttagattgcgaaatgagactcccgcagtgcggcgggggtaacggtctgggtcgcgattggcaacggagaggaagttctttgtccatttgcgagcattaaattggccagaattaggatcaagctcggggtcgctggaggagtcgaggaaggtgtttgtgccgtcaacagcgccgcttttctgtgagagacgggataaattccgcgcgagtgcagtgatcttcagctcgctttcttgatcgatatcttttctgtcacggtcgatatctttctcggaactggcacacgtgatatcggaactctctgctttttcttttgctgtgcttggtgcgccgttgtcatctgttatcctgctgacggtctctgagggctgctgcaccgcaccaggaggggcaacgtccccagagggcgctggaggcgagggctgagaagacatcacgcaaggtcagacaatcaggatatcacatagtctggcaaatagaggcagggggtgagaagtaaaatggcggaagtcgttagggaaagaccgaaggttaagtagcgagagtcgacagccaacccacgggccatcaagaagagaaagaggaccgccgggacaaagtcaaataagatctgagaacggatcccggaaaggcagcatccgagcaagagaacaagtgactcacaaacagggacagggacccaagagcagccggcccgatgggtggtgcagttcagggcctcccaggcaggaggaatgacaatccagttgcatgttttcgactggccaatacaagtagataattgacttctaaatattataagaaaaattccgataggaaactaaaattgcacactgcagcctgtactccgaactagtcggcagcattaagttcttacattgggtctgccccgtacccagtagtgactccaaactgggtcgggctatcgagaatccggggctgacaggtgtggaccttgatctcagtggagcggttatcactcaaccaggaggatacatccagctgatgttagcacttccgacttcagaaaggcggtgttgccccgacgagctgaacgaaaataattataatagtaatatcagtgtttgacagaacggtgtcctcagcttcccgaccggagtccgagatcgaatcgtttttcgtattttcgtattcattaggcagtgaccccacaaggccgacccgagtctaacctctttaggataatgcaaacagttatgcaaatcacaatctcgctgataagaggcatggttgggaccgggaaccagggtccgactgggatgttcacatgggtcccaagcccttgctacattaatctgagattagcatcaggtatatttcatgagcatatgtggagtatatgtgaagcatatacaatcgctgacaattggcaaagagactattaatctgacgtgagccacctggatttcagtttgacctgaggtctcggaggttttcccgcttcgcagcaggctagggccaataaaagttcttgagaaggtgtccactagtataacacagtacggcgcatagggaacatagggagctatcaacctatcggttcgcacatcagactagcttacatcgccagcctacatctccagccttggcccgcgataatggcctctcgcgtaagcgaaccaattcgccactcctataataagcatcacgaccaacacaaccgacgcataatctgaggatataatcagcagccgcgattgttctggattatatggggcagcttactcatatttcctcccgtgaccggaagggctgcgggaaagcagaagaacacagtcaatatgactgcccagataatgcaaacc

SEQ ID NO: 15551 - DNA, 751 bp, Emericella nidulans
ccttcaaactacaccatgaataacaggttgacagaccttcttttataactacaaccaggctagataaaagggggtttattttcacaattaggacgggctccagactctcacggacttgctttaccgcgcagcccttacagcagtgatccacacggcggagatgcactccggtctagcgtgaactctgccaagacatcgcgctccagtattgagcatgccagcggaacagagagaagtagcgttcttactaaaagcagctctattaccgatctatctccggatactccggatggattgtacgaaaaggatgagggcatgagtgtggaagacgccatctccatgtatctggatggatttagtgacgtgactgaagagccggcgtcgccagatttagtcaatgacaacaaactaaagcccttgaaccccttaccaccagcggaccttatcttggacgatgacaatctgtcgacttcctcacacaacctcgaccctatacctgattatccaccgccaccaaccaatctgcaaatgggcacccccgatgatgtctactcccgcaagcactacttttaactgcatccaaacgagcaagatcctgaaagcactcaaagggaacccgcttgacctccaatggacccctagcgcccctttggacaagcataacaagggaattttggcctgaccccgatgccagaaccgtggcccccaatttaggaatgcgttttgatacccaaaaagaggggctaggtcc

SEQ ID NO: 15552 - DNA, 3228 bp, Emericella nidulans
aactcggtccccatagtcctgcacctctacatgtcgtccccgtctccctctgtgtttccctctggagaccccagctacgcggtcgtacttgctgaccataaggctcgcaagcttctgcgccccgtgaactcaaagcttgtaatcccacgcgtggcagagcatctggacgatcgcggccagaagtactttaatgagactccctcggaccgattgggccagtcgctcggccaagtccatcccacggaccaggcgagtctggacgagctgtggaaactggccgagaccgaggctgccgtgctgatccatatgctaaaaggccgggaccgggaagaagggcctgttctttgagggtgagaaagcagggtatgcggatttactatttgcctcccagctggcatttataaatcgctttaacccggaactcttcaagaagtttctgcaactaggggatggtgagttcaagacgctatatgaggcctgtctgccgtggctggaggggcagggagaagacagggagtggcctgtcccgtcgtgttcttcctgagggagaaagggtttcttgggagagtgtattggtgactttgcagagctcttgtctgtttgagaaggcctcagattactattatattctgtcgtgaaatagacaatggtcgaggctaggactgggattgagtgtcgcactggcgtagatagaaccaccccaggtcacgatcgggtcatgatactctagcgtatgccaccgcagcttctgatccccgtaccttcccctataacagaacggcgtgcacatatttattttccacaagactgctcgtcgagttgcttattcggcatgagactgttttctgaatactgtctagtcagccgcagcgttccaccgagaatgcccaaggcaccaaccagacaagatgcggttcaattgagaacgcacaaccacagtctccgtagacggatatagccggaaagtgatatccagcgcaccaataatagtaggatttttgtggagcagtgctctacttacatggagatgccgcggcatgctaggcattatgtgggaggcatcggcccagcccacccctctgccgctgtcttttttcagcaggggttgcagagaaaaacgtttcggcgcctggcagtatatttccggcgaggagaggtgtagaagggtggtagaggtgagtggtactgcaagtgtgcctgatcgtatgagatttctgtagcagcaaataccttgacaagccgctggtggcagccattttgtcaggtagaaaatctcgaaaattcctctactccaatcattgactgctgcgtgtcgtgtaaacgaaggcgagcgcagcatcgcagctctctatgaaacattggcagtgtcggggattgatctcggactcagcgcccaaaacgtaacaaatccgaggttggggaaatctccttcataaagctgcgacagagtccaacggatatacggcatttgcggaacaagggcagctatcatcagccacaaaagatacccgtgggtttatccctcgtactgagttgcctctgatacgagtatagcgccggcatgtatatgggtatataggtgtatatgggtgggagtgtggttcgaacataccaaacggtacccgacagctgccctgccgagctttctatgttcaaggttaacagagccagagatagacgaggaacccaacatgaagaacaacgcaaaagtatcagctcatcgccttcggcgctcggactgacagggctccgactgataatgtctcgtgctggctagtagcgggggctggtgagctggtggctgctataagagctacgtaccaagccccggacctcttcacgggtctcagcatattcagaaaaccgctatgcctcttaaagtgctcgtagtcggtgccggtcttggagggttgggggcagccattgccctcaaccgggccggccacgatgttcttgtgcgtcagatggcgctcatccaagcagtcaaattgagctaatagttgaccctctaggtcttcgagcagtcccgatttctgcatgaagttggagcggcaatccatgtggcccccaacgcttctcgcatcttacaatcgtgggaggtggacatggaagccctgcaggcggttgaatgcatcgcaatcaaggtctgggatgcacaggggaacttcatctcaacgactgcggttggtttcattgtcatctatcattgccgatccccgtacacgaggctgatatgtgcggagcacaggcggcccaagactaccggagcatctcaacctctctgatgcctggttgctgacccatcgggtggacctgcataacgcgctgcgcgctgcggccgcaaaggaagtcaatggccggcgagttcagattcggctggcctctcgtgtcgcgactgtggtcggttacgttgcgggccctgcatttttacagtagctgatcccaagcccaggacgccgaagctggagcagtcacatttgaggacggatcggtatacaccgccgatctggtgataggagcagatggaatgcacgtatggtatcctatccgtaattatacacctctcctgctgacaactgaggcagtcaagaaccgtcagggccgtcattggaacagaccaaaacaaacaaagcacagggcagagctgcttcaggtgtctcatccccgtttgcaagctgcgcaataattcgttgacttcaccacttcttgacaaaatcgggctggacgcgacgattgtcttcaccagccccgaccgacggctggtcatgtacccttgtcgtgcgggttcgcttctgaacttggctggcatccatccatcagacgcgatggccagaaccgagtactcatcgtggcttgactccggaagcctggaagatatgctagcaacgtatcgagatttctgccctgaactgcaagaattgtgccgccaggccgaggatgtcaagttatggagcctggcatcgcgccagcccccgccgacattcgtgaagggcaagctggccttgctgggcgacactgcccatccgacccttccacgtaagtcagtcctgaaccgcgtgtcaacgccattctcaccagtgaagaccagggccagggcggcgcacaatcaatcgaggatggcgcggctcttggggccattttcgccccagatacgaccccggttcaagtgcccaaactgcttgcagtctacaataagacacgctacgaccattcgatcactgtcatgat

SEQ ID NO: 15553 - DNA, 525 bp, Emericella nidulans
aagcgctgaggtttttacctatgaacggcagctctcacgaccgtaatttttattatctagattgagatattaaaccagtgcctgaaaccctatacggctctatgtgtggattgacagctgcatctaccatacatgttgttgatggctagatctcgaaacagctggtggctatagcgggcaatatgataatgcgcttgccgttggcaggagtgcataatgtccacctttttatgatgggactgggttatcggggacagatcgcactcgatttcccccatacatggtaaatggctcggctgagggctttgttacctgcatgatactctatggatgaaactgcatgcaggcttgcatggcttacgtatgtgctacaacttaaaacatttttaggagcaatagcagtgcactcatcaccttcaaaagactgctaaaaggaactttactagaagatcgactcatgtatcattggcctagctgtatagcactcacctgaaagactgcttacccactgaggctacggtatag

SEQ ID NO: 15554 - DNA, 3776 bp, Emericella nidulans
acagagaaatcagcgacaaatggcgacaaaatcctgcaaggggacctggatgttacggaggcgatgatagactatatctttcgagagctggagtggaaagcctccgagtatgcaaaaacgggaatcgtcacggcattcgatccgggactggcaaaatcggatacggctatttcgcaggaccttctagaggaacttcgagcggctgtgaaaccgctcgaagatatttctgatgaagagaaggattgccatcctggctcagatgggaaggttgttgacttggtccacccatcactctttcccctcatttatggccgaacccgggtccttcgcgacaaggttattggaattgacaactgtctcaacagcgtcgggcaaggggccgtgctaaatattgataaaaacacggaaccttctcgcatgaacacgagccggcggagattgcgacggattaacaagtacagccaaaggttccagtggctcccatgcaatgtggaattcggaccaaacggagagtgtcagatcgcgtcctacatcaacaatcttcatcctgtaaggcacaaaaatctttaccatataatcgagcagattatcacacgaaccattccgctttggaacgtctctctggccccgcggggggacctgccacgccgcatcccttaccgcagggtttcatacccatccgacgaagagcccgagcctgaatacgacagtagcgatgattttgacgagcgttacgaggaatggcgagataaccgtcgaccgaagcaaccggagccctgcccttttcaggccccccggtctaacatgcacaagcaagttgacctttgcgaacagtatcgtgacaaagggctgcaagtcattgtcaagctagcaaatattgagctcaccccagagaaacctgactacgagggtggagcgtggcatattgagggacagctggtggggtgatcctcgctacatcgatttaggcctacgctgaccataccctagaatgagaggatctgtgccactgccatttattattacgactctgagaacattactgagagtacgctctccttccgccaccgtgccgacacaaattattttcaagaactccgttatgaacaggacgacttccagttcctgcgcatctttggcttcgaaccaagggcgggtcgcaatgattatgagcagatcacccaagatcttggttgggtgtcatgtcggatgggacggttgttgaccttcccaaataccctccaacaccgcgtctcaccattttcgcttgccgatcggtccaagccaggccatcgaaagatccttgcgctctttctcattgatcccagccggcgcatcatctcaaccgcgaacgtcccgccacagagggaggactggtgtaacgattgggcggcagctacaaacgatgtgctgaataaccgcctacccagagaactgcaagctatggtccgcgaaaatctcgaatttccaccgatgactatggacgaggcgaaagcataccgtgtggaactcatggctgaaaggtcctcgaagtcggagtccgaaaatgagatgttcacacggggagacttctctttatgcgagcactgaggtgctttattccttacaagccctataccccttacatatatcttgtttggcaatcgtatcaatatccaccgactggctggcaaccaatacttcgagtccaatagaacgtatacagcacagtagatgatgcctcctcttctgagtccggcggccgggtcaaagcgcaccattgccttgggtttgtgcctaagattccgcacctcacgactggacgcaatttgactccaaggttttgcgcagaactcgcaatttattctcaatcaacagtcacaataaacttttgccgaatggatgcgcatatcaatgagtggagattctgtgaatttcaactgccggccagaatctccgtcccttttcaccacctcgcaatttgaagaaattatctactacatgtcttcaaacaggtatttacaccttatcacggttctttttctcttcgcatcagtgctatgtcaagatattgacggctctgacgacgactttcctaatgggggtcctccggcgagctatttccgcgctgcccctacaatgcccgtcgctgcgctccagtcggctgcctctcgtttagggaggacctcccacggaggctcgtttcgggttagctctgactctggagagagatcctctatctatagtgattgggcattgtttaatgaggtgggttactataatattgaatgacccaactaacaagtacagggcgcggcggttgtctggacggcggacatggacgttgactgcgatggaattgactatgggtgcaaggtgccagtcaataatctactttctgaaccactgctaatatacaaaaagggcaacgccgatgggcgtcctgagacaagctggggtgctctgtcggcgtacgaggtgcgaccatccgacccggtctcctcttcagttatcatctaatatatggaaggtcccttttattgtcatcccagaggagtacctcgacaagcacgaggccggtctccccggcaataacatcgcagccgttatctggtactttcttttttatattctaaaaccctaccaagctgactcttcagcaatggaaacatgttctacggcatcctcggcgacacaaatggtgacagccccgaggttacaggcgaagcttcatggctaatggctcggacttgctttccgactgagggtctgaacggggctagaggtcataatgacccagatgttacttgtattttcctcctccagtcacctgaggcgttagctctgacagccaaactagatattgtcttccttggtgaggacgccgtgttgcccgccagtgctatgaatgacaagtatatcacggacttcgacactctaagggcaatgggagatgagctcgtcaatgctctagtcagcaatatcggactgggttctggcgatcgggcgcggactcggacacgattccgtcatcctttatttaaagccgttgatgctgctacgggtacccgaggaactgcttccattctcaatgcgcgttcttggaacacaacatccggactctctcagtccagtaattcctcatgcactcccgcctcaggaaattctacgactccatgtaaagccaatgcctctactccagccacttcgtttcccaatgtctcgcctccaagtaccgccaagcctcctacacaagccgcttcgaatactgctacacccgctgttggttctactcccagtgcttccctgcatgcaggtgctgcttctccgagtgtcgcctctccttccagtgccgctactagcgctgcagctacttcaaacgccccatcacccccgacaccaacccccagctgttcttggcccgatcactgcttgggtacgttgtcttgaacctttcacatttttcccggttcaactggtgcagcagctaacggtctttctcctaaggtgctccatgttttactctcgacgactgttccaacgacctcgtctgtgtgaacgggttgtgcgctgtcgaccgagatgtggcctctctgtctacctcgtcgccgactgggacacctgctgtcaggagatggatcacggctgttcgaggcttgggatttgatgattagatcccaggttctctcattatcttctcgctgcagtggatggaacggccatggtaagcttgtacgggagaacttggagcctcagccatggatcactgacgcattgactctctattcacttctact

SEQ ID NO: 15555 - DNA, 2176 bp, Emericella nidulans
tagaatatagaccatagcacggggactcgttcgactgtagcgaaaggatactgaagagcctgattatcaagagcgaacatgcgatggaacggggtcacaaatatctggatctcgaattgttcagcaccagtaccgtcaattgagttttcaataggactcgcgaagacctacaaaaatccagcatgctagaatacaagccaaaccgataacatcaacaagtgggtaagaacgcaggaaaacacgcgaccaggctccagcaataggagagacgggaaccgtcgagccagccgacaacgtgctgcgggccatatttgcgctcttaatgaataacgaacgtcatggaggtcgagactcctcgactggagagcatgcgctggaccagggataggaataataaaggtgtaggcggtcttgtcggccatagcagctgcccgaacgcacgggccatcaccaacctctggatctccgcgatgattgcgggcgaaaacatcccaacatttgtagcttctaaccttccatttccagcgactccagtgcgctggacctagcgaccgactagaaattacaactgtcgaatacagtcgctccctcactggataaagacttgccagtcatggcagaacctggcagaactttcaatactgccttcgctcctcctccacctctctggaaacatttcacgcctgaaaacttacagagattggaaaatattaagaaagaggcatccaagggagaggatgggcgacgaagaaagaaagaatggtcgccggccgaattgcgctctttgaaaatacccccagagcttcgattcctcgtgcctccagagattccttcggagcagtatagcatctttggggaagttcagaatgtgaggcgccgaaaccatatgctactcggaacttactaacactgcctactagctctcaacagctcttccttccctcgaggaacaagggattacccagctctacccctcgtcgcccaaacccgacacgaaaagcggagacagctcacaacccgcgcagccgctgaaccatgcgtactatctcttgaaaattagcaagtcgttactcttgaactttctagagttcgttgggatcctgtctgtggcgccggagcagtttgaaccgaaagttgaggatattcgcaacctctttatcaacgcgcaccatctattaaatctatatcgacctcaccaagcccgagaatctcttattatgatgatggaagcgcagttagcccgcacaaaagacgaaatacaacagatggacaagctgaaagaagaagtaaacgccgtattggatcagttggctgccgaaggcgctgatgtgggatctacgattcagtccactacaaaagacaagaaaggtgtgaagccggaagatcagatccctgaggactcgaagctactttgggatattcttgacggcaaactcgacgactgacctgagaataaccttgaccgccttatgcgctgtcccttgcgcaaaacacaatcagagcattgctcgccaaaactactccgtcgaccgcatttgctggctgattggcatgctcaggtctttggagagcgatcaatacatcccatgcagaagggttaagaacgtcggcattctaagccagacttaagagatacacaacaacagccacttgtaccaagaaaccataagcaaaatctgcttttacagcggaatcgactctgcaattgtgttaaggcggacccaaaaagctcggatattaggttgatccgccgatcacgtgatgcactagtctcgcttccttaaattggcgccaaatttttctgcaggtaaagaagttttgttgacagcttcagtacgtcaaggacaaatggcttggacgcttcatctctccttccttgaaggaaaaattcaataacgccggatataatactgtctgtcgcctaatcatcacacctgttcctcagtttctactaatcactagagtaagtcaacgcattttcttattcccgataaccctcaatgatgatttgccttttatctttgtttcaaccccatctgaacgtacttgtacgctttggtgataattgcgcatttttacctcatctatctgaaattaagcttctatatttgctttgcattctcgaaaaaccacttggtgtatacctactgacttgcttagatttgggatttaagag

SEQ ID NO: 15556 - DNA, 339 bp, Emericella nidulans
agaaaccaacctgatgatgcatatataaagcggacttaccacgcatgagtcacttttcagggatgcctcgagacgaagcatatcttatgctatgaaccggtcatgagctacctgaatatggcctgaagtacctctggctaggcgcgctgggacggcgtggtcgggctagacagcataacatggggggaggactgcatatggcgctcatgagacgtgcccaggccagcgccagcgccgggagcgaacaaagcccatgaaggatgctgaggagcgggcattatagctctagccatggatggggcctgataacccggcagactgtgatccagtgaccgacat

SEQ ID NO: 15557 - DNA, 5237 bp, Emericella nidulans
ccatccccacctttgccaaaaattcggcctccgcaagaggaattatacagctcagcctcttcagactgtatatcagagccggcttgaacctaaaccaacaaacacccaatactactatagtatttcaggatgacagcgaggtttaggcaaggcggcgtctgcacaaatagaatatgtggaaaatgagacaacaagctgctcagcctatcagaggactcgcgcaataaaacctgacgatgtcatattgttgatgataaccgcactgaaaacatgctaggtcttattgagctgctaaactctaagcgttagctagatccaggctttggtatttctgccttaggactcatgagacgcaattcttacctggccgtcttgtggaaaagtaccgttagggacgaatatccactggcccggggattgacttcgaggtaacgcttcgagctcagctcgctgctgcggagtgaggttcggatgtgcatatgctgtagtggcttttgttaggcaggattggtttcgatagggcacacttactgttatatgcaggtacttcatgaaccgggactggatgtacggctccggcaacagaggtttgtggatgtgtttgggcactcagttcggggggacgaggcgctaccggttgtgtagtttgcacagtggtagtcataatgccggggctagctgtgttcgcgtttttcaatgtccgcacaagccgggtaagatatatcatagataccagaagcgaggcatccagggcattttgcaagacgagcacgattatacggcccctgctcgcggcagtcacttgaagataaagcacaatctccacaatagccatgtataaggatcgcaccatgggcacggcggagtagatgcgattccgagatacaaatctctaaaattttattccattcttagcatcccttttcagaaaggggcacgcaagagacaagtagaagatcggggcatgaatgttgaacgtacctgcgcccgtagctccatacggtttatctttgataccatggagtaggagattacgactgaaatcccatttgctaggagctgtagcaatgtgaacgtcaaatatgtttcttgatatccgttgatcggttcccagcttaacctgtcatagacggccgttcgatagtccccctggtttattgagacaataaagagataggctgtgataaggacaatcatacaggatagcaaaacgccctgacatattttttccgcgccggtgttgctatgatgttttgtgcttgagttggcgacttcagataagtatcttcgggcgagtcggaccgcccgtgacatgggaaagagcgcgacgaagaccaagaacagatgtgagatattaaaaaagatatttgctgcaattcagccactaacataatcccacagggacatgctactgcattcgtgcgcccccgtgaagattacactcagggaggtcgaccttgcaccagtcagcagtcacgcctcaagattcccaattttgggatccaaagggagggaagagaaggaaggtatagtacaggattaaacagaacaggcatgctccaaatcggaatctcagcaatattgggacacctttgatcttccggccgttgattaggaacgcgatatgttacaaggcaatgataacatagacaacgagggatatcgccatgataactatgaaagcaatcgaatgattgcaaggatcgtaacctgacgaggatcccgaagagccataatcattgttattacctgccgaactcgtgcctccctcgaacactccatcaggaatgctgtcgggcagtccgccggagctggagcctcctccgcgcctgggactcatgctcggtctgtatgaagaagtcttagagagtgatttggtattgatagattcaccaaccgttctggacaacaacgacaccgtgcagcgtaccggacctcatctttatacccaagcaacctgccttggtcccatcaaatcgaggctcttcagaatcaaaaagttgttcaggagtatatccttcgcagcctcacagcctcgcaacttgttcctgccaataggctcacaggattctcgacgcctccgaagttggcagaggaaaacacgaggccaagcttctcggcacaacctgtccgtataccaaataaccgagtgtcgcaattcgtacctcatccatccaactgtcatccttcaacggctgctcagatcttgaagaagaaacaggacccaagcatgaggcgttgtacctcatctcgacgttacgcaagcaaacccactcttgccccccgattgccggccgacaacacgctcgcgcccaatctggctacccaggcgctcgaccttcaatgcagagtgttgcttgaatacctcttcaaggcgctgacgccgcatactctctccacttacaagccccgcgtggaactcacgttgatcgactatatccagcagtaccccaatcctcttccggcccaactcctctgggccacgcgctgcctggcgactcttcactcctccgtggattccacccctcagccaggtacatctgccctcgtcaacagtcgtcgtatgtatcagcaggctatccgacatctcttaatcagcctatactgccctcgctctgcgcgctcggacgaaactttgactgcggccatgctgctctgcgtctacgagatgatcgaccgtaccaaccctgaggcctggatgatccactcccgcgggataaccaacttgctccggatacgtgggcccaaggcgcacaggagcggaattggtcagacacttctgctatgtctccgtccgatcctcgttgcacaggctttgactcgtgcggagccatgcctgctcggggaaccggcatggaggaaactgggcaacgagatgatgcgctcccagaaaggtgcagagcattttctgaacacttggactgagtgctcttttggggagatcgcgatgtgtccgggattactggctcgtacacaggccatcctctcagatcccggcttctcattagaagacgaagcgataacaaagaggaaacggctgctcacgcagataacctccatccgcacagcgttacgaacgcttaatctacagatagaactggaattcgggaagtatgatgctgacgaaaaatcgccttgcggtctgcggaggctgtccgaatgtatcccgcctgactccgcggaacggtttgttctatacctacatcgaggtatccaggtcggcgccgctatgttggaccagttagtgactctgttagtgtcggacgataaaagacgttgtcagcaagaaactagtgcaagtgctgcattgaagaggtattatgacacgcaggacagtacaggtgtaggggcaaagaccattccaagaactcgcttagacgctacacatctccctacacaaacagagtcattagccatagcagaggataatggtcgtcgggaaacttcttgcctagcacaccagttggacattctgtgcatgagccaggggatgatccaggtaacctaggtggaactgtagagtaactgaccgacatattctatgtacaaatgcatatcaacttgaatgcatacccatccatatagcatctgctcggatcaattcaacagaagataattattcgtctattcgaacatctagaccttctgtatgcctatgcctttatatgtgtacattagttcaggtttcccggatgtccttcatctctgttgctttctgctcaactctcgctcgacggtggagcaatgaggcttctaatcgaaatcggagtatatgtgctatcgtagaaccccttcctttgttcaactacgtacataatataggaacaaaatcgatataaggtactttgcctggacaggtctcgattatgatggtgctgaagtgagagttgacttcctgcatcagcccacgccgagtgcgaccctacaacgatcctatggaagcttccgcatgactcaggagctcaggcttctgttgcagtagtttttggttccagacttcacatgtcacctcttaatccggccgagcggggttcacccggtgccgtaggaagtgccttggggttgggccagacgctgtatatttcagaaggcggcattttagaggttgggcagcgctccccaaggagaaagcagattcgaagtcattgcattggagactcgatgcgcacagactccattactcagtgtatggcattctcaactctgaacagagaattgatgctgcttaaacacgggccggtctatcttcggctctaaaaccaggtgatcatggtcgtatcaacaataaataactagacaacttacgtagagttcgcaccatggccagacatcctacatagtgaccactatgtagccaggctttctatataacgacatgagtcagtcattacggcaatggcttggctcgtctatacttgcggctcctgggtatttgattggctcaagccatctttccactttctaggacattccctcacactttcttccttcaggaggcttagcattcagcaggagatattcccaccaaccataggcggttatggcactttgtcatttgttagaggcgtaagtgcgctagccactctgataaggtcgtgtgtatatctaccactgacttagtctcttcagtcagaccttagtgactggatttttccaccctgctcagcaaatgttaacttaaacgaaggcggacgttgtcatgtgcactgatctttaaatcagctctcggcccgaaccgaaccaggctagggcacttccagtgaacttgagctcttctgccttgatttcgccatactctccgacgagcttttggctcataaggagtaactcatcttatatgtctttggttttctaattgtctatcgaggtatacatgcatcaaatctcccaggcagatattgtcagactgtccgataatggcggaagtcactgtgcgggttctgaacgtgctccacaagcgccagagagatgcgaaccctgacttcttccagtaactggccaattcctaggctcttctgatgggtttgtgtaggccaggtgaactgtgactgtctgaatgcctaagctctgtacgtaggtgaagcaggtgatgggcgctgcggcgtggaaatctacatttgcgccactgatcttgggatcggcgcgttttatgctctcataaaaagccatgagcgccttggtcgaatgagaactgggatcttagaagaacccaccccagatcttcgtggacgggaaac

SEQ ID NO: 15558 - DNA, 250 bp, Emericella nidulans
caatcccgacggcagagcaccgaggctgggggatattcttataagacacaggagccaattatgcgcataaccctaactgctgagacgggggctcgatccatcggcaaacactggtaaactactctccgcgccggtttgtttcttgtagaagacgtgtccatgaaccttagtaactacgcacctgtattagagattcgtggtccattgagcaatgggtcgccctgttctaataataacacctgcagcttca

SEQ ID NO: 15559 - DNA, 3641 bp, Emericella nidulans
agtggatcacgcccatgccaatcgccataccgatgggcgtgatgagcgcgaagacaccgcccatgatggctttgctagggaacgtacgacctggcagaagcgcgatccgggctcctagcgccagtccctcgaagaactggtggaaaacaatcacgacaagaagggtcttgtaaaatgagtcgcccgcgacgacgagggttaccccgatgaggatactgtgaaagatgacaccggcttccatgaccagcacggagagctttgtgttggggttggttgggtcgccgccatgatggtggcccaggccggcgagagtggcgtggtgatgcggctgcggttcttgctcggccgcggacttggaggagatgttcgagccattctcggctggctgggatcgttcggcggaacgggccgcgcgggcgagaataaaacgatggcccatatactcggtcaggaaggaaaggaagataccggccatcacgacggctgatgtggtggcctcgtagtcgagctcgccgagacactcgttgccgaacatgagatctgcatgtgtgtagagctggttttgttaatttcttccagagagggcatgatggatgtgactcacgtgaacgaatgcggtcgagaggatgacacctgtaccgaactgtttgataatggtggacgcccaaacattgatggtcgcggaaggaagcttcaccagacccatagggaggaacacaccaatagagctggtgacgagaacgacgaagagcgtcccgatacgcaagggcatgtcataatctcgagtctggatcccgcacgacgactcgctggtgctgccaccactttctgattccccaggggcaagacagtgcctgtctggtcaataattatgcgacacagatggaagaggcccttactctacgcctgcgtggaaatggcagttctctccttccgtgctctcttccgtcgattcggtggtcgtcgtctcttcgttagtactgttcgtgctggtggagctgtcggttatctctcccaggatctcgacatcgtttcctcctgcatcgacacagtacctacagcggtcagctagggtggggaggccagacggtgagtgcttaccatgtgcttccgtgctcgtggcagtcggtatattcagagggagggtctccggccggcggattatctagaagtacctgcacctcgccgccgtcgtcggtcaaacagtatacatcgtcaccatgcttgtggcagccggttatggacacagcatgggcaaggctggcagtggccaagacgggaagaaggattctcatggctcgtactacacaaggagcaaggcgttgacaatatgagtctgtgcttgagcttctgacaggacccagagagaaccgctcagagtatttaacaccaccgtccacaaggtatcagagcagtagaatcatgatctggacaccacagaagaatcttcccacgcatcatcggtgagtgttgcagtttccatcctgctaaccaccaaggtacacacgccaagcgttctgccaagggacttgattgtgccaagtgccaacagcagggccgcgacagatctgaccctctgacagtggagaaatgcgccgggcagtttctttcttgcagtttagcccgtcgtccccagggtcctctggtggccttggctacttggcaagacgtgggatgcaaagtgatgccatacgcaaggcatcagaagatacgagggacccaaggagttccatctcttggggatccaagggtactcgagagttgaggaagaggaaaggcataaataccgtcagcatggcggccctgcatgtccctgcagattgacagcggtcgagcttgaaacccagagcagacgcacgttcagctttcaatatgcagctcctcgctctcactttggccctctgcgcctcaatcgcggctcttcccactcagcaaaccccgttgccgttggaggacccgatcaagtctcctttccccatccaccacagctgcaatgccaccgaacagcgccactagccaccgctctccaggagaccgtgacccttgctgagcacgccaaagaccatatcctccgttggggcaatgagagcgccatctatcgcaagtactttggcgacaggccctctctaaccgccatcggagcatacgacatcatcgtcaacggaaacccagataacatcctcttccgctgcgataaccccgacggcaactgtgctcttgagggtaagcttagagacccctgtcttgtgtgttcgaagctaacattcacaggctggggtggccattggcgcggcgagaacgccagcgatgagactgtcatctgcgaactcagctacaccactcgtcggtccctgagcacaatgtgctcgcagggatacaccatctctgagtgggagacgaacaccttctgggctggtgatttgctgcaccgactgtaccacatgcctgctataggacagggcttggttgagcactacgcggatggatacgagggcgttttggagctggcggaggggaaccggacagaagctgtgcatgactcggagacccttcagtactttgcgcttgaggtgtatgcatatgatgttgcggtcccaggtattgggtgtgttggtggagaggaagagaatgatggccagggtgaagaacagactgaggagcctgctcaggatgatcagcaggatgaggcggctgaggaggagattcctgaggtgagcgaatgtgctgtttggtgacagctctggagctaacaacccttagaattgccatactcatgaaggtggagagctgcactgcacctaagttattcaccttcagacgattcgtgccatgacacattacctattttctgcgactgctccccgtcctcacatcccttgagaaagagaaaagaactttatacgatctatgatgcagacttggatgaccactcgtttaaccttctctataatgcattaatatatgtctatcagactattcttattatcaataatcacgcagaagcacaatgccctccattgaccctcagatccgcccccgtcataaacccgttcccatctgccaacatatacacactcggcgccttgaagtcggcagggacaccgagtctgcctaacagggcgccgcgcatccacgtctcctcgacttcgggcttggctaccaagagcgcgtctgtcatcgctgtgcggatgtactacccaacagaattagcagagacttcatctagaaaaatgtgataagagacatacgccggccgataatgtgtttacgcggataccatactggccccattcctgcgcgacagagcggcacatctggtgcacagcagctttggaggagttgtaggcggtgcatgttaagccctatcgacacttagtcttctggtgtctgttacacgatggctgagaagatggcttacccggttcgcgatctgcccagacatggacgcaatcatcacaatgcttcctcccgtcccctgttgcttgaagagttgcgcacagtgcttagcaggaataaacgtcccgacaacactaaatgccttagctcaatcccttcccttggtagtgcctatgaaaaatgattgaaaatgcatacttgacatccaacatcttcctccaaagctcaaccggatactccaacgc

SEQ ID NO: 15560 - DNA, 3489 bp, Emericella nidulans
ctgcccacatgactggctatttcagcatgtcagctgtgtcgtacatcatggtggtgccggcacgacagccgcaggtttagcacttggcaagcccacaatcgttattccattcttcggtgaccaggcattctggggctcaattgtttcgcgggccggggccggaccagacccgattccgtggaagagactcacagcggagaagctggcggaggcgattgagatggcgctcaaagacgagacgaaaaggaaggcagaagaaattggggagcagatgcggtccgagcagggtgctcgtaatgcggtttgtagcttctaccgtcatcttgacgcagagagcctacggtgttcgttatgtccaaatcggccggccgtgtggtgggtgaaacatttgcatatcaagctgagtgcgtttgcggcgacggtgctcgttgagacggggcttgtcaaaccacatgatcttgtcctgtgcgtcccttctccttcctttttctgttcataattaatctgggctaggtaccgctcaaaagaatacgatacaagccgcgatccaaaaggccccatcactgccggcgcagaggtgctctatggcgtcattacagacttcgtcgctgctatggccacgatgccagcggatatggcggagatgtttggcgcggaccaccggcatggtcggatacgaatgaaaaggcaccctaagcatggcaggaagcctccgtcgccggtgcggaagtggaagaaggagcattatgggcatcgcaacccggactcgggagtcggatcgaacagctccagtcagagcgatgggcgaatagacatttctgaaaccgaaacagagaagagctctacagttgctgatgacagtgacgagaatagtgaaactggctcgggtgattcctcatcgcgtaccgacattgcagatctggactctacgcttaacccagatgcgcataatgacagaaacaacaataacaacatcgggcttaccgcccatcagacactgagtctagaagacacactccgccggcagcagacacgcgacaaatcaatcgacacccatgaacttttcatggatgctcggtatcatctcgcccgagcgggaaagcacatcatcgactgggttctcctgatcccgacggatctgaccttgagcttttccaagggattccacaatgcgccgaaactttatcatgatccaatggttcaggagacgccaacggttcggggcgttaaaggagggttacgggctgctgggacggtaagtctaaccacgtattgggggcgaaagcattgctgattctgtatgggtatgtaggaatttacacaagagttataccaaggcataactgggattttgacgcagcccaaacatggacggaaagagtctgggacgaaagggatgctgaaaggcgtcggcaagggcgctgggggtgctgtcctcaagccaatggcaggtatgtttataaaatacccaatgtcccaactcatcgtattatactaacagcgtaggcctctggggcctcgccggatacccgctcgaaggactgcacaagacgctacggagcagtctatcaaagagcaaggtccgagacatattggcttcacgcatccagcaaggtctaggcgagatggttgccgccatgccggaagagcgggcggcggtaatcgaacgatggaacaaaatgcaagcggagaaatcgaatgaacgcgcatgataccccgtttttgtgtttgacatatttagagcgtgcttactgtttcttatgttcagtttccgaaactcgcttcctttccttcagtcatacttgcacggcaattgtcgcctcgcgccaattgaagatcctggtgttgatggtcgcttttacacgaacgattttaacgtgaactctgtctcatccgccgggtaatctgcactgccaggcccacttcacgagctatcatcgctcaggtcgcctcgcgccacaaccggtccgaaacgaataccaatcagcaacatataggcagtggcgtactctcgatacatactcaggactgttaaacatacgcaacgaaggaaggcacatagggcccgtctgcctaaatgttactaggtggttgatgggataaccttcgttgtcaatgtggtccagagggtcaaggttgtcgatttcgtgtacccccatcgtctttggctgttgtatgacggctgtcccgctaaccggtatcaaaactcttccatcgactagatacatagaagtgttctgtcgtcatcgtggagagcctgacgcgtccatcgcgccgcctgagtcaagcggcatgctgatggctcctggccggcgaccaagaataggtgactttgatggtgcagcatattacaacgtcaagacattgcattcattgctttgcgagcggttctccgagcaggataccaacattgcagtcacttttcttgtcgggaaacggagacggcagctacgagctgaatcatatccgagacccacagcgaggctcatcagctaaagtagtggggaactgatcgagacaaggcattctgatcctcgatgaagtccgaatagtcaagagtcagagaaccgcgcaacctggacgatccaaccgtctgaaattgttacaagaaccgcaccagccgtcaggggcagatgacgatctgcaaaatcgcagtttggcacgcgttctcgctttgcaactgtgataagaggatccaatagtcagggtggggtgctgaagctagaaagctagaaagctagaactggaaggatgaatgactttcttactgtcgttcctgaagttttatgaagcgagcgcagaggaagatatatatgggcaactacttataccattcatgctctcttgtttttgttttgttcatataactgtacgtcgtgtcaagataacgacggcagctcctttctggctgcgtcggttgcctcgagtcggttgtttcgtgattggtggctatgtgctggacccctgaacttgacacgagaacgctagcagtattataccttcactagagaaagagctagaccctatccagaagcacagcactggcctgttgttgcactagcacagccacagcagcctaaacagtagccgatgctcggactcttactattaatgagaggccagatccgctgcccctcctcagcctcatctcccttctcgttttctgcgacaccttcatccatctttgtcgctgtttggatttgatcttgctgctttcatcattctcattgtactttctgcagcatgtcctatccaccacctaactacggccacggccacccgcaatacacccagccgccgccgccgcagggctaccccgcccctggcccgtaccctccgtcctcgtacccagcacccactggtgcccatccagcccatcctatcccagctccctacggcgtccctgacgctggacatcccggccccccaggaagcgcagggacataacctcgccatctcaacaacctccctaccaggcgtctccgggcc

SEQ ID NO: 15561 - DNA, 1402 bp, Emericella nidulans
cgcccacacactcccccaccgggaaaagaagataaaggtacggggggaaaaaaaacacataaggggtttctccccccccttggggtggggaaaaaattcccaccggggggggggggcaaaaacgccggagccccgctcctattggttcaaaaagggaaaaccccctgcctcccataatggacccaaaatgaaaaggggcaagagaggaaaatttggcctgtgggggtccggcccagccccattgttagcgcccaggctcgccggtttcaggggtgaagtcttgtgcctccactcgcaatcgggatttttatatcaggatgataggcatgagtggaatatcatgatttattttgatatcttccggatgcaagtttatagtaatagaccctaacattgcagtaggtcgaactatctagaattccgcctggaacactctttcagccatttaatacaggcttcaggggggtatggagactctccaaggacgtcccttgttcgatcattgaaaagctgaacagtattgtttgtaggctggtcctcttctctggccagcatcttcaccaaataatcggcatcacgcgcgacaagccgactcaagatatcgccatcaatgtgcatacgcgcaggctggaattcaagagggtcatgaccggctgggctgcgctgccttttccttcttggcgtaaatgggcaaataccagtgtcccgaatacaaaggtcttgcagcaggcgcagaagatgccattctttctcctctaaaatcaaaatacggtatacagtaccattcattgcggtgccatagaaggtatctgagcgagttgacagcggagatggctctgagctggcaaggagtctcaacacggacgaaggaaggtgcgcctcgcataaggcagcaggtagcatcttatcagtctccgtcacgccgttttcagtgagcaaactgacccgcccacctctgctagaagccaaagtgagcttcaagtctccgccaatgtggatatgagacagcccgtctagcttctgacgatcatatgcgtgaagagccagcttgtcctctgtgttctttagcaccataagggattctctggccgtcgatagataaacaaagggctcatgagaggacatcgagataactggggacaagaccgagaaccgtgcagagcgagcacggcgtgattgtgcaaatttcggctccaatgctacaatttcatgaccggtagataccattaaggtgaattcaccgtaaggaactatggtataaaccgggtcctcaaacttgtgaatatacttgacagaacattcgatttgagaatctggcgatgaacccggggaagcttgaaggaagataacccgcctcggtcttgttggttcgacgtgcggttcaatgacgataaagtggtat

SEQ ID NO: 15562 - DNA, 3115 bp, Emericella nidulans
ccgctatgtaggtttgatggagggaagcaaacagaagaagaggaaaagtgagaattggcgcggagtaaatacatcttgattcaagtgccagaatctggattgttgagtcgcgagagctcaccgtgcaagacaaaaaatagactcacgcatagccgacgcggcttatccactcggaatagaattaaataaatcgaataaaaaatgaccaaaaggaccagggtagggcatttctcagaactatcagtccccgataggacatgcatgcgtgggtaggaccatagaaggctgctggtgacaccataggacatattacccggctcgaagcctcaaatctgagtggccgtgatttgatttagttggcttaacacttggaaagaacctggaaagacacagggttattggacagaatcatgttcgagagacaacgtcaattactgatttggtacacaagacttgaccagactctggagtctagaagacgatccctgatcttattctaggccagcgatcgccccagcggaccacagggaccagtaactctcgcacactagcaccactagtccatcagccccgccggccacagcagacacgtccagttggccatcccatatgtccatgctggctggagaacaatcccattgggtttcgtagcaaatattggctggtcgtcttactggatgtcaccaccaggggttcgacttaggacctgcattagacttagagcccggatgctctgattactggagcccggccagtggccatgaagagaacatccagctggccatcgttcgtcgtgagtcttccggaatcccgtattctgagctgtcaggacggctttgagttgtcacctgtcaaagcaaaggctgcagacgatcgggctgacatgagctcagaatgcctgccagcaatggtcagctcgccagggcactagttcgacgcacaaggggtgcggtgagagagtgtagatacttcgtagagattattcctgcgagggatgcaagtgtgatatgtaaacgtgacgacttgtcgctggcaccacccttcctgcagtgcactcagctcttcagctagcctcttcacatgagacccatcgttcaattgagcgctagagtctccagttaccagacctgcaaactgaacaatggcacacagagagcacccctgccaataataatggcactgcagggcaggcctcgagacggtgtaaccgaacgccagccttgctggaggcggatggcatgatggcagccactatattagtcagcactggctttccaaggagcgttagccttttttggcgctgtgggaagttcaatacatgagctatctccagtcacgtggtttggttctgttttggctagctcgagctggcagctgcagacctcgagtgcaaactaaatcacagcctcagcaccatttcacctacgaacttgttttttctttgcagctcaccaaaccatacatttcttccacagtcacgtatcaccgccacatcgccatgtccgcttttacatactctctgcgctcaatgctgcgcgctgctcctagcgccgctgctcccgctcgctccttcagctcctcttctgcgcgcggcctcgcccgtatgaatattaccggccgtcttggtgccagtccggaagtggctaccactcagagcggtgtcgaatacgtgaaatacaacattgcctcagagtccggtccctctaacaaccgagtgaccagctggttcaacgtgaaggcctttgtgagcgacgctcagcgcgagtacctctccaacctcccgaaggggtaagttgctatcatcttttgaacttcggcggtgagactgcatggtgtactgtcttctgtctgctccaaagcagaggcaaagtcgacgcaagggaacggggacggatgcatggtgttatcggccaacttcttgctaactggtttaccttgtccagaaccttggtcagtgttgatgccgatgcttcgctaagaaagttccaaagctccgagggtgtcgatacaacctcgctcagccttcatcagcgtacgttcttctttccttctccacttttttgacctatcctacttccggatcacagacttggcctcgtttgaagatagaacgtcttcgcgctgtttgctgagcatcgactaatgaacgtttcgctttcaggtaacattgaggtcctgcgccgccccttcaagcccaaccagtcggagtccgaatcccagtccgagatccagcccgagtctcagcaataaagccattcgctcggctcatggtttcggcccgagcgccctgcgaacaagctagagtaggcttcggtcgtaaaaacaggtcaactccgattcgactcggtagttgtgggtcggttcggttcgctgaacgccgctgcctctccctgttagcggcccgcgtgacggcggtgaaacaaccggtcatggtggttttgtcttggtgttgagggtggttcttatgtcggtcatagtgctcaggctatgctcttgtaatatataacgtctacttgtgataatgtgcgtcgttccctctcggtttatactagtcttactgcaccctttcatctgtcaaggactgcagttgcaaacaggcctatccacatttccactcttcggggtaccaagaacaaaccgggacaggtgctccataatcgccggactgcatctcgtctgcgaagaaaggtgtgagtatgggtgaaagatgcgtcgccaacagcagccggaagacaggctattgactgccctgttggcagcaaagcgagtaacccaaacccaggtgagtatttgggtcctttcgaaggacctgagaaatccaatagcgaacgcggtagcgggaagaatagtccataccttcttaggcttgttagggtcagctaaggtagagcacaagaccacagagtacctaggtaccgtagaaggcccaatcactatcattcagtattcgctcaaattgcctcatccagccgccactagccttataataggtacccttattcctctgcagcccccttccctacctatctgccgatcccagttgaaccgcgatttcaagcacaacccttgcggcggacattttccattctggggggaggcccagtttgtgtgccgg

SEQ ID NO: 15563 - DNA, 487 bp, Emericella nidulans
  unsure (1)..(487): unsure at all n locations
tcctacggtaccgagcttctggaatgcatagattccggtagtacgaacgtcgcagcggtgaacgtcgtacccattatccggcggccgcctgagttgacggtgatgacgtgtgaggcaattattgtggggaccgaacgagggaggcgttcgcaggccgggtgtgcttgggacacatccacgtgttgaataacgaagtataacgacgtcagtgcgctgcccacaggaggtgtatgcgtctntcgtactcaaagggtaaactgactatctggatgttgcgcgtgagagtacagaagcgctcgacgataagacatttgatcaggtgacattggtgagtcctttcgtacgttctgatgacaccggatctgtgctttccangaagggtggatagatgacttgtccttgtgctaatctgttatgagaatttgtagcagcaacatgtaatccacgatgtatgtatgcgttcactcgagaagcggcactcgtggta

SEQ ID NO: 15564 - DNA, 136 bp, Emericella nidulans
tattatatataaacctccatcagtatatattaatgtggtgaattccctaagggtcggacgatttcttatcaaacgatggtcgatccataatcctacgcttgtacacaccggacagagtcactggatatagcaatca

SEQ ID NO: 15565 - DNA, 1911 bp, Emericella nidulans
cccttcctcccatcgtaatcttttatcttcctctcctttgttgctttcgcttttcccttctacttcttgcctattgacctacttcgcttggcagcttgtacaaatggggacacggattttactagcgatggctttagaccggacgattgatgctaggttattgtatgatagatatattaagctgtggacaccctgaataccttggagctggtatctatcttgcacctggatttgaagatactgctgcagacatgtgaacgaccctggcctcataatcaagaaagtccaagccctaagccctacctagtattcttaatacggtaatcggccggatgggctctatcggagcgccatactggatgacatccaatcagaggctttgtatgactaaggcggtgtggtctctggtcagaccacgggccgaagcggcttcaaactcacctcaacctcaacctccaaactccctctttgccagttctccacgccttgtccgttggcattgcacccacaatgtttttccaacgcacagttatcgccctctcgaggcgcgccccagcccgggccctctctgttcgcccgttctcctcctccatcatccgcggtacgtcactgagaagcctaaaatactcgaacgcccccaatcgatcatgccatatctcaacccgagatcattgcgcgcggctgatctcagctatcttcgtgaaagacaactgtgtgctaggatgcaatagctaacgttcattctcttttagccaaccagaacaagtggcagcctaagcaggagggcaagatccttccttttgaaggttcgtatcctgctttgttcaatccgcactcaaatgaccgccaattacacatatccaatcatttgcgagctctatgcagtattacaactccgaatatcgcaattgagtgttgatatcggaccagtcgtttacctaccgtctacattatattccttcgcttgactgcagctacaactgacctacctacgttgagaaaccattgctaacttgggttttttttcgcgtgtagagatcaagaccgaggaggatctgattccccctggtgccaagcctggtaccgttcccagcgatatcgagcaggctaccggtcttgaacgtctcgaacttatcggaaagatgcagggcattgacattttcgatatgaggccccttgatgcttccagaaagggtatgcttatcccattcgttgaaatgtgactaggaaagtgctttatctgactccgtaaccgataggaactctcgacaacccaatcattgttaacggtgccggtgacgaacagtacgctggttgcaccggctaccctgcggactcccaccatgtcaactggcttactgtacggaataatacactttttttaggcattgttcgcaggattgcatactgattgctacccaggtctcccgtgagcgccccattgagcgctgcctcgagtgcggcaacgtcgtcaagctgaactacatcggccctgaggaggaccctcatgctcgtgagtttacctaaatccactttggacttgtactggaaatacaaataactcacactcgcgtccagatgaccacgaccatggccaccaccacccgccctacgaggagcccaagaccttcgctgactacgtcaagcccgagtactggtaccggtaaacgatctaatcgagctccaagttcgataagacgataatagtgccgttgctgtctccctccatcgaaccctggcttttccttttgcttacgccagaaattccggagacaatcgattgatataacacgtataatggtgcggtggactggggatttagatgacaaaaggtaaaagtgtcccggctgtacctaggctttggctatgggggcgggatcccttcttggaggtgaatcctggcatttgggc

SEQ ID NO: 15566 - DNA, 967 bp, Emericella nidulans
aaggagagttgtatcagcctcgccggggggagaccggttggcgaggagagcccctagaaagacactgtgttaggcggcccaaatggagcagcctccaagggggggttttggaaccaagagttttttgcatcagacacccgccggcttggagtgtggaccaagggcaaccccgacccatgacaattttgactgggaccgaagcgactatgggtgttcgttacctaccttttatggcccaacgggcagcacttgtcgcaccggccccaagggcatacataaggctaaccccatccccgccgcaagcagggcagggccctctggcacgagcaaagaccgcacatgcgctgtcccgagggccgtgcacatgccgtgtgaggctcgatcgaggagtcacccggcttgatccaggctcacggagaaaaaggccttggtaccaccaacaatgcccgtggcccggaggggagcttccttgccttccccaggggcctaatagcccccggccggcctatgggtgtagcgcccaaccattcggttaacgaccttcctgccatcatgtctgggcccgaagagccttcccataagagtcccgtggcagtggagccgtacgagggacccgcctgcatacagcttgtgaatatggcacctgaactcccccttcgtacctaggcatcgtatggcacgtatacccccgcaaaggactcctacccaaaaacgccggaaatcattaagtagcgaatttcccctctccaccccagatggcatcctaactatccatggctgggcggcctcaaccgaaccccatgcctgaaagactccgcactgtagacctgtgcggcagactctaccccgcggtatacagccccagaaggttctcttcactgggggaggcatcgcctctcctcacccatctttaactcaattgtcctccactctaaccgtactgggactgcacctcctctccacccct

SEQ ID NO: 15567 - DNA, 579 bp, Emericella nidulans
tatcctcggcttgccttgggccgttcggcctacctcccgcatctatggttatccgctgcgcatggctggtcacctgctgtagtgtctctgcccttagtctccgcccacgttatgacactttgcacgggagcatcgacgtgcaaccaggttgtcagagctacgtctgcttcttcggtgtcttcgacatccattccactcaaggggtcttggacggcttttcccctggtaatggcgtaccggacggctttgagtgcttggaacagcttactattttatgcgccattttaggagagtgaccgccccagttagcattgagtaaacattatgatgtcatatggacaaggattcagagctgcgccttgccttaattattgtcaagagactgtgactaggaacacttgttctgcactttggacagaccggtcgaccacccattcgtgttataccctgggagacaataaatctatatagaaatggatcctccatccgcctaatggctggtccatatatagctggccactataattgccaaatggggcaaccctggattgggccatctcaaaaaaaaagctattaatc

SEQ ID NO: 15568 - DNA, 2797 bp, Emericella nidulans
  unsure (1)..(2797): unsure at all n locations
gagcagagggacctctgcagaattaggaggacaaagaccgaaggagaggatgaggctacaggagctgtgaagagaagaggggaactctcgacgtagagttagcgggttggacttaggagctaccggttgccccagagtgccatccaagcgatctccaccgcaacaagaatatcttcgaaacctcaaccaagatgctcagtagtacgtttttttttttcttcgggatcgagacccttttctcctattccgccttgaacgtaatcctgtgacgtcggaattgcaagtaacccgagtcccgctactaacggtgggagccagagagaggaccagaaaagggggggcaactcaggctgaaggaggagctgctgagttggtgcctcttcttggaaacgagtcttaacgataattgcctgagtctttcagtgaggcagaagcagcagacgatctgaccacgcgaaagagaatggcgaactgataagaataacacgatcctgttggcggaacttgaaggaacggcccaatactggaggagtggaggatggagcaaagaaggaggggtagattaaaggagggagtgagagagagtgtgtgtaagggtgagagagagcgaggaaaggagaagagaaagaggaagatgataggagaagagggagaaaagaaatggggagattgagatggagagagaaagaagaggtgaattagtcgcctcgtaagtcatcaggaggagcaaatcagtggatagggactgtctcatatggcctacttaataatgactacaatatgaacaaatcacaaagtgcagacttcctaatatcaccatcatcattttgtttaaatgctccattcatctaccctgggattgctagcagataatacaggctaagggactgatatgtggatgcgttgttttccagaaagttaccttgaangtgctcccaacgactgagatcacgacacatgtgtcatatcgaagcttgagaagcatttactaggcaagaagttaaaaagtgtcactaactcgaaggtaccgctttttgaactcggcaggttctggttcgcgatcacgagctgcatttgacagttcgattgggcccagcgtaccggctaccatgcgattcgatgtgccccagagaatatgtttcagagtcgcgaacttgcaagcaggaaaatgttgtatcccaggtaaaagaagaattggccatgtgagcactgcaagcaaggtgattgttgtaggatctttggaaggcacttcaacggtttctcaattccgaattaaccaccgaatagcttgcgttccaccgagcttccagaccctctcatatatgaatgggcgagaccacgaatagaacgctacccagactggacagcatccctggtctcattgatctccggatcccggcggcgcgagtactgatttggtgtctcgactctccagcgattataccctgaaggaacaacagtcagtttgccgaaaactcagtcttttaagtggttcagacccaccgaagctctagacagacggagtccccttcaacctgagacagaggttcgtctcgacttgagaagcccccgacttcgaaagaatcatcagaaacacgatggcttgatcgattctcgaagaatgttttccccagtctcaattggtggaatagtcattgcaacggtcggccataagggcaggatctcatgatggccgtcatgatgtaaagaaccccgtttgggaccaaggaactcgaccccagaaagcggcacgggcgccaaggatcatagctgggatctctccgtggacagggcttatgcagtagacagagaagaccacttaggctcttctgactaagcaacaggcattcgagtcgccgaaacagaacggagcgcgtcccaagcgatcgctctatatcttgccaggtactttcgttctcttttatacagaccgcgttcttttattttgggcagtctgagaggaagattaagctcatcggtagccttttctctaacatctctaaaagatgcattgactttgttactgattggtctatctctaggttattcgaagagttcgtgaatgctcggcatcaacgtcgtaccagaccgttcaattcattctttcgaagcgctcttctattctatataacattgtccaccagaagaatggtttccgaactctaaggagtcattttcccaccacgcaacaatctcttgttccgtccaacatttctaggcttcactttcgtccatccgtaaaacattgtttagaagcctttctcttcctcgtgcggtttatgatccgttgcgcttatatctgcgccaccatagaacccatcaagctgcagcgtgaagctccaacttcactctgtctgattgccaaccgcaactgaagcactaccgcaaatatgggacgatctggctacccttcgcaaccggatagtccgtccaggcagctgatgttggagctaaccagggacctggagcaactgcgcgtccacaactcagagttgaaaaaggtcaaggcatacgaacgtcgatccttctatgagagtctcgacagggcagacagcgaattggaagctcaacacaatgcggcactcgacaaagtcgctgctcggcatgagcaagtcttggaggaagcagaagagacgttaagggcttaccagcgcgcggttgaggaagaggcccgtcgcaaacaggaagaggctcggaaagaggcggagcggaaagaacgcgagagagcggaaaaactgcgtaaagagcaggagctcgccagaatgaaagctgaacgggaggccgccctaaaggctgc

SEQ ID NO: 15569 - DNA, 1008 bp, Emericella nidulans
agtgtcgtcttcgtctgactcgtgacatattccgcagacttgaatttgctctccactttcgacttgtgttttttgtctgactttttggtgacacgaccagtcattgtgctattggctgtcgttttgccctttgtaggctgccttttagcattcttctgcgtatttataccagactttgaagcggcgctagactcgccagtcttgcttgagcccgaaccgcgtgcagcagatttgtcggcctcctgaattgttgtctctccctccttgccagtctcgtcggaaatttgtatcctaggagtcaaagctttctttatagggcctgtccgcaagtccagccgcgacagacacttgcctttcccacgctcttccttagggagtaagctctgccatagtttatcggagcgggaaattcttatgcgatcaaaggctgagatagcattttttattcgtttcttgctgtcttcctgagacgggtaaggaaatttccacacttccaatttcctgtagaatttatttttaagatcgaaatttctccggtttgattcggtcctcaatttcgtacttttgaggcaaggtttgacatctttccttggaggagcggtactggcggcgagaaactctagttggacagtacgaattgttaaatgtgaatgaaaggtatttggaagcttcaggcgaggctgttttttcttgaactgtttttcgtggactattagagattcacacttcacctcctttcataatctccatgtaattcttactcctctctcttacctcttctctttgtcacttatgctacttttctcactttctcccacactttttcctcattcatatacatctctttactctgcaaactatcttactacttattcttcttgaatctctactgtatctccatttttatctcttctctcctgtactcacttcttattttaattatcttcatttatcttctactattcttatcactttcctatctcacttctcctctccctccccccctct

SEQ ID NO: 15570 - DNA, 3048 bp, Emericella nidulans
  unsure (1)..(3048): unsure at all n locations
cgttgctaaccacgagctcctcccttcgcgcatccagtcttggtacgtcattctagacggtcactggcatctagccgcgatgttgctagcggacgttttggagagcatctaccgcgattcgtactctgatatcaaccacatcgaccttgtaacaaagctaaggctcgataatgcactagcagttagtgcccttgcgcgctcttcactccgaggccaggagctggacccgggcaaagcatctccgatgtatcgccatttccatgattctctgaccgaggtggcattcctggtagaaccgtggaccgtcgttcttattcactcgtttgccaaagctgcgtatatcttgctggactgtttagatctggacggccaaggaaatgcactagcggggtacctgcagctgcggcaaaattgcaactactgcattcgggcgctgcaatttctgggcaggaagtcggatatggcggcgctggttgcgaaggatttagagagaggtttgaatgggaaagttgacagctttttgtagattacttttactgttactaacgcatttcccatcctccaaaaatgcttttttaggcgtcagttggactatgctaggatccgcagagtacttcaatgctcaaatgatacctttggaacgtaaggatatgaggctctgtctaaaaaaaaaggcacctaaatcaaaaccagcccagtatgggcattgtccaaagaccgcaactaaaggggcttgggaacattgccagatatatatagtagactcaggaatgtgaagctgcaccgctcgcacatggtcagaccacgagataaccaccaagtacgacagacttccttttaaacagcgtcgacgatttttcgacaaaaagattcccctcttcatattccccgctttctctaccccacatatcatgtatattttgcaaaacacagtagaaggagcacaaggtacctggccctctgtgtgtatagcggacaatctccgaaatcttcctcgctggggtttttgccgaggcaaggacatacccccttgcgtttcatttacaagccgagggctctaaaccagctgatggcgattatcatgttgagctgctgcctactgtattcagttactccggtaagtgatcagcgacgtgcgtcggacgggggttaccacacgagaaccttgaagccccagtagggtgtcctgactccaggcaaccttcccatggatgatagcttgtagtccagaggaattgcgtacggttcatgcattagggatcatagacatgtcgatattgtggaggcaacgattaagagtcgaatgactggcaagactctaacccagctacgaggtgcagaatcaaagccactgttgagggtttctggggttgtgtttcttaatcttccaggtagggatcagccattctcttgaggcttggtatctccaagcttcgcctagtactaactattcgctgttgacaaggcctcgcgtcgagggcagtcggtgtttctccggtctcgcgtgggtgtccagaataagaaataaccacgatttcttttgtgcttggcggtcaatccctgccgcaagtgtcattcgtattcttgagtccaccaatagagagcgctgattggacatatttctccccgacccccgcattccagcgatgatcagcagggaagcagccgatcgggtaactggccgactggactctataaatcttgctttcatccgcctaatgcacattgctaaaccttccctcgcttgttctnnnacgtttgaaccgcgagtaccagtgcctagcaagatgctcttcaagaacgcctccttcctttttcccttagtcctgcccctaggtgccctggcgtcttcaggccccggaaatggcacctcgggcttcatgacatttcaaccgggcttcaaggccattctcggcgagcacccgaaacttgaacttctccatgaaaataggacatatcccttcgcccatgaagctccagtctacatcccggacacaggtgacctcttcatagtcggcaactaccagaccccaacaggtggccaagcgatccaaatctcccgcatggttccccagaagaatggcagctatgtgcgcgagatcattcaccccgacattcccatggccaacggggctatcaactacaatggcggcattcttttctgtgaccagggcacaaaagagcgtccttcttccctgatcttcatgaacgcgaccgccccctacgagaccaaagtcctgctcgacagcttctacggccgtcactttaacagtcttaacgacctcgacgtgcattcagacggcagtatctggttcacggacccgacatacggctacgaccagggctttagcatgaagccggacctgccaaaccaggtctaccgattcaatcccaaaaccggcgacgtgcgcgtggtggctgaccagattggccaaccgaatggcattgccttctcgccggacgagagtatcgtctatgtaaccgataccgatgctgtttggggaaacggcgataatgactccaccaggcctgcgactatgtatgtctctttctatcattttcctctgtacaacaggaaggtactaatagctgcagctacgcttttgacgtcaaatactactccggttctcctttccttatgaaccgccgtgtctttgcgtacaccgataacggcatccccgacggtgtcaaaacggacaccgagggcaacgtgtatgccgggtgcggcgatggagtccatgtctggtcccccgccggtgtgctgctgggcaaaatccagcttcctggcacctcggccaacctggcgtttgccaaacctggcgagatgtttgcgctgaacgagtaccggctctggaaggttactctgagccagaatgttcaggggactattctcaatgaactttaaatgacttgtgatatgattgattgaatatggatttagataatacatgtatataattagttatttgtagataggcctttgctctaacacggggcgatatgtgaatgaatatcctaccaaatccactacatcgaggattaaaagtg

SEQ ID NO: 15571 - DNA, 659 bp, Emericella nidulans
tgacgaatcgtcagttatgcccattttcttagcttatggtctaatgtacttacacaagctcctctaagccccatagtagcttcccaggcacgtctcattcgtccgttagtcgtttcgcttcctttctccgtattccatcctcttggtgtatccggggtttggccgttgccgggttcttctggttgcctaagaaggctggttttgatcgggcataggctccatggtatctcgaccgacagcactcattgagaacaggactgaagggacatggaaataggatgactgtttgaaggggcggcgacaggaagctctaaataccgccgacgaccgccgtgacgaggccgatacgtctcaaaagcgtggtatgtattcttagatagtcagtcttgctgaatctctgaccacagtattttttagtcttgactgtcggcgacccaagacccaggtgagaagtcattttttgctggcaacaacagatctttgaactgacaagaccgcgatatcactagtgtgatggcagcttccttgcaagaatgcccttctgaatcaatgacttgtgccatccataggaccagcccagttcaaagcctcgacagattccctaaagaagtcctcccagattaaatggcattccctaaaccatacgtgaacgacaggca

SEQ ID NO: 15572 - DNA, 571 bp, Emericella nidulans
gatcgccccagagaccggcccttgcctgagccggatctctatgcctgtggacacgggcttggtgcctactattttgagcgtcttggatcatggatgcgactaacgctgtgctcgtctgtctctcaccgggtaaaaagtcctccgctggagctgacactctatatacccttaacctcttgctctgtctcgcgcacacagatggccactggggaatgctatatatagataaagaactgtggggggtgggtagggcccgatcataagaattatcattgctccaacaagtgcaacaggctccgaaatatatgagtatgatgtaggctgcctagctgtgcaaacacacgggcaagcccccgtgcggagatcataaaggtcgtgcgcccatcgaccacagaattggacgctacaaaactagcttcccccgcccatcttattaataagaatacgcccaacaaaagagagctcacccgttactatggggatggataccaacctagcatcgaaaaacttggaccgcagtgggggcaaaaatttattttgacctgtatacccccacagttgctgagccttt

SEQ ID NO: 15573 - DNA, 3316 bp, Emericella nidulans
tactactccaataccaaggccgccgagggagactatatgaagagaaaatggaggcggatgcaagatgtacgttgccgtgctatgttattgtgctagaaattgtattgaacaagtgcagtctaccgctcctgcaaagatgatgatgccatgttcaacacgaagaaacgtgaagctgaaggagtcatggaaatggccaaggcttatggtgcccttattgatgtcctcgggggccctgatgccttccttcagtggaagatgattgagactggcatgtacgagagactggctctggcaaacggtcaagccatccaaggccttcaaccaaagatcaccacatggaataccggaggcaagtggccaaggctcttcaccattggaccccactaacagtgtagacagatggtgcaagcggttctggtgatgcgatgggtccaatccgacatataatgcagggtctgcctccgctattaagcacgatccacgatcagactggcatcaaacctccacaatggtttgctcagctaccagataacgaaagtgtagtaacacagaaggctgtggctaacaagtaggcctacctgacgaacccctctatagcattccaagcattcttgcatatttaaaccgcgtgagtaccccgcaagtgctttgctattatcgttgctagtgtaagccaaggaccttaatcactttcccgcctaagttaaattgagaacctaaaatcatgccttcatgactttcgccatcttcacctccagaagaatatactgcaatgaataatcgcatttgaagtcagaaactgtcaagtcaaccgttctattcattgagtatgcgcgttaagtcagacccgccacagtttttatttctttttatttctttttgtttttttttttttttttgttttttttgagaggctgtttgtcaagataaaggctggtatagggaaacataccgttccccaacttcatttacatggcaattgggcgctcgtagctggattggtcagtgatacattgtggataagctttagaatgactgtatttatagaagagaacaaaagtgaattgagataataaacctcgatcgtctaaatagaggatcatgtgatgtcatccgctttaggctggaccgacaccgccgtcggcctcatataaaggtaaccgtagctcgaatatcaattcacttgccctgtctctattgtcgacttgcgggcgatcggtgcgtacaggttgctagtatgatatgttatagctcgttcatgctcttttcttggtctccctttggttgtcattcaagctgtccaaaatgtcgcccccgaccttacgccagctctgtattgcagctgcgattcggaacgtgaagtgtgagtggacgcttaataaacatggacacttttatactgaccacacacatttcttagatctcaatgatattggcaacattccttatgcgcttgcccgtcctttccttctgaagattgagagcccagagaagctagtcagttggcctctacttactacctagtgtctgtttctgaccgcaagcccagagatctctcgaactacaatcaccacatctcataaacgatgatgctgagctatggttggagtttcttaagcgggatatacccaatctagaggagtaccagttaccagagcagccggactgctggtacgacctgtattgcgaactgcgagaggaggtacaaaggggagtcgatgaggatgcggagaaactcaaaatggccctcgatggcttaaattcagaacgagcgaacgatagtaccaaattcgtggccgaccgacggaccatcggcgtcccgcgaagccggacaacagctaggcatcggtttagtacattcggaggcttcacgccgaagaaaagcaacatattttcggctacaagacgaaacaacgccctgactgtccctacaaagcaacttaacaacagggcgacgcaggtgcggcaggctccgcgctccctgatagaggaacatcgtcgacctgctgagccggccattgctcggcgaccaccactacgagcacctgggcgctcaaactcgcaagatgctccaagtactagaagttacagcagtccgtctggtcttagctcatcattacaggagagggaagccagactacgtgcaatcgcttcgggccacgttagaacccccctcccactacagtcatcgagacctgcatcgaccaaaacttcgtcgggcgcttcccctaccttatccgagtctcaactcggtgcgactaccaactccgaaccgtcaaggctttctccacctcgagcatcaatccgaaaacgacccgctcgtaaccttttcatccaaccgaaaaagaagaaggtgaactgactttctccttgacttttacatatttgtactcatcgttagcaatcggcgtttgatgggggtttacgtctttggctacgaactttgtgacttgttcattttggtgtcaatgggcttaacggttaatggctttctcgtgcggttatatatagtctcgggtctctggagccgggcggcgttggaaacgccgtgtttcggtgctgtccctgttgcggtcctcaaatcaaattccacatgctttacgcctatacttgcattcatcacatccgtgtcacggccacaaactcttacgtatctgtgcagtcggcttactcgtgtcgaatgggagactgaaaatatttgttatcaatgttccacatggcacataaggtgagtgcgcccttgcgggcgccgtgttatcatttcatactaaggaccccggtttcatggcactgttttcctactctccagcgccagaaagactagtccaggacaaacacgctcgtcttcggattgggtatatcaagcgcaaaccaccttgcaacacttgtttcacgcctcgttctaatatgtggcccagttcggcattgttaccacggtcggagaaatcacggttcgcttgcgctttcatggagataagttgttcggttgaccagcacgaactctactgaagggcggcgcagccgccacggagagcaagaacgagatgcagtgtcgctccaccttcgaggttgtagtcttgggcggtcttgtcatcggccctacggagcaaggagaaacggtaagcatgctatcaaaggtgttcaaagcttgacacgtacatctgcttcccgccgaaaattaaccgctgctggacgggcggaattccctccttctcctcgacccgctcctttatccgagacaccttacgtagagagatcagcaccttcgaatgaggttacgcagggtagcgagtctgccttgtttgaataccttgta

SEQ ID NO: 15574 - DNA, 566 bp, Emericella nidulans
tctggacagggttctatagcgagaaagtctggctccattgctgtcctagccagttgcggctggaccacctccttgtataaaactagctccactcccaccatccatctgagtggttgcatatacggtatcaccgggggtggcatgagctatattcctcagatactgaacgggatgttgatataaagaaatcccgacacgcgtgttcggttctctggaattcaaaggcgaatccctactctccggaacagagggcggggcgaccacattactgaattacagttcccgtacccacggtgctaataaggcctgccaagggatttttattttacgccttttttagcgcccatggagtgactaaaattggtgtcccccgaatttccccaagatcattcacctgaacagttggggattattggaaacctccttttaacctccctttttattggcccattttttgcggggggaaaaaaactttccaggaaattattaatatttttgccggttggggtttcagggttccctttttttcccggttcggcccctggggccttttttaaacccccata

SEQ ID NO: 15575 - DNA, 2362 bp, Emericella nidulans
cgtcttgcgtccttatcatgtcatcatcataataccactctttgttagcattttcaaaccagtctactcttgaacctaaacaccctggcccttggggatcaagtttcgcaatgagagatcatacaccacatcctctactttcttgacctagaaagctatcagcgagtttctcaaccagggagacagatcagacatacactatacttgatcgcatcactccttttccgtagcacatcgttcttcagatttaacaactgaaatccattgaacagttccttgatgaaattaccaatcaccgtaggacggccgtaatcgccaagggtaaccgcgttaacagcaagacgggcctggcatattctgtcagataaagcttaagtatcaagcctcaaggcgttacacgaaccagctcttcaatcatggaaatcagcgcaagaagatactcctccaatgtgagatggaacgcgtcttcctccttgaggttaacgggaactgcgcgaatgcgagttagataccaagccgagacgcaatcgaagtgacaaagtagagccatactctcaagaaacttccccacctcctccatggtcaagaatgaagccgattcagagcctttgaactcctggagcccgccgagccacgcgcatagctcaatggatgcaacctaacagactgtaagcatgctggctagcgctagtttctataaacaagagacgactaaaggtaaatatgagcgggtactaacgagattctgcagatcgcgcgaccaaaccccgttgtacttgtagaaggggtgcctgtcggccacggccttcaagcgggtgatttcttccttctgggcgaggatttccttggttgcatcgtcgaggacaggctgtactgtttcaaccaattagtatagctcttgccttgggtcagagataacatacactgcgcctcgggtgtagaatgagcgcgagagagcacagcttgagtagatcggcctagcaattgaattgtcgcgttagtctactatttgctcgctaacattcgaaaaatataggttgagtcctgagatatttggatgagctgaaccttttcgcgagagattttgcacaatgtcacggagctcctatttgcagtggttagtcctgtatccgcaagctgtgtttttggtctgtgttggtcgtacatctctgacggccgcctcctcgtcaatcttggcttggagattctcgaaaatgacgcgatcaatcattctgctggattccgattcctggcccggatcaatggtcttaagtggattcaggattttgctacaaatgctgatgctgcggctgcggcgttgatgtcaggaatatcgggctgtggggccccggcggattgtgcctgaggcggatactattcagcgcagggctggcaggacagggagttaaacgcatataatgagatttatagagttttgtaagtgactgtgtattcgagtggttaaatacagtatttaggcaggctcgcagtaaaatgttaactctacgttccattcagtgtgtggttgtttgcctctataagcttcttaatcgtgtccgtgagtaacataacttcattaaatagctatggacagatatctatagcgcataatatcttccccggaacaaaaagagagcacgccgcaaagacagccgaccaaaaggccccctcaaacaaaccccaatcaataccggtatcttgtagagtaatctatcaatcattagccagattcatcattcattacaagagacgttactcacctttcgggctaacaacaagaccccttcctttcctggcgcccttgtagatcgtctcaatgatatcaatcaactcttgcttatcttcaaggacccagttcaacttattgttgttaccggttccgaaatcgcacatgatgtgcttgttccggaagaagaacatgatcgtcattggatcaaaaagttcatacattgtattgaactcgggcacctcgtcaatatcacagaggtagatgacggcaaagtctgtggttgtcagttttttctcagggaaggcaaatttgaagttttgcgaggcgtcggggcttttgagcagcagcttcaagaactgcttagctcgagggtggactcactctttacttgcttggcaatcttgaaagcactttatcctggcgcatgccttcgggaaggttagacttttactcggaatagcacaacatcgtagaaagatgcaaacttacagacgacgttatgagccctgccaaatctaataacctgaacaaggcagtagggggtggtgtttggattgtgcaaaattttttaaattcttccatatcccggcttctccagagattagctgacaactttcaccatgtctaatagct

SEQ ID NO: 15576 - DNA, 3988 bp, Emericella nidulans
ctcattgtcacaatgatgcactagacctccaagctgcattagaaacaaaccagtccgaggagtaaatcccgtaaaacagtctactgcaaactcgtcccaatcttcaatagccgtgcaagtatttaagacagaatagtacgccaacaggggcggctggtgatgacggcatgaaagcgaacccatgatgtctaggtagccaagccaacgggtcagaaaagccccgacgcggttcccagggtacgcaatttgggcctgacgagctaaaaacagatcgcgtgctagttttaaatggctttgccatggtatcggtacctcaaaggtgctaggagagacgattttcagtgagagcagcatgatcgcagttgcaagatgactgtcagtaatcttctcctgctcatctaaggctacgcgcaaagatggaaagacattgctgacccagtgcgcaattcgatttgctggctcgggatggcccagaaacctggcgcgatgacttgcggagtaggcgagcatcaggttgagaaggttcgagtcgttgatcgccactggccagtcagaatgagatcagaaaaggaaagatgattatatcttactagcgggcaagacagagctgaaaggattgtcactacagtcatgagggaccagaacttttgcagtgtggttgagaaaatgatgaaagtacatcaagttgataggcacgttcagcaaagacgccggaagtggcgacaggtatcgaggtatatttataggcacgggtgacccatagtagttgtacttgcgatcacacagttcacggtctatcctcgtagaaattatgcctggactagatgcattgcttccagtctgcgactggaccgtgtccaaagcatcactgacatcgatggccgagtggtcatcgttctttcctaaatccatatcaggacgaccacagtcgacgccatagtggtcggtcacagtagtaagataggcctgccacttctcggaatttgttaggctacggtggtcgccaagtgcatgtcgaccgctgcgcgcatagatagaactggacctggtggctttcaatctgttgaggctgacaccaggagatccatccattactcttgctaaggagctatccgaggtttcctcgaaatcctgaggagtgccggatgcaaacaggcttgtgtcaagtgagtaaggcgaaagggctccgtgggaatctgaagggctggcggtcgtgcaatcggcgacaccggtgcctcccatgtcaactggggctggtccagagcagttctcgtaactgggcagactagcttgcttaaatgcatattctgaagcttctatcgccggccgaacataggatattggttgggaaatgggaccagaaaggaagttgaattccaacagtgacggaatgttcgtattgttttctgaatccggtagatattgagggacaaagggggttgcgaccaggccgtcgggattgcgctctctcggtagaggccctgtatcccctgtggaagaacttggccaggtagtcatgtcctgtcctcgcgccaagtccatctctactgcagctctatcggttgtacggttgggtgacttaagagactggtcagggacagtcggagagtcttggatatcatgtaacctgctagggtacgttcttcctaaagtcatctcccctgcgagcctaatatcccagaacagcatttccgcaggttcgtcatgcgcagcgttcacctccataccaccggtctcgaactgacgagtagtgtttgctggttgtggttgggacatgtccgggggtgataaagggaaggtaaacgagacgctactgcactgagagcttggggaactgacggacggtcttcttcttgtcctcccgccccagttcaaacggaagctgtaatcgcatggttcgttttgccggcaacagtttaagcacgctggcttttcctccccactatatctagaaaatcagctgagcgacatcgaagacgcaggacatacaaaccatttgatctttcgtgccttgcatggcctacttgctgttagcgagtgtccagaagataggaggagtgggcaagtcgataagctctactcaccagcaacctttgcgagatctccgtttaggctcgggagcaccgggcctccgaggacgcggcatttgatgctcaaatcaaaggcgccggagaaaagagatgattattcgacgaactaatggtccggggtgagagatagtgccaacttagtctgcggagtaagatcgccatgcagcgcggatatctagatctgatctttacagggctgaaagaaggtgttcgttttcgtctgcgagttgggcgcttgacccacgaggacagaaagcgatagtcgataacgatgtaatcgcgtctgttattcgtactcatcgaggtgcgaaatctggcaatgccagccaagcggtcgattggaatatggagctttcaatggccgatgaatgataagtggaaagaatgacggatgtttaatgaagactgcttcgccgtccttttgagaagagcggagagagcgagtcacgagaattaaggtgttatccgctatagtgatcaatccaggcacgagacctctgccactaccgtactacttcgtagctacagcagaagctacagtagaagcccttgtccgtcaagatcctgagggtagaggtcgtatggagcagagaccgatgcaaggcagcaaagccagtgtaaagcaaggaagacgccgaagaaaagggaagaaagaagcaaagttggaggaagcagttggatgcacttgcattgttatcgtatcggctgcctagatcaatcacagcccgccatcttaggtggggacggttcgacctgcctcttcgaggccgctgacacctcaggctgctctgataagcctggggcccgacggccggcgttattcaggttccggattccggaccagctgacatcagctgggacagccggacagggttccttgcttttggcttccctaagattctactccgtagtgtgcagagtcggttgctggttgatgacatctttatgaagatttgctgggctgttcaattatctctacttgccttcttgccaacagtgttcgagcgtatctagcctgtagctgctactattttattcttataccttgtcctacaccgtgctgttacaccgttatcgctatcttatcctaaactactacttcaaaagctccgataacatcatgtcgtcaatcagcaaattccaccctttgcaaaggctaccgagtccgtcgaggggcttttctgctttgattcacgtatggctttcaccttaacgccatattgtgcttcaatttaaccgtttccgcacgcatccggactggccagcttcatatggtccttcaagtagtggagtgtacatattccctggtagcacagcttcaggattgcccgactaatgtaattcttctagtatcaacgacaaccctaatcatgcgtaagcttcatcaagtccagttagaaccaaggttcttcagcaattgactttcggttagcaatgaagcatacggacggcatttccagtacctgaccgtcatcggattatctctcgctaccgtcacctttgttgttggacttcttggcggacatcaccctattggcgcggttgttcttgttaaacgaacttgctattcctttgcagcggttctatcgaagcttttcattagtatttttttactggggtctttcggttggtcagccctgtctccccttttttctttaatattagctgtccactttataatgatccgtgggctgtcttcttattcccacatgggattcatttccattctcctcgtacggtttcccttaatcaccccttcatctcgattctaaaccccctaagaacttgcttcccgctggtccttcctttttcccatcccctttttttttttcgttcgccttttccaggccccctttggtttccttcaaccttctacacggtctgattacacccttccc

SEQ ID NO: 15577 - DNA, 1063 bp, Emericella nidulans
cagtggtcgaaggacggatcgttacaaccgtggccgtgtttttacccggacgtcaggtaggcgcggttggggtggtgtcggtccggggacagaggcaaaccatctgtcgagcaggagataattttcggcgagggcgatgaagactgtaatatgttctggagcatagtagttgattacctacgctgcccgcttcaagtccccatttatcccgtgcgaccggatctgctcgctcacgaatccctgcatggtcggcttatgaatcgaaagatcgggatgatctgttccatagacttggaaattaccgccggagatactgtggtcaggatcatcaggggcgactatattagccagcggctttgcgcagataagaggggaagagggatcggcgacgttcgaggggttgcataaccgcgtgttcggtgggaggatcacgatattgtttatatcgcgagtgtcgtttagaccgacagtatgggaactgaatgagagattctcctgtagaggacgacaactttttaatccgtgtggtaatgtcgcgactgaaaaccggcccttgggtcccgagaggtttgtggccactagagagtaaaagaccatttggccctgctatagctggttgtgaggggaccctgccgtactactccggtctcgggcgggggcttttttgccgggtttgggtgggccttaatctgctggagcctactggatatatctttcccctgatcttaaaattttggtattcgaactttagggtcacacctcccccatttatgggattcctttttgggcacaaaaagagtgttcacccatttgattatttccccccttcttaaggcatcattctatacgttgaggtcccctctcttcttccttaaaatcaactctttttaatagtccggatttatgtcttttgtcttttatttcaattgaaacgtgtttgatattacttcttgctcgtcgcccccctcatacttctatttattttattatatgtctctcttcctcacatttcttccacttctcttcttttataggggtggtcatctttctatccacagatggc

SEQ ID NO: 15578 - DNA, 990 bp, Emericella nidulans
  unsure (1)..(990): unsure at all n locations
agagtgtaaaacgcgacgaatactaacgttgactgtgcaccaccgacacggaatcatttgttaactatttccgcaccaatgatggctgggtaacaaagcaaacacccgcgccacagcatgtacacaagtacaatgctcaccgaacccaacttgcaatattgactataggatacctcagctgagaactgaacaagatgtcctcgactgttggcgagccccctgcccacacagtctggagggctctctacttcagtcacgtcttagcttgagtttatgtacctattcctaacaaccagctagagatgcagtttggaaacaagcccaaaaaaggctcatggccaataagtttggacaaaaaaactacgttatgcgcaaagaatgctttttaacgatggcggtccagaccagcttaatagtctccaagggcttcccggaaaaggagcaccaactggcgttttaatgatccttggtctagaatgtttaactaaaggcggtttttgggtctggggcttctcaggtgattgagcacacaaatacctctctgtgaattatattccaaacccttcttttggttgtgttaccttaaatctttaaataatggtaggtttaatattatttttcctttattataaatttgtcccctcttttttcctatatggtctcctattttgtctcatcttatatactcttttcactcattccacttatcaaaggttgagaacacaatattctcacttatctaattcctcattttattttattttatatctttttggcgccctaaaaaatatattatttttntntatatatttgttttcnttttttctctttttcatcaatatcctctacatacatattatataanaaactannnnccccncnnctcnnnnnnngattnnctctcttatttttatcttattannnnnntaattgattcttttatgttttacccaggctccagttaaaaatatttttttctctctttttttt

SEQ ID NO: 15579 - DNA, 506 bp, Emericella nidulans
tatcagcaactgcgagacattgatctctcattcactatcaccatgtaatctacaaccccagacttttgacgctagccaacctagttatatggcatagacctgtgctagcttttagtctgaagttgatggaggcttaataaccgctttgacagtccttcccctaactattctatacactctagcatctggcagtgaatgaaagagatcatgattcattggaaaatactcctaatctaagcgcatgagaatacttgacactccttacttttaacactcattccatagctagtgacgatagcgtccagtacaccactataactgaccaagcacaaatcaggctagctgaatggtggtagtacacctcactgcaccgaagacataccactgcaagatgaatgtcatgtccattatgggcgcttgacaacgtgccgcaaactacatgctcaatacttttgtcgcttctttctacgtagccctacccgaactgctgcgtctcacatacatga

SEQ ID NO: 15580 - DNA, 6603 bp, Emericella nidulans
caggtgcactacagctctcctatgatcgggcgcatccctattacacactgagactaagttacgaatccgctactctccgactttcctcgtgcatggcattttagaatactcgttggccaaaaaatttatcttaacaatggaaagactgcgtaatgcggcgaatgcggctctccaacagccagcactcacgcccattccagacttaatcctagcggacctcactccaatcgctgtcagtcagctatggcaagaaacatccacctacagtagctcagataacagcgaagtacgtactcttgaatatctcatgcgccaggcggtattaaccattagcagattcttcaaaacctcctcattgctgaggcgtctttcagaaaacagtctcctgagaacttgtcggacatggataagagtgccatcaacagattctacgcctgggctagtgagcttgctctgccgttaccagtctttgcggaatcgccagagttatcatcaaaatgtgggccttggcccctaactcacctatatttctgatctagctaactatatgcagcgcaggatgaaagtcgacaacggtctacgctcgctgtgtcggtcatttcacggctgaacgccctgcttccatttgagcagtccgaatgcgtgtccagtgtcgttattgctttggcaagcttctcctcagatgcagacgcgtggaatacacatgaggccttcactgcttccactgccatgctgagggacttcgtagaggcatcgtctttctggctgacaatagaatccatcctcaaaagccgggtccgacctatcttcgccaaagcgaagaacccggccatcacggaatctggccggaagaatttccaccctattccgttgccacgatttgattcgagtattctagatcctgagacgaagccatggaagttgcaagacgcctacatcacgactgttttcgcctggattgtcaaccaatacaaggtgcgtactattcatagctagaatcttcaatctaatactaactagacaccagcccaccgacatcaacacccttgaagcccacttccccctcctagtcccgcctactctctccttgatagacgacagcagccatttctacaagcgcctaggctgtatcttgctttcccaattcctagtccccattcgtgaaagcaaatcagatattctccgccggacaaacctctcctctgtcttcgaggacgctatcagaccactcttccactccctaccaacaatcacgccagaagatgactctatccagcttctcagtgaagcataccccgcgctgcgttctctcgtccaaacgagctacagactatcatcggccacgaaccgaagtacctcgtcccctcgacagctaacagacgaagagaagtttatatcaactacaacaaaaactctacgcgaccatctcatcccatcctttcaccacatcagctcaacgaacccaaccacgagctcaggctctaccttcgcttcctttcctcatccgcgcctctcaactttccttcttgaacagatcgcaataacctgtgcagaaatcggtattcatacaaccaaatatcttcaagagatcattccgctcatctacagcacactctccaacccctttggcactgcacacccacctctccttctatccgcactttccgccacaagagccgtgattctcaacgcatacccgcggttatggagatggcggggggagatgcttggtgctatctgctcatgctggattcatatctttgaagaagagggagaatcaaagcgtgttgatgggaacaaagcagacgagctgggaaacttaaagaaacaacttcaaggcgccgtgtatctgcttagatatgcacttgagcatcctgtgcatgtgaataccgatcacgggcaacgggaggcaaaggagaacattgggaaggagatacaaatgttggttgaggctgatgagagtttgaagacgtgcctacttgctgaaattaactctgatgacccgacttattttggatacaacacatgaagatagacaaattgaaactgccagtccaagccattattagcgttacagacggtcttcacggaactcgttcctagcagtaccgctaatgacttgaatcctgcacatcttacaagggcactgccacctgatcaatatccggtccccaccctcctccttccacgcccgatatttggacagtattaacgccctggaccaagtcaacatgtacagcactgctaccgctaccagaaagctggttagttgataaaaaagctatcgtctgcgcctcgccaccattgacagacacagcggcataacgggggtctgtatcgccgtttagataatggatgtttagagttatacgcgccgagtccgtactctgtgtcgcgtagtcgacctgaagggtaacagcaccgtcattctcgccgtccccagcaccgccgatataccctgctgcagtcgagccactgcaccgggagcagtcgatgagccgggcaccgccggaaagggccccgtcttcgccttcatacaccgtctcgtcttcctctgcattccaagtgccagaggcacgatccacactccacgaatcataccacgtcagactcgcggtggccgttgtcccgtcaatctgtaatggaagccagatgtaagtactcgcgcctagattcgatgagacccatcgatcacccatgtaaattgccttgtccgtgcctagaggtaagacgtaattaacctgactagagaaggtgtttgagccgacgggggcgacttcggtccagtccgtccatggtccagagagagaagtcgcagtggaatagatctgcaatagtgatggtgagctagcccttgcaaagctatggatgttactgtagcgtatatgagacttacattgtcattaggcgaccatcccgtcagatgagatccaaaaatgaaatatgtctcgccgcgtttgataagggccggagattcagcaaagtactcccagccaaaggtcacattcgcgacatggaggtagtcatctgtaagtcttatgattcgagttccgtattcacgctgtttgtttccattagccagtccttaacctcgaaaacggccattagtgatcttgactacccacatcctcgctaagcaagtaagctgagccatcctcatctttgaatagcccaatatctcggctttggaaacccaacggccgaaaactctccctatacacatagtcttcgcaaacactattccccgtggcaatgccgactcttgcatccgcataatccgttgaatcaatatgcatccacatgacatattggcctgtattgtcgttcttaatgaccttaggccgttcaacaatgcgatttgggccgaggtctgcgccctcttcttccgtgacagtgagcagttggttcacaaatgtccattcgactagattcgtagatgagtagcagttaacggcttggaagagggccccatcggttttctcttcgccaatcatatagtaagttccgtcctcttcgctgtgtaatgttagtggttgatattgaggtgatgggaggcaagaaatcatacatgagtccggcgccatgtgcttggatgtgctgtcctgtatttgtctagaagttgttagaatgttacaccttcgcagagaaggggactatagattccactgacagcagtccaagttgcgccggggataatatccagggctgccctggcgtatttcgcaaccagagcaaaatatagaatcttgaaacgtcgatgcatattgctttccttaatccgcaaccccagctacatatggattgaggatttgaataggtacgagcaaaacagctggttagggcactttctgcgcccttttatacgtgtttcacccatgcatagcgaggtgttccagtggggatatcggaaccgacacataatgccaagtcgcttcaggtcctagctcaatgctcaatatcacctgcaattctgatatagtccacggataaaccaggtacggcggggaacatcaaggcaatcatttaaccgaccggggaataatgccgttcacggatgtgaggtgtgtcaagattcgccgaattaattcacttccctgtcagtgcagatcatacgacagcggcgaatggaagaaaagggacatagacgagagacattggtgcggggaagttgccgcgtttgctgctatactgacgttgtcgcagggctcagtttcagcaaacttcactgaaccaaggcagagggctgcaatggcgaaggcaggagttgacgttttgggtcaagggcaacagttggattcatttttgtatgatggtcatggacaggtgcgccttgaaaggcgccaagatggcgcttaatacttgattctacgtgtaataggaaaggcattcaatagcagcaagttgcaatagcttcaaggattgatgctcggcgttgcactatatacaagccattggctctctcaactgaggatgaagaggagcatccccgctcccagttgaaatcctctgattcaatggtacaattgtcacccaaaagggagtcgaaaggaggcagacggttcaaatctatgcgggcttgacagttgataagactcagactcaatcctgggaagccaaggcccacagtcgctttaggggatttcgcgaggagtatcaatgtccataggtatgacgatggataggagggaccaaatcaacctagtctagcactaagtctcgaccctctgcttgaaaaggctcttccccttcaaccactgcccataccgcttatatctcttcttatccttatccgcctcgacaactgtgagcccctcctcggaaacatgcaagaattccgcgtagtccgctagattctcctcagcgttcgcgctaagggtatattcctccacgttgcacttattcatgtattcgaccagatccagattagcttcgtgctcacgtattgatgcagcggttagttcatcctcagacgtcacgaccagtgggactttaagcgggtggttgatgtagcgctcgtactcttcggcctctgcggctgtcacggagggattgagggagtcggacacgagttgaccgagcgtccactgggcgatttgggctttgctgggggtggggtttgtgagtgaggagtccatagatgggtggctggaggcggcgtttgtgttttggagtgttccgagtgaagaaatgggtttcattatccccgggcgtttttcagctgtatatggctggtgaggatttggagggttggccagcggctctggctcttgaatcttgacgcttcgttgggggcgttcgcggttaagctgttcgtgggagatgcgcgggacaaaaggactgaggttataatcgtctgtggatgttgggcggaagggcaggtagcggagtgtcgagttcatcttgtacgaaaaaattttggaaaaggaggagactgctagtgggcggtagtactcaaaccagtagtcgtcgtagcgggataatggttcttttggcggaaccgggggaacgggcacttcgcgtttcttcaagttctcttctgtataccatttgatatagttgggcttctttttgttcgcccagtacctggggtctgcgtgatgcaggtagtaatcggtggaaagatcccagagcatgggctgtccctgtgagaagatatagtttcctaaaaacaggttgtacgcttcctgacgctgggcatcgaggaaagagttattgtagtaccttttgaaactctccaccatgtcgcgagaatggctactccactggttgatcttgcggtacgtagccatggtgttgacaagatgcgacccaccgtactggatggcgatgttgtcgccatgatcatgccacatatcggtaaaaaggttgacaacatccgtatcgtactcaacagtcgttccttcaataatacccagagcatgaagctggtaccccagtgctctttttccaatcacaaactgtgcagcatttgtacggtcaagacagtcaatgcaattcgttctcgcgatcccattttgcacttttaacccagtctccggactttgtccattttgaaagaagccggtttttggaatgatctcgcccgcgatatcttccaaggtttcgataacatcttgatcccggcttttggctgcccgactcatatcccagggcttatatatgagcttcttatcttcaggcagaaactggttgagatactccacagcgtttgtgaattccctcaacaattttgattcgcgaggtgtccgttcgcgcgacttgatgaggttgaggacgtatatcggtgcgccgtatcgtgcaaacaggttgtcaaaatgtagggccgcagcagagtagaacggatccaccaagttcaactcgatgtcgggctttggactgacacccgagttttcctgcgtccagtacagcggaatactccctcgatgctggacataagacgtatatagaggatttgcgtagagacttgggcctgcccaatggaacgaggtccgagtcatctcggacacaatttgctcggtctctacatcatttgctacataacccagatcggtggcgcctcttttcaagaaatcggcttccgccaaggacccagatcgtcgagcc

SEQ ID NO: 15581 - DNA, 3121 bp, Emericella nidulans
atgtgttacagagcctccgctgatcgaatgttgattgggcattgggcagcaggtttaggtagtacttaggtactctagccgtcaaaggttcatcattctcgaccctgtctctctgcacaataacaagagaggcgaaaaaaaagcacaaaaacggaatgagaacgaaagaaaaatagcttgacagttcagcctgacaagaaagtcccataataatcgctgatagggatttctgctcaaggtaagcccatgcccaaactcttatgaagggcccaactgtgaatcatcaggccgtcaactacctgacggtattcccttggctattatttactgcccccctcgtcgcggtttatatatttcacaaacccaaaaaccttgattatctcgtgacttctcttcctcttgtgacaattccttgctgctctatcattcttaccccgccttgcctctggattaaagagttcagcattgactgaaagtgcaggcttgatcagactcgaaaatccattcatgaacttgatgccgaaaacgaagctttatttgtgacgatatatctctgagcgctttcccctcaccacaagccgaattgcgccaataaacgccgcttacggacacgagggcttgattcaactacccagcttttcttacctcagagccagctccgaaattttgaaagtaacatcaatgacgtgcgtcacgtaggatctcatcagcatcgctcaatactcacgatctgctaagcaggttcaacatcacaatcgctcccagtcaacacgactcggacgactcttccttcacagacgaagaggactcctcgggagttcaggtttcgccaccttctgaagcagaaagccatgggtatcatgatctatatgatgaatggacgaatttaccttatccctatgaactgaagccatcagactcagcctctcgaaaccgaacatcctaccggactcgaagtcgtaacccaatccatccgccgtccacatctacaagccgccgacgctcagcgaggcatcagatcgttccagaacgagagtcctttcaccgccgatcccgtcgtcaccattcgcctgattcaccagaaagcatggactcggccgaggaatatggtgacttgtatcgccgtaggtctcaggagcggtatagatcccaggaacggtattggccatcactcgcgcaaggctcaggccatgcgcacagcccttcgcctgggccatcatatgtttatccgaatagtgcggtgccacatgctccattcgtacccccaactggtcaacaccctccatcagaccagttgattagagttggagctcatagccaggttgcgccctcgaatcagtacggccatccattttacgggtacaatcatcccatgcaacaacctcacggcatgcctccattatacatgcatgagcacggacatgcggtagcagcagggccacttcgaagcgacggtcacaatctagctcaacatccttttccacctcatggtccctcgcatggtgcccccccatatggcggacctcaaatgaatcatcatgacctggttacgtacggtgcagggggattttaccccttccgggaaccctacgctatggttcccggaatgatgcctccctacttcaatccttatgccagcgcaccatcgcctcccagccaagctgaatccgctgcagcgccagtctccccagagcctacgcccgctcccgcgcccgctcccgcgcccgtagatcctgcaaaggatgaggcgatagccaggcttgaaaaattgatattggatgagagaacggaacgcgaagcccgcgatgcgcgtgaagctgcggcgaaggctgccgcggatgctgaggcggctgcggaggctgagaagaaacaacgtgctgctcacgagaagaagctcgtcgaggaggctgctgctcttgctaaagcggaggctgagaaaaaagctgccgaagaggcagctaaggcaaagaaagaggcagaagaggcggcggcgaaagctgctgacgcagcagctgccgaagccactgagaaggcgaccgcggacgtacaagagaaaattgcggctgcagtggcagccagtaaacctccagacaagaaaccacccatcaagttcaaggacgctctgggtaggaaattcaattttccctttgatctgtgccgcacctggaaggtaagcatccccgcctttgattgagtatatcttatgactcactcggatcaagggcatggaggaactcatcaaacaagcttttcttcacattgaggtgataggacctcatgttgcagaaggacattatgatttaattggtcccaatggcgacatcatactcccacaagtatgggagactgtcctcgagcccgactggaccatcactatgcatatgtggccaataccggaaaaacctaaagaggagccagctccgcctgctggtggcggcacctctgaaggtagcgcagccccgccgagcgatgccgcacctgctgagccggcaaagaaatcaggtgtgtttgtgaatcctgcaaatgtatgattttagctagtggctcatgctaacgttttcaggcgccaagaaagcacggccaaaacccggcgatcccagcccatttgctgtgtggatggttggaggcccagcgcggtttaagaagcaggctttaaaagcgggaaaaaagcctaaagcggccgaccacgctgtattgcgtgttgtctgatagggtccagctccttcaatatatcatcttgagctttccttaatcaggtttgtctgctttagacgggcatgacttttcctctcgttgaaacgggattggtttctcatgcctggcgatgcatccttcttttacagggagtttctattagggagtatcaaaacaagaactttcatacttcggagttggagaagtattttgagggtgcaactatcctgctgatatacccatagatcgttggaagcgagttcctcttgcaaagcgcgcgtttgtatatgtatatatatatatatgttttctttatattcagctcaagccggtttcaggctacgatcctgatattatgttttgcaactcatccttctttgaacattagacgggcagtgttcctattatttaccacgtgagttctgga

SEQ ID NO: 15582 - DNA, 461 bp, Emericella nidulans
tggcacaaacctccttcgactgggcaaaaaatggtcagtgagatgctcggctagcaactttatgaccccctgggcacgatgatgggcatctacgcgatcgtattcagcccatgtgttatagaccgcttggacattaggatgtgtaacagctaactgagacctctatatgggtattgagcccatccctggttatgggatctcgcagagactaggcgttctctagtttcaatgcctgacggccctcactccagatgacataaccttagtcgtgcagacatgggagcgctcgatctgtgggccaataagcgtttactggtaataatggccagctgaggcaatgcgtagttaggcttagtgatgtcacagcaggacagaatgctgataatgctgatgtcattagggcatagtggacaagaggagatgaacaaacatgtatactagttactgggtacaacttttgt

SEQ ID NO: 15583 - DNA, 4293 bp, Emericella nidulans
ggggctctggccaccgccctaacttccaccatttcaaagaccttccaaacaggtactcccaaatcagggttcatttgcctgcagaatagccaaccctgctccatcgttgggtcgatttccccctcaacaaaggaacccggtaccaacaatgtctacaaactggctatccccaacgcatcaaaaaggcgctcgcaataggaattcatggttactttcctgctcccttaatacggagcgtccttggtcagcccacaggcacatccgtcagattttcgactctggctgccgaagctatacgcaaatatacagatgatcaaggctacacttgcgagatacagaaaatagctttagaaggcgagggaaggattgccgagcgggtggacctactctggaaactactcctcaactggatggaagaaatcaggagcgctgacttcattctggtcgcgtgtcatagtcagggcgttccagtgggaatcatgctggtcgctaagctaatactgttcggctgtatcaatgcgaaccgagtaggagtctgcgcgatggctggtgtaaacctcgggccgttcgctgattacaagtctcggtggattagcggatctgctggggagctgttcgaattcgccttgccttacagcaaggtctctaaagattacgagtctgccttgaggacgtgtatagactttggggtacgaatttcttatatcggaagtatcgacgatcaactcgtctctctggaggtaaaagtcctgaatgcattccaagaatccaagaactaactcagacagtcatccctgttctccccagtatcccacccatacatctaccgcgcagcctttgttgacggaagagtccatgctccaagtttgtatgtcagaccttaactgtataagccatagcactaacaagttatctccgttagtgtatctcacctagtcggatttgccctcaaactccgcaatctcggcatctcagatcacggcctaattcgagaactaagttctcccttggcgggcagcctctacactggagaaggccactctagactctacgacgaggaggccgtatatcggtatgtaaacaacattatctcatgtagattcatgctaatgatctaacccgtagactcgccatcgagttcgccctcgaaacgtcccctgtctccaatgcacccctccacatcaaacggagctacccgccaccagtaccaaatccttatattctcccgtttgccatgcgtggtctcctggaagaagaatatgtgcggcacgagctatacaatgagaccatggaactcctgaaacagtttgatgagtggaagccgacaagtaaagttcttaaagatgtgaagtttcgtttagaaggcatacgttctaaactttgagtatcaatactacacactacatggagagtttgggtctcatttggctgtctttgaccttctgcgatagtgacattaaccttttgagtagatgattcgtagagttgtttataacatagcggaataattacgtaggtcgttcatctaagatagaggttcttcttaaagctgctgggatactgcatttgtgcactcagaagaaggatgcaatttgacgcaaaccaattaagtgggtatacatctttagcagcattatcaaatatggttttagccaaagtccgttgtcgcccataaactgcaaccttcatatgcccgaaatgcaaattcgaagacgtccctttcacccctgaaagaacgccgtttgatatgcaccttcgatgtcatctgggttcgttcttagctacttatatctttgacaccagagtaaaaggccttactcacctctcattccagtcaacgcctcgtatgatattgcataattagatgcggcacctattagccgctctaggccttgacgaagctcttcagtgaagctgtctaacgaataaccgtcttgactgctacttgtgctggtgctactgctgtttccaggttcagcctgagcactcttcactaaattcgcctggtagaagatcatgagtaaagcatagctgccctgcatcatgcaacacgcgaaggagggcatagttctggggtattgcctccgtggtagtgactgcaggactcgaggagggttgttgctgtcgctgagtggcaggggtatgggtagagaatcgaacatgtgtgagattaacaaggatgctttcaggcagactctggctgaatgctgactggtataagggagctcgctaatgaaggaatattgaggcagtaagggctggaactcagatgctgatgaagatgtagaggttgaccgtgtatactcgcttgaagaggactgttggaatttgtccaaactgctacaggagcagccgacgcttgaaatctcattcggatgctctgggctttcggcagcacattctggaaccgggtcgtcacaagcatttgccttgctaagatcacaatgccttttgaggaaaatcggtatgtctgaaaatgctctaaaacggtgaattttgatttgggcgctggtgatagtgtcagcttttactcttagtatgtttgcggcggttcaggcacgaacctggatatttttatccgtgcaattgtacggatactctgcgctgtaattcgctccgagataccgctgctgttgccagactgggcaactgaagggggtaagctcgaccgagccaatagcgcgctggcccatgtgtcaagtcgctgcatgctttctacaatgtatggcatatttgtcctcgttgggatccacttcttgacgtcgataacaaattgtgtggcagctaccagtatttgctgggattggatgaatatggaccagccctgagaggataaccaattagaattgcgcatgagatatctagcaggaaaacatacatttggatcagcggcgaacctggggtaaggcgttacaaattgcgaatcgttggcatcaattgacagagactggtttgaacattagaggactcgaccaagatcaatagcgaacttctggacatgcggacataccgttgtgctcacgatcgatccctggaggacgcagtagtactatttgaaggacaggcagtcagtacctgaaatccatgtgagatggatgatagagagagcattactgtcatccaccaagcccttcttcgggcttctgccatttcatcgtactcttcgccaagggtatgcagtgacatatccagtgctattgctaaagcttgcccagcacggtacctcatcttcagaaggtttccgcgctgggtgtattcatacacagtaagcagcagtaatgcaaggatactctcgagctcaactggggtatgaggatgaaagcgttctcggttgatgcgagggcggcccttgaacgttgtttcaaaggggttcgtaggggaagcatgaagctcgcagtcagattcgactccggcattggccatctgcgcaaacttgtgcgcgtatgcccgccgtcgtatgactgagcgaggtgaagacggctccggatcatttggatgtggtatcaatgctaaaatggcggatatggccagactgagcggagaacccggctgataggcgatgactggctcctcaggagactcggagtaaggctcaatgcaatccaaggggctgtcgatataggctggccctacccttggtggcaggatgggaaaatagttatgaatgaaatcgtagtacgcattcaggctgattccaccgtcagcacaatcacatatactggagaagtacagcccacatgtcatgttcactgccatacgtcctgaccacggatggcgatgagacgctggacggtgataatgatggtgtcggttcaactcgagcttgaccggtgttgccactatcattcgcaccaagtaaaccagcaaacaaagattggaagtccgatggaaagtctaggcttctcagcccagcaccaggactggaaagtacatcaatctggccaaacaaggcagctgcggtgttatggttagagtaacccttgatgtagagagtcggcggaatgctagacttactgtcctccaagccaggagtcaacggggtgattgttttttggacatcatcctcgtgaacggtggcttccacaggaaaggcctttttctttctgggcctggggcgcctcgcttactggggatatacgagcacgttctttgcttgctctgacacttgataggaacggtggccttggtcagcgggtcatacctaaagtacattgacggccctagctttgacagtgctagaagggttgtttcaaggagcagggatggatacatacgttgacgcaaggatcttga

SEQ ID NO: 15584 - DNA, 3596 bp, Emericella nidulans
ggggcaaccatcagttgctaagcatcattaatgtacttcttgtgcgcattcgcggagctatcttgctttgccgatcgtcacttctactcggactggtggaactcttgcgactggtaagtcggccaataatccatttcagtacgctgtattcaccaaaggttcaatgcaggctcgaattctcccgcgagtggaatgtccccgttcatcacttcctccgccgtcacgtctacttttcctctctatcacacttctccaagcccgtcgccatgttcatcaccttccttgtcagctcgatcttccacgagctcgtgatgagttgcattacaaagaagctgcgcggatacggcttcctcgccatgatgctccagctgccgattatcgccatccagaagtcgaagtacttccgccacaaaacaactctcaacgtaagccttgcttcttgtgttcctcaaagaaccatctaaccacgctgttttttatagaatgtttttttctggctttcgatgattttcggtctttccttggtaaggcaattccccctatcactggggttaggaaccagctaacgtcagaactagatgtgtacattatacgtccttgtctagagcttgcttacaagaattattagttcctgcacttacacgaacccactccccacattctttgttcttccttccttacaagcaatatacccgactacattattccttactcatatcccctatcactatacctttgtattctagggtgccgttgactggagtgtgttgatttgttgcaagattgttttccttgtggatctgaactgtaagtttcgttcaatttcttttctccttttttctcttttaatggtactgttttcactcaaaacactgtctgttctcgtaggagttacggttagaagcctcaaggtgataggatgtgtttcgacaagggttgtgtctcccattccaaacctttatatgtgttttgtttggaaaatcgcgaccagtagaatcatatgtgtatatatttgctcacgagaaacactcaacgaacctcaatgcaaagtaaataatagtgtccaaaataaccgagcacccaagtatccaaaacgccgaatgccttatagcactaagagtttgggtgtaaaaaccgaaacgatcaggcatataatagatattcaatgacgaataatgaaaaaggagtggaaatgagggtgcggcgagaacacaattgcttagcggtctaattgtgctcaatgggatcctcaggcagaagaacccttcctctaccttctctaggaaggcaagccttcagcggtgggcggacgatatcgttgaacaagaatgttccataaacaagcagagcgaacccagctacctgcagccatttaaaggtttcccaccctagacctagcgataccagccagatgaagagggtacggcaggtatcgatcgtgctgcgggatgtagcggatacggttctggtgaccgagaggccgaagaagttaaagccactattttgagaagagattaacaatgaatggggtgatagtggaggaatatggaaaaaggaaatagtcatacccaatgctgatcatgatcaggacgctcgagatggctacagccttgtgggtgaacacctggtgccaaccctccctcgcgtcaaaatatccgtaccgtcctgcttccgtacgtcccacgcctaggtacaggataatggacccgatgacagtcacagaaaatccgaagataccttcccagccaacgacttggagcggctccatggcatagttctctagtatccattcctcgaggacgaattgagaagcagtgaatatctgagctgcggcgataaggagtacacccacaacagctctcacagcttccggggtctgtgcggttgctccgacttcggttgttgcggatcgaacagctgctgctacagtttcttgagtaatatcatgaccctggttgtcgccaaacagcgcacccgcaagaccgaccaacgcaacaccaagaaccaccacgcaaagtgctagccattggtacaagtatagtttacggtgaaggaacaggacgctgaaaagaccgacaaatagaaccaaggctccgcgagtcatctggtatatacttgcagccacgaacagcagaccgacgttcataagagtagtgcccgcaatatcacagcatgccggtgctgcaaggagaaatgtcctcaggccacgaagtggtatgcggccgtctggcagtcgtaaaggtttcgacgggtcaatgttatcattgtgtccttcaattgtttgatcttcgtcatctccatcgacgacgttcactgggcgatagccgccggctagcagaggcgactggtcctggaaaagtcgaggagcgaggtgccgtttatatagatgggacatgaggacaacaagccaacagcccatctccccgataaacatctgaatactgttgccgcagagtcagcatgtctgccgcccgacgttcgataacttcgtcgacttacgtctgaataactggttgttcaaaaagatgatggtctttaggatccggcgagtcacagtttctgacacattgcatgtccttgaatctcgttgcatgagttacgtccactgagctggaaatcatcaccctcggctctcacctggtacttattgagaatggtattgcacactcctgtcacaagcatcatcgtgacaagaaaaggtatgaccgccttgctcgccatcttgtccgactgatcgctgcgagtatagagagaagcagcgcaaaggaaggacagaagggtgactgtgttggccctctgaagagcaggatcacggcttgctcaaagggaccttgttaaacgagagctcgccaagttgctatttaatattctaatatggcttattatagccaaaagagaaagaaagatccaaaagagcacaaaattatcgatgcgcagaagagtgcaggaagaggaggtacatctggagttggagcaagtcggcggtcgttgtcttatcagcccgcggatctcccgtgacctgtgggtccaatgacgatatgcattgatatcgccgaatactatgtaggaatggagtggttggttgataaaagtggtagatacgtaggcagtaacatgacattccgatcattattctgaatagtaagaaccccgagtgctcctgtactcggtaactgtacttcatgagacccatttttcgctcaaccctcccaagaacgccattgctaatagatccgcatgaaacacaaaatataggacaattcacgcccctgagcatatgatacatatttgttgcatgctatgccaaactgtcgagaagtagaccctctatgggaatggtaataggccacgccccatttgaaccgccataagccatcccccatggttacatggcatatatggcaataccattgtcgtcagcgcttagtgttccacctttgagatcaatcatatcccaatcgatctctttacacacttcatcctttaataaaggctcttcgaaccgacccggcaggcggcaccaatctgcaggaatccaacttccgtctgtggcatctgagtctttgttgaccccttcatcattcttcagcacctcg

SEQ ID NO: 15585 - DNA, 577 bp, Emericella nidulans
tgaaacccgcatggagattttggtgagctgccctgacacgaaccagcaaccactctaggcatgtgtcccgagcccactatttgtgctactcacacagtccagaggccggtctttagaattaacgacactgcacccacatggtcccagctcggccgttcgccacatctttactatgggcctgggagctggcttgagtccgcaccgcaatcctaattcggtatatgcacgctcatgctcctattgccggccccactaatgccagagggggaagcgcactcgagcttgcccgctttaatgctcaattgagagccgcgtaactctcgcacgctgtacataagcagcgtgtgcacgatcacaccctgagggacacaatcatactgtacactttgtcgaactcaaccagggtggaggcttatagctaggacgatggatgaactgccgctgctgaatccaatcacacctctcattgtagacaaaaaagcaacttctgaccttaccactaacccacatgtttcatgaagaaagaagaggccacgttatagggcaggctctgagtcccgtgcatgcgccgacttgg

SEQ ID NO: 15586 - DNA, 882 bp, Emericella nidulans
  unsure (1)..(882): unsure at all n locations
gaggtagaactcacaatgtttgaagcagaggaccgctcgtcatatctcctctatgtatcatgatggctttggtgctgttaccatatgagccggcaatgctaattcagattgctggaatagccctcgagcggtttcaagaaggcggatgatgatgccaacaaggatgccgagtctcaagctggaagaaatcaagaaggacgggaaggagaacggtccgaaggttggcgggaaactcattcacgcgctggatgatgtgaagcccgaaccctccggcaagatcctcaccaaggcatataaaatacaacgcgaggtgtaaaactgacggcgattatgagcattggacactttttctttttgctataagcctttgaaatgatttacaggtcccactccaatgtatgtatctggatttctgtcaaaggctctgacctgtaagggcatggaacttattggccggccgatcttgcttgcttcnttccccgttttattccacatccgaatccgaacctttagatttgttgtgttcagcattttaactaccccaaaggatgccaaaatgctgccttttaaattaacggcgagcccctgcttggcatgtagggtgtgggtccggcaaggcataaaggggcaatgggatatacggtccaacgtttatctcgtgcccctgtggatttggtggagtttcataatatgttggctccttggagggcccggcccaggggtagccttaacttgcgataagataaaaccggcccaaaaacgtgatagggtggccctccctacccataaattgcaattaaatttgctctgccgagtttggtctaattcttaaattaggccatactctcgacccaactaattccctgttgttagaccccccct

SEQ ID NO: 15587 - DNA, 3758 bp, Emericella nidulans
acgcacgcaggcgttatccctcaactccagaaaggcgacgttctgggccacgaatgttgtggcgtcattgaatccgttggccccgagtctacaaagtacaagccgggccagcgcgtcgttgtctccttcccaatcgcctgcggcacctgcaaacgctgcaaagcgcaactctacagccagtgcgagaacaccaacgagaataccatcaccaatgccatgtacggtaaacgcacggccggcattttcgggtacagccatttcaccggcggtttcgcgggcgggcaggcagagtacctgcgtgtgccgtacggcgacgtcaacctgttgccgattccagacgatgtacctgatgagaaggcgctgtttctcagtgacgttatcagcacgagctggcattgtgtcgtggatacgggggtcaacaagggggacattgttgctgtttggggcgctggtccaattggccagatggcggtggattttgccttctaccatggcgcagaaagggtcattctgattgatgggggcgacggcgcatggaggctggagtatgtgaagagcaaactgccgaaggtcgaggttattgacttcacgaacctgcccaagggggagtcggtttcgtcgcacctgcgcaaaatcaccgatcacaatctggacgtctgcctggaatgcgtgggtggagagtacgccaagggctggattcactttttcgagcagatggtaggtgctgagacggacacgtcggagattgtcaacgagatgattacggctgtgcggccgtttggacgagtaggccttaccggagtgtatgctggctacgtatgtgtctcttacggttttcctagaatcgaaatctgtactgatcgtgcttctagacaaatcacttcaacatcggctcgctcatgcagaccggcgtgcgacttattgggaatggccaggcccctgtgcagaaatactggggcgatctgatgaacctcatccagaagggtgatatcgacccgctacgtatggtcagtcaccgcttcaggctggaggatatcgacaaggtgtattccttgttcaacgagcggaacgggggcgtacagaaggtttacctggagactaggcattcggcgcctgcggcgaaggagggaccgcaattgacgaagttggagtaagtatatcacgacatttacagttggcacatgatcttcatctgaagtaaattgcaaagacaaaataaaacttttgcattcggtgatactaaagcttgatacagcaattgatcctttccatttatttgagttaaccgtaaagctagctgcaaatttgttactactacgctatctaagcctcgcccaaaatattgtcttcataaacagtggtgattttgccagtgtttgcattctcaatctgcctgtcgttaacacagtccttagcccggaactaggcaacgcacctcatatctcgggctatcctcgctggcatcgacgttgcgatcagcctgtctgccaggctcagtcagcacggacttgatcgtgccagtgctcttggaagtgttggagtctcggccttgcagcggttagtatgtatttgggtaatggtgccgcggctagtacctccaacgggcttgtactccaccatctggccgtttgagtagcgaggcattgtggtatagtttgctagtagacgtgacctgagatatatggactattgaagtgtaggtagcagtgtgaagagatagatcatagaaggacatagatcacggagagggagttcttatagactggctattgtgtcacgatgattcatcactcagtatccactggctatagatacggtggaggggaatgaatcatggatagactgtagtcagactcggtcagtctagatcgttccttgaatctacctcaggcccacgtcatccctgctcaaccctaaataggttgagccaccacagctctcactgcaacatcatcattattgacactactcgcgttaataacacacaatatcatagatggacagatcgaatacagtggagctgcatgcggccggcgcgcagagcgtatgttatcactgaattcgaagtcaatgccaatggcaatgccaatgctgattctgacgagcacgtccacaggcccagggagcccgtcccgatcaagaagacgagtatataattctgacacctgggggaagcccgaacgagattggcgattcaattgcattcttcgctgtgtttgacgggcagtgggtagacactaatccgatgtgaagcagcatttactaagtagcaccttacagtggcacaggaatcgtctccaaccacgcgaaggagcacatccccctcctcctcttcgaatccgacgagttcaggagtggcaactacgaacgggctatgcaagctgccatcgacaaagaggacgagctgctcctccagggtttccgcgaggggcagaacttcttcgcgacgtctgggtctacagcatcgctggcactggttgatatgaagaatggcgtcttggtagtcgggaacataggcgactcgcatattctcatggcagagcgggatccggagaacgggcaggtgaagagcattgtacgtcagaaacaacacctcacagacccggacttctataatccttgtcgaagtggtgaagtgacgctaatctgaagatgaatatatgtatgtgtacacgataggaacgcctgacaacctcgcacaaaccagaaagcgcggacgagaaagcacgcatcgaaaaggcaggtgggcatgtacactcgcatcatgacatctcacgcatcggcagcctcaatatgtcccgggccctgggcgacctgcagtacaagacgccgctgatctcggccgcagcggcgccaaagacggagggccagaagtttgcttgtgcaccagatccgcaaaatgtgtcttcacaggacggagcccaagcgggaacagggagagacgacttcattacggtcgaaatgtcctttcgccggattgacttgcacaaggagaagcagtatctcctcgccttgacgacggaaggagtcacgaatgcactggatgacggcaagatcatgaacgggattgcggagatgtttaatacagtcagtaaggtggtatgagtggctagtgaagttggtagacaaattggattaacgtgataatcctgaaaattctaccttgaactccatgttcttagttgttacctatgattcatcggttggacgaattactttgtttaaactttacttcccctttaaaagattctacttactaaggactaattaccttgcacaaatgttaggtggtttagtaaatcagttatcccattatacatattttctcttctattcttcaatataaagtttctattaatgcctattacaaatttcttattgtgcgttcaagttattccatattaaactaagtgtccttttcccaattaatgatttccttatatgtggttattactcctttttagtaaggaattccactctttaatacttcttagccgttctacaatacttctcttatatctacttatataatgatttattacttcttctttatatatctttcatttccaaattgcttcctcataaacttatttcttattcttactatccttactatatcatttcacctctaagatctcacctcttctatttttaatcatactccataatcttcttattgttttcttacttccattccttctattagctgtcttattatatcattaattctacttctattcacactctcattactctta

SEQ ID NO: 15588 - DNA, 168 bp, Emericella nidulans
actatcaaccaatatagtccttgcttaagattttaatagtttcccacactgggcaatacccaaatggggggtggcatatgtgaaggggttatcgggagtgatcaattttcaggctgacggagaggtctcactactcgcaacagattgtctcttacgtgatcactttga

SEQ ID NO: 15589 - DNA, 2745 bp, Emericella nidulans
ggacaggcctgtgctagggatttcgccgtgactgcagcaatcagtcaatctattattgggacatttgtgctggaaaacaaacctggggttctcaactgaaattaggtacatgatacgggatttagcaattcagcctaccgtgcagaccctaggctacaggaccagataagtaggcgcccaacgaacagcgacggtccaaacagtcaggaataagaccaaatcatcaccaatgtatcaatattggatgtttgagcgacagcagtcttttatcctgtatcctctagctgctagtcttaactaatatctagcttcgaggctgttcagccgcatttatggcaaaacggaaacgttagagaattttagggacagtgggtatcatggaaaatcggacggcaagaaggagtgtgtgatagaccgtccttcatcacgcagcaaaaacttcttccaggactcgctggccctgagcgagagattgggatggccattcacctaggcactgagactccgggcgctcactttcaatcccccaagcgcgcgaaccttccacgtacatggagacgccgtggagggagtcatcgcaaatcacgccaacggacacctttgcgacatcatcggcagtactaaagggcaggccttccttggtccagcgctcctcagcggtcttggagaatgtgctaccagtctgggccatccaagggcagatcgtgttgatgcggatgctgtgtcggtaaggagagttgaggttggcgtggagggagcgcatgagatcctggacaccgtgtttggcgacctggtaaataggcacaacgggggtctccctgatgactgcggcgcaggagaaaagaaggatagagcgatccacgcctgggccgcggttgtgacgaaggtagacgctggccacgcgagtgacgtaaagcgtaccaaggagattcacatcaatatccttcactgatggggcctagtagctattagtgttgacactgtagaagatacttgctttggacctaccttgcggacttgtacaaggttcaaggagtggtcgaaccatgactctctggtctccgcactgccagcggtgacaataacatggtcaatgcggttgtacttcttgaaggtattgtcgaaaagatcgaggacggactgatagtccgtcacgtcggtctttctgaaaatcgcgcgagggggtttaggaggaccagttggctcttgatgtaccggccattgctggatgcactttctggctaactgctctcccctagcggcgtcaatgtctccaattatcgcataagcaccgttctcgcagcatagctctacgaggctggcgccaatgccgttggagccgcctaaggctgttagcattgcaacactgaaaccgtgattgataataccacttacccacaacaaggatgaccttctcgttgagagattctttacgaatcatagggttaaactggcctaaacggccatcagtggattccacgacgggctctgtcttggcgatcatggtgaaatatggggtgttatcacggaataatgacgaaaggagtcaagatactgtacagcagtatgcaacaggtggagaagacaactagcatgattcccttgccatgtgcggcgtatcttcgcttttatattgccatcggtacccctccatctctcgccaatccttctgaattggggagcttatgctaatcgtactggaaattgtccatagaattgcgaccttttttcgatcctttgaagccagctccgaatgcagtggggcatgcatgaggtttgagcgagcgatattagaggataaggattcggatgggctgctggagccgaatcgagtgacatcgttggatatcgcgatccacctcgacagatgagtgtgcgtcgacttcacacccactgtgggccttcgatcggcgagacagcgcgggggaggggactggaaagtggaaatctggagaggatctgggggattgacagcacgtcgtgggtgaggtctggactgttcgagatttaacgtattcaagatgcagagttgtagagaaagatcatgaagttgaaaagaaggtgggggattggctgaagaagcgcaaggtactctgtactctggaacctgaggctggtgttgcttgcaaaggcaactgtgccgtcgccgtgtttcttggcgtccttcttcctctctcctcactttcttcccgtcattactccagactattattactcaagagcttcggagctcgcctccaaggtgaccaatgatcttgctttacggcccccattgacttcgactgcttgatgctgacacctgctcgttccagcggcctacagatgatccatgagggttaaacctacccggcctggtgtgggagccagccacaggccctgacccatagcacagatgaaacgatgcggctagccactaccgtgactgggccccctgggggagatacgggctctcggcagcggcgtcagaccagtcccaagacgcagcagacaaatcacaagtctggatgatccgtctccaatctcggttaatagcaagactatagacgaacgggcgctcttggtatacttggtggcgcgaggccttatgtgagacgacgtcactctgctgccgagggctacgatattgcagcaggaggtgcccgggtgcgaatccacgacccctcggaaccgaacacttgaagctaacacttctgtcaatgtacacggtcaaactcggctgggtgggaaggtccccacctcacgacc

SEQ ID NO: 15590 - DNA, 890 bp, Emericella nidulans
ccccaggattctcttaagaagcaactattttgctcttagctagggcatttatttgaaggctgccaacgcgaaaatcggggggggacccaacgctcggcaggggcggatagagctatcctgaagatcgctcggatcctcagcactcgacctatgtgggagtggccaagtcctgtagctgtcgttgaagaggtgggcaaagactgagctactggcaggcatgatgtcagacacatacagcacttgctatatatagcaccagagtagtattacaaactacaaaggacatatcctgagggactacagacatacagaacacatactgtgggcagtactgaattagacgacggcattagggcacacccatatctcggttgttatcaagcaaacagtaaccctatattgggaataccaaacgcccaagagtttgagccagctcttgagcggcacagccatgaccagatgttttgaaactgagaaactaaaccactgtagattcccgctcccaatccgatcccccacctgtttcaagatgacacccacgggatccaaaggcatctatccttaaagcctgtgtcctggctccaaaactgatatggccctcatcaccaaattcaacagttcacttgttaactagaattttggatctaagcaaaacctacctttgttctaaatacactgataaatccttaggtattgctctataaaaattttactctctcctggctccctaaaaatttttatggctttactccaaaaccaaacttttatagctaatcctttaattaaaaatttaatctgtaaactaaatccaaaatatcttcaggcctacatatttatatcatataaaattacccctccatgtatcttttttatgtgttcttcatactttc

SEQ ID NO: 15591 - DNA, 540 bp, Emericella nidulans
aaagcgtccgcttatatacatggacttaccccgaggagaatctcccagccaggacatattccactcgcctgtgattgcttgtgccacgaacctggatgcacacacagccacccagacgatataaaaactagcgataacatggacttctacacaggggaatccgacacgatccatatgtatccatccttggtccatgcattgtagctcctacccagtgctaccatatgggccgtatcgcttgacacgcatgctgtggatatagggctatagctgcaagcatacttggcactaggagaaaccataggcgatatgacaactgatgtctgcaaagctgctgggggaccacatgagggacctggataaaccacacacgtgctcaaagtggatactgccatatacttgttcggacactatcgatatgtacacgtccaccgcatatgcagtaccgcacgcaagctgttgacatacccccgcctaggcagtaatgaacatactacccggctcctcacagggctatgacagaaacaggtcaccctacaa

SEQ ID NO: 15592 - DNA, 595 bp, Emericella nidulans
  unsure (1)..(595): unsure at all n locations
aaacagtctcgcccttgtccgacgggcagacaagcgggacaagatggccatagcagtaggaactaggcaataggcttggcagtagatagtagttagatgacccctttatctggttctgtaaatcggggtctgctggcgccgccccagccccatataattcgaccctttttccctcagggcttttctttccccagcatacccttccccattcacctccatttacctgattagcttctatactgtcataatatcatggccgacaacacaaccgaccacgcctggcagctcgaaaagggcatgggagggttacccccgacattcgtccatctggaccgcactcacacggccggtggacacgtcaacgaccgcacccagcccggcctccctgttgtgcacaggacctttgcgaatccgtcgccactggggctgttgtctttcgcgactggtacttttcattgccctctgatacccccagcgcttatgaacagaggtagtgtgctaatacatgggaaggaatcttnctcatctcaaccctaggcctgcacgcccgcggcgtccgaacaccccatgtcatccctggtgtcctcatcttctt

SEQ ID NO: 15593 - DNA, 1155 bp, Emericella nidulans
aagcaggcgccagggcaaaacccgggatccacgctgatccatcatctggatgaatgtcaccatatcggtggttcaggacgggatagtgtaccacatcccgttagtcgccccggagcgctcaagggtcatcttcttgcccagtgcagggtttatacgtagtgagtggaacaaccataggtaatcatatcgtccacccatgcacgacggtgatggtctatgcttgcgttttctccgcgctagccagtgccaccctgctatacggaaagacacggatccgcgagcacgcgcctgccacctagtctatgtacgtttcaatttccaccgttagccaagtcgagttagcgacgtaggaaggcccagcactctgacaaaatgcgagttttgaaagcctgaagctccgttcctaacagtctagagatgaggagcgtaccttgttagccacacgacatttgatccgcagaatgcacatagaaccagataccaataatgggcgttcaagactcgcaaacccttccatattgggcgcatattccccgcaaatgcacatctgaaagccgatgggctaggcaaattggcggttcctgaatccttccaaggttccccagactccggtgcgatgaagacagcaaacagcccaacctgcatatatactccgcggaggatgtacgtcagtttcgcgacagagactgaactcagcctagagtgggaagcgagagggatctgttatctccattagctactccgtatagtcaaagtcaatgaagctggaatggtctgggcggtggggcagctggagcctcactcagatgtcgtcattcgcttgtgatacctcggctatttttctttccattattattggctgatcaacaggacaagttaacacattcagataaatgatgaatgaacaaaaggatgctccagagagaaattgaagaatggacaaaacacgtcttgagagcgcgccgcaagtgcaatgttgaagtttcttttcgaaaccactcagttcagcccctatttcaggacataaatataattaaagccgcggtgtcgaaagcacattaagtattatgaataggcttatctatctatgtagaaatatacatgccatgcagcaggctcggtgcattcaccgttacatggacgattgaccgtttc

SEQ ID NO: 15594 - DNA, 521 bp, Emericella nidulans
ctcttgttatgtccatgagaaacccgcgtgctcaaattcatgaacggtatccggcgctcgtgtccatgctttagaaatatataaggagcggctcatactggggttctatggcaacagtaggggtgggcaactaacgaatacaggcccggaccttctcttgacctatttacaggcccagtcagtgagatagtgaggcttaggtcctcacagacttcacttcgatgagctaatcacaatttagtggcctgttcgcctagcgcgccggattcattgcgatggtaaactgtgctaaagaccgaaaatgctgaatctaggacgcatgctgacacctgaagtgacgggctccagttcttaacatgatctgaagataaagctggtctcattcccagaatcacaccaccgaaacgagaccgccgactggacgaactcaggccccaacagattgatatgccttgtgggagggcctctccactaattcgcgctcaaatcaggtagatggcaatttgaaagattacataatg

SEQ ID NO: 15595 - DNA, 798 bp, Emericella nidulans
  unsure (1)..(798): unsure at all n locations
cccgggagggggaaaaacggggaacttaaaagtaacacccggnaataaaaaaccggncgaaaangaagaccaatggacaatttaagggganagagggttgacacaccaaacgcgaaaatacaaaaaaaaagaagagaagaagcgaaaggggagaagaccgagaacaaggggcaacagcagaaagcgaggaacgaaaaggaaaaaccagaggagacaaagggaaaggaagacccaagagaagcaggacggaccaagaagccgaggacgcgacaagagcgcacaaaaacgaaaacatagaaaaacgggaataaaaagaaaaaggagacaggaacgaaaaagcatgcggagaaggagaacagaaaaagggggagaacgaggaagaacggggggagacacagccaggcaagggcaccgagcagggcaaccgggcggcagggcaagagacaagagaagcgacgagccatggcggaaggaaccgagaaaaaaaaaaagccgcaagagaaacgaggggagaaagaaacgggaagaaatggaagcagggaccgaagggcaaaaggaaacaagaagaaaggagacagggaatggaaaccgaaaacgagagggaacgggaaagcaaaaaaataccaaccaccagaagggggaggagggccgaagcaaggaaagaggggaaaagaagaaaccaccgcacgcaagaggcaaaaaaaacaacaacagcgtggaacgggagcaaggaacccggggtagaaaaaagaaaaaaaggccatgccacggaagcacgggagaccaacaagggaagaa

SEQ ID NO: 15596 - DNA, 2731 bp, Emericella nidulans
aaatagagcagcatactcgcccagatgacagtccgggcactgcgtaagacatgaagaaaacttgtagtccaccgtgactgtactcagacgcgtattccaatgtcctgttcaggcaaaggagtcatatctgagtcatgaacagcaaggcaaccctttaatcatactgctgactacttaggtacctggcaggttcgtgctaccctggaagctcacatctttccccagttacgtctacctaatcggatttcaccctccttggacctagagctcagccaccttcactgcgggcggacaccctgtcagccggctgctagcactgatactacgtgcgctaatgtgccatcaattgtgcatccgacattcctctgcattgcctccgcaaaagcttaaacgcacccctgacggcccttgtttccatcggattcaacacctataatagataccatcatgctcccataacgtattctcattcttccccgtactttagactcataccattaaggacacttatgtcttgcttatctaggagtatgagaagaaatccagtacattcctctttacgtaatgttatgtgatcagatcaccacgttcgcttccgccgttgcccatttatctaatgaccaagcaagataacttgttatgtggtatgtcgcaccgggccgatcccacgatgacgatcacccgtctatttttgtcagtcgctgtaatcatgtgttgtggtgatccaaaagtggaagtaggcaggtcatgagatgggctgcggggatccttggccctaagtaagcgccagtgtagtagactaggtagtcagtttccaccatcattttccattcagatctctgatcaggttagactaagctcatcgcgtgccaatatagaaggtttggcagaaaagctgaaatatcaggaatgacagaagtcggtgacgaaacaatttacctagctcagctgtacggaatatatgtgacaagctatcagctcccttgtaactacttatcaggcctctatcaacattgcgcagtccctcctccccatcctttgtattctgagcaacaacctctgtctccaccggcgtctcgattcccgtactgccatcctcaagactcgctctcgcccgccaactgcttcctcttctgatccctcctatgcagaacaagcgcagtaataaaccctgcccagaggaataaatagaacacaaacgtcaccggctatcatttccgccaccgcggggcaccgtcgggtccggcagtcgggaagaggaggagcgggacccagatattgaatgagtagccgaatgtcatcattgagccctggaagtcattatgttagaatgcttcgaattgggaggccctgaaagtgggaggaagagctatgtaccatgatggggctcgctcctcgaagtcatctttgactatggtgttcactgtagaatagagaactggacttgcacagccgttggccccgaattgaaaccaggcgaaaaacctgagaaatgccttttagctacggcccaattccattgctatgcattttgctgtccatgacaggcaggaaagcggaacatacttcaagcctgtcgggatgcagcagatgcacatgcagagggtcgaaaacaacgaaaacgtcgagatgatggtgtagataatccacgaaggatagattgaagccagagtcgttccgagccacgaggagacaatcgtgattgtttggatgatggtgggatactggttgattttcgtaacagagtacccttcatccttcaaccagagattcatgtagctgcttgggtaggatgaaaggatcatgcaactattcttgttagctaatgtccaatcttatcttcctttattggtatctttggcgaagacgtacgcgtaggagaacaagaagatataaatatgccagcgcttcgcggtccttttgaacacgtcgggccccaaactccccggtcgccgaatcttcgctctgctcagccaatccttcgcaatctcgatatctcgcttcgtcaggaagaaaggcgctggagagtcaggtacgccaggaaaaacaagaaacccgatcagtgccacaggaatggtgaaaattccgtcgatgataaagagccacctccaccctggcattcccccaactcccgagagattcgtgtatgcggctgcttggagatacccgcttattatttggctaagtggattgcagatgaaccaggtcccggcgcgattgaataggtcggagccggagtaccaagagcctgatttgtcctgtcaaacttgtatccagtaatgaccagagttggaacttacccaagatgaagtgcgtttctgcgaagactggggcttcgaacatgcctaccagaaaccgcaaggcatagagctgatgcacgtttctgacgcggctctgggcgaaggtgcaacttccccagaggatctcaagagtgggaagaagccagcgcgctctacaatccatggtcaaaatagtcccaacactcaaaaggtcgaaaacaggccgtacagcttgggtcttgatagtaggagcaaccctggcacctggaacaccacatacgcagtgtaatagcagacattggagtaattcagttcatccccttaaagccggaaatctcctttaaggccactgacatacgcattgctgatattggtttggtcgaggtatttgacaaagactgattttgtgagatgatgctctgagcagacgaagaaagggcttacagcagagg

SEQ ID NO: 15597 - DNA, 5659 bp, Emericella nidulans
ctgttttgacccaatatcgtatagcagggactccgactggttgagagcttcatgctggtgatgatgctctggtgactgctgtattgagagactgcaggctggcgattttctctttattttttctggttatcgatagatggtagcacgtgatgctgcggatatcgagggcgcccgattggctgcacgaacgccaacaatctccgtaatcgactcgggacttggctttgagtgctcagactggaactcgccgcaactcctgctgctgaggatgttgttaccgtcgatcctttcgtcgtacaccttttcctgatcccatggtctactctccataacagttcagtcgtccctggctaccgacctcgcacgtacggcgaggacacctgggcagttcgacttatcgctgacctttgtctccgtcaacatcccgatacgatgggccgcggattgagaagctacttctggttcgacttgctttggaaatgaagttatcttcggtctttacagcttccttggctatttatattggtccaccctgggacatcagctaaaacatggactttcctgggggatgcatcacaaacgttcgcgtcattgtaggtactcttcctacctagttacagctcccaactgagctctaatgctccgttaggatgggttctccaacgtctactggaggatctacactgaagataccagcggcactaatcctccaggtgacggccccaataatgggcataccctattgaagcatatcagtcgcctcaaagagctcgagcttcggctaaggagtcaaggtagcttagtgttgatttacccgagacgccttggtctgttgatattctccgccactcccgactttgagcacctcgcaccagtacttttaagtgaaagcggagatcagacaaatcgccttcttgttggctctacaattctaaaaggttagttgcctaacaggtcaattacaacgacagtacgcttaccaattcattagtctggacatcgggaagcgtctctgctgcggatttggcgaagagtcacctgtcagatctccagaccacgaacgccaattctcccgcaccatcccaacggctgcaaaacaactctgtgcaacctaggcgggcggataattctggcggctccgcggcaatatatgcctcatttatctcagccgtcaccgccgcattcagtctacaaatagttcgacaaaacaacgccattcctctgggaccgcggactctcttcaacaccgtcaacggtaatttagatgatggccagggccctgccggcaatgggtccacttctgtttcagcactgacctccctccacgtccagttgacttcggcaggaaaattgaccattgccttacagactattgcgcagactggattgttacgactgagccaaccagaagaaagtgcatctgctattctacccggagctgatttatggctagcacctactggttcaattgcaagactaataacttctcactcggagaaaaacagccattcgcgccccacgtcggcctcggaagatattagacgatggccgttaactgttctagaatggttgggatactttggactacccactgaaccggtgaccgatgatggctgggtggaggttgaggtctgggaaccgttctattccaggttgtccggagaagccgctcgactcaaagaagagaattcttcgctcccgctaaaacgtatactttggcctgcaatatactgcttccgaagatcaaagtcaaaccagtcagaaaccttggacagaaccggggagagttttccctttctttgtgacccactggacttcgcggagggttggtgtgctaaagagatacccaaggctgtggagacgaagtcggagcttccttccaagaaccaagaacggcaggttaacagccaagacacatcatcacccggacctgtcggtctgccagaagggatagaaagtctatcccgtgcctctcttcaccctgaagtgcagagcgccaaccttgtgtatccgacgccgccagatgggacggccggcataggacttaatcccgtagtgccgactacgacaaaaaacgcgttagatccagatacgactatggatttcggcccggcggcggggcttggtgtcggatctggtctttatgacaccaatgaagacgatgatctttttggagacatgaacgaaaaggactttggtaccaaggggatcacagatgccgactttagttttttcgatgaccaaaactttgatcaacctagcaatggcggcaatatggaggatattcaagaaagtcctgggtttatcgaatcaaacaaaccggatgttccccttggaccttcagatctagtttcgtcctcacctgtctcggttgatagaaacaacactccgaagggaagcctcgagcaaatacatcctgctcctgtgcctcatggtcagccgctttccgtgaatgatgcactagtattgtcgcctcaccaggatcacgctcagacagccagtccccccctcagccctgttgaggttaagaagatcctttttccagagtcaagtaccagcccaaaatctctcgctaagacaagcaacgcactgagtcactacagtccagtcgcattcaagagcaatatctcttcatgggatcaaaagtatggtgcagacggcaagttttcttttatgggagtaaggaccgcgttcaaccatgatccccacacttcttcggatggtattccaactattggcctgccgcgtcgaaaaagtcatatgaaggcgctagcatactctaaaaaagccgatgccgaagggagcccggttgatgaagtcgactcagcttcaagtcccgattctgagagcgagtcagatgacgggtgtgacaatactggcccagagaacactatgccatacatgaccttgacaaccttgaaaagaaagcgtgcggtctccagcccgattaattctcctaaaccatcttcggtgatgagctcaattggcgccgagcaggaggtaaatatgcctaggtctgaggattcaatctttatagggaactttctctctattttctcggatttgtcaattgctggatttttcacattatctgaaaaccatatcttcccgtcgcttgcatcgcgagaaatacaagttcaggttgctcagcttttagttgaccaagtcacgcaatcatcgttggatcacaagattgatggcagatttagtgtctcttgcctggataatcagccgtcttggtctcgggaattgctagagggttccgaatatttgggtggcattgaaaagctcgatttgaacagttttgtctcactacaggagcaaaatgcacaaaattttctctcaccagatgctggtcccgctcctcgtcagaaccttcaacataaagacactggtagagggtcgatcacgaaactatcaccaccacatctacgtgtccggcgcggcaaagactttctggaaactctgcctcccgctatatctttctgggagacgtttgacctggaacctgctcatggaccgaaggatattactgcttattgcatacaccctcaattctcgactagagcagccaatgtattcctggacaggttgggtcttctctaccctagctgcaaccttggcagccactccaggggagaaaatatcgatgcatgcagaaacgggttagttgaatgggatgtcaaatcggtaaagaggcccaattatcaaacggctgtgcagcagctaaagctaatctgtgaggagctcggtaagaacatcactcgcagctctggattatcctcaactaaatattttctcagggaccgctcttttggatggcatgccatcaaaggacaatattgttgttatatcataaaccccgtctcacatgctgcttcgctggttgacatttgcgctgcgttttggaccctactacaaaattatttcgccagcgccgagaaacccacctaacaaagtagatgaagttttgctgcagatcgttccattggatttcgttatgtcggcggagtctttagttgtgcctcctcaggcagaatatttaaacctggccttggaagtctacagtcggtgctctacaagacaaatgcaaccgagccttgtgaactgcgcgccacctgtaatgctggccgagactcttcccccatcaattggattcaggcttgcttctgaacgtttttcgcctctgcaggaagggagatgtcttcacgttgcatgctctagaagtcaagatcagcgatggatgaccgtggcatggtcagacaactctggggccctgcaacgaacaatgtcttactgccttcgttttcggaactctacggcttctcggactctttctgctgtgcggtctgagatttgggctgcaacaagggatatcatggacaaaagccaaggacgatggagagtcatcatcgtcaataccgacaatgtggaccaggacgaatatgacagtgaggctcacgcacccccactctttctgatgcttgtattaatgatgtttagcatggttgaatcttgcggaccagtacaacaaatcacgatccatggctatagaattggcgatactgagcgtcaataccgcctttgatatttccctcagccctccaccgtcaccattatcaatgagccttcttaatccccaggcttcttcgacgcctattgctaccccggttccaagtggctctatcctttctccggatggaccgggaaatgctccaactcccccgagtggtgccaatgcagcaaataatgctctcactccgacggactcactcctagagtcagaatccgagtctctgcttgttgacatttgcgacgaatcctggtgtgttctattatcgcatcggttaaacggcaaccttcatctcaccgagtaccgccctgcgttagctagtggctatctagttcggcgcagaggtactacggatgcggatggggcatataccatgaacgttaacctcttattcacacagcgaccttcaacccattacgaaacgaccctccgcgagatcataggaatgtaccgtgacctggcgacacttgcgcgagtacgaggcacgcggatagttcaaactggcacgctgccgtggcatatcgccactgcaatgcgtgctcaagaaatattgagttatgttttgtgatacagatgttccgtttttctgtttctatatttacctggttggtatatggcgtttgggtaggtgaggatcatttattctctttcggcaggttgcatacaggatgcgttataccatcatatagggtctggactgctgtttgtcatgatattatacccattatatcctcgaatatttcttcaacactatgcagtgcctacgtagtggatagagtcacctgactaaatcttatcatatctaatccgctgttgctgataaaaggtggaaaaaattcaaggtcgcagcgattcataactacaacccctcactctcgcggctctctcaattatagggttccgttgactataagaacttataattgcataatttcttgatcgaaagatttccgcctcatttcagctccatagctgcggcagaccagcacgcaattgcaaaaatcagttcaattcaatatatcacccgcattcagactattgccaaagacgatctctcaatcgaaactcccgcagtgttgctcatac

SEQ ID NO: 15598 - DNA, 1433 bp, Emericella nidulans
ttgtgcaacctctaactcttcaggcgcgacgtataatgagtacctgaaacccaccgcatccgttctcatctgcaacacgtcaatatccttgaaccaggaaaaactgcgccataccaatgaatggggcgtcccggctgtgactgctgagtggttgtggacatctattagacaagagaggaagcaacctcttgaaccctatctagttcggaaaccgtcaacacagagcagcaaagatctagagctgcgagcaggttctcgcccagagcagaagcggccttcacaacaattaccagacgactatctcgtcactaatggagttaaatcgccggccaccggccggctgagccaaggaaatgaaacaaactattttagagagcccccaaagaaagttatcaggcgaaccaaatttgggcctcaaaccaccacacaattccgtttctccagaaaaactacatcctattgaagctttaaatggggtcaaatctccagcgaagcgcaaatactctgatcgtgaaacggcgtcctccacgaaatccgccatcgacctcgccgtaaacggcctgctaaagaatgcccgcacagcaccatcccgctcagcttccgactctaccactgactatgacagaccccgctcaagacgagcgaggccgcttctcggacgtgcccagtctaactcctctatccgcgcaactgaccaaatggctttttcccgcgcaagctctattgacaccttgcatgaagatggagccggaagtgcagttgatagtatgagcatcaacacagatggtggtatcccctctctcggttctcgactcgacttcgaatacctcaatgctgaacgggaacggcggcttgaggagatcaatgaagagactccaccaatgacgcagctagactacgaggatccagacgccgtcgccatgcgggaaaagttccttcggtacgcgggaaaagttgtcgaaaagccggttggaaagcaggatattgttgtggaggagcttaaagacttggaaaaggctgggtgggggactggacgaaggacgaggaatgcgactaggaagacggctgcggatgatgatgacttttgatgttgctttgtgtgagatgtggtcttgggtttactggtggaaggctcagatttcactcctactgcgggtgatttctgcttttcgcgtgttgcatagcatctgaatggcgtttttggcactctactccaaaggtgaattggatatgtaggagttatggcgcttattattcaggcacgaaggagaaggacaatatggtgcccaaaggccctgggcacgcctgtcagtcggtacgtcccattgaccagacgagactgtcctcaatccattgatgagtgtttggagtggtaatggactgtttagataccagagatgcatacatgagtcagaatacatgagttcggcagt

SEQ ID NO: 15599 - DNA, 851 bp, Emericella nidulans
agaaagagagacaggggtacagtcacacaaaacaagtcaagaaccggagaaaaggggccccccggggagcaattaagaagacaaccggggtatgacccgcacgcaccatcggcgcacagaaacaggcaggaaagcacgcggcagggacaaccgacgaaagcacgcatcaagcacagaagcccaccaccgggcccatgagaggcgaaacagagcaaaccactgctcgaggggacagaggccagagaaagacgaaggcacgagagaaaagcggggagaccgggaaggaacgaagcacacgagccggaactgcagcccgaatcgggccactcccctgcacaaccacccaggagtaagagaagcgcagcgggcgagagccgggccacacatacacacaagacagatgaacaccagccaagacccgagagatttgagaaaccgaggcacacaacagaccaaagaacccaacgcaacacagacgaggaggcccagcaaacaaagggcggcaacacagacaggaggacccgggactgaaccggaaggaacggaaagacaccgggccaagcacaccccgaaggacaggaagcccactgaagcaacaaggaaggaaaccacccaagaatcccagagtcaggacccccgagccgaaggcccacgacgcacccggaaacaacacagccaaaatggctgaaaccaagccaacaccggaggacccccaagaccagaaacgaagcaaactgggcaggaccgaaacaagaacgcgcaagcaaacgggcgcccaaaccaccgaaaaaaaagttggagcaccccctggaaccaacagaaaaaaaaaagaagggaccacggcgcacccc

SEQ ID NO: 15600 - DNA, 1758 bp, Emericella nidulans
aaattagtaaaagatatgagataagggtaatttgaaattaagcctttaataagaagagacactgaaacctacgatcttaaaaaattttcatttttttaaaaaaaataccaaccccgtttttttctcctgggaataaagcctatgtccccgggaccaaaccaaatttcctctaaccttgtgggggatccaaaatggttagccatcgccccaaaaaccaaagcgggcaacgcccgttttaaatttaggactggggcaatccgccctattttagccagaggggccaggaagctccccaaacaaaatggcccttaaaatgtttcatccgcgccagggccattatcaaccggtgtagattcaggaatatgacgcgacaggccgaggtcttggagtgggctgtagttttcgacctcgagttcgtcggtcttactcctcactccacccgatgtcgaaggtcgaacggaaggcttgctgcgggcatggttcgcgaagatggacgcgcgggggcgtgtctgggctgaggacttgcgcttcttgataccggagactggagccgaggtgagtcgaagtgacattaggatcaggacaggaacgagtagtggaagttgaaaacgattggaagcttaattaaggcttgtgtcggataagagccttatcatcacgtgactctgggtaccttgcatgtgattgtgcattatagttagccatagtatagagttgcgtaagctgtgcaccctgaataataaagttgacgtcctacaagatattgcagatgtgcaacaacctgaagacttgttaagtcagacagtatctcggacacagaccaggttctgagtcggttacatattggcagtcacttaaaaggttgcggagatcgggtattttgcgtccaatgctgcatgcccagcaagctgaaaacacatttgtcaatacctaaatgaagatttctcgtgaaactggatgggaaaggattatccttggtgtctgagactcttattcgacatggaataacattctttactgtaaagtttgcccgtggttgattaccgaagtgtatatagctagatcagaccctgtccgcttgccacagtcctcgtcaactcctcatcgatcgctcactcgagagaacaagaacacaaacacaaacacaatgatgctcatctttatttctatcttcctctttctattcccttccagtctttgccttccagatgagccctaccactattacttacaatcaaaacccaaaaaccctaccaaatcatcgaacctcaccttctacctctcttcctccattactctaaatggccacacaaactacgtcctcctaacgtcctcatccttagcccagccgcttcatctttacgccggtgacggctcgataaccctcgacatctctaacgtgattggcgcgagctcgcaagcgcccctcctactcgcggacaacgacgggctgaacagcgtgtacaagcaagttatattgggggatcagatggcggggcaatatacgaaggggttcaagtttaataggacgttgttagtcgtggaaaaggagggatttggtgggtttgtggcttgtacggcagcgaaaggaatcaagcaggtatattggtaccgcagcggagaaaggggagacgctcaggttggatgtgaggaggtggagtttgagagggtatggactgacaatggaacagtgcactgagattgttgaggttgcatgaacatgaaacagctaggctggctttattctcgatctgctca

SEQ ID NO: 15601 - DNA, 845 bp, Emericella nidulans
  unsure (1)..(845): unsure at all n locations
gaggcgcagagggccaggcacttggccgtaacggccgcggattaagacccgaccagaaaaaaaaaaccctggggacttgaggaangaagccgagggacccccaaaacgcggcgcaataagagacagacaaagaagcgaaagaaaacggagcgggcgcccaatggaccctaacgaaccagaagctgacagcggcccaggtggaatcacagcgacagacgtagcgggaagcaaaactgcaatataggccgacgagctctgaagagagtgccgggatggaatcatccgagacgaggataggcagccgaggcaaagaaggaccggcaccggacccgccaagaacaccaaccgagggaagcactaccctaaccggccagggccaaggagcaagccgcacactgagagatgacgaagaacgcgagcacctcacgcgggagttaaaagcctgcagaccggaaagacccacacggcgcggaaaaaagacgtaagcggcccgctgaaccggaatcagtacaagccacacaacgggaagggaagaaaaaaccgacacccacaagaggacccgaccgaccaaagaagaaactcacaccgacggaaagcgaaagcgaacaaaacagggccaccgaaaggcccagggaaggcaaggcaaaaaaacaaaagggctgcaaaacaaaaaagcgggaccaacaaaccaggcgaaacagggaacaaaggaaaccgaaaaaccgctaaagaggcagggcaagacaaaggaacacacggagaaagcgaacacaaagggaaggaagaactacgaacaaaaccgcaagacagaaagaagcacaaaccacaggaaaaaaaagcaagcg

SEQ ID NO: 15602 - DNA, 2538 bp, Emericella nidulans
atacctcaacaggcccaagtgcgggcacatttgacaatatcccgcgtcagaacgacgagttggataatagcatcactgagttacagagcttgacagacgctgattatgatattgatgacggagaaagcgcagtagccgaaacgacctggaagcagcggtacatgaagctccgcgcacaaatgcagaaaagggaacgatccttgtctcagtacaagcgcaagatcctggaatctgtcatggcagatatataaggttatttcgccagtttctgccattcatatttggtaaacttttatctttggcctattttatgtttgtcacgttctcactttgccatatacccaaaatcttttacttcgcctggcttactgtttcctttcgttttcctcactttggatacccactaagcaatgttactttacgattgcaccaagtcatattgaatggatgcaaatggttagattctcgtctgcctcgatccttctgtggcagctgtatgaaccttactgtagggtaagaatcaggaacggaatgctgcacatgaacaaaataaaaagagaaaagcgaaagaaagttgaagatcactgaaaacccaacctcccggctgccttcaagcgcgatagcgtgtcctgcccctgattatttcctcaattccagcctttccagaagtgagagcaaaggacacagcgaacataggtaagaaaaccaatcgacaagtgtgctctaagcctcctcatcctcatccatagtctcgtctccaccaaaagccctatgagtattgctcgcttgatcggtttcttccttagaagtgccatcttccccctcttcagctgctatttccgtaggtgctttagccttgggaggcctccccctcttcctcttcggagctggttcgtcgccgttaccgtcctccttaggagccggttctttgcgcttcctgcctttcttcgccgctccgcttgcggtctggttctggttctgggtctgggtctggccctggttgacttcactggggccggtcccagcaggggcgccgttatctccagcaatggctttgccttcgcgatgtgcttttagaaggcgttgatagcgctttgcactgttgcggattagtccggttccctcttcatccggggaaaaggttggagatgagggctttctggggtgggatacttacgcggctcctgaagtggggatgttgcattgttgtgcgacggcggcgaagtcaatctaacacgtaaaatcgacattagttcgagtcggatagctttatattgtcaagttcagctggtttggtcacgcatgagaatgaggggttgttaggatattctggcgaccttttggatatcggagtgttgaatacagctcaggaggagaacgacatggtcatcgttagatagcgacattttggtttcttgattacgtgcttatttggttgctttctgggtcgctctgttggtttgtagctgtcgtcttgataatcgatgaagtaggtacgtacgtatgttggcaggaagatatatgtatgtgcttaagatcgaagttttggtagtggtatgaaagagaattgaaagatctgaacaaataagggctcctgaatgtctgaggagagttaaagaggactagtaaactggaagcagaactgagagaagagagatgctaggataagggtaaagagaaggatttgggtgcctaacactcttaaccaccgttaacagtatgaccttcaactaccgagcaaaggagacggctttttatttttcctctgcctgtatcctttgattgatttaagacttcttagaaagcgagaataggtggtgttataagagggttgacagcattttcacgctagaacactggtttatttgctctgtcgcgtcctgagtgatatagagcgtatagtccagaaagatattgaatcattaacaagtccctatagatcaacaagaggcgtctaaaggcccttcctctgaagttacacacccaggtcccacgaggaagcaaaagcaagaccaaatcgatatcctcttggcaccagtaacctgagccatatcttgccataacggttaagttgtataacttagttttaaggttctatcccaagaaattaatgctcacgatatggcctattatgcaatttcggcaattttcgctatggaagactctagcacgactactgttttgattgtagcactttgccaaacagtccacataccattgaccatagttctagccctagggccaattttctctattaaatctgccagaattgtcctcagctttgacaagaggttcgggcgtggcaatccgctcggcgacagtcctcctacgaaaaccattcatcgcgctccttaccatcgcctggacccttagatctgccgggatggcgctaagcagaacgtactgctacaaaagattgccattcttaccatagtatttgtagtttcgttgccgatggccttcctcttctcggtgctaatgttgggactggctatggtgcactcgaggccggtaaaacggtgcttgttgcaggaggcg

SEQ ID NO: 15603 - DNA, 2377 bp, Emericella nidulans
ctgtctggctggcgttatatgggatttgtagttcgccaagggtttttaccactgacatcagtgaccagaacagagaccatcctctgctaactgagacgtttattgtagccagttacacgggaagggcactctatacagatgaccacgcctgcaccggctgaggacctcgtcaggggtggaccaacctgatagcagacatccaatccagccagaacccctcctgttcggcatccgccatatcaaaactcgacaacccactagcatctacaatgggattagctacctcacgttccatttcagactggccgaatgtttgacacgtccactgtgggcctggtcacctggaatgacttactggagaagggtgcaataattcaaccttagcgctgcccgcttattgctagtttcattcattgggctaggtcaatttgcccagccaatatctcttcaagtgaccagttcaaggcctgacacgtgaccgttggccgccgattatatacgatatagagccgtgactggtggaatgagaaatagttggattttttttgtgcttgaggaccagactagaacgcatcgagctcccttgtattgcctatcttgtcttcagcgttcaaaaggccgtgttagcccctgcgaagggcaagaatcagggtaaatggtatgtggccctttaaggagcgctcaagcttctgggcggacccggtttgggctctccagcgctatctatatctctttattctggtagatttaggctgaggagctccagtttctctctattactctatcaaaaacagttctattttctccgtttattctcagctaaccacgtctctgtcaaagtacaagatactaagcctaagcggccgacgtggcagcagggcccgcagaaccggtaggaatcaggagattggacatcccagccatgttcatactaaagttcgggttcacctcggcgccatcctcagtccagtacccctcaggcgagttgaattcattgcgcgtgctgttgataccgagtgaagtccagacgaagacaccctgcgacacatcgtcacccagaagaacatactcaacgaaggggtcggtggtctcggcctcggtcgcgaggatgtcgtcattgctgttgttgagtagggcttgagtgttggtattgtaaggactggtcttttcaacagcagtaatgaggtcctgatcaaagaagatctggccgacatgggaggcgcgggtgtcatagaggccagcgagggtgttgttagggagcaccttgatctggtcgccggggtgggtgaccactgtttgactcaatgttagttgatgatagcactgtgggggtcgtggggagttgtaccgtggatgtggaccgcacgaccggtgtagtggcctgggaagatagactcgaactgcacgacaccatcggagccgctggattggatgccacgcaggaaggtcgtattggagttgctctcgtcgttaaagttgccattgccgttggcaacgacaccggagtagacaccagtggcgttgcagtgccagatatccgtatagatattctgcagcggctcacaagtgttgacatcaatcagctgcaggtccaagaacaatggcacacccgcctggtcttcggcgacgttgcggcggacgagttcaccggcgatatcttgtccatattagccccgtcatagtttggtcagaaaggaggaaggtacgtacagtacggcccttgggtaacctctggctgcacgatacaagccccgccgtctgcaaataggacgctggggtcggtcgagagggtgacgttcttggtcgactcgtggtccgtggccagcacagaatcaagatcgcgcaccttgaggtagcggccatcttgattggaacattatcagttggtgcctgttctcggtcatctatgcatacgtaccggtgttaccagccctcttgcgcagctgctgcacggcgttctcacgacgggcaacattagactccgcaatgccgcgtgccttgagcttcgcggcgcagtgtccaaggctgcggccctgcactggaacgctcttgagaaaggccgcgcgctcagcggcctcggcctcaacatcatggccgggatgggcagcggcgatgctggctagacccgcaaggccgaggccgacaaggagactttgagtgagctgaaccatgttgacggcagagacgaggcttcccagtgaaacaggattgcgcaactgagtgaagtgttcagtctggattgtatgttgagatgataaagcctcgagccagaaatttgtccgtcttatatacactggcaggtacatccgactgtaccgaaaagacccaaggccaggcacgcaatcagcggagtatgtgcttggaacactgttgatga

SEQ ID NO: 15604 - DNA, 2773 bp, Emericella nidulans
ccatgttatcatcaatatctgtagagcccaagggcttccctttttgtgtgttctgttcccttttctgcattgggttgctcgaaggttccgaagaggcctcttctgacgcgaaaaacatactctcgagtgcggacctatccaatcgggtctggcccacaacttcgcccaagtttgtccgccgggggaagtgagtgtacctattgttagactctggtagtagcctccactgtgcgtaacattcctccagccaaagatggttaacaacatggatattccattccctagcagcagagcacttctcgctattgtcgtgtgcagtcactaaatgtgtattttcctgcctcaaggttttggtgcattctgcacccgtagccgtgatcaaatgctctagatacgaccttgcttcaccaacgtaattggacaagctgatcttgaatttctcaaagcctggtataggggttttcgggattgggtagtgtaaaagacgtcgatagggagatgtccaagagtcgtaagtcattagatggtaaagccaagacagatttcccacatccttatttagcctggaagccacacggtagttgaagccgtctctgaaccggcagatgaatgtggttgcttctgaaacatcagtggttaccttgcctccgttttcttccactattgctgagatagtgtctcgaaggtgcgagccgatttccaagtctgaagagagcatgataactttgccgtgaaaaacgctcagcttaggcttgactggagatgtcaatggtgtaggcagtttggagggctctggtgtagatgcgccaatgatatcgcggctctctgcggagcgaataggagcgtccggtgctgcgcgaagaatttcgggatctggaagcttataagggcgttcatcaatccgccgtccaagcttcaggcagtcatcaaaccagtgaggaagaacaattttgacattgaggtttcgagccctgacttgtttggccttatccgagtcgatggtcagatcaacaaggtgagtgcacatcccagtgagcctagggttatagagaccacctttcgccaggacaccaccgatgatagcatctttatcgccttctggaatatcgccacatgtaaccacgacatcgttcaaaaaaagtcggggatcggggctgtactggcggacgttggcgagcctcctttttgccagtgaggcgtgcatccactggggcttaataacaggaatcaaggcatctttagcggcgtcgaattgaggaaagtcaatcgtggtggacatgatatggctgaacgccgcaatgtctgggaaatcggccggaggctcatagacaacgggctcgccgccatgagtttctaaggtggacgcgagctgggtcgggcaagaggttagaagaattatactgaccagagcaatattttacttacctgatgggctgcatctgggctgagatctttcgagcagactatgcagacctttagctggtcaaagagccgcaaattatcgtcctggtgtcccgccatgggaaacacctgtatttagacttgcaaagcttgaattgactggaagcaatttccgaggaattagataagacgcaggctgttgaataccccgcgagtaggagaggaaagggctgtctcgcagaggtctcgaaagtgcgatggattggttgctatgttccttcccaatacgatgcgacgcgctcaagtcgcgcctggcgacaccaagtcacgtgcagtttctttcattagagggccaaccatcaacgtgcctcacgtcgctccaagtgctttgggcaatctatgtggaatctatgccaggctagccatattatttctatcatgcacgctacagtggaggaactcacttcacctggacggtccgcgactggctcctaattgggcagtctggggtgcctcggctcaggatgtccaggcgccccctcggcaacagtttactcggatgctcccgataccccaggccggcgggtcagcccccatttattcttaacctctgaggctgcagctttaaatgatctgtgattccatagtattttttttgacttagacagcggggagtatcatcatgtcaactggtccttttcgcatcgttgagcatacggttcccggtcagcacattcgggaatatcccggtgctactgcgaacgaacaggaagacatcctgagcttggttgtgaaacaatacattcctttggataatcctagtccgcagcccggtgatgtcactatacttgcagcgcatgcgaatggctttcccaaggtatgacaggattctgggcattttgctcaacgaagattccgcactgacaatggcttacgcaggagctctacgagcctctttgggaagaattacatgctcggtcaaaagaaaacgggtttcgaatacggagtatctggatggccgatgttgcgcaccagggacaaagcagtgtggttaacgaagacatattaggaaatgaccgtgggtgaaagccgtagcttatacctcagcgctacattgtagctgactcagtacgtcaacagctagctggtttgaccatccccgggacctcctccaccttgtcaatgttaagcgcaaggagatgccgcgccctatcgttggagtcgggcacagtatgggcggtgcacaatctgtttgtttcatacccttacaaccggaatgcgcccacccctaactataaatcttaagagctcaactagcaatcatccatccgcgcctccttcacagccacgtcgttctagaccacatgatcca

SEQ ID NO: 15605 - DNA, 2799 bp, Emericella nidulans
cttctcacggatgacaacctcaacgcccactatacgaagacccatagcaaacggggtggtcgcaatcgatacgtcgccacgctggacgagaacagccccgactacgacccagaattccgcgggcactgacgccagacgggcgtcctatctacgggtcaaagctggatgaccccatcccgggcgcgggcgatatgagcctggacggctgggatgaatgaaacagaaacaaagagggctgatctgcatggaatctaatatgatacccgcgggctcgatgctacgccaaactttccttatatctttgactcaggcagacccggcgctctacggtgttaacttctacccgcctcggtgttctttttcccaccttttctcttcgctttcctgtagaacattactggtttggattcgtcctggatcacccaatggctatttacaaggtcgaaacaaaataatctaattgcatcaaaacgggcagctgcgcaacaacggagtgggggagtcgggattctgtactgtacaattgacagtgacttggtttaactttctgattttctagttgatctatcgatatgtcaaccccacaaagcgggataataatagctagctagacatgttctacgtgttagtctctttagaaataggtagataaaatgccaccgctgggtgatttcttggttgttcctcgtcgacttgctctggttgtgatgcgtcgcatttgccgaaccttaactgagccttggtgagcgtcgatcggacggggcagtcaccttgacaggaacccgacaggaaccccaaggttggtcagcgagcgctattcagtgactatcggaagatgtatcagcttagaagaattgcgagttggagtactgtcctgagcgctgccgaaccaagttcgactttcccctcccgtaggccaggtcagatgcctgtgcgcttctcgtgagcaaccaagtccgttatggtatggcgatgggcgggaatgcgcgagtatatcgagccgatgataacaggagatttgggaatcttcatttgtagcatttttcattcggtcatcatgcgccacccaagcgctgcagcagcagaacgaatgccgggaaacggggggcaagatgctgggcggatctgctgcgttcctggttgctggaattcaaggcttccttggactgcttggagtctagtccagaatagcactgcatagggttggctgaggtgtgggtatcgtgctattcaaggcacatcttgggcagtgcttatgcctggactggcacagggcacgaagcccaccaatcagaaatgagatatggtaggacggtatgtctgtgcttgattatcaccataatacttgcttacggtaggttacgttcttgtttccgcgcatgaagagtcatggcttatcaccagagaggcagataggtagggccttcaatgtgcttcgactccataggataagagaagtattgcgtcactgggttgtgtggtaccaattacggggcgcgaaaatgctgggcagagattcgaccgtattgtgatattatgtgacttgcttgacatgaatccggagttactatcggggaatggagagatacgacctttgaggtcgtattcgaccttttcatagtcacctttatggaacgctggtacgcaatggatgtaacctgagggctattgtctggagcatgaagggattcacttgctattgccccgtagggggcagggtaccactgcagggcagtggccgtaaacgcggcttgaatatcacgagatgcttatcatcgaaaaacgggaccattcggggtaggaagcggactggctcccccagcagatgtggctctttgtggtgagattgctgcgagacccggttgtatgcataaagcgatgtgaggtattccgagtgacgcatttcgaatgacgcattccgagtttcgatcgctataataactatgaagttacatagagagagctagcagggttccatcatatcaaatgggattcaaatgagagaaaataacaataaagacgatttctgagtgattaaacattgttacggtaagactgggagagatgactttggtgtcgctgtagggacagctctggggcttgtcctgaattttgagacttatctttcccagccgaataaaacataattgtgaagaaactcctggaaagacatctaaactcatgaaacttggtatactgctccgtttccttctggcaacagagcaggtcgaaactcacgactatctggcctcacaaccttagataggaggttggtaaacgcggtcctctgatattcattattggtatggccacttcgaggcaagctaggtgtatgaattatccatagattaccgctcagtaggcttagccctaattcttacccggctggtggatgggcaacggaatcaagcctacaccaacccaatatgtatttttgcagcatcgtgcaatatttggcatcaatacagatactaagtacagatactcttccagcatggcagcatggaaagaattagttgagttgggtttgactctgaattaggaatccggtttagagagggttagggctacgcgccagaaccagcccattcacatattgagttccaggccagaacgataatgccgcttcgagacatacatagcgaataaataccatcacggagagagttctgtctggtttggaaacatcagttgcattgtataaagccgtaggctgacttcgacctcgatgttccgaccaatcgcgagacgagagaatggttttgcttgactttggttctcttcccttcaagggcacgt

SEQ ID NO: 15606 - DNA, 2794 bp, Emericella nidulans
  unsure (1)..(2794): unsure at all n locations
aaaaataaaaggattgaggattgaagcataagtactatgcgatcgtggtcggccatatcgcagaatggcccttggtatacgttcatctcggccatatagtcgccgaaaggccttctgatcgaaaaggaacatgaagcgcgctcaatgactcgtccgagaaaactaccgggtggaaagtacagagaataagaatcgaacttacggtctcactcttggacgacttgagtaaagcaccgtttgccaaaaggttacaacatatggactgccgaagtaagagcgcggggttagaggggttggtgaggggtataaccctaccccggcgttttatttgatcagcactatggagtaggaggactttactccgtgagtatggtagtacttttgacatcaaacaattacaatttctttgcttctggttatcgcactccagtggagctaaataatggtggatagagaagtccgatattattgctaaaggagaacgctctctctattctatccaatgtttcgaaatttcgggaaggcctggcatattctggatctcccagccctgaagggtactagtgtactacttttgagtatggtactaaaaactttgctattaggtatcggctttggtcatcccttatcagcaaagaccacgcaccaatagcagtgtcaaggttgcattagttgatgcttggcagccgatccagcaaggcttatgccgcagtgaaaagcgccagttcncgttttgcgtaaaccggcacggacagaatcccgcgctaccacggtgaatgctttagcaggcacatagtggcaagttaaagagcgacgactggacaaaactgcccgctgccgactaccgagaactccccacgggctgtgctggtcactgctgatcgcggcgccggtgagagcaggacagcggttaatcccagagggtcttttggtttgatgattagattactcacgctgctgataagaacgaagactgtgacttactggaggagaaacttctttctgctggtgtagggaaagcctccgttgagagcagtcgccgtcccctgatgcctgtctaaattcactccaactttcgcttaaatacagttctcactggtatcgcaagatagatcatagtatagagtattaagataacatagatggagtggagcagagatcgataactgttcttcagtcgataatcccccgccatacagaagggcatatacagcagcggcacgtggggcccaggcacaaaggtcttggcatcgcacttgcctctgatttccgggcttccccctctgaccggagcacaatcctccatctcgccaggatactagaaaagtccaccgatcagcgatgcgacgtccaacggagttttgctatgtcgccgcccaagatggccaccgtgtaattcccattgatgggaatttggcgaactcttacctaatgtcacgagaatgtcccggattccgcaagcgggtgggcttccgcccagagataaggaccgaatctgtgaccttaaacgttcgactaacaccccgaacttcggccttgctagtattagctttgtgcttagccctccctttccgatcctatggttcctccgatcctgaccctggttgaccagtgatccggggccttcgagcctttccaccgtgccagccgactttcccgccagattttagtcgcctcccgtggccgcacccagggatcttctcgtccgactccggcagtatactcattcgccggcctccgccaggccgccgtccgcctctccccaccacccgtctcctctgtcatacttaaacccggtcgtgtgcctctcttggacggtctctttttttttcttatccatcagagccctttgcttctctgctgcttcaagtgcttcaattgtcttctcgcgggctcagcgcattcttattacctttgccacattaccttatcagcaataagcttctcgcgcaaaaatgtctaaccttcccgttgagcccgagttcgagcaggcctacaagggtacgaccaccgttaatgaatggccaatgatcacagctaatgttggcgcgcagagcttgcgtcgaccctcgagaactccaccctctttgagcagcaccctgaataccgacgggctctccaggtcgtctccgttcccgagcgcgttatccagttccgtgtcgtttgggagaacgacaagggcgaggttcagatcaaccgcggttaccgtgttcagttcaactccgctctcggtccctacaagggtggtctccgtttccacccctccgtcaacctttctatcctgaagttccttggcttcgagcagatcttcaaaaatgctctcacaggacgtgcgtaaccgttacttcattggatgtttgccaagagtactaattggtattagtaaacatgggtggtggcaagggtggttccgacttcgaccccaagggcaagtctgactctgaaattcgtcgcttctgtaccgctttcatgactgagctctgcaagcacatcggcgcggacactgacgttcccgctggtgatatcggtgttactggccgtgaggttggtttccttttcggccagtaccgcaggatccgcaaccagtgggagggtgttctcactggcaagggtggcagctggggtggtagcttgatccgccctgaagccactggatacggtgttgtctactacgttgagcacatgatcaagcacgttaccggtggaaaggagtccttcgcaggcaagcgtgtcgccatctccggctccggtaacgttgcccagtacgccgctctcaaggtcatcgagctcggtg

SEQ ID NO: 15607 - DNA, 670 bp, Emericella nidulans
tcgaagcaacacagtataagagatctgcttacatagacaacctgtgggaatgtgatagtagtgtaaaagggtatctgctgggtaagacagaatggacgtcacgacacctccggccattcaatgcacaatgcaagtcgtaaagctgagaagatttataaaccaaatagtcaatgagtcgggaggcgagaattatacgaagaaaaggtaggccagttggatggcgtggagtcaatagactattgaggaacggagcagataacgtatggcaagtcgtatagtggagttgaactggattaagcatccaccgatactaccggaccggggaaaggtaaagaagccgagtctttatggtctgcttctggggactcaggcccgacgccctttccattcatccggtcaactcgagggtttcagccagctctgcagcatagggtccagctcttcctccttaggccagtagcgagcgccacagcttgcgatgtacttgaatttcgtgctgacgccagcatagctttttgtgagccagttccttaaccgtgcccgcttatttttgctaaagcaagcggcgctaatggaagttggagcagttgtttgtcagtgacatagcttaccgagtttggtgacggagtgagcagagtcttagcagttgtgattgttagaggataagtgc

SEQ ID NO: 15608 - DNA, 753 bp, Emericella nidulans
ggctcgagaagcttgttgtcgaattcatatgaaggaattcatattccgacaaaagaagattggacaagtttaaaagagcacgtgcagaagaatggcttatacaactcatatcgtgttgccattggtccaacacaatcaatcagttacggtcaaaatgcaacttcaagcgtaatgccgatcgtaagttaaatcgaatcaagaacatatgcgaatgcgacaacatattatccaatgccgtatttatgaaaagatacgttctggtactataaatttttttacgaaatgaattaggttcaatttaattgatttaatcgcagaaattcaagaacatattggcccaggaattagtacaattttttacgcttataggggaaattttaacaccgggaattaccacggtacttacatttttgccataaaaaaggctttaagaggtctgttttataccagaacacgtttaataaagcggggaaaaatgtgtggattggtcccgttaaatgggtaattggctttcttaatggaattcccaattggattgggccggttttttagacccgccaaacctggtggggcggtacaaaccggtggtcttccttggtggggggaaataaccccttcattaaacataattggttaggggggttaattcccctttatatgaaaaaagggaataactctttaaggttggaagacgattcttctttggctaaagaataccgtctttctaatttctgggctttaagaaaaaatttt

SEQ ID NO: 15609 - DNA, 838 bp, Emericella nidulans
gtctaggctcgagacgcttgtcgacgaattcagataatcgcgatgttgatgttaggagatttagagaaagaggtggaatttttattgacagaagaagaaggattatatgtgacgattcattgattaagtactgttgtatcagccagagatcgttatgaatacggaggatacctattggggacagttatatatggatttatgcaccatattgtatgtaaagtagcggtagaacggaatcgtattttttattatgacgaagaattgttgagcggatttggggtacgatgaaaaacgttgtttaggcgtttgcggtattagctaaacaccagaaaaacctctgttggataaagtgaaaaccaataatccgtatggttttgaaattgtagattgtttgatgcggattgcattgggaaatttttcccggtgaactcgatcccttcaatgggcaattggcctatagggcctgtgccctaacctcgaacgtgggaaacattgggatgggccttacaccgtacgcaagggtgctttatacatttgggagccgggagaacgaaacccccacaattttcgaattctggccctgctccggcccccctctaatatcagacctgttgttctcccccccattacaatttacagggggcttccctgttgagcaaaaatgacgtcgcatcggatataaaaaacccaggttttccctgtcccggtcataacccgatcgcttctcttgcaccatatatttcactccctctcgcgaatctcatgtaattctcgcgctccttattctgaagataccatccttcttagtagcaacccagggttaccatatcttcaacac

SEQ ID NO: 15610 - DNA, 411 bp, Emericella nidulans
acgatgccgtgatactttgaggttgttgtggccctcatcatacgctccggggatcgactcagggtgttgtggatggccttcatgctttaaggccgtcaagcctcagggactagaaccacaatgagccgtaccctgttgatggaacaccttacaatctaatgatcatgatggccacggtctgataagtgttattggggcaaatgtgcgctctcccattctgcacgcaggcccttcctctttaccacaggtggatgcccctgatggtgacgttggtgacgttactgtcatgaaggtctcaacccgctcaacataaccgctaggggataagcattgttatattctcgcaatgatacgaggtcgtaagatttagccgagtgccatggaactgaggctaatcagttttttccaact

SEQ ID NO: 15611 - DNA, 618 bp, Emericella nidulans
  unsure (1)..(618): unsure at all n locations
agactcgccccgtaacaagtgcgcttgcagctgcccaggctgtttcattgagttggaatgaagagccaaatacgccgccaggttcctctcgcccggcgcgtcagcagcatgctatcgatcgttcgccgagccggagcccagcatcactcgatgtcaaaccgcgtcccgcccccaagaggacgtccgcgacttcagaagatcgttcggttaaagaacgctcccgaccctcgcctgcacaatcatcatcgcccattccaatgcctctgaaggagaaggagaatcgaccattggcggcgcctttgaaggaacctccaaggcctctgactcctactaccactgagaatgaaaatgtagtacggaccccaactgttagtccaccgcaagcgaaaccagccgcggactgtgatcgtgagcgccagcctgcagccttaggccaccgnggtagtccagcaagatcggctcatttcctagtcacttactgtgagggatttcggncgatcaactcatcaccccctccccgtctctttcccggctaagtcgcatgaaaaccgaacagtttctatcccgatgaaggctttgcatctacgtctgtccctcatgacgagattagaccacgtt

SEQ ID NO: 15612 - DNA, 112 bp, Emericella nidulans
ttgtcccctcgcagcaggagggttgttaggtctaccttcacgagagcatttgcttgctcgggtttaggttcagcaattggcgcctaggggtgcggtttgctctttagagcga

SEQ ID NO: 15613 - DNA, 2157 bp, Emericella nidulans
gactcagatggcaacggcttctcttcttcaccgataccctccaggtacggcaagttgcagataatagccatataccaatgggcgttctcattgattggtacgacgatatagtcatagctgaagatatcgacgttgcgagtccactttgccacgccttcgtagttgatcttaagccctttaggagacttggtgagagttgcaaagaagtatgaattgaagaagtagactcgctgtgctgcttcagggcggcatcgctgaagatgatcttctagaaagcgtatatagaagcctataatgttgtcgttgaggaattcgtggggtgcaagcctccgcaaatccagagcgttcacttcggctttttttttcccaaaacggggatacaccagaggtctacgttgttagtatgtttttgcaacggagacgcctgggaatatacctgtcccatttctgttccccccccagattaggctgtggtgtgtattcctcttcgttttcattgtcatcatcgtcactaggggccgtttactaacagagtttcaaatggagacgatgggaacttaccagaccaaagtagtaggtgtttgccgcgacatcaatctcgatctcgtagtacgtgtgggcgcttgtgagtttgattgaaacttcttcatgggaatttcaatacctatatctcgatgaaggcgagatgtaggacttggggcccgtttggaaatggtattctcgccggtggtagtcggaagcgaggggctggtgcggctcccggaagcggtgtctgaactccgtggtgcggcacgttcttcgtctgtaacttgcagcgcatccgagagcctcattctcttagttgtagaacccggaggcggcttgggagcctccttgggggattctaacacaccaatcggacgtttagtgttattcgtgtagcgctgattctcccgtgcgctcttcttgaatgcgttatccaagtaatctctttcatattgaagtaagcatctggcatgtgacaagaacaaaagtagttgaaactcaccctgtcttttcctgaacctcaatcttgagttcgcgtaaacaagagcaaagctgctccttttcttctgctgttgataattcgaagtcgtatttattatcatccatgcccatcttggacaactcaaaccgaaccttccggctcgaccctccgcccacaaaaatcttcagcactttccgcaaagcgaacgaatgagaatatccagagtcgggtatcttgacaattacccttccagaatcgccgccaccagggtccatgatgagctggtcattttcacctttaggaacttcctgtaggaaggaacctcctcggtaatagacgagcctaaatgtttgtcgctgtggtagtcccttacttgccctccctctcttatttctggtcttaccgagcctggacattacttgagaagtaaagagagttggacgaatgtcagaggacaagggttcgtcccgcgactctcttctaggcttgctcaaagatgttggcacagggccaactgtcacatcgccttgcagctcatcagggctatcccttgatgataacgcacggggcttctcatgacgtggcgggggagtcttaaaagcgccgtctgatactgaaggcttattcactatttcaacacttaaattcgaggcgtgcgccggcgctttccatgggacgttatcagggtccccttgcagcaaggcagattcttttcgccgcaccttggcagcgtcacgagtaaagataatgtcgggatcctctgacgaaaaagggtcggcagaactggctttcttcttagggctcggcctggggaccctcgcccccttgtcaatcgtccgatattctgatgttaagccactgttgtattcacgaggctgtcttgtattgcttgagaaactcggcgtgggtgatttagcgtgtgagcgagtagtaacaggagaaccccttgtagatgaatgagctggtgtctcgtcatcagatatgttgattgctgcctgtgcctctgccggaccttcaactcgacgacgctttgacgacctctcaggggcgtctgcaggatggtccgagcgcgagtgactggtgtagaatcttttttcctttctatttgcgcttaccgttccgctacctttcgcccctcgtgatattgtgtt

SEQ ID NO: 15614 - DNA, 5979 bp, Emericella nidulans
tgtgcaaccccgttgggtaatttcggttgttaagaatgtattccctagcaatttattagcgcaagactgtgcgttaaatggaggatataggtgcataccgggttgctgcacttgtgccactcaagtcttgccgcaaagggcaattgcagatgtaagaaagaagatcatgttaagagtgtcgagagtgaccaggatgatgggatggatggccccgtctatgttccacgacgctgggcagaggtagaagagcgtgaacatggagaaggccgcgacgaacatagtgtagttgatcgtcgcggggttccccgcgaacgactgggcgatcatgttaccgatgagagccatgacgagcagtgtccagatgaactgagttgtcagtatgtatactaactaggcacggtttttcgaaaacgcgtcttacctgccagacccgaaggccgagctggattcctctgaagcccattttgacacgagtgtcttttgttcaattaggatagatggataagagatatagtgatgaggaggtggtcaagacgatgagagaggaggcagggtgtaatgatttaagggcggaagagtcgggatgggagcaagggtgctacgtcatggagcgtgtgctggtccagaatcgtgaaatcaccagtcgaacgaatgaacatcgatcagcctgctcagatcgttggccgatcatgatcttgacttctccattgctgtgctcttctaactgcgatatctcccttccacccataggactagacggtggattcagctcccttgtatactagactacatataatatgctcttttacattctcgcgacgcatctctccgatggctgcagggtggaatgtatatccgcgatgaacgcagcattccgtcagacgatccggcctgttctgggctcggttgctgggtccctccagtgggacgatcctcgatccgagcgagcttgagattaagcttatggtggctgaactagtctacttacccgtgaagagatcctggtcccatgcttggggcagatatatcaggtccttaggacattactggagacctactggtatatttgatggcccatcacgttggaagtcgaggattttgcggtctttgagttgtgttcctgcatacttgagttgattcagatcgatggatcgaccccaaaccctgtctatggagcaccccgccagaaatcgtgagtctcacccaggccaacattgattgcgaatggattgaccccgtattcctcagtgtgacgttgggaactgtcctctccctgatatgcaacatcgtgaccgttccatgattgcccaacgacgcaacttccatttctcttaccatcctcaaactcgacaaaagtctccgtaatccgatcgtcaaggttctgaacggccatacggcatgatgcatgggcttgtctgcgggccctcccagctcggacttgtccaacgcccagctccaccttcctcagtcgcccactcatgcagtgacgctgctggagacggccggtgtttccgtcaatcgctttgtagagcgcttggttaaaaccggcgcttaaagatgatgccgtcactcttgctttcagtgcaatatcgtccgcatatcgcgacggagaagccggcacaattgccgactgccgcttcctactcgtttctcacctcgagctcgatggccacagtctcgggctatcaaggcgtgaggagtaagggcaactcgtctcagcatcattcagttaactgcggcctgctgagttgcttgcattcgaggatcggaatccaccatttggctttgagctagccgacccatctagggcaacgacaatgcttatcccaactcctgcgcaggctccgcgatttgccgtccacgcttctagatcgcgaagtgttcagcatggagatccggcccaacccatagctgcttcactgactacctgatagcttatatatccagcaagggcaggactgctgttagggagccccagttcgccggttgcaagattgcagtcctgtctccaacctgatctcttagcccagagtgttaacgcgttctactgggaagtcggcaacgaatgaacaccgttgaccagctcagctctcatattcgaagcgaatcagttgacagtctagatagtcggtgtattctcctcccgaagcttctgcagactcgcactccctatgttgtaaagtcctattctgaagagttcctttgaaaaagtgtagatacacagtgagctgtctgggctctgcatcctgactagctcgagtagtggggctgactgcccgggagatcccgcgtcttattcttgtcgatatattcgaataccgttcataacaaatgcgagagtaccgcgaccgtgtcagcagcttgcttctcgttctaatcgccggcagtgactgagacgggctttccgacctggccgatgcggatatagtggagtatgtcgggctagtttagcgggttgggagacagaaacagtaggtcagtgtcccggtggacaacgctatttaatactcatctcaagaagaggcgagataagatgagtagagcaataagtgcgtacagccttataaacatccagaaaaactcgggtaccaacaaggtatactagggcgagcactttatacgcttctcgaattccaggttgaaggctcaatttctccaagttgttcaacaccatttctagggatgtggctgcaggatggcctgcgcaaaggcgaacagttcgcaaccttctgattctcagtcgttctgcttctaacgataacggataacttaaataaacccgagcctgggcagagtttgcattatatcatcctgtcctaggatgttcatcaggttcagcggcctgttgtcccaaggctttttggggatgaaccttgtgaaatataagcattgtcccgtatggtaagcgcggacctttaatcattgaatggtgaactcagctccagagccaatgaagagttcttcagatctgacatgttttgccgaacttcgaaaggcagttgctcgtctgttttcgcactggttgattgtatattgtggggagctccggataggtcccagagttgagatgttagcttgattatatttgcgtcggcgccagtaaaagtaacgaatatcaaaaccattcaatgtacaattgtacgacaagtagcatatgcaatctgaacattgagtgttgctcctgtctttaagaagggtagaggtgttcctctcagggtggttggtagtaactagtagcggggctgaataaaaccacggaggtgagtcgcccctaaaacatttgccctccactccaccacatccaccaccttttttcgaagcccctccacgacttttcccacaatctgcaaaatggcaattcagtaagacttgaatgctacaagcccgtcgacatgtgctgatctcacccagctacctgatcctgctctcccgccagggcaaagtggttcgtcgtcacccacccgactttgcgatctgtccgaatgtctgaagctcgttcgacattgctaattcgaattttcccctatccagcgcctcgcaaagtggttcaccagcctttcgcccaaggagaaggccaagattatcaaggatgtgactcaactcgtgctgtcccgccggacgcggatgtgcaatttccttgagtacaaaggtaggctaaggtcatcatcggagccggggcctacaactccccgcgccggccacgatgactcaagagtcaactctaactacttgcctcctgcagacaccaaagtcgtctaccgccgatatgcctctctcttcttcatcgccggatgcgcctcgactgataacgagctgatcacccttgaaatcgtgcaccgatacgtcgagcagatggacaagtattacggcaacgtatgcgagctggacatcatttttaatttccagaaggcgtacttcatcctggatgaactgttgctggcgggcgagatgcaggagagcagcaagaagaacgtgctgaggtgtattagccagcaggacagtttggaggatatggaggtgagtccataatgcagttgttatttcacccgtgcacttcccagcgagggttatcgtggtggcgatatgtatgtcgttgcgtgtcggcctcttcatcgtcttcagtcgtcaccatcttctctacatttctcggatagtccactcgtacccccagaccccatggcagcattgtctgtatcggcttctcgatttcagaccttccccattttaatcacacaacgcacgattgattatcctgctatgaaaccacgtgttgctgcgcatggccgtaacgtctcttcacctcaggttgaggaagatgtggttacgaagatcatgtaggagcgtcatcagtgatacgcttctgtttctataattggtttgcttcgtgggcttgcaaggactttttattggcgttcggacgtatataggcgttgatcttcactactaccacccagtgactaataatactacattgactccaatcaggaatccaagcaagtgatggacaacctctcgcagcatggcctcctgtgacaccgaaattcggctatcgccttctgcagttctctggttaccgttcggacccgtgaagtgggtgagtgatatcactggttgatcgctccttccacgtgactagccccctcgatcgcaacgcgcaacggctcaacctcaccagcgatcgcattagcatcatcataccattacccccctcttcactcctctttcacctcctccatcctcccagtgccctaattgcgacagctgcggttattgcttaacaactgtcccatttccttcttaactatcgactatcacactagccgttgtcctttgccggttctatctgcgaccgtggctcagctaagacaacagggatcacttaccctcagttgtgaaacaccttgttacttcattatttggagatttctcttgaagagttgtgcaagcctttagtcttgcgatacatatattattttcgtcttatcctgcctatgttgtattgagcggtgaacctccatcaagcccaagatgaaggtgagatacatgcaggccccaaaccgtggcctgaactgacacgactttcaatagtttctccctctacccgaatttgaagacgtgacgagctccctgaatttcgacacggccgactgccacattgttgggggttgcgaactgtatataaccaaagccccccggtccgatcgcaagctttacaagaacattgaacaatcactggaagcacagtatgagtctgtccttcgtttatctgcgtcactgtcacccccaactgcatcggatgcagccgcgtctctgaacctgtcccgatcaagcccattcggacccctgagtgaccattcaagtcgacggacgtttgcgtacctcatcgcgactctgaacgccagccacccagattacgatttttcacatgttttgcgaccttcggacttccaccgtgagaagaatttgaagagggtaatgaacacaatcgactctacgctgtttaatcttcgcccacgcgaaacacttgatcttacgcccccatccccgtccgcagtatctggatcatacaactctgaagcttctgccagatggggtcggagaatgtggaagatcttggatgaacagttatctcttaaggagtgcaacatctactcatattcgccggacgaggatccgtcggatgcggacgacggggccatctggagccttcactatttcttcttcaaccgtattcgcaagcgtgtttgttacctttacgtcaaggcaatccccatcttgagtcacacacccagcgagggtcttgctactcccgtgtcaaaaaggacattcgatgatggtatcctcacgcccaatcttagcacgagcaagcgtgctaaatactggttcggtgaaaatgtcgaaattgagagcgatagtgatggagagaacaagtatctgaggagcggcgaggaaaaccgatcacgatccgtcagcaagggt

SEQ ID NO: 15615 - DNA, 496 bp, Emericella nidulans
atgacagtccccgcagtccacaacataatcggcgcctaaagcgctcagactacggcttgctcattgcggcatatggaagttgtgctcggggatctaacagcggggcaagtatacatactaggtatttgccagctgtgcctgaaaggaataagatgacagtgatccaggaagcactccctgactggggcggacggtgcaccagtctagcgagaggggtaatatttggaaatagcatcttgagggaatgctagccatgttggataattgcattaagtaaaaaatcaacctgctgcaaactgcatgactgactcgtacccaaagtgcactaggatacaagggtacgagaattatcggtctatgggaaaggcagactacgaggggttaccaatgtgggactggaattcaacttggattgactgcgcaaaccaccgtaacgatggtgccaaggcaatgatgacttccacccaagcgagccctggttgaacgaagatctata

SEQ ID NO: 15616 - DNA, 555 bp, Emericella nidulans
atatacccgatccgtagtgttgtttgcatggctgttagtcttatcgacggctacgctactgcctggaccatacaaaacgggttgacggtataacgggaatgcatatttactctgtggggctgcttcaagaacgaggcgagtccttactgcactggatctggctaaatcctatgtgggggtatgtacactgtcgtggcctgcccctgtgggaccgtttgcacgtatgcttccctggcctgctcattgatggttggaggcatacagctaacacatgggattgagggagcacttgcaacctgtggattggacccagaggcttcccatgggggggctgtccccgctctgcgcgcatttcatgacctgtgctagatgaccggcgctgtctcagtggcgacgcgtaccatggaccagatcggggtgcactctagacagggcctcctgggacatgcatctcgtcgagtacccgggtcgatatggacggcttctctaataatctattgtagcgctgtatatcctaaacaaatgcctggtattcgcttacggacacttatggtg

SEQ ID NO: 15617 - DNA, 485 bp, Emericella nidulans
  unsure (1)..(485): unsure at all n locations
gagaccccacagataacacgcatgatatgaccgtaactaaaagaagctattctttcttctattcctatacacgagtgaacgcaggctcttattccttcggactcggctggctcactgtgggcggatcacaaccagaggataccgctgagcgttgactcccatacccattttgagcgcccttgtcctccgagcctgagcacattgtacgacacctagaccacgcgtgccgtaaggacatactacaggtggctggggggtccacggatatacgaagggctctattggcggatactcgctactaacacccaaggctcggaaccaggaagagaagccggcatcagccatactgcatgcagaaaggccaaattagagaatcgtcgcgtggagaccttgtcccgactagcctgtagggcgcgccggtgtgcatacggtccacattagatgctgccttctagcctatngactgccgctatagctacaggact

SEQ ID NO: 15618 - DNA, 800 bp, Emericella nidulans
tacttattaaaaacctttttttatttcaccaataaaatcgcttttcttgggggtattaatgacctgacttgccgcttctgtgacaattgttgcaaatacaccgtacgataacgctacaattgagtacgccatttgcagcgtatcctaaaattgatatagatgctcattattcgtttctttctgggttataaactgatttgttacaatattatcaatggttaatccaacttgtggctaccgtttaattatttgatatgcctgaaggacatttttgaccgcttaataatccccttggagctttattttcctttcatcaacaacatgaaggtaacttaaattctcttttcaacaccatttatacctgttagttatgatgcaactagacaattttttcccgtataactggcaaatgtcatgatttttcccaatcacttttttaatggggtacaatcttttctcttcacccgaaaatatttttttgaaatcatcaattccttatcacttctttaactcccaaaaacatatttgctaccctttcatgtatttacctctttatttttagggcagccaacgttaatagtggaataaattggccttaaatataacgtttacctttaacgagcctttaaaatctatcaaaaaccacatttttttctctaaaaagcataacctaatctcaatggttatttaatgtgcatatttcaaatgtttcttcacatcttacatcaaccggagcgttaatctctgtacttttctccatgattctcataaaatccctcttaaaataccttttctcaatt

SEQ ID NO: 15619 - DNA, 2745 bp, Emericella nidulans
  unsure (1)..(2745): unsure at all n locations
catcaccgtttgcctatgtgactcgatcagcaagcgcgaacccaacgctagcccgaaaggaaggcaagagcatacgcagaacacatttcggtccaaaagagcccatcatatttgccacgataggcgtctgagggaaatcgatccttcgctggagcacgctctgcgcaacagccggctctgcgatgctacattttgccttcgtcagagctctaggcattctcttcccgatcttttcctgtctttcctttttcttctttcttctttctttccatacttcttttttgcaatcgtaaattaactgaacaattcacatactagattgagcactcatcaggcgttactagcacaaacacgttaccccagccactcatgaaatgcgcgttttgttgcgaaaatccaacccgtgcgcgcatatgtccagccgctcgaagatccagttcggcaggtatttcttgtagaccggctgcagggccggaccgagaatcatccagggattctcttggggagggttggatagacgaagatggggaacctggtccggcgcccgtgcgtgtaaacgcgcaggaaggagagcagtcgatggtgagggcgaggccagagtggcgatcgctgagaagatgttagatgtcatcatttcttgtgagaatcgatactcccgagggtcgtaggtgagtcgttagagttcttggtgtctctttgcaggcttacttgtgagcgtctgttgatggagaggatgtgatcgttgatggccagaattctgaacacttctctcgttaaacgtcctaatatcccgccgactgcacttcgtatgttttgtgttcagcacttcagctgtcagtcgttgatcagattcagtcttttgattggtcctgaagtgaacgagcttaattatgggtctctactccccatcttctggcgagggttcctttggttggctttctcgtgataacggatggtcagctatctcaagctatcccagatcagttgcggcggaggattagggcaagctgaatttgattaccattgagcgcttggtctctgccgcagatcttgagatttggaatcagagggacaatgaaaccgtcaggttgcttgagaagtcacgatattcattctctttttcaaccttcaaaaaaaggggaggaaacaaacctctctgggcctgctccttaaaagtaatgtccttccaacagtaaccctcagctgtgagttctgtgttcgccagatcctctttgcactggactaacaaggcgcaaggagggtttgtctagtggctcgatatcagaacaaggaagtatattcttgaagaaccttgggaaacagttaacaatgacacagcggtcctaacgcttaatatactggtaccagctagtgtcaactcttgcagctgtcaataacgctcgcaagaccctagaatcatcgtttcatgcagcggaatatagccgtcgaccaaaagggaaaagggtatagacggatctggccccgtcggtctttaaaacgcccccgagccatagcagattctacaaatggttgtaagaaacatgacagtctcgagtagaagcatttaagcatttcgtaaacgcacttctattctttctctacacctattattcttggtataactttagagcaataactatgtagtagtcaatgccacccgccctggcatttgatatggtttgccatatacgattaatgaatagttctctttatccgcgacacactgcttagagtccttgccttctttgtctagtcattgcggcgttgttaacaacatatccctttgggcatatagatcatcccttacagcactactttcagtgtccctcctatttgttattcacaataactggatttggaaaagcacataggctgtcattatcagtatactgattggaacatagaaaactgtcgtatactcagtaatacaaatattcaatatcacgattgctacgaggcaaacgggcatacataattgccactccctcaatcccacttgacagtcttataggctctgaccggtgtggctgcaatcttcgtatgaacagtaacagtctcaccacgctggtcagccagatcctggcgacggacctgcttcgtctcaacatcaaagcacccctccttgacgttggctccgcacagcggctagaggatccgtgtgcatatatcacacatgaaaccctcactgtgcgaaacaaagtccgggccgacggcattgggatcatggcacagctctgtagccgtgtgctggggtgcgagctctcaatcaagtcatccgtatgggtacagctgcccgcagccacggcgtcagcaagcgaacgccttttcgtcccatatgtcggcgtcgataaccggccgggcggccatttctgcagtttcctgatctgctcggccatggggaatgggtcaatgtcgttcgcgctcggctcgcacatcaccttcccttgggtatgtagcctctcgaagtcggtgtccccgcggccatactcgttcttcagcggcgggtcgaatatgggcaggcacgtcgtctctacagttggtcgtacatgtgcagtcgcgacttgctcacacacagggtttccgggtgctcgacgtactgcgcctgacgggcttcgttgccgtcaaagtcgataatgcgcagccnaattcccatggganaagttgttggtcggacgccccgtgttctcgcgaggccctcggatcccaaaccagctgggcttgtacgtctcgtcgttgactttgatc

SEQ ID NO: 15620 - DNA, 562 bp, Emericella nidulans
cgcacgactttccttggtttgatcgccgcctgtacgggcttaaaccatgctggagtaacctgcgccatcattttcttttttacctcgcaatcgctttgcctgggcacgggcatcacaaacccccggcggcgttcactttgatcatataccattttactgccgaccccatagaatgggcggggagccagcctgtacacgcagtatatgcccaatttttcggccttgaccttgttgatgttctgcggcatgtaaacctgatcaaaggaattcgctgcttggacacaccgtattctttcatatggacgctgaatcccctttgcgaaagattcacaaccccaaccttttccgcccggctactggccgaagcacgggttcataccctttgaacctgggttatcaacaagctccttggatgtagggacccttactgcgcaaaactttacggcccaaagggggataaattgcggtttccggggaaccccacccaacaggcgggggcttctacgaaacttggtttctttcccgttctttaagaaccctgcagctgcttgggcaaagtttt

SEQ ID NO: 15621 - DNA, 501 bp, Emericella nidulans
ggtagttgagtgatgagtgcaaagcgaaaaccggactccatctatagaatctggtattattaaccacgatttatctttgactgaaaccctcaaagatcattatatggagaggaatccaacatggaacttcatcgaacgcccgctaccaggatacaaatctaatatagttaatcacttatattctttacgaacataatcagtggcactgcttgataattgctgaccctcggatgatgaacttgtcgtccaggcgaccactactcgaagagacaacctgactctgactataccaataagggccgtgttgggtacagataccacatgggtatctgtattagcatccgtacttatagtcgagcatacacagccggtcatcgtagagatcaggatgttgcatgggtcattaagatgtcataatccaggttagagcgttatacagccactgacattggatagatgtaaacccaatgaagaaggtgacatcactcagagtaccagact

SEQ ID NO: 15622 - DNA, 597 bp, Emericella nidulans
aggatcgattctggcagattcgggtctctaaatggcttattatttggcctgcaatgtttgtttctcagggttgttctatgattattttgaagacagagtcaaccttgaacttaaggcattgatggaggcgttcagattcgggttgttcatgatacctcatgttgttctatatacacttatctcctatgttatgaatactttcatgctccaaccctgtattttagcaataatagagaacatcactttctcctcttccctaaacgccgattctaaaacccttataaatagcaaatgacaaccgtacatttcactggtttccttaccaaccacgcctcttaccccgatgctctgcactcttctctttcctcttttcacgctggcgatcattccttctcttcttatcacgcccatacttttcagggtctgcaacagcctcaatgcgcctgttgacgcgccgaccctcacgccttttcctgattttctcttgaatagctgacatctggttgatatactcagaggtaccgagctttttttgcagaaagtccaaaacttcatggcagttcgaaacatgagctttatatgactcccggaaagact

SEQ ID NO: 15623 - DNA, 3313 bp, Emericella nidulans
ataaccctatctaaagggatccccatatccccaatgcgcggacagacagcttttctgagcgcgacgatgcctattatgctgagagacggcggcttgtcggcggcctgtatgcgcaagacaatgtgctgaggtacgagccatgtgtagatcgcctgatccatctgttccagcagcgcatgcaggagcatagtgagtcagggaaagtctttgacatgagcgtctggctggagcgatacacatttgatgtggttggggagattttccacggccggagggagggtttcggcatgctccgggacggagccgactacaatgggtggtgttatctgatgggagttatgccagacattggcgctgcaactacatatctcccttgggggtttcgaagtctctacctgctctctcaacttgtatttcaaagctcccgtgatggagtgagggggatgctcgacgtcaccaaacaggccgaaagggcaacccttgaacgatgggaggagatgaagaaagggaaggttctttccgaaagtgatatcttgactggccttctggatatggtccaagaaaggggaaagaatgacagtgtcatggcctcatggacggtggctgacgttgtgaccgaggtttgggctgtgatctgggctgggagcgacaccactgccaccgcgctgaccagcatattttaccacctgcaccggaatccgtgcaagctggcagggctgagagaggaaattgatgccgcattcgaagacggccgactacggttcccgatccgcttcaacgatgcaagaaaactcccatatcttcatgcagtcatcctggaaagcatgagggtgcatccttctctgggaatcggactcccacttgaatcaccagcggatggtgcgaatattggaggaacctacattcctggtggtgttgaggtcatcgtcaatcccgcggctgttcatttcgatgaacgctcttttggagccgatgcgaaagagtggattccagaacggtggctggtagacgcggaggccacgaggcggatggagcggtcgatgctgcaatttgggtacggaccgcgcatgtgcattggcaggcatattagcaatatcgagatgtataaactgcttcccgccctcattcgtaattttgaatttgagatgttggttgacagttgggaggtgaaaggatcatggttccaccgcgctcacaatgtaaaatgcaaagtgaaaagaagaggttgattagtctggatagacggcgcgggcagttctatgataccttcgagattttactacgaatgcatatgcatacaagatagtcatgttgaaacgggagaagagttatgtatagaaaaaagatatttttcgttcggccatcagaagcctaaataatccctcctgcgcacatttttatgaatgtcatgaccagtttataggattataggtggaaaagtaattataatcaattatcaagtatatcctctctaactaaacttgctataccctaggtcagcgcagatcctccacccctggataaacaagtaacttgacctaaataatctgaataccccatatgtagagtttttctgagaatggaggaaatctacgttcctgaatatattaccatcttagataaatgtcagacgccagttacttgagaataaatggggcaccacccctccccatcgaatgcgcggaactccaacgtgcgtcatcagaatctagcaagtgtgcgtaacggagagcagactgtctgaaaagctaccttcaggtcagtattctgggatatatctaggtgtccggttatttgcctgcctcgataccgaggttgccttctttattctggaatgagctgaaaaacatcactagggctttttgcgagcctccaaagacctgatgggtgagaaatctaacatatcgcatctctcttcaaacatacaatctccacttcagtaacttcagtaaacgccgggttctggtttatagcccaagccaaaaactatctctaagttgctgcagcccagctcaagaaatacaccaagcacgagggcgcagatattgcatgagatgaaggtcaggcttaaggaggctagccgtaggaatatgcacaataccggtgctgatcagcttaaggtggagcagcaaaggcgtcaaaactttagtacagtttcgccaccgtcctcatggccatcattggcatgcagctgaggtccaattatcaagcaatagcgtgttaaccggcttatcaggacatcacgcatgatcacaaactagggcaccaatcttcaggtattcgtccaaaaaaggcacgttgttaccttgcggcttagtagtctagaattcagatgcagcctgtagataggacgtatagacgtgacaatatagagcactgtttcgggtcaagttcaccttaacagtaatagataggaaagttgtctctcttcattatatcgtggtttaagctgtctcttaacgtctttctctcggcgttctggcattggaactattatggaacctcttgtttcatccttgcgtatttaatgcacttgagctgttttgtcaaagggtgctattgtcacttgtaagcttcacagcaagattaaattctgactagcgaacaggatggtcttgcttactattgtgaaaaaggttctcattgccgatatcagctagccacactgatgtatatctgcatcattgaaaatcacgcgccactttcctgcgcgcccaaagctgagggagccttaatctgatcattaatctctactgttgatactctatatcttcgtttcgagtgcttgatggatcggaggatgacatcaaattttttttactcgattcgccaatcgatcttcaggatctttgagcatgaagtttagttgagatagcaatcatcctctatcacatctaacgaaactgcgcccggtatgtccgaggcacgttagaaaatcgtaaaccacgccgagctgagaccctctcatcaaggccacgctggttagtcttcttgatctggtgcccggacccttgatgttcacccatcacgctgccgcgacttgaggggtcagtacacgtggtcttccaaacatatctcaacctaaggggagggaatcagtaccggctccctctcaactactctttcgctctagtttttgaagccttcagcggcaataatctctctctctcttcgcccccacatagtatgtggcgtgcattcctttatatgtgcagttggagtcagcctggcttgttatagagctgatcaaaagggagcctggttacttaaacatgttttttcgccagtccgattaactggattttaaggggtc

SEQ ID NO: 15624 - DNA, 129 bp, Emericella nidulans
gaggtggaaaaaaaacggcctgggatgtgcgacagcagcgattctgaaccgacgtgtatttgacggcctctaggacgcccaatcttatcggtgtagaactacggacacgctgagtgctacagcctcttg

SEQ ID NO: 15625 - DNA, 125 bp, Emericella nidulans
aggtaagcctggctggtgctgactgggcctgcgctggctctgtatctggcaccttttgctcattgatgggtgtgaaccctgtgggctcgagtggctgtgctggtgaacggaatactggccgagca

SEQ ID NO: 15626 - DNA, 456 bp, Emericella nidulans
aaccccatcgctgtcgttctgtgtgtgctcacgaggcgtcattctcttttacaaacgtgcctgaagtgcggggcacaggacacgcccaggcgaggtcgtcggaccgttaggctaatatcccaatctagtgtaagagccgcaacttgtgcaccaatctttaggcccacagggtgtaattggagcatccccacaaaggttcgttaggccctgtctagaagctttaattagaagcagtaatgtatcgtaatgtatctaaacgttcagtaacgaaccgcgaacgagtatgaagggacgagttctaatcgtcctatatcccacccgagcgttcaaaagtaaccctcccctaggtgcttctactcatgcaacgtgcctttgctccttcgaatagaaaagagtactgaggactctgaccaggcccaatattcatgacctcccgggggatgactccagaatgtt

SEQ ID NO: 15627 - DNA, 129 bp, Emericella nidulans
actggattaattcggtccgagctaactccgggcgacgcaactgacaacccaaagattttttcatcttcatcgaccccggcaaggaaaaaccagggaggacgctgggacaaagaacgcccaggacacgga

SEQ ID NO: 15628 - DNA, 643 bp, Emericella nidulans
ggaacgactacaataatgtccgctgctcagagtggttcagaaaacacggagttgtcgaagcagccatctccccaaatgtgagtttttatttctgttcccactgtctgattggcaaggaaaactcgagagactggatgcgggaaagccaaaccctcgaggcggacgtcgtggtgcggtctgcgtgtgtgcctgagtgcgaaatttgcgggtttggctctgcttgttccgagcgtgccgtcgcattgatctcgaggcagccgcaggttcaggcttgatttcctgctctgtcccactttcttgcaagaaaaacctgtctttctgcctcctttgcatatcaattgcatccccgtctctgcgacgtactttttctttcttgcattcggcatgccagcatcacgctgcattccgacactctttcacgatgaattcagcaacccatccaagatcttgggcggctaacatctccagtagcgatgggtgtcaggacgacgataaccacgatcaaattgtttcgagtaccccgagtccgtcagggattgccaccccgcagcccaacccggctgacaggcgtctaccttccataatgcacaattacttttcaggtggtagttcttctgctgtcatgcttcgctctctaaaaccc

SEQ ID NO: 15629 - DNA, 496 bp, Emericella nidulans
gcctgatcctcacggtgtcctactggctcacgagcaacataatatcaaactgatgcaagcggtgactccgggggggcttgtccgaggtgcacgcggagaccagcctgggaagtcggcccgtgtcgactaagatgacgattggatccatatacttggcgtggtggaccatgacgatactgctatagcaccagagaccgcacgcaagcgactctggcgacatctggaaggaggccagccagaactcgttagctctaggctgacgcttgacgagtaggtacagggaccagcctcaacctaccggaaactggtgacacgaccttacggcgacagatcgaacatctacggacgacaactgagcccttcaagacgggaactacttgtgcgagaataatgccacccacttagacgtggatacatgctatacccctgctcaaccactgcaatcaagggaccgtaaaagtgcccgcatcatgatgagagctaagcatataccact

SEQ ID NO: 15630 - DNA, 454 bp, Emericella nidulans
  unsure (1)..(454): unsure at all n locations
gttatgtcacaatcggaactgcgttactaactgccatctgcgcatagggtgcacgagctcggttcatgagacattaaccttgctccatgctggagcctaaccgataaacgccgacattgaatgttcatcatgctcacgtgcggcttattcaatcatgagctgtactttcccttaatgggcctggtcaccccgaatcgctggttaaagtgcactatgctttattatcagttctgtagcaatagcggggttacagtgcaactggagtctcaactagcggtccacatcacttgacgggagtntataccctcgaatgatatgtcactactatagctgaagcacattttagaggctcctgctgcttgggccacggagattacgcccgacatccgacgcgcggtgcaaggaatcatatctcgcgtcgttcgatatactacgtatctcttcagagatgcac

SEQ ID NO: 15631 - DNA, 590 bp, Emericella nidulans
atccggcccaactgatcctatctggctggcccttatatgcactgactcttatactggagcaaacgagaggagatggcgcgtgctaaccgcagacacgaaggcatagagtggctgaagcctcgaatgcgaacctggcgcctaccttgtgagcagactggttgagggtctgggtatcgcaagatgcacctacgtctggggtgacccaatggcagagaaaaccgatcgcacccatggcggaactaccccggtaggccatcttgacgtctatagacatgggtgtatcagagcttggtgattaccacctatctgggctatgactattgaccttggcaaacgaagaaggaaccagtgtgaacttgatagcaggctcaacggcggcggaaatgccagttttggagtactctgtggacgatgaccgagggacagggagatcgcctgcgatgaggtaagatcttggagatcagaccatcaggtagaaacctacctggattgggactgaattctcacgaacctctggatcgacatcaatgcattcgttaggaacgcagaccaccagccttaagaggcccgctccgtaaccctagggaccc

SEQ ID NO: 15632 - DNA, 549 bp, Emericella nidulans
  unsure (1)..(549): unsure at all n locations
atccggacgagatacacgcagaccctgccatctttgtaccagcagttagaaccaatgactagtgaggcgacctgagccgagcgccactccatataggcgccactctacaggcggacctgacgctccagaccgcgcgcgcggggaatggtacactgcaacgcctctttgcatgcatcgaggctcggtggatagtgaccgacagatgccatagtgaatctaggcacgtagcatgccagaccccgtgctgatccgtggagaaagatcccacaatgctataaggccaactaaccgcctgaacattgagggatggaccgtagagcaaagctaattaatggagcgtatgcacacgtcagcgaatgcatcgagcacctggacccacaaactacactcctgacgctactcaaggaatgtggaatgatacttggcgcgtcatagtgcatggccgaaagagtcacacatgactangacatataagagggcgacctcagagcataactatcgggacattaatcggcagtctcacgcctgaacagtgagctcctcatgtga

SEQ ID NO: 15633 - DNA, 566 bp, Emericella nidulans
ccccccccggccgcccagccttcttcggcggcaaaccgaacaccccagggaggactcggacgcgacgacgccgtccaaccccccaccccagccgacaccatgcccacacacagcgtccacgccacaacagaacaggacgcacaccggtgcgggccgggccccagccctcaagacggcacacaccgcacacagagcagcgatgcacacccacgggacgcccagccaaggcggatacgacgcggcgggaccgaaccaagacaacaccaagacggcacccaaagaacccgccggcgcgccggacccagcgcacgagcgccaacgagaccaggcgacacacccaggagcaaaccgagcggaacgaacgggacggggcctggccgcacagggctccccgcagactgcggaggagaaggcagccgcgacactaacgatctgcatgcgccaacccccgtgcacacgggcacggcacctccaaaagacagaacccgcaaaccaccggccacacaacagaggaacgggctgagcccgatccgagacgagcagacgaccccccggggcgaggcacc

SEQ ID NO: 15634 - DNA, 378 bp, Emericella nidulans
aaacgccggggggggggaaggaaaccggacaacccagatcgacagcgcctccctccaaccacggcaaaaaccacacaggggggggaaaatgaaaagaaggggcggtcacaaccccggagagggtgccaggccggaccgtaacacaagcaccatgacacaacagaccacgacccgagacaccgaagagggaggcaaggccccaacgccgagaccggcaggacagcgacaggagccgcagggcaccggagagaccaaaacaggacgatgaccaccaaacgggataggcgccgacaacaagcaggcgggcccaggggcaccaccagcccagcggctcagccacaggggacagcacacgacgcacccgggagcacagcagcc

SEQ ID NO: 15635 - DNA, 581 bp, Emericella nidulans
atcgtatccggaggctgccgccttgaggatcctagaaagcccgcactggcacggcggacctagtcagggcagcggattttgtggtggacaataatgcatgggctggcgttggcaaatccgagcagactgacacataagaataccattagtgtatccactacagcacttatagtgctttggagacgtatgacggaataacatgctgggatcggactgccttttgcgggcttgacggaacttcattaacgggaagagatattcctgcgagtgagctggtctattttgacggactatcgaatttatagcaactacacagtacaggcttcttgatatatggttagcttgagccactacaagcctggactggctgggataaggggctctcttgcctttcgatgggcagaactcgaggtcatcctagttgcgagaaagaagtttggtacaaacatcttcgcggggttgtacgctaaataattgtcccaacccttttggtgaccccttggattttagttgggttaaccttaagccctagattcccaaaggaggagtttaatgcttggtttgcgcctggtaaaatgaga

SEQ ID NO: 15636 - DNA, 537 bp, Emericella nidulans
caaggtctgttaggattgaggtgcggaatgtttgctggtcataacctgacacaaggaataacagggattactgttttctcttacagaaggaggcacagggcgtgatggcttacggagcctgctacatgcacatatggaaacacacctagcggatgctatgtggtgatactgctattgcaagctacgagctatattgcactgaccttgatacacaccttggcgactaggggacctagtgtcccattccgcggaccacacggctaactttaggacataccagacatgaaaacccaactctcctacgggcccaccgggtccaccagctaaggttgcaccatgccggtggggatgctgatggacctctctaggggtcactactcctaaaccatgacaggtaggttgagagggagaactactaactgggtccgcattgcatcctgtgacccaacatcggttgctgctaaaatgggaggtactatttatgaaccactggcggctcgctctagaatcttccgccgctggaagctttaaaggcat

SEQ ID NO: 15637 - DNA, 755 bp, Emericella nidulans
ggcatcattgacttacctagcgatgtgcggataaatggctaggttgaggcgatcactagatgggcaccgacacgtataccacggcagcatcacttgtcttcaacactattgtcttaccatgatccatgacgcgcggtgtcaccatatccatcttattccttgttcactatcctcaggtgatcataacgacttgttcacagcatatctccacacgaactgtgagctatgtgcgtactactatgtttcttagtcgaccgagtacaagaaccgagcttgcatcacatttcaccgatggacaagcgcggaggctacgaccataattgacaactcatggtcctggaatatgctggggagctcctttcgggcgagttggacaaagaccttactgacgatcatgcaaaataacgacggacgggtgatttgatccggcactgttgatgattgcctgccaaataacccaccgtatgcgccgcgcctcgaatcagcaatgatgatggggactataccacccatggacatgatgcacctgtggaccactgaatctgctagattgtggcacaatgatgcacattgcatttctgagcatcgaacatgacactctgatggccgcttgtctatacaaacccgaggcggccaatgaccacgacacttatgagtctgtgcataggcatatgttatcttgcactacgctatcaataatacctcgcgtctgcaaatgccaaaatgttgacacctgaacccttgaccctactggc

SEQ ID NO: 15638 - DNA, 901 bp, Emericella nidulans
agcccaaaaaaaattaaaggggaggcccagggggggaagagaacagacggggcaccagcgtgaggagccaagggtggcaaccgaagaaaaaaacagcaaaggtgagacattgaaagaaagaggcggttaaaaccccccaaaggaagaaaaccacaccaccgcaccagcgcacaagaccacaagcagaagaagagaaacgcaacagacaagacggcaacaaggccctgcaacacgacagaacaagacggagcccgaagggggagcgcagcaagccacccgcgacaagcagaaacgcaagacgagactggaaacagacggcggcagccccaatggacaggcaaccagagaacccgcaaggacaagcactggaataaaaacgagaagaccaagatacggcacagaaaaaaagaacccaacaaataccccgtaatgacgccagaaagacgactagcgggcacaagagaacagacggaagcaggcaggacgagaaccccaagcagaagagcgccccgggggcacaggaaaaccgacaacaggaagaaaagaccggaaagcaaaagcaggctgggccaaacgaaacggaccccaggggcccgagacccccaagaggaagaaagcacccgggggaaaccagccgaaggaacggagaccccaaaagaccaaacaagccgtgccaggggcggaaaagcaacaggcagagcagaagacaaccaggggggacacaggcgacaaaaacaccaacacaggaaacaaccggcggaagcaccaaaacaggcacggacggaccacccaaacgaaaccaggacgccgaagggcaaaccccaacacaaaaaccccgggaggagaaagaggcaagccacaggacccccccaagagcgcaaagacgaagaacagcgcgaca

SEQ ID NO: 15639 - DNA, 700 bp, Emericella nidulans
tcctgatcggtcgtcttatgtaccaacgctgagtcatggccactgatacctcgagcccttctgacttcagctccttcaccactgtgttactaaccgtggatgatatcatacagctgataagcaatgtgatcaatggaccggctcttagccgatagaggattaagtgaactctgcccgatctgccgatgatcactacagcggatactatgcatcttcacctttgcatagtcctagcttgcatgttcattcgactcgtatcattctctcaaggctggacctgattatcatgaccaggggaaggctactcgtattgtctcgacagatgctccatgtgctccttacactcattctccacatcgaactgcatgtcagcagagcctacactgacttagcgtgcctggctgccgaaggtgatgccatcgccgcttaacgactgactcgcgggatccttgagtggagtatgtactggactggctagatgtggaggcttatctggaagatagctggatcgatgagcccgtgctctaaggacattgcatgcagagctggcgctggatgaacaggtccatgccgttgatgtctgaccgacgagctgtgatagcagacaccggtgtttgtgtgaccgacgaagctggtgtagaaggatccccatgagacttggagcggaggcacaaactgtaacaaactgatgatcgtgtgt

SEQ ID NO: 15640 - DNA, 548 bp, Emericella nidulans
ctccccagtcgttagttactacttctgatactgaatgagatacatatcgtcgacatggacacgaacgtgactactgtggacctctacgcggccgatggttatacgctcagggctcaccaggtgcacatcggcagacatcactaatctaccataagccagattatctgctctcatacacgcgaaatctaggtaggcgtccgatttctcacacatggtgtattgacttaacgataaacctgactgtgcagacttcctattgtgcgaggtagcgccacgacagggctctgacataaattgcaaatggaagcttgtccgtatatcataatgctgccgcttgtatcattttacttgtcagaaggtatcataggggagccccctgtgctagtcagtaactataaagctaatctcaacatagaagattgccctgccgatattaaaaaacatgactattatatccgattagacatctatcccggatgaacatccgtactaagacagtgatctcacgactaacttacctgattagcaggggtgtacgcatgaaggac

SEQ ID NO: 15641 - DNA, 399 bp, Emericella nidulans
gtggtgggtgcatcctagcttattcctatagagggcgcctattttttcgtcgtcatatgagatatggtctctgggcagcttagtagccggtgcataccatgcagggactgtaccataggccgtaacacgagattctgcgctgccgaaccatctgagtcagccgtcgaagatggcttaagatatgcctccggccccttgctatgatgaagcggacctatgtccatgcttaaccaatcgtctcttgaggccgtagaaaccatctcgatcgcttggtcgtagttctgattggcgatcaagagcgccgctccaatgatgcagtgcggctctcggacacgtgaccttattcttcgccagacaacgcactgatttctgactcatttgaatctaggccctgttcac

SEQ ID NO: 15642 - DNA, 2078 bp, Emericella nidulans
ctttagaatcgatgggtccggtccggcacggcctcgttgcgggatggcagcccaattggtcatatgatctgatcgttcccgccaacagtgcacaggatcagcagacctggctggccagcacgtctccccggaaccgagccgatggttcgtttcggacagcaataatattgcaggcgaagatccttgattcagccactcggctggggaggttggggagctctccacttccactctacgcagcatcactctcactttggaaacttcctgtctgatgaaaatagccgccgatttagtaggtactgaaggccaagccgctgataatgatgatgcgagactaggttactgtcttgacccggtggagctgattttgcccgatgggcaggcgaagcgctgcggccagtggcagcctacggctgccgcagcaacagcgcgacgcgttggttgacctttgtgtactgtaattacacaaccgcaacactctgacaagagaacaagcttggggagatttctctttactaggggctagtagctgccacccgcctaatccgcaactgaagcctcagaagctcagagccaagttcttcgaggttctactgtgaatgcgagggagagtccgccgacctcggtagttcgtcctagtggactagcaggcagaacctccgtccaagcaacgaagcgaggctgacgactcgactgtcagcgcgtcctatgagtcctggggctctggcgtttccgcccagacgcccgtaacctctgaggatgtcgagagaggatcatgggatcatttcctaatttgacgtgctgcgggcgtcgatccctatctggcaggttccagaacctggatgaaggcgctgtatcaggttgaggaggacgcgctacacccatctgtacctgggatccggtttcctgccctttaacggcatttcaaggcgcgccactgcatcatgttactgcatcatgtcacttcttcgtatcacggctctgtatcgttgctacgtatcactaccctctgatgctttgctcagtgatccagaccgccggaatcatcaatggtgctgccagcacccagacgatcgttgaactttcatttaccgactcattgagctgaaattttttagtggcttgtggctccttgacaacctagatccgagttacgcgccgaagcaatgacgccgtaaatgtttaattatttgatttttcactctatttcgcttttttttggtccgtatgtatgaatacctttgtggaagattatttgcaaaccgccaattatattacccaaccctttcattttcaaacaaagactggccaagaatagctcaggatctattgaattatttgattacctgatgcagagggttaacggaggtaatttgattgtgcagactgcacctccagctcctcggctcgggttgttccgtcctggctactcgacagatccttgaaattgttgtacccgatcaccagtatatttgctgccaaggaacgagatttgactgtagtgatacgatggtcaggttatttgtggttgccatctgcgtcgagacgagtgacagatgcaagtgtgcagtggaccgattctgagagtgaggtcaagcccacgcaacattcttggactcctgcatgagacgtcaagcctgataccggactggtcctgcatctaggctcatgcctcgcgcatggcgttactacgagttgctgcctgtgctgcgactcgacagagagcctcatccgcagcttctgctaccgctttctgttgagaagccgtcaacctcgtcagcactcagccccttttcccaacggttttcccaaggctgtccgaaatgagtcctctagcacagagccaatgcgtacgccgaaagtttgagctgagaggattgtttggaaactgccttgcaaacccatcacagaaactgcatagtctattatggtacccagggaattccttgtcctcctcctcgtttcctgaacaacagaactacggattgcaatggggaggtggactctgtctgccgtctctgattttttctgccggctcgtggtcacccctgtccacagaagatggatcctctcgcata

SEQ ID NO: 15643 - DNA, 755 bp, Emericella nidulans
taggctcgagaagcttgtcacgaattagatggagatttattttcaagaagaagcagttattaaggcagatgagaaaattcagagcttacttacacaatataatggacaaatatataagacgactgcggtcgataagtcggtatttcttacagctttaaaagctattgatgcagaggttggaaaagcagattcaaaaagtgtggatgagagtcaaaaaataggtaaagcaatggataatttcaacaaaaatacttctggtgagacaattcaaggtaaagtaaaagagctaggttcagagtatacgaaattaacaaatgaatgagataaagcaagacaaaaagacatagagtttgcgaaaagcaaaatagctgatactaaagggcaagaaattgcgatagcttaaattaacaagaaatacttttggcaatgtgtcttgataaaaaagggcctgggcacaacttaacaagggcaaaaagtgttaggatcaaagggggtgagaaggattaaccaccagattacgaaggtgaacttgaaaattaaaattaggtcgggatcgggaagacctaagaaatccaaaatttaagccaatgaaaatttttaggatttagaaaagctcaaagagctgcccggaaagaagtgtgtgaagaaaaccttgagggcttatggaactaaatggagaaacttccgcaactggaattttgagtcaagctcgaaacttgaaggaaaaactgtttgaggaggggtcataaattcgc

SEQ ID NO: 15644 - DNA, 358 bp, Emericella nidulans
tggggaacgcctctgaagctcgtgctcagcaagattctggatgaggagaacattatttttgctcagtatgagggctggatagctgggggactttgacaacggtagatatctggctgaacccatggtatatagagcggcacgaaattatagaggcgttgcatatctcagggcttgccgaactagagttttggagagaatgcggccacttgaccaattgcagtggtgggttatcggatgggtcctaatgtgccacgcctgatcggatgacgactctggaacatatagctgaaatcgctgatacgggacataatgtggatttgcacgatggaaagtagggcagttgcgttgataacagctg

SEQ ID NO: 15645 - DNA, 5000 bp, Emericella nidulans
tttactggatttgcgataaatgattacacaggagagacactgtcaactcaggcaatgtacgatgcgcactgccatgatctggcacgactacagagaacctcaatgaaacacttcaaggacaaactgacaatcctagctttgtcaaactatggttccattgagcagcgttcggaactcgaaggacaattaaaagctttggatgactctgagcttcaggatctatgcgcgcacctaggatttcgtacaagttatcccaaacaagcgaatgtcgcagctgatcgacatctctacatggaggtgcttctgtcctaccatgaacggacaacttcgttccaagaagccacttctaatcttgacgtcgtccctacagaagaaagtctgtacgatccatcattactccgcaatgagacatatgatgggtctaggccactcgccatcccgaagctcaaccttcagtatctcagtctgggtgacttcctttggcgctcctttctattatatcgcgcagaagcttttttccagattcgcaaggatatggagctaattgtcaagcgaatgcaaccccgatcaagtcaagatgggcgaactttgacgtttgacgggttttctcgtatggccattccaatcccaaaacctgccattattgaagttgcgccacctaaagttggatccacaaaacccgcttttgtacgggctgagattaccattgaggtaggcaggttggccgaccacgtccgcacagagtgggattcacttcgtcctgatgatgttgtgttccttcttgccgtacaacctggtaaccagggtaaatatggattcagagatgttgaagcgccccagacaccaggtatcgtacacgtcagatccgcggacattgtgcaggtccttgatgaaaacggacgcccgctacgtgaaccagcatcgggccaaacaaatgggtatcgatctcgtcctcgcgttcgaagattactggtcaacttggactctgctgccttcaaagcggataaggatcgtacttcacaggggaagcccgacatttacccactcatcaatgtggtcgcaagaagaaaggcaagagagaataacttcaagtcaatccttgaaaccatgcagagactcattgcgtcggacatcaccttgccacaatggattcaggatattttcctaggttatggagatcctgctggggcttgctacacggaattacctaaccgtctcaaatcagtggacttcagagacacgtttctggactggcagcatctaattgagagtttcccaggcctgacaattgagcttcgggtgacgctacctcaagctttcagccaccatacgttcttgagtacgtcgaagaatctgcacagccatctacctcaagcgcgccaaaaaagcgacggagggaccagcatgccgaagaacgaggagggcccaagtctctccgcgtctcaacgtacaagccaccgaacccaggcccgtacccggtagatgccccaaggctcaatgcagtccgtttcacaccggctcagattcaagcgattgcatccggaacgcagcccggtctcacagtcatcgtcgggcctcctggaaccggaaagactgatgtggcaactcaaatcatcaacaacatctaccacaatttcccaaccgaacgcacactacttgttgcgcatagcaatcaagccctgaatcaacttttccagaagattgtggccctggatatcgatgaacgccatttattgcgactcggccatggtgaggaagaattagataccgagaccagctatagtaagtatggccgcgtggaatcgttcctggataatcgaaaccacttcctcgcggaggtcacacgcttggcggcatcaatcggagcacaaggcgcacatggaaattcttgcgagacagctggctactttcatacagtctacattagacctgcctggacgaaattctgggaacttgcccgttctgagaacacatcaacagaggagatcatcgcggctttcccgttccatgaatatttctctaacgcacctgcgcctgttttcgatccttctgcctctaaggagacagtggtcgacgtggcagaaggctgccagcgtcacatcgacaggattttctctgagctagaagatatccgcccgtttgagatcttgcgtcagcccaaggacaaggccaactatctgcttgtcaaggaggccagaatcattgcaatgacaagtacacatgcagctatgcgccgccaagagattgccgaccttggattccattatgataatattgtcatggaggaggctgcgcagatcactgaggtcgaaagctttattccaacagctctgcagaatatgaaggaaggtcaactccctctgaaacgtattgttctatgcggagaccaccttcagaattctcctattatacaaaacctagccttccgacaatatgcccattttgagcaaagtctcttccttcgtcttatccggctaggcgtcccagctatcacgctcgaccagcaaggacgtgctagaccaagtattgcagagcttttccggtggcgctatcagaaccttggaaacctgcctattgtcgaacaagcgccagaattcaagcaggccaatgctggtttccagtttgagtaccaattcatcaacgtgccagactaccagggcacaggggaacgtgagccaactcctcatttcgtccagaatcttggtgaagcagagtatgctgttgccatattccagtatatgcgacttttcggtaccctgcatagaagatatagatcctcgccacatacgcaggtcaaacggcactaatcaaggatgtcttaaaccaccggtgctccaagaacaccctcttcggcatgcctaagatcgtcacgacagtagacagatatcaaggcgagcaaaacgactgtaagctcttgcttcaaccactcagttccaggcaactaataaggtttctcagacattatcctctcccttacacgcactcgcacagttggatacctccgtgacgtacgccgtcttaccgtagcgctttcccgtgcccgtcttggtctatatattctcggccgccgcgaggttttcgagtcctgttacgaactaaagcccgcattcgatttgctattacaacgtccagacaaactcatgctcgctcctggggagatgtacccagctaccaggacgttagacgacgaggtcaagggcacccctatggaaggcgtagagcatctcggccagtatgttttcgagatgacccaagccaagatcaaggctcttgggggggaaggtgccattgttgatgagacgatgccagatgaggagggagatcttatcgaggatggagacgaagaaatgcttgggggcggtgaagaaggagatgaagatccgttgcatgaacatgtatacgcctgattacggaataagatcatggtatcaagcttagggagttatgaaaactgggggtttaacttggatatatgttcaatcacagcgaattgcaatgtactctgattgagaagctgactctgcgatcgatgaagaactctgtatatctctagacgtgtttcaaaagcgccgcactagtgttgctctataactgaattttgatttcgcacgaatcgagcgttaaggaaggctacatcgggccgttccaactgtaggtgactgaagctgttggtgtgctacaatatatatctggagctaacctcggttctaaatccactttctgatccatatacgtcatgcaaaatgactaaaccagcaagggagcagacaccgatttcacttcccctgtataggatccattcatagaatttactagtgatcgattatatacttcgtttaggtgtctatcgagaactccatcatgcactcagactctttgtccttatgatgatttgcgctcattcaactcctctacaatattttgagggtctttccaggctagcgcaacatacctatttgctggttagcactgcttgagggaagcttgaatttgcgtacttcgtgtgactgccgcgggcgaagacgtcgcctttagaattcataaacctaatgttggtatacgcaagggttttgccaactgcaatccgatcagaagggtgtttttgcgatatgcagaagatctcaggcgcataattgaggcggcaacatacacttatcacaagtcacttcctgggatagaattagccctacaccatcaatgaatagtggaggacgatacatactgccagaatcttatcccccactttgccaccagagctgagatacgtgactgaagatggttaggcgtatgtcgaggccaattgaaccctgtaaatcgtacttaccgttcagatcagtcgatactcctgtagcatataacccacgggatgcaacagccagagagccaccgagatcaactttgagatgtgagatacaacgccttgaattgaaggttttacatgagctactgacccatcgaagcgatggtgcctccatggagtatctgcaggcgattctgacaaagcattagccatcgatctgtagcattgctaccgtcataaacacaggattcttactgtatgatgcttctcaatgtccagttcaaagttcacaatccctggctttgcagcggttacccggagctggagtgctactcatcagcgcggtccgaccattgattaccgatgctcggttgcgtgaggacgattggagttgatgattggtaagacgacgttcaagtcttcgggtcgtttgatcttacattgtccagcagcctgtgagaacacacaatgtcggcgctcagcaattgctagctttcggtgttgggcttcactacctaccgaggttccagccccgaagtggcccggaacgactcccaaacctggtggatgtgttagagagatcaaatagatacggcagtgaatgagatgggatttacagatttaacaaagcgcagcgcagtcattttggactagataaaaggccaatgtcaggtgggcaagttgtatggaggagagaggt

SEQ ID NO: 15646 - DNA, 3514 bp, Emericella nidulans
ctgcataataatcattttagctagcccgaatttacttcaaaatctcaatctaatcacattttgatctacggaattgtttgcaaagctcacgcctcagctagcatcttcttcagaatcggacttcccgtcaactcatacgcctcctgaatatactccctctctaatgaaaaaggcctcgccatcacgtttgggatgtacttgcccactagctgctccacgtcaatattgtccaccaagaaccccggacgcaagagacactgcctaaaccgatcaacggtgttccgcagaaggcttgagtggaatggtacgtcaattccttctagtgggactgtcgcctttccgcgctgaagttggattggacgtggaagcgcttttgctttggtgagaagcgagtcgatgataggctgtagttcgttctgttcttcagccagacaagcttggccaggtgcctccgctaattggtcgatcaatcttccaagaacgtacaagttcgcggcctttaattgttagaagagtctcgtacaggttaggcgacttacagttccggagcagacgtactgctccccctcgatattgaaatttacgatctcgagtagttcttggctttgggccgcgatctggctaactaggcgatccagcgtagtttgggtaaagacttacaatcttagctctcgcatcacgaccaaagggagcctgaaacctacatgtcccaaccctcttcgggttcatcgcaaccattccgtatgttgtccctccgtcgttgtcgctcgccacggaagcctgcatgaccgagccccggtagaatgccagctcgaccaacgcccccgtaggaacggaccgagacaaggcggacaaggctccaaattctccgagcgaatgccctgcatacacggcaccgtgtgacacgtagcccttggcacgtagttcggcaaacgcggcggcctcgaatagtaggatcgccggctgggcgaactgcgtcgagtagagcagccctcgtggatgcctaaacgtgtaggatgtggatgtaggtgttagtccggggaatactggcttttggactcgttttccgtttggaaggacgacttctgtagtaatatcgagatacttttggcggatcctgcgaccgtttggacctccaaagtgtacggtaagggactttgggttgttttgcacgatgtccagaacagaccacccttattggttagcaagaattgaccagtaccttgagtaaaacataccgtaggcattgtaaagttgctggtcaatctcatcccatacagcctttgcaactgaactcgtcttgtacaagtccatgcccattcctttgctctgacttccttggccagtgaatagatatgctgtcctaggctgttctacttccgcatcaccctcaagcactcgttcgtcagtttctttccgtttggcgagaatgctaaaacacatccggccatcgaccattcctgtatgcttgatctccacaacgagcttttctagaggcatcaccatatcagtgaacctcgcctcaaaccggcggagtctctcgcggtcacctccaagccctaaatgctctaggaccctctccgcaatggcggaggtacacatgccgtgacatagtgtcccaggaaccccggccaaactggaaaatatgggggacgtatgaataggattgaagtctttcgaaagttgagcgtacggctcgttgctcggaggcatttggatatccatggtggactttccggcccagccaggaatcttaaactcagtgcgtggttctgccagtttccctctgcgctggagaaagtccagcactggatttccagtgcaagtgttcctgaaatctacgatcgctagtttttgttgttgcccatttgtctgagacatagcagtgccttggacgtgcaactccatatttccatcgtcatggtatttgaccaggctgttgagatcgaaaatcatggatttcccgacaagggttagagaaggatcgcacggtctgaaccaatttctgctcaagagtatggattcttcgaattcggacgtcacgtcgtaagtccatttctgctctcttgctcttcgaaatgcaggaacagtcgtgcctttggagccacgaaacaggaaagtcgaagtaactgtcatgaccggtactcgggaccgaaggatctgcgcttctactatgacaaccctccccccatcgtcatcgtaaaccgcctggacctccgacctgctactcacgctatcaccgagtcggaggcgcgtatcagaataatactcaaacgtgttcgaccggtgaaccaagcgtagaagatcgcctccaatctgacgaagtattagtggccgcgatataacgtcccaggctatgattattcccatgcttattggtaggacatcggtgctagggaccatctgccggtgatcgctataagccgggcctatagtcgcattatattcgtccaatagatcctctgtcagcgttatatctggcccataaaagacaccattgagcgattgacttgtgtcacagtcatggccaaaccataacaggctgtaaaatgacttgatacgctcgttgcgcttatccataacctcgcttaacctgatattattcgtgtcgctgaacttgtagagtagcctcaaaggctctgacccctttggtgagctaatatcaatttgaatgtcgacgccatcgtggcaaacagctctcataaatgacgatatgtggtatggctcctgcgcagtcaccattaactctgaggagtcctgattgtaattcacaacagtgttcggtgaactttgtataagatctcggaaagggtttttttgacgcaatgtcccctgcaataccacatcatcctccagtagggctcgcatccaaagtggatgactcggcctgggaacgctatcgacccctcctgaagagaaagagtggttttctatgagttctgacaaggaagttatagaagtatctgaggtttcctcactagtgtccctttcggtcaatgataacgttgaccatgacgctggcgtggtatggcccctttccagtttgggaagcagcatctctgccgtagaggtttcgcgtaaacgggcaacaactccattaagtatggagtccagaatatatccagccggttcgctgtcggacttggagtacctggctgcaataggaccatgtagtatgcacactctctccgcgtcttgatctagcaccgcatcaacgtcttcggcctgccacagagagtccttcttgaagtaaaactcaaagtcatcatcaagggctggaataaaattcaccggttttcgccccggagtcttgcattgcattaggaagaacgatatatcttcgggattcagaagatcgccttcagcagtcggacaaacgtcggcgaatatcgcaagaaaacgatctggtgcctttctgagcaggctgatcgtcaggcttgccgcagcttcagagtcgaattgtaacctttggagccaacgctgagcaattgtcattgtaaattcaatataggat

SEQ ID NO: 15647 - DNA, 564 bp, Emericella nidulans
taccgacatagactcgccgcagcatgacacgcgcgcacctaagaggatgcacttaacacatgtactctaccagcatcgtatccggtacgctgtcgacaggtgccgatacaaaacagtgtctatactgactataggatcgcgtgcatctggtaacgctcactgctgttattattacaaggactgactgaacatacaatgatctggcaaacacagacaataacagaaaaatcgtgatcacacagagccgtgccgatgatcgtggctacatttcgctctacgcagcgccaatttctacagtacgtctctctgtactaggttgttaagtgctactcgcttattctacagaatgcctatctgacgccggtataaaagaatcatttacgctctgatacccttatcggaagcaccttgccgactaccctaagattatccttatgaccatcgacggggcaatagcgatggtcatgcacaggataggtgtgcatacttcgagctcgagtcatttaacgcactgaatgtacgataacgcatggggcgcgactgtatggatacaactgaaagatt

SEQ ID NO: 15648 - DNA, 409 bp, Emericella nidulans
aaaaacctcccgcactatgaacaaggataactcctacacggaggtaaccgtttttgcgcgtgaaagcatggtctttactaacagtcagtatgaccgggtgtagcttaagccttctagacttacaacgaaaggatctctggaacttattcctacccgatggacggagctgcattgggtctcaaggatattgaacgtactggtcggcaccccctatatacagggtactaaggggccgtctatatgacacgcacaggggggcgttaggaatgctcaagcaataccatctcgagcccgcattggcgatcgcaaacgcaacaacatccaattgaagcggcatttgtgttaatcctaagaccgctagtaccgtgatcaccagctccctgaccgctacagatctagcactccctca

SEQ ID NO: 15649 - DNA, 533 bp, Emericella nidulans
actgaatcgtgtgcccacatcgatccgggctataatactcaaacctcccagcatgagcgggcaaaagacgcctgacagcgaagtagtgaatgatgctgatccttctaatagtgcaagctcactctactcatgaggctgtatagtaagcgactactctctcagggctctccgtcgatgctatcttcaacactgctcgacactaatgcgggtcattgtgctcgcaattcgatgagagctcattctcctcataaatgcctaactgcagacggtctttatagcgatcatctctcaacttaccctttattccatgggcgcaatcactaataacaactgctattcagctccctgagccactcaagtcccaatccagcactcgtcagagcattcacactgccatgagccctacggtagtctctcgggccgtgattgtgatgagatatgaacccttacaacgcttgcatgcaaaaagaggatgctatactctaccatctatgaatcctctaagaggctgatcccaaagagccctcttgaat

SEQ ID NO: 15650 - DNA, 2757 bp, Emericella nidulans
cttaaccttgctggtagtacttttgctgtatcgacaccatgctttgtatgatagtcagtgtatgctgctaaactagaatagaagaccggcccagaatttgacaggaaacaagcgaacttacatgttcatggttgacaagattaaaccacggaatcacttgaatgaagagattggcgtatcgagagttcctagcagctacaccctgcaggtgtggggacacctgcgaagcaccgtacagaggttcacctttcttgaccttgtccaccatttccctcatgtccatttcaacctcccttgagttctccgtgaagccatggaagcgatctacaggtatcagagttaatgacgggttgaaatgaggacagtaaagcagaggtcgagggtacaacgtactgcacgatctctgatagaggacatgtacaccaccaatgagaccgatcgccgtcgccagcctcatcacaggcgaaaagcctcctctgcccacatgcgacgggctcactctctccatgagccagaatgcgagcggagacgccgcagctgctccagcaccaaccgcatagtccgagggcctcgcgtatccaaaaactcgtcgcacgtgcctagacaaaagactcaaagtattagcaaaatttgtgggtcgtttctaagtgtacatctcctatataaagagaacattgggcgttcggttcgtacgggtcagagtcaatgagctgcaaagcgatattagtatgaccttgctaagcctggatgaggagttaaggataaatcgcaccggatagtcggtaagggccctctttggtggcacaaccgtcgaattgttaactcctgccattttaacgagctgggtaaatcggtgtaattggcgatcgaagtcgttgttatctgttggccgggcggcgttggaagtgggagtcggaggtcgacaacgccaaggtcaattttcggattaggattagcgtcggtagccaccactcatttatatcactcatttctacagctcacttaagctatgtacgccttcgtacaatacaacctggacatagacgggagcaaaaattatagagtattgggagcataaaagaagatagaaattctcggttgcagaaaattcaggtgtagtctcgttggactggaaaatggttggactgcaaatatccgaccagctctatagatcccactgtggaaaataccatcaaacatggtttgatggtcaggatatgtttccatcgcatgttgtctaatagtctatcccagccagttcgagtctactcaagttgctcggaaatccgttctaggttcgcttatgatccgccgcaacgcgtatcaacgcgtcttcggcctatcgctttatcgactcacctgctatccgagaattgcggcgcccacgcccacgtttgaccatctatacgttgtacttcgtacatgagactgttgcctgaaatcaccagaggcctacggaaatcgagttcaaggattctcccgttttacctcaatcttcaacgccgcaaatggcaagtgaaaccaactcagcagcagtggcggcgcagtctgccgactgtgtcgacgacttgtttgattacgaggtcggtcttgacgacattttacaagaaaccaatgcgagcacgagtagcggaaacgtgccgaagcaatctatccaaccggataactcaggggtgttcctaggcctcgatgaagaggttgaagttgccaaaaggagacagccagttgctaaattagacgaaaacaggtcagtagttagagcccattgagcaaattgccgaaacatcctgttgaactcattattattatagactgctcacacaagctggaatccccaagctgcggcgctccgcaaaaaaaagccttaggttcaagggaaaggggcatgaggtttgtactccgcaaataatcctcctaagactatgacacttcagtgagcggctggttgaccctgttatcatgctctatatagttctctgacttagcacgtctcctgaatttttatcaattgtggctcgacgacctgtttcctcgcgcgaaatttgtagatggtttagctatgattgaacggcttggccattctaaacggctacagactatgcgacgagcctggatagacgaggagaagccgaaggctgcggttgaggatacattaaggaccgaacaaacgaattccaacgataaagatatcacgagcaacgacacgttgatggcaaaccaccggcaatcaataccaagtgatagctcgcgattaactggagatttagttgatacagatgaggacttgtttttaccggacagtattaaccatctgcagtcagtcagcaagaaccatgctcaaccggacgataatgatgagtttgacgaactggatgctctgctgagagagcgtggagatgagcctggcattggaaatcttacttcaactgggggtaccggcaatggttattgttcgccggttgatgacgacttcgctgagttggacgccctattgggggaacacgaaggcgaacatgatctagataaatttgaccccgaaagagtcgaagaacgacacaacggaaactgacagtcatgcggaggagcttgaagcgatgcaaggcaccgaaatgtccgggttaatgaagtgattgagttggcataaccaacagaagcgccatgtacagtttcaacggcagagccgtctgacataatggatatcaatagttcagtcgtatggtattacaagtttaatctcctcgtacatctaaaagtaca

SEQ ID NO: 15651 - DNA, 752 bp, Emericella nidulans
  unsure (1)..(752): unsure at all n locations
cacgtctgaagttaccccatacctcgaagccggtctccaattagtagcgcgtctgagaggtacgtctttctatgcctactggctagattctactaaccagacatacgaggagagtgctgaacaagcagacgaggctgtggaacacatgtgctccctgacggatgcaaaccggatctacgatactgcactaggtctctatgatcttgaacttactttgcttgtagcccaacaagcgcagagggtacgaaaggccgttaggaagagtacaaggaggcattctaactaatcataggatccccgcgaataccttccattactccggaagctgcagcagctcccagatctgcgtccattcttcgaaattgacaactacctaggaaggtggcagaaggcactcagccatcttcatgggtagcatgcccacgacgagcatctcgaatacgaggtcaagacacgtcctatacaaagatgccatgnatattttacaaatatgagcctgaacagctacgcgacataacccacctctacgcagaccacctgtaccaggaatcccagtatagagatgcaggaattggtacgctcagagaactcctcgatagataaaatttcagagctaacaagaaccacaagccgatgaatcctgtatatgtacacagacgcctacaatgctaccaactgaacatctttgtgcgaaatcaatcaccgcaaactcgtccccttacaagagagctacaaccacgccccaccttgca

SEQ ID NO: 15652 - DNA, 548 bp, Emericella nidulans
ggaaaccggtccaattttaatgcacgccctgaggtctagcgttccgtccgcgttcatgacgtatgtcaatgcttccatagcgctttagttgtttcgggtaagggggcagtgccccgtgctgaagatgattgaagatgcctgactgtgacaagctactttgcttgcgccacgagctctttggaagcaccgaatagctcccgtggccagttatggagtaaccgtacttgtgccgaaccttggattcgaccaatccatatccgtctagaccagagtgggttgtaagccaatgcctccacactgcgatagtattgacagtagggctaattatatggagctactgtcatccggttgcagcaacacgctgtttctgctgtcatagtcagccgttttgcggcagcaagaccactatatgatggttggcccagagtacaaatctgtcgagacatcatcttgaatattgaagccctgccttactggtgaatctggaggaattatagtgggtctcttgggggcttcagaggactggctcgacatgcatgagctttgtg

SEQ ID NO: 15653 - DNA, 1959 bp, Emericella nidulans
ccgaacacagcacaggtcaattacctacagtctcggttttggttttcagagacaagcacatgtccaatatggggctgtggtgaaccgcgttagcaaagaacacgcccgcgcatcccctccaaggttcaaagcggcttacgtagatctcgtcatgttggaatcgaagcttcaagttatcgttgattgcctcgttggagatcttgctcagcagcgtaagatctgaaacgccaatctccttcttctttgtgctttcgaaaacggcttttctgacttgcggcttgcccccggcttgtcgcccgtcgcccacatcagcggcggccttggagcgaccgaaccgactcttcttctccccgccagcaggacgtcgagagtgaccctgaatggaataaggctgtcagttcatgtctttcgcgaaacaaacccgtatattaacatatttcagacgccgactcaccattgtgaatgttgccgaccacccggggtcttgcgcctaggcgaccaagatatctggcctatcaatttaatgcagatgaaagaaaccgcaagaaacaggaatgaacgcagataacaagatgttcattccactcgggtatatagaggacttaaggaaaaagagaaaaatcttgcaccagagaagaattggtggcagtgagcacgagggggggaatgacgatgtggaggaggatcactctcagtcttgactctaggacccaggtccctcgatagatagtggacggagcgggcacccgttgcgccacactcggacactccttactcatgtggcaccgttgggtgtctttctcaggccgacaacgcgcaatcaggtaaaaatatccctcaggtgatattcttgctgcctttgggccagcgcttaggcggcaaatctgcgtactatcgaccttccttgttcctgacggcgttattatatcatacttcctatccaacttgattctatcctcaaatatttaacaaataatacaggttaacaaatcttgagtttgtctatcgcttcctccagtatattcatttatggctcctaaatatgtcaatatatagacctgtcgtggtaaaagcctgtggtaggaatacatcctctatatatcttggcgcattgtgcgtgttaccgatggttacttatgtgctgccacacatccctccttcagaatatctttctgccggaatctatgacattcctaccgtgtcttcaccgaagaggattcgtgatactctcaaacacacggatgaacggtgcaacatccgtggcaggaaccgataatgacagttccggggatgtcgcataccacctgtaagaccagaaacccgttcaggctacctctcctacaacactggtaaaagcgtccttagacaaggggacgcaattgcctttcttggacttagcactgggccagtggtcataacagtttcaatagaatgccggtggtccgcttttcggtttgcttgatgaagatgtgtcagcagctgtacctggagatattggttggtgcctacaagttgaaactcgaagtcatttgcagaaccagctcttctggtggcgacgtcggcaaagaatgttcacctaggcctttagataattcggatgccactgacattcgatgtttcctgctgttgctgctaggagaggcaaataactttccaggccggactgtctcagagagttggactgtattttacctcagacttcttgttgtgtttcgtcttcaagatagcgggaggatcaccattactgagaagtttatagatggcgatggtagagagcggagttgattagaggtatgtacctaggtagagaacaaacagcgccaattgatgccacgagaccagggaagttcaacgttcgccacatgagaagggtatccgaacagcacataagataaacgccgactatgcgaaagatcctatagataaatacagaagcatatgtggtgtatgaggttcagc

SEQ ID NO: 15654 - DNA, 664 bp, Emericella nidulans
tgaggtcgtttgcttcgtacctacgcatggtatgagtcatagtggggaggtcttcaggcctccccaccaggcgcggactgtgactgcttgtcctcttgggacaagcctggcctctcactaatactcaagaaacctttccttctgtgcctaactgttactctttacgtgtccagagcttcatctgcacttgtgcatcatatacaatgctttcgaaggcagcggcaagcgactgcgggctctacaactgtgttatgggattatgactcccctgtcgtttatgcacctattcatacctaagccctctggctagtgctcacttcgaaaaggcacgccgttgactcatcagattggcccggcatagtaggattccacattgctgaatgcatcctcgggaggcaaaagttgcttaataaccggggaccctcgaccctctgcgttgaacattgttcctgacccatcgcttaccgagcatacatccttgcgccttgctaaagtgattggttgtttgaagattctggacccaaactggaaccttgcgagacctttgtcactactatcccaccactatgtttttatggctggggatcggctagtcctgcgaccggcccatacccttgggcatagtggtctacggatataccaagtggcttttccccgggaagct

SEQ ID NO: 15655 - DNA, 2675 bp, Emericella nidulans
  unsure (1)..(2675): unsure at all n locations
gagcttgccaaaccacacgatttacatgcctcgctacttacctagcaacaccaccttaccagcgctgatctggggcaacggcgcctgttccgcgaacgggacgctctttggcaactttctcaccaacatcgcctcatacggttttcttgctatcgcctcaggggcgccggatggacacggaacaactgacgtgcagctgatgagagacgcgcttgactggattgagacgaacaccaacaaaacagcaaagcacagggctattgataggagcagaattgcagttgccggccagagttgcggcggacttgaggcgtaccagatgcgcgatgatgaacgggtgaggtacctggggattttcaactctggcttcctggacttagggttctttggagggctcttggggctgcctaatgaggatccggataccattaaagacgtcaagaagcccgttttctatttccttggtgggaagaaggatatcgcctataaaaatgtatgttctttctttcgtaaactccccattcattgttatgaagacactaatggattgtttggtacagggcatggccgactatgccgctctaactggcgtgccaaagtgggtaggaaactaccccgtcggacacctggggacctacgctgagcccgagggaggagcatttggtgatgccgctgtgaagtggctgcagtgggtattgaaagaagataccagccaggcgaactggtttgctggtggtggcgcgcaagaagacgggtgggaggaggtggacagtgagcggctcgaggatctactgacttttgctggagtctgaggcctgccctgtgattgatggagtgacgctgtgatgatttgctttacctgcttaggtagtctttctgttgtggctatccagaaatgatagggatgctctgccacttcaagattccgtagacttggtttaacgcgcgcagatacaatatcaagaggcctgaatcctctagtactgaatactgaaatgcggctggattctctgttggccacattaattgtgcaaaagctcgtccgcgcactccatttcatcgtataatgggtatacggggagggcgagcccgggctggcatctctgggcagtctcaagacctcgatttctcgtagaaagaggggatacaaagtaaagtaaagagaaagatgaaaacgtcgggatagatgtttcgttagctcccccacgcttggtgagctcgttctctctttgcatcatatccaactcggctcactttatcataagccaatactttacaacccagttcacacccgaagcaaacctcagaacttcagtgcgtcctccttgccgctgatttaattccacgtcactatgttctctcccaacatacatcaaagcttgtatgacataacctcagcgtctagacttggtcgcggagacgaaacaggcgacgcgctggacaaatgtctatctggagactatttcatggtggcaaccggcaggtgttctataccattgacagattacctcgagaattagactacgaatgcgccggacgcgccagagttacattgggatgaattaattcctgatgcggatgtgccgacggccacttctattgacgatgtagatttgaagaaggagactgagacggatagcgttgccgtactactgtaaccacagctgactccgctggtgggctggggaaatgctgcgtctgctgtgttgcgtgaacgctcgttgcgttggttgtcttgtgcaacaaatggaatgctcccaagggctaagactgtatgcgcatcatattttgttccatctgtgcttcatagtctagccatcgcatttaagtcatcttcgtttgagtccccatccatatccagagacttaatatccagagaagacagcgcctctccatccacaacataatagcccagatcccctcccaccttgggcactgtacttgcttccctggccttcctctcctccctcccgagacagtctatgtcctggttctccacccacgaaaggcctttctcccagtaggcaaaccggttgcctctgtacgtgaaatggaagtcctcccaccgatcctccgcaagggtctgcatatattgcagcgagctgccaggccacagcgccgtgattttgccagtggtactgttcttgtaccagctgcgacatgtccccgtccagatcatgcttgacatgtacgactgagtatgggcatcgaactctngttgcgcgtccagtctcatggagaaggattggatctgttggcggacgggtttgcggagcatacgcgtatataagtcgctgttgcttcaagggcctacactcacgagacagtgccaataaatgcagcagatggggcgcgtgaagcanaagagagacccgacgtcctatccaagctccatcgggatgcgatttgccctagaacataagatatgggggacccgacccccggaggcaaatacaagacctgttgtttgcatgatctgctatacacaacagngccattaaagactgngcccgaggagttgaccaatgntgtcagtttcgtgggttatgacgttcaggacatcgtttanagctnctatgatgaaacggcccttcttgtgaggaagtttccgaggtttgccaccaaataaaaatttgggggttaggggtctccccccccccccccccccgcgcccc

SEQ ID NO: 15656 - DNA, 817 bp, Emericella nidulans
tatttatactacaatctctttcatggattatcaaagcttcaatgccgtggactctgttcattttttttttggtgtcaaaccaagttctacttttgcttggatcactcggcatgtatttgccgttagtgtattgataatctttgatggatcggaatcctctctttgtgacatcctttctgtttttgacgattttttatcaccaaccttcaaataagtaaagagaagtagccatgcaattttattttatttcattttgttcaaaagtatacatgcaattatttgcaacaaagaaaacaagaaatttgctacaaataattcaaaagcactaaatagtaaatatccatgaaattattttaattattctcaaacatcaatcactcaaagacagatatttacatcaacacaagaggaacgtatatgaattcacgaaatttagcgttcagatcctaagtttgattcaaaaccatggtgctgccttcagggacaaggaacatgatgagtacctgacataaaaatgctttgagttataatatgatccggtttaagaaataaaacattcaacgttactcggaatattactatatccggcattaaaatcctttgaaccgggcggctttaccttttgcggctactggcggtctttgagactggtttgagctatgcttgatgtgggtataaatcccaactttgcacaattttcctgcaacttttggaggtcaaactgaaataacatgcgtcaatggggaaaacaaggggggggggagggtcttattgtacaaggaccactcctgccgctaaaagtataaaccccagattt

SEQ ID NO: 15657 - DNA, 3726 bp, Emericella nidulans
taaagtgcatttacaaagcatttcatagtctcggaagaagaacttttggctttgacatctattgaagagccaatagatgatgagttttttgacgtgcttgcgcgggtgaagcaggtacatcgagattgtgaagctctactaggtgcggaacacgagagactcggcctcgagcttatggaaaaaagctccaggagcctgaactcggcctaccagaagctctaccgctggattcagaaagaattcaagtcattaaacctcgaggatccccagatcagtggtacgattcggcaagctctgcgggtgctggctgagcgtccgagcctgttccagacttgtctggatttctttgcggaggccagagactatgttctctcagatgcttttcattatgctctgacggatgcagtctccgggggagatagtgctgtgaagccaattgaattctccgcccatgacccgctcaggtatatcggggatatgcttgcatgggttcactccactacagtctccgagcgtgaagctctggagaccctgtttgttgctgagggagacgagctcgccaagggaattcaagccggtctaaatagcgagccgtggtcgcgaatcgatgaagatgaggaaatgacatttgacggacaaaaggccctcagtgatttagtaagtcgggatctcatcggagtcgctcgttcactgcgtcagcgggttgaactagtgattcaaggtcatgatgacccggtcacttgctacaaggtcatcaatctactttccttctaccaaaccattttttccaaactagtgggcccaaactccaaccttgctgagctgctcaaggctctcgaaaagttcaccttaaaccattttcagacaataatgcgtgacgaagtcaacaatatctcaacggaccattccgccctggcaccgcctgatgatctctcggcgccacagttcctgcacgattcattagaagttctgacagcgttgatgaaaacccacgaggcttccctcggaacagaagatcccagcatcacatccgaatctgaagagaacgaattcactccggtcctccacgcagccctcgaccctttcttcactctcgcaaaagcttctgcagatgaacttcccgatcccactgcccgcgcgatctaccttacaaatgttcatattaccacccgctccaccatctcgccctatccttttgcaacatcaacgcaccttcctcctctctcagcaacgctttctactctccgagtcgaactcctcgaaagccagcaccgctacctcctcgacacctcaggccttcaagtactcttaacagctctacaaccattttctcaatccaatgaatcaggcacggagaaggatctggcagctattgcagatctcccggccttccaagccgaagccctcatttcaaccagtcagcagctagacgacttcttgccttcggcactcatggacgcaacagataacttgaaacgtgtgcagagcgcaacttttgtcaaaagtgttacggaggaggcggttgaagcattttgtcgtgatttcgaatttgtggaggggatgattattggagctgatgaggctaggggtgttggtcagagtgacggtgcagttaatgaagagggtgaagagggtgacggtgacggtgacggtgaggttgagcttgagcttgaggttgagcaaagaggacagggtcagagccttagaaagttgttcccgcgtaccacaggagagattcgcgtgttgttgagctgattctttttcagcttttggcgattcataaagatgcacatggtcttaaagttcttctacgctgtacagattccagaatatacccaaattctagaattttgcctactgctgcatagtaatgtaggataacgtcactggagccggtttacttcggataatccaacgccgagtccgatagaagcgcttttcccgatttggaaacgcaaatccaggttccaaggagaccgcggagtagagaaacagcaacagcaagcattgtcttaccttcttccattcagcgtctcatcgaggccgtttctcagacagaaaatggtccaacctctaaggcggggagtgagacctctcacttggacgcgagtcctccctcgccaaacgcgacaacctgcgtcatcgcatcgcagagctcaagcaagatatgtccagattcgtgccacacctacggatcaaccagcgacagttaatgggagcaatgtgcccattgttgatacacccagctccgccgaatcggccggtaggtccttctcatacagcgtggattgattatcgctaaattctgggaaatacagatgcgcggttcgaagtcatcggagcaccttattcgttactgtcggttaccctttccgcctcacagaacctctacacacggcgcggaacgctagtcggtctgagcgggaaagcggacaatgtaagagattgaaatatggagcttggcttcttctttgctgatagcgttggtataggtaatctcaaccttaagtgtcttggagccattccggcgagctcctgttggcgtgccttcctataccaaaaggttttttttactctcttcattgactccggaagggcgagtattgatcggcgatgtatagatctcctccgctagccctgtcactgccttgatttctactaggtcccccgttacatcgttcgccgtcgttcatctcaatggctctgtggattggatggtcgctcagagacgggcattactagcgtggactggtcgctcgttgagcatccgtccgacaatcaatacgagcttggttcgtgctccggctgtgttcaataggagaaggcgtactaatccatctagagcgtggctcattggggtagctctgaagtcaccggaagagggttgctcgctctggtcggaagcggccaactctactcagtagagctaaaagagggcgagaaatacatagtccatcccaggtgtgtttgaaacgagactgttttaccatggcagctgctcactctcaaaaagcaatgttgtggcctacaccgtcagctctaaaccccctcgcccttaccgctttaagtcgacgtccttgaagttacaagtcccgggcctgaagagccttcctacttttctccagaacacgcaattcatcaaagccatgtcggagaccgattcatggaagacggccatgcggatattccatacggttcgtacatggtcacgaatgacgatctggggagataggctgttcctccaatttgacggtccctccactatcctcttacaatctcgcggggcccggatgagcgatgttctgagcactcaagaggtcaacgaattcgcaagcacacctagaggcctaacgatcgtccctacaaaacaagaggagaagcaaaagggttcggagcaggatggaaaagacgacgtccacaaggcccccggcacaaggtcagtggatgaaatcgagcaggagatcaaaggcgtcacccagagtatcgccgtcctaacgaaggagggcaaggtggtattccaaaagccagggcaacaatgatagaaggcaataactgtacaacatacacgttgaattatatttcctcggaaatcgcaactaccagtctcagcttatgcttgtattttgaggcaaccaatcaccatgacagtcttttgtccatcaccgcaaactagaccatgatggacatgggtttcatggttaccgtacagcaatgagcatatccaag

SEQ ID NO: 15658 - DNA, 5961 bp, Emericella nidulans
aaagtacttcgatcatatactgcacgcgcttgtcgatatcggcctcgtgtaagatgttcctgaattggtcaaatacggccaaggcaatcggaccgctcatttcctccagatgctggccaacttctcgcgtcagccccacggcaatctcaacgctgtcatcagtgggcttgtgaagcagaagaagcagaatctgggccgcaagcatttcgtgcaccacttgttggttacacagatgggcgatgaatgtcgtcgatgatatgcagaccgccttatcgtttctcttgaaagctttccggaactggataatcaacctactcaagaggagttctccgacctgcggcagcttggtgttgacaattgccgccatggcagcgtagatgggagtgaacggcaaacttgccgcctgggctttcatgatactccggcaaaacaaaccgcgtccccggactaggttctcgccaaacagttctggaacgatatacttgatattcgacacgttgactttgttgatgagaccgtttatcgacttcttcaaagcctcccaagccatccgttggtactctttactggtcttatccgtgatctgcgcttgcagggcccggagtcgcgctggaggaatgtatgtacctccggagcgcatgttgaggagcttttcatattctgcctttgccgcggcctgcttctcctcctccgtcagaggcttccgcgcagcttcctgctgctcatattggcggactcgttccgccaactgacgttcacgctcaattgcacgctcggggtcaatgcgtggcacgtcgcggtcagcgtctgccgtgtcgccaggaggcgagcgacgccgattcggtgagggcgaacgagagggcggcgatcgctttcgtgaaccggaggttgaggagagtaggaagcgcctgggggaggcgtgggtactcgcacagcggactgtagaacgacagagtccgacattttccgcgcctcgatgaaaaatgtattccgacccaggacctcaagctgtcgagctggtcgagctggatggaagtcagaacatggagcggcaaagagtcttagcgcggtaatgcacgtgaccattcaggagccaggctggccgagtctcctgcgagtatacaacaaacatcccaacgacctcttgtctgtatctggtttccattccttgtcactatggtaagagatcaccccactcttgactactcatgaaaatgtaaaggcaactgttgatccgacgccagctgggccaacttgtgggatccgccatgcttttggccgctactgcaatcttcctctactacacggcgtggacacttctcatggtacgtgatggacgctcattactttgctggacgaaaaggctaaccttatgacagccgtttgtcgaccccggccaccctctccatgccttctttccccctcgcgtttgggccatccgcatccccgtgttccttacccttttgggttccgctgtcgttggtacatttatcggaatagtcatgatcaatagcaacaagaagaaggcagcaaaggccaaggcggcggctgcaaagaagaagacttaaaaagagaacggctgaaggatacatgcgtgcgtataggagaactttttcggccacgggttgtgcttttatatctaaatacctgtaactatagtttcctattattctaatcatttcaatttgaccaggcaacatgttcctgagttgagcaaattaagctgaccttaaccactgagtagcccttaccgattctcttccttcctggaggacttcactagggcacttgggagataaaaagagacaaaagcagtacctataatattagacgccaccttgctgactgtgcttgaaacaagacgatcaaagacttggtctgaccatcagcgtcataatgcatttgaccatggcactgacctggcaagctgatgatgtacaacctcgtgatcgaagtcacgggttcttgttggttattcatgtgcggctggaaccggtcgccatggatgatgaactttgatccataggagaagatgaagagaaccgtggcattcggatgataccgttgagaaatgctatttggcagggctgatgccggatcatagctcatcaccccctcagtgtaatagatcgtattagtgtaatttgtatactccggcttaagtgtaccagcaggatgataaaccccagaacagattcaagaaactggtattttctcttctgctccatagcgagtatccatgttcccttacatcccttttagctccttgaagctgaagctcgtccccacagatgtattgtcatcgttggcgtcataccattacgaacgtcaggttcctgtaaaatatcgtctccaacagccaatcgattcccctctccgtgtcatgagaacagaatccaacaacaattgctgccgaaactcccagcagaagcctgcaagggaggcgcagtagtggttctaggaatattgccgagtagttctctaccaggggactaactggagtcgtggaaaattaccaactggagtcgtgtcagcctaccagaaggtagatgtcatttccgatagctcactatgctcctgacctgatccggttcccctcccccgcccctctatcgctatctacacctttcctcctacaacccccaactcgctgttgtactgccctgctcgacttgcaaattttggaaagacctactccctggtggctacattccgtcttgtctcttaacgtggactcgccggtttaagctgtgcttccgacccagtccccgttacccagatcgacgcgtactgtatcagagttccccgtcgagataccgtgctatctcgacgcctcttctcaaccatacatccataccatcttcagcgttgaaatagtagattattgcgtctcgctgggataagactgtaagaggcccctggaagacccggcggcggtgttgatgcttggggactcatgctgacagcttgtcgacataggtagactacaaccagggaccgtcaagcgcagagctctagaacgctgaccatacttcgactttccgttctcaggcctcgtaaaaggtcttgagggcggctgttcttactaatcccgccctgcctcgctgaggcagctcatccttttaatgctcccggcagcttcggacgacttgtctcgccagcagagccggttaccgggcgacataggccccgtggaagacacaatccccgccaagccagataatgagactgggggaaagagcaagaaaaagggaaagaaaaacaagggtgccaaggtgacttcaagggtccccgtggacgatttgtgagtacgacagctcagattcagggcatggagactaaacccatggctttcaggatagaaggatcctcaccctcgcaggccgaaccatcatcttatcctgatttgcctcctgaaccgcagaccgagcccactactatcgcatcacctgttctcgatgctctgggttcgcttagagatacccctgagcaagacttcgcctatcgcacaaataactgggccaaatccatcccgtttggaaagagtcccccgaaagatggttatgaagatgacttcgtcagcggatccccctttggtggttttctgacgagccaggataaaggcggtttcagccatccgtcttccgcctctccgccacccagaacaaggcctatgagctacgggaatgaatattcaagcggagccttctctcggcagcagtctgctgatagacataagagtcaatctgccaacattcccttcagtgaccggatacctccccctcatttaccgcagcctcacttctaccgagcccctgacatcgacattccatcgctctccggccaaagtcgaacgccaacggactcgcagtattcattctgcgcattcgacaccatctcgagcccaccgtttaagtcttcacgcatgggcggcaccgttcttcttgttggtagcgatggtacgctggaggttttgactattgaagatcgcaaggcacgccctattggaaggttgaatggactgaatggccgggtcgttgaagcgaaaatacttgcaggtgacaacttagcttcgggatcccggccgcatgtcgctatcatccttcatggcccttgtattccatccgacgacgagggtcatgtgtcttctaatggctctgaatcgaatgacctccccaccggaggacggtattctagtgctgataggcgtcagatcagagatgacacacggttctaccaaacaagggttgaggtatactctcttagaactggagatcacatttcaaccctcttcacaacgaagcctagcccgtgctttgagaacctccctggacttgcgaatttggcgccatctccaatcgggaatttgaggctctttacaagtggcagctaccttatcctaggatctggtatcagtggcgaaatctacatttataatattaatggataccagtgcctagggaagacctggactagtattcagtcgagggaagcaagacgctactcgacatcttcgagttcaacggatccggatgggtctcgaaatgactcacctcacggaactgccaaagctgataatccaattgttgcattgaacggaagatggttagctatcgtaccgccgtcatctacatatcgagcatctctgggaggaacagtaccagcgcctttggtgaaagggaaaatcttcggtctggagactcgtagtcccccttcccgaccagcgactacctgcgtaactgatgtcggtgagggcgaaagctttctggacaaagttgctaggggtgttacgcaggagttcgtgcgaggagctcgctggatgagcgatcagggcttgcaggcctggaatagttattggaacaaggatcagcagcaaaattcccagcagcgccgctcccaagcaatggactttccgcaaggatacagcatctttcctccaacccatgctcaagacacacagaacacttctccagccgaaccagatcttgtatcaatcctcgatctgaagaagcttgacgaaggtggagactcgaagagcgcaatcatgttcagccctgttgccacattccaagtaccgaatggctgcagctttttgtccttctctcctagtggcctcatgctcctcacagcgagcaagaaaggggatgttcaatatatatgggatctcatgcaggcgaagcactgtcgcgctgggcttttcttgaccgaggactcggctacagtatccgcgagtgtgcgtcaggtcgcacggtactcacggttgacagagtcgcatatcgtggatgtaatatggtgtccgccttctggtgatcgtctggccgtgattaccctcaaaggcacagtacatgtcttcgacctcccgcgaactgcttttcaatggcctcctttccgcagggctcggccaacgcgaggtagacaatcgccaaaagacgttggctctgaggaattaaccatgcgcacgacaaatgcgaatcccctatcaaccgccatcaagcttgtgggtggcaagacacagcctatctttgaagctgttagaggccgagccccatcagctggggcggcatttcctgcgatgaatggctttacgatcccgaccgctgcgggcataggcgggaaagctgttgctgctggtctcagcaagtcaatgggagctgccgctagtggcacggtaaatactctgcgtcatgttggtgagaaccggcttcatatttctgggtttacacgcgagcccgctgcatcgcgggtcacttgggtccttcacaagggtcagccattcttggctcttgtagcaaatggctacttccgattgtacaggatcaagcggtccatgctgcccaatagatcacggcaaccgcagctagttgttggaagcaaggaagttgaatttcggctgcctgcgaatctgtccagctcctgcggccctatgggaatcagcagtttcaatccagaattgatggtttg

SEQ ID NO: 15659 - DNA, 3010 bp, Emericella nidulans
cgaccacactatgtatccgtttgccacaacgaatcaacaagattttcagaacctcttgtcggtctacctagacgccactatgcatcctctgcttaaagaggaagactttaggcaggaaggatggcgtttgggacctgaggatccccgtgcaatccaaactcaggagggaaatctgaagcctgaagacattctgtttaagggtgttgtgtacaacgaaatgaagggtcagatgtcagatgcgaactacttatattggattaggttccaggaaagcatctttccggccatcaataactccggaggagacccccaacatatcacggatctgacgcacaagcaactcgtggagttttccaagaagaactacaatcccagtaatgctaagatcatcacttacggcgacatgcctttggccgatcatctgaagcaggtcggtggcgtcctaaacgacttttcgaaaggggctgtcgacacaacggtgaagttgcccattgagctccgaggccccataaatgtgactgtcccgggaccaatcgacactttcgtaagtgaagacagacaattcaaaacatccacttcttggtacatgggcgatatcacggatactgtcgagaccttttcggccggcatcctctcgtcccttttgttagatggttatgggtctcccatgtacaaagctctgattgaaagtggcttgggctcctcgttcactcctaacacgggactcgacacttctggtaaaatccctattttttcgattggagttacaggtgtgagcgaggagcaagctcctcgggtcaaagaagagattcagcgagtccttcaggaaactcttcagaggggcttcaacgatgaaaaggtccaaggatttctccaccagctggagcttgctctgcgtcataagacagcgaactttggcctcggtgttattcagaaaaccttcacctcttggttcaacggctccgatcctatgaaggagcttgcatggaacgaggttatcaatgccttcaaaagtaggtacgaaaaaggaggctacttagaggcgttgatgcaaaagtacctcatcaacgataactgcctgacttttacgatggttggtaccccttcatttaacaaggaattggatgataaggaaatggcgcggaaggagaaaaagtttgagcaattaactcagcaacatggttctgttgagaaggctgtgactgagcttgctaaagcagagctgcagctgcttgaagttcaggaaaaggcccagcatgctgacctgagctgtttgccgtctttgcgtgtggaggatatttcacggcagaaagagcacaagccagtccgcgaatctaaggtcgaaggcacagatattgtttggcgcgaagctccaaccaatggactgacctattttcaagctgtgaatgccttcgccgatcttcctgatgatctccgcctgctcctgccacttttcaacgatgcaatcatgcggcttggaacaccaactaggaccatggagcagtgggaagacctgataaaactcaaaacgggtggtgtctcgacctcgaatttccatactacatcgccaacagagatgggcaaatacactgagggacttcaattttctggtttcgctctggacaaaaatgtccccgacatgttggaaattctcacagctctcgttactgagacagacttcaccagcccttctgctccggccatgatccaggagcttttgcggctgactaccaacggggcattggatgctgttgcaggaactggtcaccgatacgctctaaacgcagctgctgccggtctttctcgtagcttctgggcacaagagcagacctcaggtctagcacagctgcaagctacggcgaatctcctgcgtgatgccgaaacttctccagaacgcctagccgagctgatcgaaaagcttcgtctcattcaatcattcgctatctcgaagacatctggtcttcgtgttcgcctcgtctgcgaaccggccagctcgacccagaatgaatctgttctgcaaaggtgggttactggactgcctaaggtcccgtcgcccacgtcccaacctcaaaggtttgacttgagcacaccttccaagaaggcgttctatgatctaccttacaaggtttactattctggtctggctttgcctaccgtgccatttacacactcatccagcgcgactctgagcgtcctttctcagcttctgacgcacaattacctccatcctgagatcagagagaaaggtggcgcctatggtgcaggagcaagcaacggtccggtcaagggattattcgcattcaccagctaccgcgaccccaaccctgccaacaccctcaaggtcttcaagaacagtggggtcttcgcgcgtgaccgggcttggtcagaccgtgaaatcaacgaggctaagcttggtatcttccaaggactcgatgcccccgttagcgttgatgaggaaggatctagatacttcctgaatggtatcacgcatgagatggaccagcgctggagagaacaggtcctagacgtcaccgccaaggacgtcaacgaggttgcgcagaccttcctggtagatggcacccggcggtctgtctgtctcctcggtgagaagaaggactgggccgaatctgagggctgggaggtccgcaagctctctatgaatcccaatggttccaacattccctccggtgatgccgcataagctgcacccttcctttctctctaactccccactcgtcctcatatgctatatacaaccctgtgtaccgcaatgtaccaccaatgctctaacgaaacatgtaaaatagatcatctttgtacaatatcccatctctctgtgtcatacgtactctttcccatctctttttggctccaacccatacagcatctctcacgcgcagaacaaagaacaacccgacccatcttcaatctcgcctacttccatggtcgaacgatgggtcaaacgtccagttctacggacaagcgcaatatcaatgcggaatgtgaaccc

SEQ ID NO: 15660 - DNA, 480 bp, Emericella nidulans
acccgttgctattataaccatggtgatttttactatggagaacatgacagatacagtgccctggcaacggctgaatcgcgctacttgagcgctgttcactaatcacaacacttattgcccagtgccaggccttgcaacatgcttgccctgctgagactcgattcatacatgatctaggtacggtaggcaaaattatcggaagtcgtgccgagcgcatcaagatacatagttaggctggagacctctcgatcatgaagagtactcacgacagtcgcatcgacaccgatctatgcgggcttgtctgctatatctgaacagaccgaagtgcgtggattgcaaatggttctgcacctgatcaggctggagacgtgcatagcaatcacggatctctgtcccatgtgagtaccgtgcatgccatatattcaaccttcattgtggcgaggatactcctaacttttactcgggccctagcctgagttg

SEQ ID NO: 15661 - DNA, 659 bp, Emericella nidulans
  unsure (1)..(659): unsure at all n locations
aaacgtgcgaagtgagagaaaaatgacgagatagaagagaaaaggaaagtcctataatcgctattaagcaatatagagtgaagcggaagaaagaaaagattgctgtctcgcgaacaaagtgtctggcgtagattttcgagttatccgcggcggctcgttctgtcgctcttttttctggacttttccttgattgggaatttctccttgggccaatgacaccactagtccatatttgagctagttgctgcttatcggtctatctccatgtgatttggtagccctaattcttgattagggctaatgtcgtcttcaacatcaatcttacctcccccatacattatctgcagaagatcttgcctgctagccctaccaatcttgagaggagaacataggcatttatcaatatgcagtagaccacccttctgccgtaatggatctatgccctgccgctgtgattctgcggaagtccattgtcgatncgtagtgccaagaggttactccgccgagctncgtggtgnctccgtccctgagctacctncgaggtcgagcgcccttctcatctgnggatcttgcgtgactcgacccttgtgcatttccggcgagtacacatgattcgagtccacggtaggaaggtgctctgttttttttcttctctgcat

SEQ ID NO: 15662 - DNA, 624 bp, Emericella nidulans
tcacatcatgattagtcctatgctcgtcggacctaagggggcacaccgcttctacacgtgtgctgacagctggtaacggcccataggcctgagtcaaaatgagacttgtgatcgtgagactggcgtgatcgatctataagcatatggtcgagaggattgtactgtcatttgtgatgcctgtatagaccaaccatggcatcacaaggattctattgtacatggacggctgtatctatcatgatatcgagactgtgatacctggcgagagatcaatgatcaggatacagctctgtacactgtctctgaccactatcgcgcattgtatatttcatgacagcgcgctgcatatttattgggtgctcaagtgaaaggactacgtgtaatatatactgtactgggatgcatggaccgacaacgcgatagttgactgtgtcggctggagcatatctcaccgaatgccgctctcttatgtccttgcattgtcccccgaatccaacccaatggctatgatctgtggcgcgagcctaccacggatagacctcacttcaatcacccgtaccgctggtgctcttattaaaaagattgtgttcaccgagcggatgccgctttcgcgatatggatcat

SEQ ID NO: 15663 - DNA, 555 bp, Emericella nidulans
ctatgcgaaaccctgatggatactgtcagagaaccatgctgttcagtgctccgagccagccgtgggggtaaagcatctgccacttttccgcgggacggatgtactgacctgcccggactcactcctcctacgacctggagagtcgtcttacaggaagccgaagggccgtggtgcaaccgaggttctgcatacgtcacatgaactttgctggaaggaaacctattacatgtcaatacttcggggggcgtttactggaatctcgtacttggacacgcgcgtactgaactagggtgaataatttaaatgcatcgtaccgggcgctctatcaaggcttagggctgtgggagcggatgccgggcatggctggacaggaatcacaggtcgaaccgggtatacgcttgacggttcttgtatgtttgggggaaatcgaattaaaggccgttgcagtatacgagtgatggtgctacagcaaggtaggtatgtttggggcatgggcggttccattttccgcttgcggataccagaggtgggcctgtgaggactttacgaactttt

SEQ ID NO: 15664 - DNA, 2000 bp, Emericella nidulans
catagcttatcagtgaatgcttggaacttttgcgcttttgctatgctatctcttccggacagtgaaagggtcccgcaacaaccggacacaaagagccgcacaccaccatcagccgccttgatcgcggtcccgaacgcgctcgattccggtgctgtcgaccttttccatttacccagtgagcgaagggtctgtaccattcctacagaccctgccgtgaagacaggaatggtcatggcggtccaattgactcggactttttcatcggaagatgtctacgtcgcggctgcgtttgaagacggtactgtaatggttttcgcttgccgcggggtttttcatgacgatgagccctcggttgacgccgaaaggagttggaaatgggaacggctctacctgaccaaacctcattcgcagcctgtcctttctatagacctcgctccatccagagagtactttgtttcttcatctgctgatgcggttttggccaagcatcctattccgccacttgatgtctcagatgcctgtgaaacaccattaaagtgtgtcaatacaaagcatgccggacaacaagggttaagggttcgatcagatgggaagatatttgcgacagcgggctgggactctcgggtcagggtttattcgtgcaagacgatgaaggaactagctgttttgaagtggcataaggagggatgctatgccgtagcctttgcagatgtttcgaccacgcctactgaggctattgcctcggccaaaattacgggcgatatacctgaaggcccaaacaatgctgacgaatcagccgtcattcaacatgaggaagcccaatcttcgctcgcgcagatccagcgccaacgaagtcttaaagtccaaaagacgcattggctagtcgctggctcgaaagacggaaagatctcattgtgggatatctattgagtcataagtgctatgctatttacgaatgtgacaatatatatgtcgactatgcaagattgaactcgctcgccccagccaattgctccttcatcttggctctcatcttctgcgccgcgagcgtcgtgtccgtagtcgctgaagggcgatcatcgtcatcatcatcatctctgccaccaccatacccagtagccttcctcttcttcccgccagcagatttccgctccgctttaaaatccttcttggtgtcctccttcccaggccgcagacccggtacattgatcttacctggccgatcccgcagcgcgaaactctttgcaaggtgacccaagtgcagctccttgatattgaagatatgccgctcgttcgcaacgtgcgtcgcataagctcggatgtgagactgatatgcccgccgagccatctccaaatactcaggattgtccagcgcccaacgctccagctcaagctgccattctgtggctttctggtcccagtctttactctgggactcgatgttgccaccgaagccgcgcttgagaatgtcgtctgttgttgagcgtgtcagagcctttccgccatcgcggtacccgcgtttcaggatttcgacgtagttctcttcgcagccgggaagtaggaaaacgagagcgcggccgtcgcggcccagacgagcagtacgtccaattcggtgaaggtgctcgtctgcgctgaaggcagggtcgtactcgacgacgaggtcgacgtttggaaggtcgagacctcgggatgcaacgtcggtacagatcaggacagaagggtcgcgattcttagcgaaagaggaaagtgtggatgtacggacgtgttgcggaagggagccgtgaagtttgtacattgttacagcgtttgaagagttcgagaatgcagttgcgggcgcaactgttccgtgggtcgaggctggcgtaggcttctctttttccttttctttttcgtgctcgctgtcgcttccttcgtctgggttgtcgcctccagttgctccgcaagtttccgtgtaaaacttcaaaatggaaattgactgaatcggcacacgaaacgaagat

SEQ ID NO: 15665 - DNA, 4238 bp, Emericella nidulans
atcaataatacgactcactatagggagacccaagcttaggatcaattatacacttctaattccactcgataatcatcgtacccaacaaggtcccttgccaagagagcctgtcgttgggcccctggggaagaccccatttttctctccaccaacgaaggctccagttttggccacacgctgagcttttcctcgattcagcgttagacatcaactccatcgcctcatctcacaatcattagcccaccaccccccctcctttcccttttatttcaatttcgctctttatctcctcagggacctactcaatcgttacttatcgtcactctctgccccgctaccccgccttcacaaagatgcctcccatcatccactgcgttcgccacgcccaggtatatccattcatctcaacccctcaccaacagtcttaaagagcccatcaactaagacgagaatacacagggcctgcacaatctctgcacagagaatcatgtcatcccggaccccttgttgacagatctcggaaacgaacaatgcgatcaactccgcgcatcctttccccgccacgataagatcgatctcgtcgttgcctctcccctccgccgcacaatgtacacagctttgcaaagcttcgagcccgtcttcaaggccaacccgggtatgaagttgattctgttgccggatatccaggagacgagtgacgttgcttgtgatacgggatccgatcccagtgctttgagaaaggagattgaggaaaaggggctacctgttgatgcgagcctggtccatgaggggtggaatgtcaaggtacggtttaatgttgagaggttcctagacaacgtgactgatttggatagactggtcgctacgcacccaccaatgctgcagtcggagcacgtgcacgcgacgcccgacgctggctaaaggcccgaccggagaaggaaatcgtcatggtctcgcacggcggtgtcttgcattactttaccgaagattgggaggacagcagtcagttccaaggtttgtctatcccgcaaagatgctgtacgcatctctaactcgatatctccaggaaccggctgggtcaacacagaatatcgcacgtacactttctcagaccagatagatcttgaagatctagaaggcaacaagctagactcggacaacgcgagcctgatcgagacgcccgagtcccgccagcgccgcggcaaggagggcccgacggcggaccgtgagaagcagaaggagctgtataaaaagggtgtgcaaggatgggatgaccaggggctgcagctcagtacggctgagcgggaggcggctaagattcctgctgggaaggaggttgacggggttcgtgtatagacggaggggttagactagatgtctaggattgtgatctgtcgacttttggttagattagaggatagaaaaatgatttgtcaatctcttgggaaaagtagctctttattcatactgttgttaagataccatgtcacaggataaattctagggaacaatgggcgacattggatcaggaattgcatgggtgttactttgacgatacacattgagcgcctactgcaacaaagaatatgataattatcaataaacaatggttcgagcacccgacggctttatcttgaagttataaaaaccccatcgctctctgggctagatcgtcaacacagtaacaatctcattctgtctactgtgagcttccaacctttcgtctctcctgctcactggtacaggaccgctaagcaactaattccatcactacttcttatgttggcatagacttgctctcgctcttttaacaggtacaaccgttcattttactatttaaaccgaccaggtacgtttcacctgaagcattcccgctcgctgatgtttctataggtagaccggaggcgccttttaaagctgaatacaagaccaggtacgttcccttgatgcctttcttataacatttatctagaggttggactggatcagtttccacgaagtttcataccggccagatgcgttcgtctcatagtatcttaattgcttacatctacagaaccagataagccgccctcatgtccatacaagcaaaccaggtaggcctcctacaagcatctgctgccataacatctctaggtcgtactggactatactcttctgtactctttacaaaccccaggtatgttcatcccttagtatcgaatctctattgctaacatctgtacatcctgacaaaccatcccaacgtccgtacaagtatagtcatataagcctcttccaagtagctccatttctaatccctaggattgaacaagattattctcctggagaaaaatttccaagtgctgactccatgaggcttagaaagactcgttagggccgcattcaagcaagaccactggtggtaactttcatgcatactccaatcactaacatgtatacgcccgatatacttccctcaacattgaccgaaatccctttcagacatgaagtgaaatctgttatccatctgctctaccctagtgcataggtgagcttcccatcaaccactcaccagctgacagtctcggataggacatacctgattgcaccctgagcaaattggcattctttggggaaagaaggaatagagcaggccttgaccctgataacacaagctagcttgctggtcacgccaaatttcaccgaatcctaaggtacgtatacatactccacccctcgaactacagattgaccttggcatcgcttgtttgttatgaatacaatgcttcactatgcatggcgccagaggatcaacatcacttggatggcaatgagtattttatggccccattgagtgtgctgacgctgcatgtaatcgtccacgaagaccaaagacaacatgtaatgagcaagaggtaagcttacatactataatggtcggttatatgccaccatatatgccaccattttctgggccgaatcacatggatttgtaccattgaaaagcacaagtggccttccctactgcatgctttgtgttatcgaagcaggtgctttaactttgggcttgtcatctgagagcatataaagagtcagaaactgagtcgagttttatattatgaggtgacatagtgtaaactggtacaattttcattcttcaatcgaactacataaacaaagttaggacttgcgccaacaaactctacttgaatcaaggtccacacgaaaaataaattatgacgcgtcgagtaggacgatccacagttctcacaaggtctacagactaacagacctgatcacatcccctcatacaagacaatgaagagcccctcggcaatagcggcgcttccaggcatcatcccaactggcactctgtcaccgggtttcagtttacagaacagttctacccaacggttgtccaccgagaagttccaggcatgtggttgtttatcggcgatttccaggtccagtcgcgccccatcggcccgagctttctcaacaaaggtctgaacatcatgtagtagaacgtcatgtgagccaacattgacccatgtatacgctggcaagatctccttccaggacttctcagttccaggcttccactgcttgagaagattttccaggttcaaggcgtccacacgaccacgctctccgatagcgctttcaacacaacgatcaagaagtcgcttactgagcacgtctttgtgctgattgctctcgaacgtaggcgaatggttagtcagattaacccaggggtatagcagcaatgcgcctttaggtcttgctaagcctgtctcaggcggacccatcaagcaagaaaggagcaaatgcccgccggccgattcccctgccatgataattttctttgcaggaatgccctgattctgcaagagataaaggtaagccgccacagcctcgcgctgctggcttggaaatgttgctgcgggtgccagcgtatactcgacggagaatatgctcatggaaacacctcgagcagctgcgatttctgcgacacgaaggagattgacggcgggccccaaggggtcaccgaaacaataggcgcccccatggaaccacagaaggacaatgtcgctttcctgcggtgtctgcggacatcccggcggaccttggcagatccaatacccattacatgaactgttcgacacagggatacattagctggtcctgaaagggcccgagcggtttgaatttttgtagaatttgctgtcgcgctttgaaaaatgacgatcgttcca

SEQ ID NO: 15666 - DNA, 691 bp, Emericella nidulans
gtcatcctcgacctcatctgatcattgcagactgtacttgtataatccatcccactatcgactgaagcactctattccgcaattgaaaacgtcgaccgcggactacacgcacgggagtatagacctgggcaccgacacagtacgtctatatagtgataaggcactgctgacaaggtgctagaaagaggctgagcaatccagggcacaatacattcacgaggtcatgagagcatgctctgctaccacggaacaacttgagcacacagccgccctggctgcgacagaacattacctggagagatcacaagacaatcacccgcgtgcgcatggactatatctatgaaggctgccaaagtaaaggctactttgaaccaaagagagagatggccgaccttacgcactatattcggggcggacctatggagagacgtaagcaattccacggttactctggctccaactatacgtatcatgtaaacgctatccatgatcaccttgtactagtaacgccttctctgaacctgttgcagacctataccatgcttgatgactctcgccctatcgtgaccaactgcatagatgatgactgctctacgctcacggctgtacccaccacctcgcaacggagagagcgtacctttgactgaacactctggacatacatgtgcctgatgacaccacctaatgtcga

SEQ ID NO: 15667 - DNA, 757 bp, Emericella nidulans
  unsure (1)..(757): unsure at all n locations
gaagcttncgttctagcctcgagtgcggagcgtgattcccgctacggatccggtgataatcacgctcgtgggatcctcgagactcgcctttgcggagagctgggggaagaatttgtggatggtgaaaaagacagatttcacattcaggtcgagcaccttgtcgaatgccgactcggggaacttttcgaattcctcgccccaggtcgcgccggcattggcgaagaggatatcaatatgggacgttgtcttgctgacttctgataccaggcgctcgatctcagagactttggaggagtcggctggaatggagattgcttgtgcgccggggcgtttatttgggagggcgttgagggctgctactgcggactcgcaagctgaggctttgcgcgaggtgatgtaaactttggagcagccggcttggaggagactgtcgcgcgagtcagtctgggtacagtagctaggcgagggataggggattaggggagctgccgtaccccgttggagcataaaaaccccagaccccgggagccgccggtgacgacggcgaccttgcccttaagggagaagatggaggagaagttattcaactggacttgcttggaggcggcattttgatgacttgatctgtgaaagggtaagaggggagggtgttttgggtgggaaaagactaaatataatagttggggaagcctacccggtttagaccccaaccctccgaacttggttcggagtaataacttccaaaggtcttgttcaa

SEQ ID NO: 15668 - DNA, 181 bp, Emericella nidulans
agccaccctattgcgccgtggctggttgaatgagctcatttattttatcagagtccgcgccccttgacaaggtcagcttccagttcgtggaggatgaataagagatctttaccctttcaggacgatcacggggaattgacgtcgtagctttattaaacgcgtcactatgacgcccaggagc

SEQ ID NO: 15669 - DNA, 749 bp, Emericella nidulans
tctccagccactcgctactgattctcatcgctgctagcttgtgctatgcaatgaatgcctctaccccacacatggctgtatctgtagattgaccgctgattttaccggacatactatggatctgaataatgactgatccctggatctcgtttagtgacgatacgcataccgtagtggggtgtgcaagagtgccttagctataacctgctattgatggttcagtgacatagcgcaaacctatacctacatgtacgcgaaacataacgaatgactggcttgtgacctctgttggattctatagcggaaggtgattacaatgtatgcaggctaacatcatttgttcatgtgcagagctttataagagcattggaagacaagctcatccctcgcacgtctgacaagaggacggaaactaaactatctatgatctaacacatggtctagcatgtgtagaacggacctctcgcgcatgatataccactgacctgactgtgctgctgtatcgtaggctgagacgataatgacttgtgcctgtggccacatgcactggctattgcgagtcatgtatctgatagtagcgaatgcgcctgtttaactctcgcgtgtaacaccatcgctgcctctaatagtgcgatgtcattaccaccaaccgactgcagcgtaacaaagcacgccaccttctggatgtactgaacccggctgaagcccactgcctaggagctagcgccttcctgcgctcttggatcggt

SEQ ID NO: 15670 - DNA, 3803 bp, Emericella nidulans
cgccagtatgctttccatatggcgtggggatatcggcctgctgaagggtatttgcttgaattgcttctacggttatattcagaatatttagtctgtaacaggtgacatggctaaagtgcggcgaagtggtaggctttcgtatgtacatagtaatctaagcctgtactatggtcgatgtttctgaggaaaccaagagaatatatatctatgcagaaaggaaaagcgacgaagaagtgaaggcagttaagtaatcagcgctgtgacctggactgtgatctggactcctgtcaagtgtaagagtacagtcagaagaccaaaaagaagatataatgcaatgtgaatatgaatcaacagtcgtacatctttcctacatctttgcgcgaaccagctcgtcctgtttcagcctcacaaccccctgtaagtttgaatatcagccagctgaacactgcagaagcggaagtacatggatgcgcatccatccaaagctaagtaagaaagaagggaacatacctcctgcgtgcatgtggcgatcaaagtcccgtctttagcccaaatcttctgcaggacaaggcccctcccctcaccggcccaaggactctccatctctgtgagcatccactcatccgcgcggaatttccacgggttatggaaataaattgagtgatcgaggctaaccatcatcccaatctccttgtggtcttccctcttcttccgttgctcgagcttactaagagcaccttctagccggcgctgtagatccgctgcttcttcctccttgagctctttcagagcccgcacgatgtcgtcgtcatcaagatcggatgggttcttcagagcctttagagccctttgcagctctgcggcggacgagaatcgcgggatctcatgaacccgagagacggtgccgataaagaagctgtctgtgatatatgcgagagcagataggtgggcatgttgggcaccggcatcagagatcctccctttacaacgcacccagcgtctgaccctcttgtcttcgggtttggacgcacgattaactatttcatcccggactgattcaaacggcccgccgccatgcgggttgaatcgtgattcagcagacttcggtagacttggagggggagcagagggcattgacgaagcgtgctcgagcttcttttttccaccactgtttgctttgctgaaactcagggtggttgtaaagatgggccggccgcgctgccttgcctggactgttcgtgtgataaagcttctcccatcacggactcgttcgacgtggtagagaattgggatctcagaatcgccggcgaggacaaagtagcagtgcatgctgtggactgcgaagtcggcggggacggtccgcattgcggctgacagacactgcgcgatggcggctccgccgtaaatacctcgggcaccgggaggatgccagagaggacgggtatttgtgaagacatcctgttggtgacgacgaaccgcatagttagagggcgtgagattatgtagagtgagggattatgactgacaggtccaatgtcaagcaccggcgttagctccaacacgttttcgatctgcgccttcgaggggtccagctgcggaggttcgaagagcgtcacccttttcgccatcttcgattacagcggtcagatattatgtcgcaagggctagtatggcatcaagtgagttctaaagatgatcggacagttatttggagagtgaatttagagagtaatcctgagattctcagagataccgaaggtgccttcacgcgctacttgacccacggctagccccattacggtaatagccgaggtgctttctgagccgagtcaatactaagcctcgaccggaaataatgccagaaaaaggacaaagggcaaccttagtaatgagttagagggagggacaataatgctaatctaggtattcttcaataaatacaataagcaaaccaagctcagacgcagcacactacatgtgaaatacaaaaggtttctctttcattagtaatcagggtattacctcctctgttagtcgtgcgaggatgattccagtatatagtggatatatatatatgcgtgtcatagcaggtcgttcctccttgtcgcaaggcgaaggtataatctgagaatactcccgtgttcgtagagctgatcagaagggtctcaacgtccggcccatctcacccattacgtcgtgcatagcctctgacaattcagctccaatatcctccgtcctcatgtggcggaggtaggaatgagttgacccggtcagggtggttgacccgataggttttctgtaccgccctcggacttaatgatttcctcgaggagttctgctccaaaagacgctgtaattgctgtcgttgcatctcctcgtccgtcaatagaatcgttccaccatgtgagtttccggcattcgttctgttggcgtcgtgtgagtaaagccagagcgcaccaagggcatacataaacgcagccgcagtggagagacctaggctcaagatttccaagagatgcagaggaagtaagtcccgacataggatattgataaggacgttgaataacgctagggcattacatatcacgccagggctgtgagagtcgtcaaattagcacatgagcgtcgcctagttcgcagtcaataaccggataggcaaacatacacgagcagccattgaatcaggagcattcgctcattgaagtgaaacaggaacaggacgagtgaagacgagtacgcaagtccgatcaggacagacgcgacaacaactgcggccgtcctgttggcatgagcagcgctggggttctctgcgtccccgaaggccaggggcatcaccaggaaccttggaaatgggggttgtcagtgaattgtgtctcaacgagcacgggggtttgctgtatacccaacaagtgctgagtgagaagacgctagagccagacctctccaggatgagccttgtccaggcggttgcctggctggctgacctggcgagccaatctcatgataatgagaaactgtcgccatgatggaacggacgagcactcaagcggggaatgttggggaaacgatgttttgcgcagtgtccctccggcgtcagatattgatcgacagtaacagcctatgtgcacggatgggctagaaattagagacggggtccgaatacgaagagcgcgaccgcgaatgaacgaatggaactcgcggcgcaggacaagaaaggcttagaaataaatcgtcaacatgttccccaaatccactcagtcaaaagaaaaccagtttcgaaaagcaaaggcgatttcgaggagatggtgtcgaaggatcagaaggaaagctgagctgctgaaaggaagaggaggcccagctggatcttcaatgactaggccagccgcactatattttaatcaacagcaaggttgttgatccatcgtggcagcaaacaacattcattcttttcactggccaacagtaagacattgcattcccgaggcctttttcttaaacgtggcgctcagctggggactctggaatagatcttacctctacgcagactcaagagcccgactcgagtcctcgtgcaacgtcgatcgggatctaggcagaaaggcctaatgcacatcattcctgtttcgtttgtcatttttgtgtagcttgggttggcctaacacgtacagtgacagactggccaagattgttactaaccagacattataaggaagcgactatcctgcccatattaaatgcgaaatcatttaaggatatactgccttgtcctctggatatcatctaataaaaccccaggcctttgt

SEQ ID NO: 15671 - DNA, 890 bp, Emericella nidulans
cacggggtttctccgcctgttcccgccgtctgaaccgcctatttagaaaaagtcaccttgacgatcgcagttgggaataaaatcactccattgcctttatcgtcgaatatactaacgcgccagacggcatcgcgctgatccacaaatctcaattgtatatctgcaactaccagaccccaacgcagtggaagtgcaggctcaaaacataatgcccgaccaagaacccgctgtccaaacaccatcacaaccagcaccaacaccacaaacccaagccgaactccaactccaacacacaaccggtaccatccctaaccgcgatgccgactttgcccggttcaaaaactacgccgcctacacttttctttttggcgcacctatactgatcgcccttccgccccgaaaactagaccaccttaccgtcctacttaccggtgcatttgccgccttgggcaaccatattacccgttaacgaacgggcccggagtattctcgatcgggttgaattgtgcttttcgcgacccggttacattaacccgtcctgccggtgggaaagccctcatattcagctccccacccggccaagggggaatgttaaggttagtagtgtgtgccatgtaggaggtgtttttaagtagggtagtcgttcatgtttcccaactctcttctttgataattcaaagtccagatatactctttacgttgtttctttactttaacgatatatctctacttccaccatcaacttatccttatcttcttttccctttctcctctgcccacttcgtcatattcttctccttctcatcacttttttccttctcaaccaacttctccctatctcctttctttttatcactgttctccctccttcctatccatcatattttaat

SEQ ID NO: 15672 - DNA, 2327 bp, Emericella nidulans
gctaacaccgccgtttcagaaacacagcattcatcaagtgctggaggggccctcttgtggattttatataattggactggagttcaatgagcatatcacaaacaaggccatttagcttctcataatttatataagataaaaatatgcaggagagcggccactggcaagatagccattgcacacagagaggatcatcccctctagtgactgttcatttcgccatcttggagccaaactcataatttacacacgtttcattataaatttcgcagcaacggtaatacatctgcaggtacagcgagatcctatggcggccggatgcttccaggagctgcgtcaagttgtccaagcacagtagagcgtacttgtgttcaaagtccgcgagctgaactagctgttcccacacatcaccagctggcccggactcgagaaagtcggccgaattgaggtttgctgtgagtctgtctcgctcaatgctcccaagatcgttccaaagtctgccctctatggaaacctgccgccataacctttcggcgagatatttttccttggctgtgcggaagacatttgacccgtgcccgatcttgcaaatcagggacttggagacgacagcgcttttggcgtcgtggacggcacatgtgtggagccaagcgtagaatgtttggctgctgttgaggaatttgtgtgctttagcttgttgtagagcagcaatcattgccatcttgacttcttgcttgagatcgtatatgtcatgggaattggcattcgccgggaggttgtctaccaaagcaaaacgcagccaaagccttatgttgtgctggatggtcatgagttgagttcgagtttctacatcatatccagagatatccgatccatgcggtgtcgcgtgggaagcgacattgttgcaaaaagctgtctcgtggcacgatttatcgatatagtcagctacggcgtcggtagcagcatccggtaggttgaccaaggacttctccatttcttcgtcttcctgaaatatcccaacagaaagttccaccatgctatagatcaccgacgtactgagaagatactcaggacgtgcgttgttggccagtgtccaaaagatggcggcatatttaatatatctgtcgccgagggcttttccagtcgaaaagatgtccaacgtcttcaacctgcagctgaagaggattccctctataacggaagcctggatcacccacttcggtgtttctgtctgagatggtagtcgagcaaagtatgatgtcaatttttgcaccgtcggtgttgacgtgtcgacgagcttatttagtgtatcgccagacacaaagtcagtagcctcagcctgcacagcagccacgatgtacgagtccgatacagttggtatggcgaacaaggttttgtccagccaaagctggtcatctgtctgagaccgttggcttttagagagaatgaactggatccctttccggatggcactctcgagctcggccgatatctcgtcagtgaagttaaaggatgccacatttttcaggattaatatagcatatgcagtctcttcagcagagttcgagctcccccaggatccatttgaattttgagtgcgcaatgttcggatcagggcctgaaacaacgtaatgggaagttggaaattcatcaattcgtcaggcaatgcagccaggtgcccttcgctccagcgatgaatgtaagacatcaggccctcgcacaacagcatcgttggataataaggagagatattctagcattcagtaagcagaatcctttccgttgatagagctcaacatacccatttgtcttttaccattcggtcacagtggaaccatgcctcgcagaggtagcggatgcatttttcgatctgtggttggtagcgtccatcgtctgagagcaacaccagtgcagtcagaacattggcattggtgcttacgctcgtgtgcgtctcgtataggtatgtcgtaaaatgatgttctcgttcgaattgatcaatcaacgcttgcggcgaatagcgtcttccccggagttgaaaggctatcaaagccttcgccgtgtcgtctgcatcggggcatgccttgggaactgcaaactcagagcaggtcaccaaaatagaaggaagccttgctggaggtgatcgtaccgaatcccacaagtccatttaccttaatttcgtcttcaatctgcttgtccatttgtcgtaggctactgcttattttgatgccatgccgtgaaagattcgttgtgaccttgctgatttagcatttgatcaaccccacaccaagcaagaagaacctacccaggcccactaagaaaccgggggt

SEQ ID NO: 15673 - DNA, 689 bp, Emericella nidulans
tggcaatcatatggcagccttacgctcttgtgtatcctcgcgcggcgtctcgcgcggcatcgtgcatgtactagtgcgttcatgctggcgcatgctcatatgggatctcaactgagtcataactctcatttccctccgagggggcgcacggaaaagagagcttgcgatctaccctctgcaggataagcttcttgccccggggagagaaccacaggaccactgaccggacgataacccttgaacgtcatctccaattgactagttccggggactacttgagctccttctcttactctagttttgatcatgactatctttggctccatgcccgccggccctgtcgaccacggtgtggagggaaggcgtgatatactcccttacgtcgcaactcgatctgggcaatcaaaatatcttgcggtcgaccagacccacggatctcaccctggttagacttccgacaactagactgaaagggcctgggccgacgaactcactttatacctgcgtctttaacaaaagctggctcgaccgcagcacatgcattctaaaaccccttctgtcacctaagcttggacgcaatgtacgaccatcaccctccgttttgccaatcggagagcaatcgcctctgacctcaacggataggaccggatacttgaaatggatcgagacgccccatggaacatatgggg

SEQ ID NO: 15674 - DNA, 3479 bp, Emericella nidulans
ccgaagtgcccatctaggcaagggggaaactacctacaagtgatggagtgcaacttacattggagatcccatgcactccgctgagagatttagtgctggcataaggaagccttcagtgtgaggcccgagtctggcgttcgtaaatgcctctcggagacaattcatcgcatgaacttgaggcagctcaactgtttgattgtgtgcttcaagttgggccggtatgtaggctacatcctgaagctcgcgaatgacctgctggaacagcgggccaccagggttcgacaacaggattcccccaaccaaagctggcagtccggcagagcgacgggtgagttttgacgccttctcaaaaataatcttcttcgcttcctgcataatatcagtaaggtagtcttgcactgacctcccagtcaacttacctgataccaaagaagaggaagggcggaaatctcagggttacccgattgaccgcatcgctggcagcacgcagcgaacgtctgggcgacagtcgagaaagctcctctgtggcgaagctctgcaagttgagtaaagctactcttcccaatttgatcatagtcggcccttgtcaagccagattctccctgcgggccgtaggtcgcgttggacagtgtggcatgcacaaggagactgtctacattagaatttacatgactgcggaacttgaagtcaacgtacctagattcccggagcgcacgccacgaatatgaaaggatatccttcgggccgactttaaggtcctcaataggctcagcagcatggccttccggagagtcgatgcacagctgaggttttacttcctcccatatcctatcacacagtgatgcaatcctcgtatgaattgacctccagttctcagggctatcggacccttcacgagaaacctgagtgtagaagttcggagaggagataatgtacctaaaacacggtcagtcaagttctcataagcccgtttcaaaacctcataccgtaaggctgaaagatagccgtggagaggtgcatcacgcagagaagaattgaaaagtccctctgaagatgacaacttgccctcaagcttttccagaatcagctggacgacaccctgcttggttgtccaccacttggcgtctttgggatccttggcatctgctatcacaaagatcaaatgatataaaagagcaactgtatcggcatggtcagctctgctagtattgcttgccagaatttccgccttcgttacggcattcaacagctcaggctccccattactacatccagccgtatcgagaagcactgatcgcggaaacagcttcaagatgttcagtgctgctattcgcacttcgtcatacggatccataagaagatccaccagtaacctcaggagctttggtccaaaaatctccatgtggaacttccatctgacttgacgctgttcgggcttgttagatcctgccccaatgtaacgctcatctagacctgactcgatgacaagatacaatgtcttaactgccatgatatgacggtggtaagaagccgttgttcgcaaatctgccatgaggaagtccaggtagctctgcaaacatgaccgcgtctctgcatcatctctgatgtagacgatcggctgcttcttgcttaaagtagttcggggctcgactggattttcaatgtttgcaagaattccacccttcaagcggacaatcaatccacggaccatgctcagtatttctcccctagtacaggggtcagactctgcatggagagatggcaggctttttatgataacccttatagcagccgaagagagtggtttcgtggttgatggtgccgtgattagtaaagacagtgcagccatcttgatgctgaagtcatggtgaaaaagaaattggccaatgacttcactcttcaataccaacggtttttctccttgcttctcaaatttactgaagtaatctaataaagtcagcattgagaccatagtcggagtttttggtacttacgatcttcgtggaccaggccaattttctttcctagttgcaatgacgcgaaaagaagagtcaattcgttcgaggaagagttgctcatatcaccggcaagcaggctctccaaaggtaaagtccctaaaaagtaccggaaaccaatggtactgatcccaaaaagacgtagaagtatatgattagacagtttgtctacaatctcaaggttctgtaataggaaatttttgatcggtttcacccaggaaaaagcaagactatcctttttttcggtagacaaggcagaatcagtcgacggttcgagcctccgaaaaaaagttgtcattacttcaccacaggacgccgccaaatccaaagcttttgcgcggttcaggagccccagaagaagtatctgaacagccgcttccttggactgcgcatctgatgctgcttgctcggacgacttttgtaagaaccgagggacgtctattgaggttatccggcattcgtcttgcagcacagttggccatcgctccgaattgcgcaagagccaggactctaccagcataatcaactcagcgggaagtatagcttttttatgcaccaaagtctcgagcgcaatgatagaagctttgactctggatcgaggttcgccgaataaaatgctgggaagaacggcctccacaaaatccctctggattgcagtacatccatgctcgtgatgagacttggccataatcattgctagggactccaagaccagtttcataggcttaggctttacgtctttgaaccgggacaaaaacccttcaaacacggagaccagagtgtcccgagaccgagcaagctgtcgggtctccggccgttctgacacaaatgccgtgtcaagaaacgagctcagggcattgcatgcagcagtagtatgcccatgagagatgtacgctgaacagaacgtctgcagcagagagctgaaaacattcctcgttttcctgcagatgctgtcagaaacatatttgtcgtacggaagtaatgtagtttatactaggatgcagtcttactcaacattatcgcatgttagggtgaacttcactagagcacccttggtgattttgtctagtgtggcctcgggcagtatttgtatatcctgcgaaatcagctccatatctgtaggcccggcgctggcctcagcgctgaaaacaggtttggttcccatgactgtcaccatgcagcatgtccgtatgaatgagccggtcgatagtgaccaaatcctccgagacaagttgctttcagcaacccgaatccccgccatcgctcgatcgtatctctttttgccgcctgtggattctttccagtggacccaccaaaagggtttagtgccggcctatccttcctccggcccagtccgcccagccggctggtcaaaggactaactcgggaagtttttactctgcgattacgaggatttcgaatccagagcgaactcgaaggcgacttttagcctgcgagttttcc

SEQ ID NO: 15675 - DNA, 3934 bp, Emericella nidulans
ccatctgttcttctcggctacgccccctcggccgcatccttcttcatcgtctacgatggcgtcaagtgctccctatcaacgaacctcgagtcacagtcccgcagccatacaatcctcgcacagtcgcttgcgtcgtcgatgggcgagattgcagcatgcgcaatcagagtgccaacggaggttgtcaaacaaagagcacaggctggccttttcggcggctcgagtctgcttgccctaaaggatatcttagccctgcggcatccagacccgacgagaggcgcaaggggtggctatggacaggttgtacgggaactgtaccgaggcgcggggattacaattgcgcgtgagattccattcgcggtcctgcagtttagcatgtgggagacgatgaaggaaacatatgctagacggaggcagttggaagggccggtgccggcgtccacgagcgcaatctttggaagcattgccggtgcgatctcggctgggttgacgacgccgctggatgttatcaaaacgcgggttatgctggcgcggcggggcgatggtgcggagggcaaagccggggttcgacttagggaagtcgtgcagggaatctctgcggaaggctttggcgcgttcttcaggggtatccagccccgcgttgcgtggatcggtattggaggtgcagtgttcttggggagttaccagttcgcctggaatactatggagcggaggtcgaaggaggagtaaaacgttgaaacgcgatgtataatagttatgtatatatactgttagaggatagatactatagaggatagtacttatagatgggctatttctcagtcccatgcacccagcctcgttactcgggcttgctacagacgcccttagcatttgagatgcggggttagactgacttcagaacgtcgctctttactgtatctgaggctgctggcgggtatgtttccgtttcgcctcgatggcagaccaaactatcgtatcaatatcaatagataggttctgcgcagatagcttatacaagcatagcatgtttagggtgctgggacctgaaaggatgtggtggcttagcaccggcttaacaaatccattcactagctaacaacaggcacaagtaaaacaacttcatctcaaatccccgcttctcctcatcctcttcttctcttaggcgtcatctttgtttggtgcacttaaactttgtctatcctgtgtttgttgcatgcttttatgctttttgtaactacagggaatgcttgtctccactgccgcctgtcttatcaactgttggtgagcgatcggcctgtcacaacctccgcatcacccggttcctccgcactttactgcttcacccgcactctgtcgctgttgtcgcctgctgcatggcacgcaaattaagccaccaaagggtcacttatggtaagtcaactgcgtgatcataacactcctttgtttctacctccttctttccgccctcgccagaccccgtccatatctcacattcgcgatgtctgcacttgatgctaacacaagcatcggcatttatccagtgctccctccctctgatgcacccggtggtcatcggctgggcgtcaatggcttagcgatcgactcagcgagttccattctgtaagcgttccaatccgttccaacactgcttaccgagataaacgctgctgtcgcagtcctcgcagtaactccgtttctaatcgctttctttgaaaacagttactcggctggtcgcgatggagtgatatgctcatgggaccttgaccttccctctcttacctcgtcttcgtcctcagcccggcaacctggtcctacaaagtttcgaaaccaggtccaggcgatacgcattgggtcaacgatattgtcttaacacaaaacaactctgccctcgttacggcttcgtctgacactacggtcaggttatggcggcctcactccgagtccactgatgtcccggagccgattggtaaacacactgactacgttaaggctcttgcgagcccgggttcccattcgacctgggttgcatcaggtggcttggatcacaaggtcaatctgtgggacctcaatggaaatgggcaaatcctcagtataggcgcgtcgggcgcggagcggagtgccaagggctctgtttacgctttgggcgctgtatcctccgtcattgccagcggagggccggagaaattggtgagggtgttggggatccaaagtccggaaaattaatcaccaagtttgtcggacatacggataatatccgggacattctcattaacagtgatggcgatacaatcatgacggcttcgtccgaccaaaccgtcaagatctggtctctgacggcgggtagatgcatgcacacgttgaccatgcataacgacagtgtctggtcgctgtactctaaccatccgaatttatctgtcttttattccagtgaccggtccggcttggttgccaagaccgatacaagaaatgtttctgatattgaacagggtatctgcgtggctgcattgcaagagcacgagggagtagtcaaagtcgtggcagctggagactatatctggactgcaaaccccgaaatcagtatcaatcgctggagcgatgtcgatacggctgctgagatcgatgctcccagagcccgtggtggtccagactctgacgctgcacagtcagatgacaagtcgccgccaaaggaaaagccaactaaggtaccatttgaatcgcttttacttctctcaaacacatctacgctacctagttcacggatacctcaaggcgattccgcctcgaatgggcagtcatcctcaccacggcaggatatcgatgatgagctgggcctcacgcttcccgcttattctctgcctgaggagacagtggaaggtcagcatggactgatcaagtactgtctcttgaatgaccggaaacgtacactaacccaagattccgcgggcgaagttgttttgtgggacctgcttagggtaaatttcctctatttctattgaaaacgaacctcactaaaaaagtctagtgtgtacctatcaagtcattcggcaagcgtcatatggacgatgtggaattagaggtcaacactaatgagagcgttgcgcactggtgcacgatcgatattcggacggggaggttgtctgtaatactcgaaccaggccggtgcttcgacgcggagatttacgcagatgaggctgatctagcggactattcacaaatccgcgaagaccaaagatgtatgtttgcctgtttataattaagatttctgactaactggaatagtgaacctggggaaatgggtcctccgatggctcttcgctccattggtggatgaacttgtcaagcgtgatgctgagtaccgtgccgaagcgaaagcccgagcagaggagatggtcaaatctcatagcgtgtccgcgccagtggatattcctgggaagttgaccgtgccaataccatcagacccgtctgccgttccgggacgtgattcgattgccagtcctacaactccctttagcataggcttagcaacaacccctggttcattgacctcgtcggtgctcaaccatggacatagctacaacaacctgggaatgtctcctggggaatcttacgatcatttgacgtcgcatcatagtgtcgatatggctcggagctcaatgtcggataggtcaagtgactacttttcgtccccgaaatcgcatgcagcgatcgatagtgacaagccgttgcctacaccgggcgagcagacgccaactcccgctgcagccagtgagcctgataaagaggagcgtaaaaagggcggctcactctttggcaagaagttccgaatggactttcccaagaagctaggacgcacttcgtctgaagtcaagccccagatccaggaggagaaggcggaggaaccagaaaagacgtcggtgaaagaagagaaagt

SEQ ID NO: 15676 - DNA, 516 bp, Emericella nidulans
  unsure (1)..(516): unsure at all n locations
ccggtccatctcgatcctatcgcactgtccatgatctgcactatcctacatactagatgcttatgacatgagatgactcgtgctaacagcaacacgaaggcaagaagccacttatgccgtcagagctaacttggtgcccaccattgcatccgcctgcgtgtagtgctgggtattaaaagatgcaccagtgtccacggtgacaccttggccgataataaccttgactgccatgcgggcatacgcccgaggattgacttagatctatcaccagacgggattatcagagctgcatgatcccaattatctcgggctacgactagttacctagtcagatgaatatggatccaacctgcacttgctggcaacctcaacgacgacggatttgtcagggattggagtcccacgaggtctcattaccggtctttacctgagcctagagncgtgcaatgacgctgctggagatgacagtgatgtcttatcaagatagatcgcactggctactgagtaactctgtaa

SEQ ID NO: 15677 - DNA, 4094 bp, Emericella nidulans
ctaggtcaagcccagaaacgcgcggttgtcatcgaaagtcgtgactcagcggcaggcgctattaacggactctcagcgacagcaggcgaatggatctcccaacgggactgcggcaggtggcaagaggaggtcggagtttgctcgacgcgcggcggagattggacgaggaatcacggcgacgacggcgaagctccggagattagcagaacgtgagtactgctagagcttctataattgcgtttgctaacgctgcgctagttgccaaacggaagaccctctttgacgacaggccggtcgagatttccgagttgacctatgtcatcaagcaggaccttgcgtcgctaaatcaacagattgcctcattgcaagcactcacactttcacaacatccgaaatccaaccggtcaaaaacggatcaggagggggagcacaatgataatgtacgttgaagtgaggatacaatgatgagttgctaacgtaggtcaggttgtcgtcatgttacaagggaaactggcagacgtgggtgcaaattcaaggatgtcctcgaggtcccgaccatgaacatccaagcattgcgatcacggacagaaaacttcgtctcatccgtttcgtccaagtcacaggctgctcttgacccacagcggtctgattctccgctatatccttctgggcgaagaacaccgcagcccggaggctcctcggatcttttaactctggagccgtcaaatccctctcctctaggccgtccgtccatgcagtctgaccagcaacttttgatgatggaggaggctgagtcaagtaactcgtacatacagtctcgtggcgaagcaatcgacgcaatcgagcggacaatcaacgagctaggaggcatctttggtcagctagcgcaaatggtcagcgaacagtctgagatgatccagcggatagatgccaacacagaagatgtggtggacaacgtccaaggagcacagcgcgaactaatgaagtactggacacgagtatcgggaaaccgatggctaatcgctaagatgtttggagttttaatggtaagtcttctctgtgcatctgatatgcgtaattgctaacagatcgcttgtagattttcttcctcctctgggtattgatctcaggatagatgcacatactacttgttttaataatgtattactattgggctgcgtttcgtatctacctttcaacgaatgacgcatatcctatcagtatcccttggtgctctttcattcttgctttgtcttgcaattggcgcacctagatctcaacacgaattttaggtacctaacactgaccagtgaatttctcttctttgttcggcttttctctggtgtatacctatgaagagtgaatcccatagatcgaggtcatgataaatttgctatttgtgtgtgaatagtcttaccttaaacacgggcgttcagcaaggtcttttctgtcatcgacagttgtaagattagttatgaaagttccctaaggtgataacaggtattcgaatctggatgcagctaaagacttagccaggcatgcgctgcgcgtcgttgcgggcgtcgttcagttagggctggatcgcttggtttctctgggcgtgacccgcccagcttgtgttcgaatatgaggggcaaaatatgggaggagagacgatatactgttagcactgagatggtgaaaaggaagatagtgatgatttgcgcacattttcgggatgtggaaggtacgggcttaggttcgaacgggtttcgctggattggagtcgctctagcacttctctttttatgtccgcattctggaatgatacgagacgacggttaactcatagcgatgtatgaaataataagtgctagcggtcataacaaatggctcgcattcgagctggtaactctatcgctcatcgtgaagtcgttaagataaacaaagaccatatgggtcacatgacaagagcttaaacatagatataaatgaacatgtgcagcaaaagaagtcatagcaggcaagcaaggcaaggtaagcctcatacagagccatcgccctccatcttcttgctgcgttcccccttccaaacaaaccaactggccgtgatgatgagcttaatgcacatggcaaaccagagactcgccgccatctcggtcaccttggatagacccccggctgtcatggccccgagaaagagtgcgacgaatccaccaatacgcccgattgcgttagacgttcgcccttaacggagcacttagctctgggtcgacgagcaagtcgcaaaggagtgtagtaagtacgacagtggggagctcatcaaactttaggattcgggatgcggtgatctgcccagcagcctggaaggctagcagcgagataggtagcacttgcatccattggattggagctcgaggatcttcaggctttgggtctacaactcccagttgcactaagagggcggctaccaggatgcatattgtttgcacaccaaaagagagcaccaacgaggaccgacgacaggcacccaggacgcggcctacacggatgaagatgacgtttcctatgaggaagactgtaagggcgatcaaggatttggcccagagataagcggggtatgcgggttggccggagacgcctagagctatgaagaccgtgtttcctgaatctgtcagaggacatacattattccaacaataggattgctcgcttacctgtttgcatactggagaaactcccccatgcgttgaaggacagaccgtcgacaagaccactgacgaagccgcacatgacaaggaagatgtcggtgtgttgggtattgacgttgcatttcatgtgcctggaaaagctggattgccatgatacaggctcctcatcggagagggtaactgtattgccagcaagagaaacagtagtcctgccccccacagaccataacccgcccggatatctggaatcatcttgctgcccttgtggccccgtcgcagtatcccagtatgtaagccggttgttgcttgtattcggtgccgttggagtgctccctagcggggcggtctctatctcttttaggaccctaggggggtgctgcataataacggcaacgaaaggaagggagaaggcccggcgttcgacggtaaggcttatttatatgagacagagaagtatagataaggttcttcaatcaagcagccacagggcttgtggatctgagcaagctattctgagagatattgatagattcgggcagattctagcctgctgggcgcaggtggcactcaatatatgatcattctgtccctatctggctgacgtccgggacaatccctccttcaaaatgggtccgctctggctgggataccgcatgagaatcaatagcgagaacgccaagagaaaagccctaagcccatcagcccaactccgactcggacgaaaaaacaaggtgcatgctcgttgatctatcaggtatccggagtataaccgagcatgaccgtccagacccgcgtgtttgatgttacaccgctgtgtttcaaaggcggccgtatgagtgaggaatcgcataacatgcgtccaggcaggcggcggagcggtaacgacggactgaatagcgtttacctgtttaccggctgacccctttcgaggctctccggctccggtgcatctcgattccgtatcaaaggggcttgcttggccggtttcttggcgcattccgtcatggcctggcccattttcagttcaaggaactgtcgggagaggtggcagtgatactgagatagtcagacccgtgcccaataaaaccctgagcgtcgattcagacaaacagtcatttgccatgcaaattgctccttatcttatggccgatcggtggggtccgccaagggagagacgtccggagaaggtcctgatgttgcaggcagcttcattctccgtcattcttgtccaaaattggacgctcgacgctgtaatatcttggtggagcgcttggcgaagaatgatgggaccttgtggtgacgatagccgacgggagataccgtggcagaggaaccataaaaaagaggagaagcggagtgcctggggttgaagctgggctgccgtgagagcaaggcggatatata

SEQ ID NO: 15678 - DNA, 2790 bp, Emericella nidulans
cgcgtgctatagaggaatgacgccccgttaggccagttgggcgtcgactccatcaagcgtcgacgtagtccggagacggaactaagcacgcaaaacggattgggggctcgaaacagggaattatcgacaaggaaaattgtgagattggcaggatatcacctcactttgcggggaatgccatcctagacctactccggagtctccagtaagcggacagtcgatagtcaggggactcagagcaagcggggacatttgggctctaaaagccccaattcggatttgcagtataaaggacagcttcctcttcgccccctgtcctgagtttgatttttcccgctgtcaactgcttgcaatcccctgtgaagtgtggacggagagtaagaatgcgtttctcaacaattctctcggcattcgtgctatcgagtgcggcgctggcaaagcccgcccctcaagtctccccatcctcgcaggaaagcattcagccgaaggagcagagtgttgcacaggtaccaacaggatctgcgccagagcccacgacgactgtggcatctgagccgactgcaagcagccaggttgagcagcaggagaataccaatgcagatgaaccgcagacaacgacacgtgccccagctgccacggcaagccaggagagcactgatgagcaagggagcggcttagacggtgtcttgtcctccgttcttccttcctcgagcgccagtgatgctgatgaggctgctgccccctctgacggcaccgctcctgctcccgaaacttcagcttcaacaagtacagcaaccgaacagccgacgaccaccagcagtcctaaaagcacggcgacttctacttcctcgggagacgatgataacatattggaaggcctcattccggatgggacgactggaaacccgatcaaagatttcgggaatcttctttcgggcatcaccggcctactctcgcccacattgatcaaggatattgaatctttctttcatcacgtcgcctacttgcttgatgacaagacaaccgagcaggccaagtctctgattgaccttgcttatggcctgttgaccaagaacctgatcaacaagctcgagacccttcttgacagcgcaagcgaactattgacgccggagatggttaaggagcttaagcaactgctcaacaatgacattccttttgctgacgccggatctattcaagcaaatctttgcgctgttggagcacggcatcgatcttctgacagccgaatttgttaaggaggtcaacgcgctgattgtaaacgccaacaagttgttgacacccgagaccgtgaaggagctccgatcattgctcgaggctgctggccctctcttgactcccgacttggtgcacgaactcagcaccctagttaagaacgctatagacctgctgagcgcggacttcgtgaagaacactaagggattgatcaatacagtctcaccagtgatcacgaaggacttccttgccgaggttggtggcttggtgggcaacgccggcgacctcttgacgccagaattcgtgaacgacacccagggattaattgaggccgtcggtcctctactcagcccatcactgttcaagcagattagcggactcttgggcaacgccggcgacctgctgacaccagatttcgtcaaagagacccgcagcctcattggtgccgtcgcccctgtccttactcctaatgtccttaaggaggtcgccactttgctaggcaacgcgaacgacctccttactaaggacttcgtggacgacactcaaggcctcattggagcggtcgcgcctgttatcacgcccgagcttctcaaagaagtcggcagcttgctgaacaacgccaacgacctcctaacaaccgacttcgtcaaggacactcgtggcctgatttccgaaatcggtcccattgttgaggacggcgccattagcagcctgctcaccaacgccaacaacctcctcacgcccaagttcgtcaacgagacgtccggattgatcaacgatatctcgccggtcattacacccgatctcctcgccgaagttggcgacgtcttggataacgccaacaagctgctcactgagaagtttgtccaggaaactcagaacttgatcaacaacgttggccccggcatcacccctagcctccttcacaatgtgtccttcttggttggaaacgccacaggtcttttgacgcctaccttcgtcaatgagacaaagaacctgattgacgaggttgggcctgttatcacgcccgaacttcttgcccaggtcggcggtctgcttagcaatgccaatgacctgttgtccaggaagtttgtcaacgagacgcagactttgatcgaggacgtttcggaggtaagaattaacccttgaacagtccctggatgtccagaaaaacatttgctaacatgcgtttcccttctagttgcttcctgctttggttcagatcctgggtaacctttgaatcggttgaatttttttgtttcttctgttaggccatgaataatgggcgatgactttcatttacatgtgtatatggatacattttttcgacgtgatgaatatgtcaagatttatgcgtcataataataatgatttgaattccacctcctgactcggttcgatccatattggagacttactgtcaccacggcgtgcttgcacatatattgtcgtaaaagcgtcacaaacagtacgtttgcacccagctgactgtagcttggaatttggccatataaatggatttgaaatcaggcaccgaccccgtcaccggagccccat

SEQ ID NO: 15679 - DNA, 820 bp, Emericella nidulans
tgtcgtctgttggaggacggcgtagccacggttccggcctagatatctgtgcttcatgtccgggactctattctaccgcctagagcagtggcccactggcgctctcccgggagagatcagctgatgcggagcacatatataccggacatccagcgcggacggcctggcctgctcattgcacgttcacaggcccggaactgcaacctaggagcaacctcatcccgtgaggcgcacggaggcccgccgaagtacatgctgtctcatggaccccacatcgcttcttgcgggtactgcccggctcaccacaataatggcttcggtggatccagcgcattcaaggctgcacaccgaggaagagcatgcgattattcatgagaccgcgaaagagcgacgactgaatgcccatgatacgctgacgccaaacaggacccttgcgtacgggcgtgcttgatacaccatggcctagccaacgagaatttgtcgatgataccaagagcttaaatacatggagcttatcaagccaactactgtcatagggttaccctgagcgtagcttagtaatagaccagcgtaccgtcgaagccctggtgtcatctgcaaagaccattgacatggcggcgccaaccctattggtttgggaagcttctagcagaccctttttgaccttctcgtgtagacgacccggtttattcctaaggcccggggggggccccacaaagtcaagaatgggaaaagccttttagagagtttcaacgttaaaataaactcttaggaattccttttgggtcaaattgtattttgtttgtaaaaacaagggcca

SEQ ID NO: 15680 - DNA, 933 bp, Emericella nidulans
aggagatgccgggggatgcaactgtcgcttctcctagtgcgttagaaccgaagcttgtaagccgggaaatagctgcgacattgttacagtgtgcgctgaaggagcggacccctacctggagtaggtagcgatagcaggtgtgagatattactccctgagcactagtgtgagtgaaggggacggaatgccacaacttcacgattgctagcgccaacggcgggtatgtatttaaacgatacccaccccagataggcatcatccactgcgtaacgagatagatgaagggctcctgtgtgcttaagatcaacgagaccatacaaatgaataggagacaggctgtacgcacagctcagactgaccggatcatgtcgggtccaggattctggataacctgaacaacggctccatgctgagatgagcagggtaatttgacatcctatatttccatggatttggcgctgcagaacccaaagtaatgttccacactctgacgcttgttacgcactggtcatgtgacggggagcagcgggggaccctacaagcccatttctcaacacagtttatataccggccgtgggtgcaccctgccccgttttaaacccaatgccgaagcttcgccaagctgatgcaaaaccaaagctttgcgggagccaaattcgacctctcaggggtgggcggactagtgtcctgttgcaacccctttttaccgtgttgggtttagtgaatctctatatcaaacccatgacttgagccattagagtatggcttcctgagcttccatgcggattccgagtttttgtgcttaacaaaatcctttgcggcttccaccttctaaatgccgtggtctcttttgttcccacaattttttttgctaataaaacaaatcttctattttttaaatgctctttctaaatatcaatgtgctatttaaaa

SEQ ID NO: 15681 - DNA, 561 bp, Emericella nidulans
tctctgactgctggtgtgatctgatcgtgccgcggaacctgagcgacgcctatctcgatgataacaccagagaactgcctgcttgcctaccgggatcagtgctcctacctcattgagcataatcgataggacctgactgctcacgccctcgacctgcgttgtcgacctcacactcagttgagactgtacgctcctacgaacaggtattccatgtggaccgcatcctgcctgacgctagggttaacacacactgccatttgagagtggtatctcatctgatgactttgccaacgactcctcacaggaccttatcgctacgatgtcatgtacagatcttgactactccggacacaggtatctacgtaactgatagccgggcggaccggatccctactgcactgatgaccgttttttgctctcacctcgcgcacgcgttggggcttgaatgtggcctgcatgccgttacacagtggacgactatgaacacttgctctgtatgactattactgactacgcactagcgatacacctccctgattaatgacacattgcctacagctt

SEQ ID NO: 15682 - DNA, 599 bp, Emericella nidulans
tgctggactcaatgcgggcaaagactcatggctcaaatgacgggacgtggcgcgagcccagcgtcatacttgcttttattgcgattatgcaggctgggttgtgctgggtcgtccctgaataaccgaggactaccacttatcgctttgacgactattttgtcatgctgtgctgatctgtttttaaacttgtattccgtgctgatatcgttaacattacatgtattgatggctagatgtcgaggaataatcgctgaaatgataacgtttatggatggtttgttgataaatgccactatgatcaagcaaaatgaattgctggccattaccacacatgatggagacgcttttcatacgctattagagatagaaatgactgagatcctccgcacaataaaactgcaaaatattggtattaagaccggctgttttgttgttgaataaaccccaggaatccagaagaagaccccatttgctatactcaatggtgactttgcacagagccatgtacgttttgtccacgatacacccgggactatctactgctataaggtgagtgtcttgaattgatcggcgagatttcaatggaattatactatttc

SEQ ID NO: 15683 - DNA, 554 bp, Emericella nidulans
aacagttggactctgcaccagtcccacgcggcaactggcagatctctaagctggcctctacttctgttgtacttgtactttgtgtacggatcatggtcaattgagctataaatggcagcgggtccagggtccaatagcccaatttatgtaaggtaaatcgctctgaaacacccaaacgggctttttggccgcggtttgcactacgcccagcgctagcattgcgcctccatgtggagtcgtctactctttgttaagtctttttgacctgcatctctgccacgttcaccactcgtctccaacacctcgacccttatcgtttttcatcgttcctactcgattttctccatcggttcctctttccttctccttctttctcttgctttgctttcccttcccttcccttggtcgttcaaatatgcactgagcggcggcactcatcccgggcggcgacaagatgagaaccgtacaccaactcaagctctatcgcagctgcatcttcgtctggaaccgtctgcggtcgtcgcctgctgccttcttcgatgtcttctgggact

SEQ ID NO: 15684 - DNA, 2855 bp, Emericella nidulans
atatgtcattcatgaggtctcgatcagaccgaagacatgaaagcatacgaaggtgacgtttgattgcagctggagcctctcagttcattacatcctcggcgttgcttatgtaattacgcgtcttggagcctgttcctggaccaacaactttatctttttgcaatgatcaaagacagaaaggtgatacgatactggaaattcttctaagatctagaagagattgcatctcaccgtaattcagccgcgaatctgaagcagccaggaattgctggtcgggcccatgacgactctattcttctcgctcctcccggaggctctatcccaactacacgatgccctaggatgcctagcaaaatacagtgataccgtcggcattgaagccgaatttgacttggtatgttagtggggacgttagagagctaaatgaacagttctgaccatggcctcagcttcgtctgagctcgctcaactccagcaagactgcatactcatcctttgcgtttgaagcccaaaacttctttgaagcatacgaattcggcatgaatggtaataacagtgggcctcggaaatttagctgcgaagtatatttgaaggtgcgggttctgacttcatttttgagttccttatgctaagagcctgcaggcgttactatccgtcttcgccgggaggacaaatcgacgagataaagatactgcagttgaacgctgcgagtttgaggttcgtgaagatccagacgtgactgaatgccgtctagttattcggatgatatgcggacttggttaggatccttggttgattatctggttcgtcgcttacagtgccaggcgtgatcaaatcatacaagctcacttacgagtcaacgacagtccaacatgccatctttgaccggtcacaatctactaatgaatggaccgttgagccggccttcctaaaagagatagccgtgcatttcagtccttcggcggacgagttggatatctattcagagaattctaaggtgatctttactagctttacgactaaaataacagacgggaagggttcgtctatccagaactttctcttacttagaatgtactgatcttggtctagacaccctccgacaaccagtgcacacgtcagtcgccgttgacaaaacagattttgaaaactaccttgccgacgacggcgtccacatcgccatcagcctaaaggacttcaaagcagtgataacccacgccgagacggccagagtcctgataaccgcgcgatacacccgtccatgccgacctctgcagctcgcgtacgactttgacggcatcagaacagaattcaccctaatgactaccggcgaagcaggcccagaggaccttcctagttccgcgaggcctgtccgggagctttcagctagacaaacgcctgctcctcggcctgcgcctgtacaagctcctcctcaaacaaataacagcaactcagccagggagagacaaacggctccgccgcgtggtagacccatccgccctcttacagggacatccacgcgaggcacgcaacaagatacacaggctacagttgcgacgcaacaggcgccgtccaccaaatttgatagtctttttgtaccgacggatgatgataggcagtgggatgtcgctgaggacgaggaggccgaggcggaggatatgctcggctgggatgcaactgctgatccagtatgatccatctttcgccttcattagcagtgttcttctaacagcagcagggcaatcctgagagcctgggtccgcttttgcgagatatcgagccgaacctgggaaatggcaaccaaatggacgcaggcaacgacgagatggggattccgccgacgcaacgaatgtcccaggtaagtgacactcgcactgcaactgcgttcatgctgatagccttagctgcatggcctcggacttttcgactagaattgtcgtcacgattaccactccctcacactaaaatgtgctttgcaccactcaagccgcaataatccagctcgtcgcacagcccgcaccaactccaacgaccttaactccctcaggtagcgaaattcgagcgcaaacgcctttaacatctcctctcgcatccgtctcaggcccgcaattgccatgctcaccccatccaaacgccacaacgctacaaccaggatcatcgtccagcattgcaaggcaatgctcacttcccacggccacttctcgcgccttatgcaggtttgccggcggcaactgaccgcggtcattgcgtccccaggcacagatagactggtctttttgatgtacatagacaccatgccagctagcatgtatacgcaaataccccttaacactttcgagcgccgggatccctgtttggatgctccacttatccttctctcccggagatccagagccaggtccgagaacagcaaactcccccttatccttatcaccgcataagactgtaaactctcgtccacagacggcgtcagagacagcaaaatttacgcttataccttccagatcaatctgtctcggctcccatacaatcttctcactgattaattgagcgccgagctgtcccttccttgcagcgccccatccatacactgatccatcagaacaaacagcaacggtgtgccccatttccgccttgcaccgacagaatcttccacattccgaggcggaaacttagggaccctggctccagtagtctgagcctctgtcacctgagcaccgagtccaagttcccccttggacccagatccaaggacaaagaccgggtcaccacgactgtcctgactttctttggcagtagagacaaccaagacactcgctttccacgtggcgggcacactcttaaagagcccatac

SEQ ID NO: 15685 - DNA, 471 bp, Emericella nidulans
cgactcgccgggcgaggtagcagatacctacataccgttgtcgaagacttctgacatacatagctcggtgtggatataccaatgtcacgatacctcttgctagaggactgttgacagctagaaccgtcgctctatatgactgatttacatgacctaccactcttagacttgccaacagtaggcatgctttctggcttattggcgctcatacttgtaacagatgcacggggacggtgatgattgcacttttcttcttgtacacttaactctcgccagcaggggctgtgcctactatgcttggctattagagagccgctttcgcaggcataatagccgatgataacatggatagctggattcggtaatgtatgagtgtctcgtctatgaatggagatgcgccagcagcactgactgacgctatgacagttagtggtgacgaacgagatggcggatgatatgatctactacacg

SEQ ID NO: 15686 - DNA, 565 bp, Emericella nidulans
cttggacatgatgatgactggcttacagactgaacacctcatatctgagtggaggcgtgagcgcacatatcactacgccgacctgaccaagctgctgctgccataagagcggctgaacgatctcttatgcagaggcgggatgagccttatcgcgctgatcccgattctatgctctcagtcccagagaaggctgatgcttgttcgtcccttggccggagttcacatatcgggacagcaccaactcgttcgcgtcgcatgatgcgcatcctatgactctgtccaacgcgcagatgagcgaagagcccataataccggcccacctgctcttgggcctgatatttgacgcgcacatgtatcttgcacgggtccaggttgaagcatggcatccatcttgctacctaacatgcctgtgtatggactctgtcaccacggccctgatgatacaacgtgtgctcacgttcaaaggactggctcaagccctagttgcaacctgttacatgttcatatcaccaaatcggatatgtcacgctaatgtacctctcgcttatcattgggctacgcatac

SEQ ID NO: 15687 - DNA, 3451 bp, Emericella nidulans
aagtcctgaatgtcaatcacggttatgttcaggccatatctagttttcgcgtgaagggtgttctgcaagccgctccgtgaagcgtttgctgtccctcgttagtggtttgcattgaacgaacctctagggaagggtttttgtttcgccctatgtttctgcacgagacctacctcatctggattgtgttgtcggtgaccacggcatcaagagtcaatcctcttctgcgtcgatgcgaatttcaaaccagtcaaatcagtcaaatcaaaagttgcgaggagaggggaggtcacgtcgtgtgctagagtgctggcggtcaaccggtcgagccccgtcatgagcgcacacgtagcagaccaccacgaccaatttggatcggcttccgcgcttggtctcccctttttcattatcatatgccgtcttccccagtgagctggtggagagaaagcgccaggacagaagttgtcgaggggtggaatctgctgatgcaaatattaaaacaacgtagtcgtctcaggtaggcgatggacagggccttccgtctgaagtcagccctcaactcaaatatcatatctcatcgtcaatctagtgaaatggagccagtgagggatttcaggaggtgagtgaacgagaataaaaaagtaatggggagactggtttggacgcactgcagtccgcctgtttccgttgtattgtataccttgcttttctcaacggcccactgacgagctgcagcatcataaattcggtccctttcacttttctgatcggtccaaatcatacaaaactcaccatccagtcgggccttgcccgccatgtctccaagcctctagatcacctcatcaatagtggcaagacgcgggaatccaagcatcagatcgccatcttggaagacgaagatgttgagacctttgtcgcattctgcgagtatgcgtacaccggcaactatgccgtgccaccgcctggatctcgagaaaacgaaatagagccagtctctatcaatcatgcgctcaacggcgcctacccggacactggtagcacctcgccggcagcgagctgggagaagtcgcctccaaagccaaaagtcccaagcgaggcatgcccgggtaatcctgatgacagcaatgatagagatggagttggtgacggtgacgtggagccgcgcagagatcccagccagcagtcaagttccaaagacaggcacgtgtaccactcgacaaaatctgagtatacagcccagaacccagtcgctacacctcacgactctgataattcgcctgccccgtgggcggaagatcccccaactcgaggtagaagacgccgcaggggaaagaaagatcagcaaggggtcactcaagacgcgacctccaagctcaccccgccttgcacgccccccggcgccgcacaagtcgagcctgatatgccggctgcagaacctagtgaagagttcccggtcttgcccggtgctgaacaatccacctcacagtcgccggagcgtccgggccgaactcttagcaacggcgcgaatggaagtggatttggaggcatcaggaatcagagggaggagagtttgaccaaaagccgagtgcggccagtcatagatacgtctttcgccaatcagcagttctctcctcgccacgagaaaggaacaacaaacctgtgggaggagttcactggcatcgatgacagcggttttcgtccgtccttcagaacaagatccccaaacccacctgctgggattacattgccctatctgatattccacgctaagttgtacgtctttgccacacgctacctgatcccgggtctcgcccatctgtgtctgcaaaaactccattacgaccttctaaatctggcgtttccagacccagaccccgagaatcagtatgaggagcagctcgttctgaccactaccaaggctcggatgatcgtcgatctcctcaactacacctatacgaaaaccacccgtttagagccgataacgccctcgtcggcaacccagcttcgggataacgagctgcggagactcgttgtgcattatgctgcttgcaaagtgcgagaccttgcagtgtattgtcccccagtggagcccattgcaggtgctgcgttctatccagaacaaccatctgctcgtggctttcgggctcttctggatactcttccggagcttgcttcggatttgatataccgcatgatatagtggcctttcattgtcgcgggctgtgtgtacgccacgtcgtggatcgaaaggaacgatgacaacagtagtacaatggactgatttgagaaagtttgcattagctgacgctttttttttctgcccacttagtgcctgtttagctttttctttgaccccttccacattgacaaggatccagttctgttagcccaagttgcatgcatccactctgtttttgaatatccagtggccctctatccctgactttgtagcttcctttctggtattattgtgagaagcttgtggtaacataagcccctatgatcttcagaccccattcaccctgcattgagcaggctccactctccgtcacgtactgtctactccgctgagttgcaatgagtgtagcctctgacggagggtgggtaagggccaattgactgccctatcctgttcgagtgcgtagctgtcgggttttcgattgctgcttcagatttttgcatgctcatttcggatactcctgaggcggataacgtcagtattcgcgtagcatatgctgcccagttccgaatcatacgtgcatacagtcaagcccgaagacaaaactatacagcacaaaatgatctgtaatcctacacgcagaagccagtgaaagtccacagaggggtgcttcacgcacatttcctccaatctcgaagggtatccaattttccggcgcgcctgtgacattttgaatagagttagtcctggtcgaaatgaaaatttcctaccagtgcccacgctaatttgtgatgtccaacggtcgttgcccgcctttggatgatgtggagcagtctgctttagtttcaccttgtgctcgagccggtgctggatgtgtagattgttttgtccacaggcgaggtgggagcaccggaagtcctttgtttacccatgattacccttgagcggaattccttgtttcggtcttttcatatagatggagccatcagcctcccctagctttggagtagagcaccattcgaacttggcgatggtttgctgggcgagccatgacagcctggatgaactggggaaaaagcaaaggaaattggatccacagtggatgcagaaggctgaacacgtgcatgggcttggtggctgcggtagggcgtcatcagtactggcgaggtttcacaggaaccatgatgtattctttggaaaacctgttaactcgcccttagcgtgtattcagtagaaagaacacgaaatacgggacccagaaaaggatccctctgc

SEQ ID NO: 15688 - DNA, 557 bp, Emericella nidulans
tgtcacatggtcatgctcctagtgccagatctgtctcgactggatcaggaagcgctgctcgctggcatgacgatgcatacatgtctgacgcagctagatacacactactgatggagagagctcgcccgtattgtcatccgactccactttatctattcatgaaaacacgcacggcgcgttacgtacacccttatcccaactggtggacagaggacaggagtgatgtcgcgaccgaatcttgcaggtgagaccttctgtccttgggtcttccatacctcgcttactcctatgtccgaggtatgctacactagacttgcccgtgctctaccttgtgctttccttatactgtcgatcggcgatagggaagattctaacccgaggaaggctgacataggatcttttaacgagcgggcggttgtacctacggggcgtgccggaatgaccatgttcccacccatataggggacctcggaagatggcctagcaacagcgcgcgcacggatgaccatattggcccgaataaacgaccgcctagctttgactggtccagcggggta

SEQ ID NO: 15689 - DNA, 597 bp, Emericella nidulans
aaaactacttgctgagctgccggttcgtcgagcagcccgttctctcctagccatattatcgtcttcatcagtttccggttctcgtcttctttctggcggtcgaggagctaggagacgtcctgttagctgggctcaaataaaaacaaaacagctcgataatgagttgacacctaccgcttcaaggagtccttttcgtcccttgttctcgactggttgtgctttggtcccacggtcaggcttctcgtgagcaaacttgcaggtcttgcctcgaggacaacggccgttgcgggcaaaatgccgacagatacgcttcttctcgtcgcgcgccggcggcgcgacccgttcgggtccctcccgacgtgatgttgcttgctccggcgcagaatcgtcgtcatcgtcatcgctactttcatcagaatcagaggatgacagatcagacccggttgaggaaagtccagtcgctatcgtagaacgcgttggacgccaaatcgccaacgcttggtcgttagctgcggaatcttcttttaggttgatcgcttttcgttcaggcggactgaattttttggaccccgccatttgcgagcgcgcctagcatag

SEQ ID NO: 15690 - DNA, 1166 bp, Emericella nidulans
tgctggccatgctactgataggagctgggtcgatgatcatgctactaaccacgacctcgactcaggtgccatcatatgtgaccccgaagacttcttggacatctcacgtctattgttaatgtcccgaccttttccagggaccgtactatgcctgactgctgctgcggatggatcatgctgacgctctggacttggtgcataggaacaaaatgcctgatccataacaacacccgaacgtgcttattatatatgccgatacccatgctattggagtcaaggctctccatacactacaccattgcacgcaaccgatctgtatcgtacttacgtcggacaccaactttgttgatcattcaggcattgtctgaactattattcgctacctttgcgaatataccatgatgcgttctgaccaacatgtgtttcttgcctgacactgcctggttacacaactctagcatctcgtgactgctaagagggggagaccgttggtttactcttaggccctgatggagcacaaaatgatgaactaggcatacgtatatgatataaaggttgagcacctgacataccatggaccgcaagaataagctttgaccaagacgactgctgacgcgatcgacttgcacaaccggttcatgctcctacggagtacatctacgcctcgttgagagattctatgcaggcactccagatcaagggccagagaacatgctagcaggccgatgaccagtgaaccgtaatactgatcggacgctgctggtattctatgagaaacggacagacgtcttttgacctttaccaattcctattggcgggcgaccttaaaattaagttatggctacctggagttgtttggctacatagctatggcctcgctcgggaaggttttgacaccaacaagaagtccagctttcgttgaccggaccgcttttaatttcagaaaatgtaaatctcggagtagctaacttccacttattttaagcttttgaagcggccgaacttcttttcttggagccttggccttcccaagatcttaagcccttccggtgacccgtttaatatacttgaccctattcaaaccccggttcaagaatagccgtcctttagggcccccttgggtccaaggaacacctgttgaccccgtgacccggggaggggcaaac

SEQ ID NO: 15691 - DNA, 3525 bp, Emericella nidulans
tggtgagtctaccgagccgcggctgaataattcatttgttcacatccaattccagtctgacccccgtcgagaccgtcctgaaggcgtaccgagtcttcctcaatgataccacgcaaatggctggcgaagccctggagtgctccgcagataaactgatctaccatcacctgcccgaatacggcaatgggcatatcacgcaacgggctgttacggtgtgggaaccgctgttccgcatgctgcatggcgaagactcgcacctaccggacgccattccgtgataaggtgcaggcgaaggagaagccaagaagcagtacgaggtatgcgcctgagtgggcatctttcccttttattcttctttttattttttatttttttctgtttttctttgactgaagactggcagaccctgatggccttggcacgcatgaagcggtctcgacgatcgcaacagctggaacttcaggccaaaattagcagccgtttcccgtttttcaattcgtttcctctctcctcttgtccgcctatcggaccccttagaagcctttggctgtctagccaacgagagctgctttttgtaaagcctgactcggtcttagggaaggtctgtcaagtccaaatcaatcctgcgaatctatcaccgcactgctcctttcggcatcccgtggcgtaacagtccctgcagtgttgtgcagatccagaggtcacggtcatggctagcatctgatgtcaaatgaagaggctcgcttctggcgcggctgcaagtgtccggccagccgtgtggagcggatctagcaccgagccttcgtgctcctatggcaagcctaggttcacttgctcagatgcttgaacaggtatagcttatgctactctagtggcctatcgatggtttcggtcctacttatccctttacgtaactattatttcgcctgtatacactaactccccggcatattcggggtggtagcgtctatcaggatagcattgtgtgttgatagagttggtaagggtatacagcaggacaggcctcttaattgcagtagcagagtgtgttgggccaaaacaaatcgagttttggcagactactgacaagctatgacaaaccatgatagtctatatggccgattgacgaaacaatgcggatcgtcatcagtctgttttgtccttctcccttttccctttacttccccgttaccggtaagccctggccctgtcaatatcagtgtgcaagaagcccttaatcagggtcatctgtgagaacatgggtcagactccgtacgacctcgtggtccagggtatatcgaatatttacatcaatttagggcttgaagcgccgcagctattctggtcgttgaagaactggtggtgaactatgcttgtgaagtcctttcgaaggactttcgtgatgatgagtgcatataacagcagcgtctctctgaagcgcagctatcctccgcgaaggcctgccgggatgcctgaagacgctctggatgatgaggttaagaattcagtgccggattctatgcacaagctcacagacgacggtgggatatgttcaggtagtggaacgtcctgaaatcatgtaccagtgcagatctaaggactgaatgggatagcttaaaaattcagcatgatgagggttcatctgctcctgtatataagtatattgacagaaagtgactgagaagttagaagaccttggaagactacaatcatgtccacacaagccagcgtctccagagcaatctacagctccgctacggctcagaaccgtggcgggtaggaccctattgtaggatcgtcattcccgggtctgataactgtactgattgattgaaaacgtgctgcggttgtaagtaatatataatgctgataagtgacaaattgtctaatagctgctgaggttgtactaccgtgttgtacaactgaccattgtagacgtttgcactactgacgattatactataatcatttgtttgatagttctaccaaatgctcaaagtttcccttttcatgtagtattgtcaagggtttgatattctatgcttgacgtgtttgtggtttacttcactgagatcaaatcaaacctggctgagcacacgattgttttggccaaagcgacgtacattattacaaacagtgcaaatctcccaggctcagaaacattgagaaggtcacgtgaaacttccaccaaataagcactcgtgacactccgcactaggccacttatggtcacccaagccggcgccggcggtccgagggaggcgacaacggaagtgaggaggctttgtcgatgacggaaatatcacagcctgagagtcagcagggaaactctctctccttcttctcctttccagcactatcctgcgtgctatccccccataaacatcactattttatattatcctactacctctattacgacagctcattttgagtggtagtcgttcaacttcgcgccgtcaccccgtcccccgcgtctacccttggacggcatcccacgatcccacgaaagcgggtgcgaatttacccaaacctctgccctccaccatccacgagaccattacatcacctgtgctggctcgccagtcttgggcttcgaaccttccttgccctcgtcaccgttcataacagcagtttcaggagacaaacaacgtgttttgccctctttccccacggtcagacgatttacgaccacggctgctcttccgaccaagtgactcagataatccctatgcatctcgtcaaggacttcgtcaagaccccatttcctgcaaatcaatcactagaggtccccagaggctctgatcttactaccgtctcccagcttctcacgcacagttccaacatgtacgccaaagttcgcgtccagggacgctcctgtttgtctcagtaagcgggaccgttacgcactgtttgccatgggctccttcaaacgtactgggaggcattacaagccatacaattacaaaacgaacaattacacctaccatctctgcctccgccataggctcatcgcagagcaattttcagaagcggagtttgagtgcgacacactcggtcgtcggatcattcttcctggtgaagagtccgatacgtcggcataaaggataaccaaaaatgaacgcccatgacttgagcagaaagtcttgggagtcactttcttcgactttttcgcagctcgagatatcgctttctcgtgacagctgctatgcttcagatgaagtgtctgtaacctctgctccacctgctgccactgatacgacgaagaaaatattggttgctaccccgactgagactcctattccgaagtccatactgaaaaggccatacgccgacattgaagaagacgaagagtcggagtctggctatgcctcagattctacaaacgccgatggcatctttgaggaattcgacgacgacatgtgcgacgatgtcgattgggacgacactgagtccagctgtgtcgaagacattgagtcttttgatggctcgttctatatcatttagtgctcggaacgcttgcgt

SEQ ID NO: 15692 - DNA, 975 bp, Emericella nidulans
gctaccaatccatgtcgggtgcaatgcacccttaaggaccattagccggtgttcgtatacacactcgcaagatgacgacctcgggtgtccttttcagggcacaactggcggagaattatctccattccatttgctccgtccccataccccgctttcttggctggcaagtcccgatggacattgctgccgaagcccagagatcagccgtgcgcgatatacaaccctccctgtggcgctggagatacgagcgagagagcagaccaccctggtcgtcagtctggcaacgacctgactattagtgcaggtctgatccctctttttgaacgtcattgctgattacagatagcgctgtgtcttcatccaccttgggtcttgttgtttcgcaaacccgaatcattatgcctttaaccctttcctgcgaagcccgcgtcgttagaccagtcaagagcgatgggaaagaccccgtgtagcatctgtcttgcggtgggagcagtcgtgcccttttttcaaggccctataggtcctcggtccacagggcctgaacatcctcccacccacggcttatgccctccaaaaagatccttggacttcaaaagctgctcctcccagaagctttctcccggcttgggccgtccttctgctcacttccccttcttctccagggataacccctttggttccctggggcttctcgcccctaacacctacttgcattcttggggcgttttactggggcaatcattacccatatttgggcattacctccacaacacacttttccctccggccgtggttgtcctcccttatcttcctcttatctggacccttccttctctctaatcccatctctcttccgcctttctctccgttctcctccaccccccttctcctacctgtcttttattcccactctcctgtccatctctgttcatcattctttcatatcctactcacttcatcctacctttctctccc

SEQ ID NO: 15693 - DNA, 646 bp, Emericella nidulans
  unsure (1)..(646): unsure at all n locations
cctgaaggcacacttgctcactcttcgagatcttgaagctcacatatttgtgtgccgcatcgctagctgattgtgtacactctgtgcctgcggattctgcgtgcggatcctgacagggtcgtattagagactagaccactgtgcagacctgaggattggacgctagactatgggactcctgatcgcatgcatgcgttgcacgcttagctacgcccctagatgcataggatggcggctacatctgcacacgtttctgattgagaactggccccggagaggcttatattgaacgctgtcaagcgttaggctcgcatgcctatcagaatcgggagcattcgcaatccgcctagagcactgcgtgatgctggaccatgggatctcgccaaaactgtatatgcctccataaggaagtcaccgcctaggcagggaatacgcggtacttatcgagatgcgaaggacggacttgtgttggtgtcataggaagcatgaggcatcgacatgaatatacatttgtaggactgctggctatgcacttggtatcattcctttggattcaggacgcaatgatccctaccgcgcgacataccgccctaaggatgccatcanaaagacgcgttggtgcacattcatatatgatgcactccct

SEQ ID NO: 15694 - DNA, 974 bp, Emericella nidulans
agaccggcacgcggttcgttctatctgaatcactggggccgttggctgcgggccaccctaagtagcgaaagcgcgggttttttttcgctggaccgaactccttgcctagtgagatggcgcaacctgactagtggtgaccaagatcgcacggccataattactagaaggcgacgttcgttagggcttgaggctaccgtaaggctcaggaccggcagtggcatcagccttgatatccaaagagttccgtgctgagcggatgatttagcctcgtgaccagggcctatcacagggggggacagtgacttgtaaataaacttacggcgcgacgctttccgtgacgaatgttatttgatctgtgtttctcccagtagggtactatagctctttctagcggtgctggatccgcaaccataagtcgcgcgaatctcatgcagggcctgcctcggcttggtgcattgggctttgagtcgtacacgtaatgcccgcctgggactaggttgcacgggttacagacgaaacctgacagtggaacgtcaaggatccgggctcaaaaagaggacgagtttatagaggtcaacaaagcttcagcattctttcctagttgaagacccaaaaactgctgatatgaaagcccgccgggctgaaggtctgcaggtttataagccccatgtgttagcggctttgtagcaggtttgtattacatggcatttatgggacgaaacattagtagaatgtacggacacggcattaaccccctcttgcaaatttccttttttagcaaggggccgcagagcttgcccgcaacccagtagtttaatccccactggaaaaggtacggttgctttaaatttccctgatgctaaacttggggcccaatttgaatttatctggccacctgggttatctccgccccggcacaatatttgctcccatagcttttttaaaaaccctgataatctttccatagaacaccc

SEQ ID NO: 15695 - DNA, 3707 bp, Emericella nidulans
ctctcgccttttctaagaccttcggcgacctttgcacggtagacctttctgcgctcttcctgtttggcggcacgcttagcctgcttctcgttgcgcaaggtgttgagcttctgcatcagatcacgagccttcttctcctctccgcctagaacgactgcacgcttctgcaggtaggtcttatccttccgcgacttcatgcgtgtgatctgggacttgaaggggagttctgcagcgagttgccgtgggactcgaagagggttgaagtggcgttcgggccgctcgatcttgcggtatgcagagtccttgttcaggggtgttgggattccctgctcccgtcggacctcgcctgttagtcgcatacccttccagccgccatcgcccgacaggccctcttcaatatccaagaggttggttactgggttgtagaagcggtgaggtttaatgggataccatgcgcgcaggaatacaatgtcactcataaggattttatcctcgaaagttgcacggaaacatccatctggtttgctcagggctctcttgatctgacctctgatacctgataccgttcggattgctgctccttcgaacttggcgatctctagcgatgagttgaacatgtcctttatgaaggcagtgttcttgaagatcttgtaggccacacccgtgagcttgagcttcttgacgatttccgtgtgttcgtccacgcttaacaccacaccggtggctgctatccggaaaccgggattcttatttgagaaagattgaacacagcagaaaccagtgtttggtgcaacaagcggcccatagaatgtaccgaagcagtgcatatgctccggagtgtacttgagcattcggttacgggttcgattgtcggacgtgctgtacatgggtagggtctggaagcgtcgccaaccgagagaaaagatgagcgggtcgttgctcttcaaaatcttcttgtgccaacggtgcctcttgatacgaacctggacgtaaccaaagcggtcctcagtcggtgccaacccaccaacaatgacagggtatcgaggattgaacttcgtagaaaattcgcaaggcactctctcgagaacaatacgggcatatgttccagctctgtaaccctccgctcgagccctggagttagggtccaaggcctcgaattcggcgcgattgatgtcggcctgcttctgcatttttgccttctgcgcatcgtaccattcatcctccccaaattcttcctcgggttccgcgccgtcgtgtcgtgagttgtctttcgaattcgcaaagccttcacgatcttcttcttcaaatctcagcttcagttcttccttccttttagcgttccgcgcgcgttcagcctccaggtcttcaggcccatccttctcatcatcttccccgctagcttcgccgtcgtcgtctttgatcccattgaagacttctccagtctccagatcttcaaacgcaccgtctccctcatcatcctcgtcaaaggcgtcttcgacgtcctcatcctcaccatcgtcagcgtcgccgagtttagcagtcacgaaacgcttgcgcaacgactcgatcatctcttcgtctcgccatttccgttccaactcctcgtaatcatactcaggaacggcgcgatactcagcttgctcctcctgctcaacgttcgtcttcttgaagaacgtatcctcgtcgtcttcgccctccggctcctcatctctctcttcctcaccacgccatcgtcgtatgacctcagccggtgtcattgactcgtcgtacatcgtgcgcgagaggtccgtgatgcggtactttgggcgcttggagtgaagcgatttcgcattagcaagcatgttatctttccaacgaagagttccgtcgtcttcctcgtctgagccttcttcttcctcttccatatcgctttcaagaatttgatcctccacggacgatatcgagcctaaatctgaatcgctatcggcgaatgcgatatccgattcctggcgcgacgtcggtccattttgtcgttccctgaagctttccgcgaagtctggaggtgcagaaacgtccacttcagcttcgccatcgtcactaccagcttccatatcatcctggtcctcctcttcttcgtcttccccatcctctgcactttcaaagccctcgtcttcttccgcagcgccttggttgtcatctccagcaaatcgtacttctctcctgtgcttacgcccagtatcattgtcttcgtcgtcggcttttgtgatggcttctccaccgcggaacaagcggacaccgctgtctgcctcaccaaggagtttccgctcgccttgcagtccaataaccaactgctcacccagaccgcggtccgtatcgcgttcttcgtcatcttcgttaaaattcgaagtcttcacatcgatgtagacagcatctttgtcgaccaaaacaccgccaacgtcagacataggagcaaagagcagcttttgcttttcgcccagcctgcgcttattcgatttcccggtggctttttgtatctgctgatccatatatggggttgggcaaggatcatgcaatgcctcaattccagagaccgttaaatcgccaactccaggtacgtggacgcgcgcaccttgagcagggaaattcgttcctcgcaggtaaccgtataaggcaattgtgcgatcgcatttcgggtccttttcaatctctgtcggcggcgtgatatctaggaagcgatctgcaagggcgtatgggtgggagttacgccacacgagaggccgagggttcttcataaccgaaaggaatcgggacaggttgtgcacctcgcggtcgggatagcgaccattgatcacacccgaaaggtagaagagtttagcaccgttatacagttcactccagaaccgatgcttaagacgtttcttggcagctcgaagagtactttgcttcttgaacagatccaaatgcgtaaggatgccgaagacatttccgggcataccgctagtagacaaaacgttcagaaactccatagtctccatctcgaatccgtagttaccgtcaatcatcagaagaacgatatccgcaatcttggccacatctatcatggctgccagggagtcggaggggcattctaagatcgtgagacgtcgcttcttcgatgtcaccacagtcaatggtccattcggtgtgctgagcgtctgtttagtgtaccggcggatcaaggatttgataagagtggtctttccgacctgtacaagaggaactgtcagtatctaactctgttaacccagacggaaacttacgccaggaggtccaactacagcgacaacaagcgggggagcctcttcaggcagacgatccaccaacggaacgtgtaatctcttctctttgatctgtatcgggcacaaaaatcagctcgcatgtccttaaaaggttgatagaagcgtcaaggtgtcgaacgtacatcatgagacctcgctccagctttattgccttttccgggattcgagaatgcaaacgccttgggattgggtcctagagtccagaaaatgtgtaagtaacagaccgactatgcaccgcgatgttggcgattgcgacaaaagtcaactacttaactgaccatcatatttcttcctctctttcggcgcccgatgggccctgatagtttgttgctccattgtgaggggcggaggtcaaggcctctcagaaagcctgtatcttcatcactgggg

SEQ ID NO: 15696 - DNA, 2221 bp, Emericella nidulans
  unsure (1)..(2221): unsure at all n locations
ctgctgcccgtaagtgacatggtctactgtatccaggttggtgttgacatgctggcctctttcaagcccttgctcacgctatgggtgggcattcttatccttggctacagcatggaatactacttccacctgcgtatgattctatctctatccttcctgacaattgaacatacctctgataagtttcttataggtcaccacaagaatcaccctcactaaattactcttgataggtgctggacgtgggggatttgtgtatataccgtgggcctagaatggagccttcgtaacatcgaacagctgcgatttcagcaattccatcctctgtaacattagtttagaccttccacattgattgtaagagtaatcattaatgcagtattctttgacccctgtactccgtctccgtttggttcaattcggaatgctgggcgcgattatatggaaattggcgaaggtcgagataaaaagagtcaaccacaacgcacgagagagtagccaggggccgtacgtatatcgggtgaccaaagtaggcacaatcgatcgtagggtgatgactcttgaaccttgttgccgactttcgcggctcgcaagtcgaactccagccacagggtttgcaacactttgcggcgtttcccacgctaaccgaaaacagccaccctagtcttgggaacctgagcaatcgctcatcatccataaccgcaggccatcatccgatctccatcaacttagagaagagccgctctatcgtgacctccctttcgggatatcataggctgttgcctttatcctcaagagctctctctgccgcccgctcgactcgactcgtgtatcttgcgcaccgctagcctcttcatcatccaccctcttggtcgttcggagcttttcaaggctcaaacagctaagctcacagttcaaccgtggcgattcttgatccctaacaataggtatctccgagtcctctatttatttcatctatgtttcagaagtcctattgccacacatcccgcatttatagcttcaaaacacatgtctaacagatgtcgcaactggttgttcccacagactcgagaattgttatggcagagcagaacggccacgatgtggtaaatctaaccctgtcgggcggcgatccttcgccttccgacgttcctgcgagcaccaccgacaaggaacctgctggaggggacgagggggagaccaacactatcgctacgacatcatccgagacgaagacaaacatcggatcagaagatcagaaaacgcacgaagaaatgccgatgggaagcagtgacaaggacaagggcggagaacaaacagtggcagtgagtgttccgggccagatgccggcgcctcgacttaccccgacacaggatgcatcaaagccagggcccaagttcggttgcccgcaaaagtacttgaaatgaaccgngttacatctacatcggatggcggagaagactcagcctccttgggcggctcggaatccgatgcttgtccaacagaaagcagagtcaacagtcgcgctgggtcaaccaaacggccaacaacattcaagccggtgtctttcgccaaattctccgttccaaaggcaccgggtacacaaccggtggctaaggttcctgaaaagagtatgtacagcttcgcccattataagaaggaatggagtcataatatgtagtagcacctttgtcctcgggcacccccctaggcacaccgtcgcagaatcctcggcctcggttggtcgcgaagacaacgagtagcttacattccctgtcgaaaacgggcacaagcggcactagacttggtggaggtgggcccgatcccagccaggtttggaataggaatcgacgtaaggaactcccaactatgacaaactcatgaaacaccagctgactatttattctcgcagcggtccagcagacacctccgaaacatctcacggacgaggagttgaaacagcagtatggaattcacatgacgtcgagaatccaggaagatggcggcggaacagaatccaaatgggctgatattgccaacaacgagagatgactgggccccagaaaccatcgaatggaatgatggaaccaagaccgacctgaaggccgaaccagctcaccctgagcctgctccgacggctacacaaccaaccgagaaatcagcggcggattccaagccagcgtcccccgtagatggatcaggcagctcctcccgagaaatt

SEQ ID NO: 15697 - DNA, 2512 bp, Emericella nidulans
gtctcacaacgccgtatgcgcagacgagagagctggcgtttagttttgcgttccttgccacggcagtgaatcatacccttgctaaagctagaaaacgcgccggagaaacaggcttatcagatgaagagcgtgtctttctagcccgcgaggtcatgcgcgtgacgttcgagcacctcgcgtcacggactatcatcgcactggaatcgctgtgccagtgggttccgctcgtcccaaataatcctaatgacaagcggcaaaagccgctcccgagcagtgtccccgtatcaacactcgtcgtttccggcggtgttgcggcgaataagttcctaatgcatgtgctgaggacgtggttggatggacggggctttgggcatgtaggtgttgtggcgccgcctattagtctatgtacagataatgcggcgatggtgggctgggcggggattgagatgtttgaggcagggtggaggagtgcgttcgaggcgagggcattgaggaagtgggggcttgaggagggtgatgagagtgacgggggtgaagatgggggtcaagggatactgggtgttggagggtggcagagggaggggaaggaatgattgcatggtgagtgtacgatatttcaatgtactatagtgtatcataaaccggcaagagggtgtaaacagactctcctcttgaatactaggccagccataggattatcatctgcactcatattgtctccatcagacactacctacaggaggatcctagcacctcttgatgctccacaccatacgacgagacatcatgtcgcgtcacgccataggtctgcagtctatccaccttcgttgtgcagtcactggctctaatcctccgccgtctatatgctctacaacgacgtaaagaatccctcttttctctcgcatgtcggtatcagatcccatcctacaaatggagatatcagatagaaagagaagaaaaggatgactcgcatagtttgcattgttgtttgattatccctgcggtattcgaagtgccccgatgtcggcagtaccacatcccgtaagtagagttagggctacgatgcagacaagtatttccttccccgctagcctgcacatagaagaaactgaacattatatggctcctatatggctcctttttccgtaggactaggataaatgctctgaatccgcaggagctaaagctgcgagtataagctccaatagctcctcttgcaccctctggatcagtcagtcagattgatagctgactagcattgtcagttagccctgctcaaagtcttcaaacagatcggcttccttgtccggcgcaccgaacgacatttcaagcagagtagggctggggccgtgactgagtgtctcgtccccaatacccctcaatatgcacccacggctccaaccaagctaggtagaagcatgcagaagtctcttacacatcaatactacgggtcatggcggagaggacctggctacgaggggagccgtgaagactgaagctgggcgactcctgtcaccgaaccacagcgacaacacatccatcacatcacatcactaacctctgcatcaccatcacaatgtaggacatacataacccgaagtaggaccagaaagcaagagtctgacagactgacccttgtcttaacctgaagactcttgcctctgatctgccgatctgtcacaacattaccaagcatgagaaagcgacaggcgaggatcagccaacccacttgtccgtcacaatcaacttgatgcagtcaaaatccgaatcccgattcctgacgaaaaagtcacattgtgatatctgcagcagcaacagccggtggtgtgggacttcttctataattggctgttgccctaggagactttcctagccttcttgatcggaactctgctgcagcatggtccaaaaaaaggaagcaactgccgccccccaatcccagcaagaatggccgggcacgaactccattggccagggcgatgtgtgggggtggagaagcgcgcattgtcgtggtgctttaccgcgagggcatagcttgtcattggctagtccgacctttttgtccataacttgatcatctactgatctctttttatttcatcactgctgcaccttttttctctgaacatttttgtttttggttacttccatccttttattttggtattacggtttttgctattggccgttcatcaactttttttttacttctggtatgttctttctttcttctactgtgcttaattttttagtaaagtgcttattttcctcatatttgatttaatatccttctattgttgatctattaccattttttctctataacttttttttaattttaaaatttattctatagtttatattctcaccccttgtctatctactcttactaatattatcttttttatcacatttattttaattctttattctcttatgatctattatattttgtatattctattatttacctattcttttctttctactctctaccacttattttctaatt

SEQ ID NO: 15698 - DNA, 660 bp, Emericella nidulans
  unsure (1)..(660): unsure at all n locations
tagcacagagcttctctccctgtatgctcaatcattatctttncttatttacatgaaatatactttatcttcttatctaactgaggcctcgatgcatctgactagatgtatatctaagaatgtataagtctagacatgctcttaaggctctatatcttctggctgcacagaagctcctgacccaattaacgactcagaccttggcgatctatactggatgctacagctgacgatgtggtctctaccgactagctttatacgcctcctgggaggatgatctttacttcttactggctcccccgctatgacacacaatctgtgtctcttaagtgcacttcttgactctgcgtactcatgatggagagttcgttatcgctcccctgatcgttgacgcacctgtcaccacacgttgcactcctactgccgtgtgtgcgccctaactatgtcggattgtcatggtttgctgctcatcgacccctaccagggctatgtagagtatatacgcttatatactaaggcatgctgcccattctcatgtgcacccgctcactgactcccacccctgcacacacactctgctctgatagcttgcacagtctatacgcacctgaacgccttggcctctgggcttaacagcgaccatcgatagagtgaattccc

SEQ ID NO: 15699 - DNA, 4146 bp, Emericella nidulans
ccgcgcattttccaatgccttgttcagcttctcttccagcacgcttcttgaagagtactcgggcagcaggagtcgtccaaagcaggtcaaactggtttggaaggcgctgaacctcattattagtcaagcccattcaatttggatcagtcaaacttacagcatcacccacgccatttttttggataacaaacataatgctcgaaatcccattgaccggcactcggtcgctcgctgtgacaaactccagcagctgcgccttcttctcggcggagaattgatgcgcgatactccaaaagtcctggataacccggtggcccgcaccgaagccgccctcatagcgcgcgtgacgttccagttctgcaatgtcaatttcctggatgccttcaaccacagtcttcagcgcttcgggtgtgaagatagacagagatgttcggtcgaggcaggtatagaagccctgtgcaaaggcttcaaattgggggcgaatagacttgtcggtcagccagaaaatgtagtccttgacgaattggccacgattttcgttggtcaccaaagaggcttcctcggctggggaagtaggcgagggcaaagggggcaggcttatagctgatttggcggtatcatcttgtgaatcggccgtttcagcagccatggatgagggcgggcttagacttgctaggtcggtataacggccgacatcggaccacgacggagagtatcgcacagagcggccggactgtggaggcagtgagttcggccacggtgcatctctatcgaccttttccatatcaaccgtctcaacgcgccaaaggcctcgaaaccgaactcatacgtcctcatgaaaatatctgcgacatcgccttcattccaacgtagtagctcttccaaaccacgggtcagctccggccacccgtcgcgaatatggtccaagtgcttgaccttcaatcccagtagcttcctataaaatgctaatgggaaattcacagggagggtcaggccattgtaaactgcgagtgacatcaataacccaagaatttcaaacttgtagagcggctcccatgagcaaggttgaaaccatgagcaccgcgtgcgactatccgttgtgaacatgccgtatgatggatcaagagcctccgccatcaacaaccggaagaattcttgttgtacgccgccgtgatcgagcccctcctccccttcatccatgcccatttggaccttcaggggccgcataagctcacgtctttcccgccgccaaagctggttcaaggcgtctgtgagtatgttatctcgccggataacaaggacaaaataggtggtcattgaggttcgcaatctaggaataaggccaacatcatcctggatatccatagcaccaaaggcagtctgatacacatgtttcgtggttgtcaaggctgcttcataatattttgacatggctgaatagttaagagcacggaagtatatgactagggcggagggcgggaataaaaacgagtaagacaacagatggagtgtcttattattaggcactcttgccaaccattgcacaggcatttcgagaggatccaggcgttcagaaagaaaaggtgtatagaaatcctccgacgcaaggccaaggcgggtccgctctttatgaagtaccgacagaatctgtacgacacccccttgtgaactgcttctcgatatttcaggattcccatcccaacttttcatgaaaagggtacgtagccactcggtgatgatcgccggggtgctcggtgagcgcaggctcgtgtccccgtggttctttcgctctgtcacaagatcatgatgctgaccgagtgtttcgatgaggtagtccaaaacgttgtttttacgtttcgatgaatcttggatatacccagaacgagttttggatatttcgtggaatgctaacctcgcggtaagggcgcgtaccaaacgatcaactaaccgaagagccagctcatgttctagcacgtctgtagctttaacaaccagctgggcctcacgcagccgaaacagctccatgacagcgctcatcgccacgttcccagtggatcgcattcgaaccatacagctccaagttgaaggatctatttcgggaagagaacttgctaatgcgaaaagaacaaccgctgtaacatccgctgcattggcatcggtaacgtactggtggccgacagtctcggacgcacggcggataataatgggggcagagacagtagtggcagggttagaattggaagatgaacgacgggaggatctccctgacgttgacagctccctaggtggaacaaacaaggcctccaaagcattccaaaggctgtgaaatatgatgtccttgggacagatggagaagagtttccgtaatgcaggctggagctgttggaggtcaagtttattggctgggtgactcgcaccctcccgaaatgagcgcaaaagctgtctagtacttccgagagcatagaagacgctctgtgtaatgaatgtgaacactgcacgctgccgaggagttgcaactcgcgtgtctgcatcctcgaaactgccgctcatttccatcaaagccagctcctccctccatttctcagcttcctcgtcagagagtataagcattcgttgcaaaccgtcaattatctcgctattaagatgacttagcgactggatggcagaaacttcttgtaccatgtgcgagctgttatgatgacaatggtcagaatttggctggtgtttcggagtgtgcgatttattgtcctgctggtgtaaggactgaacatcatttaagaacttcgctccgtcccaagagacacgtctctcctttctcggttgttcatgcggttgagtaggattcgcatcaacagctcttccgcgatgtttttgaggacgatgcttgagcgccggcggcgaagggagattgacaaagtcatcagcacttgcatccgtatgtgcactgactgagagctttcgcgccggtttcaattcaggcagtgacttctcatcaagacttgatttcgaatttgagcgccgcaaatcaacctccgttagcgatagccgtttgaattgctggttcggtagtctccattccattgcagtagtttgacctccggcactccgcgacgaaggagtttgggggttacttccgccgccggcttgatatggacgctgtctgtaatgaggttgatccttgtccgaatctacatgagcttgacaggtatccgaattcggagaccggggagtttcgcggttgattgagcggctgtggtcaaggtcaaacgagccgggagagcgacggagcggtacgcattcaatcattctcaacgcgagagtatcaaacaaattttgagtaaaggattttgggtctttcattcgcaggaccgggttgttgctgggctctggcgatccatgcggtgttgaggcgctcatcgcaacgtcattgcccaaataccgcacctctggtcttttctccgctgcattatccattgatgcattttgtaagcgcctccctcgaggtctttgatccggtgcgacggagactgggggatcgtgtggtggactttgagcggaggatgcatgcgttcgacgtctcgaccggcgcgatgggtcctgggaagacagctcagaatgtacacgagacgggttgcgacagagccctgtttctgcattgtctaagctcgctagataacatgccaaggttcgcgcactcaaatcagtgaaacgtcgatagggcccttctgacaccctcctgcgatagctggcacatgttggggtttggcagttgggatcttgacatccattgagcagttggcttttatacctacgaagcagccgtatattagtctcgataatcagccatttgtctgttcaagcgatgtatatactcgccttcgaactagaaggttaaaatgccgccggcgttcatcacgataccacaacagaacctgcgcagggtccgatacatcgacagtattttgagagatgatttctggagcaccctgaggaagtttagaactatgacacggggtccggtcgattccagcacgcgaagtctcgtgggagctcaaggatggcccgcggagcctggtcatgattgcgctgcacggagcataactcgaatactatgggttgtaaaaagccggtcgccgacggatggca

SEQ ID NO: 15700 - DNA, 636 bp, Emericella nidulans
tggatgacgatcatcatctatccgtcctggctgagaggggcggtgcgagtactgtgcactgtacagtgggaagtgctgccgcgcctgtgtatgactatacgctagagtaggcactgggcgaacagacagactagaccggggtacggctagaagaagatgcttgattctcactgactataccactactgtgactggtgcttgttactcttacgctgcatgctcttgccccttatcacgatggtggctggggtatgacactatccttgatcaaggcgacagctacactggaccgcatgggggggagctgacacagcaaatccacggccctcgtgagctatagacaaccagcgtacttcgcaccctgcgacgcactgtacaactggcggcatacgtccactatgagtcaacatccatgtgattgccaggacctagacctctggccacccgaattccttgtgtctggaaggatgagtactgcgaacactctactctcggggcgaccctccttgtaagacatgcagcacactcaatgcctactgatgtgcagtcctaagtgactggctccagactgacttacgcctagcgattactgtgctttgccctatgctccatgtacatcgcctacacccttattca

SEQ ID NO: 15701 - DNA, 4535 bp, Emericella nidulans
tccgaacctccaaagccaaacgaagacggtataacgagccgccaatttatgctcagagaacaagtcgcacgaaagggaggtgcccaatgatccccaacccgcttcctcccgtccccaaacatctgcgaaactcagcacaaaatccttgggtactacgccagcaagccgcttcacaggcgcctcctgccacaaagataaagcgggagggttcagttgtggttgggcccccggccttgcaacagtcgcagccatcacgcccatcacagtccgctgagccacccgaaatgaagagcttgggaccctgggaaccatcaatcacagggcttgagccattcgaggaaatcaccaagacgatctgcgactttctatttcaacatgtggtccttcgaaatgacgccatagctggtcctcccggcgcaacagcacaaggtcagggcgccatagttgaggtcgaagcgaagctaggacatatcatcgatcttgatcgcggggaaagacttcgcctcccaatcatgactgaaagcattatcactcgagaacgcatccgaacaagcttcgagagcaacatgacactggtatgtacctcatatatttgcgatcaaacccgtgtgattcactctatctaactttgtaacaggctcaacaccgcgcgatgaacaattttctcaacgaagcagtcaagaattccatgccccaggccaacccaaagcggattccgctctcctacgcccataaaaaagagcgagattccttctacgaagtctcccctgccgagctgccccctgtcatccgccaaaacctcaaccctcgccataaacccaaggtgcgcgtcacggtcgaccaacgcacaggcgaggttcttgcgaaaatcgtgaaatgccgagtggcggacctcgatattcacagccctttgaccgccgttgactggcgcgtcagtgttaacctggaaatgaactatgatggtgacatttcccaccttacgcctgctgatactgggcgtgggcgtgcgagcgatcggaacaaggaccgcatgagttataggcatctcgcatatcaggtggatctgacacaagttgctaggtctgaggtatgttccacactctctcctgtctatattcatatcttagccctaattatctatcttatacagccgtccgcaaaaggagaattcgagcacgagctagaagttgaagtttcggccgctgaaatccgccgtcaaggccagctcgctatagctggtgaccccaacaatcagtaccaggacctagttaagggtcttgtagataatgttcgcatcctggcgcgggcagtgccggcatgaggctgttttacttctttgtcccttgttttttcgccctctctccccttcgcgcacgaactcaagagttcacgacatagagaagactcgatttgttctggttggctttgcttttattatttctttttttctttcccttttcttcgaatataccatgtcactttgcacatgaaagacagagttgtgtgggagaaaagctgtgcagggtgaagtggctggctagttcctgataggacaggtagtctgccgggggaggttcgttgttgttcttctatgactgtcttaatatattttttctactcatttaacggattaccaaagaaatgacaatgagggagttgggtggagggtttgtttataatttactctttgttgatatgtatgatatagcttgtgtctatgtgtagatggattgattgctggtgataatacactgatttagaaaaatagtacctaaaaggccagaaaatgaatatcaaaaaaggttgagacataatgtaggtgaagcgccgttttagattgaaatgggttgtactcataaacatgcgtcacacgaatatcaaggactgggcgttccttcctcatacctgggagcaccatcatccgtatcaccatatgccccagcacccggtgtagcagccgcgccgcccattgctggtgttggcgcatcatacggacgacttccttcgccaaagtcggcgggcgtaggcgcattgtacgccccaggtgttggcgcgctatcagcccaggctccaggcgtgggtgctgaaagaccaggtgtaggagcgccgccatatgcgccaggcgtgggtgccgagtatgttgccccaggtgtcggggcgtcgtaggccttgttgtcgttcctgctggtggtattagcactagctgaccaggctggggtgcggctgccggatgctgcgccccaggcgggcgttcgggacccggcggcgaaagcgtcgaagtcgctgttgccggagccggaaccgaagcctccgccgtagggggttcgagcacctgcgttccaggcgggtgtgcgtgatcctgcgccgccataggctgtccggctgccgtcggctttccaggctggtgtgcgagaaccaagaccagcaccgctccaagcaggcgctgcaggacttatgttagaaaaccttgagagtaaagcaagagcttgagaaacttacttcttgacgacattgccgcaccccaggcgggtgtcctcgaagaatcggcagcggccattggggtacgaccgccctgccagccagatgacggagcggctgagttttgagggacccggggaccacccctaccacgaccaatatcgatagtctggccggtaacaggatctttgacaacaaggagctctttcggtatagtaacaagcttgttcttcgaatgaagttccactcgagcctgaacatcggtcgtatccttgacgataccaagaagtcccttgaaaggcccctttttaaccaagactgtcttgccgagaagtcgatcccgtccgaaagtcttcgagggaggaggtgccatcataccacccggagcaccattcctcatcagagctgggttcatcttggagagatctggtcctgtaggtctgcctccttttgcggatactgtcacaacattggtagtacgcacaacgacaatacctgcgttttcagcctgggctttgttgtggatgaacaggaaggagcggtggatgtgcaggattacaccactgcgttgctcgccgtatacttctctaacagtatctccatgccgaatttcagcaccatttctgtcggtagccaccgcgtctcgtcgtggtgtgattttgttcgtgacttgggaggggagaatagtgcgaatagaaccgttctggtccaagactcgtaatgattcacgatcgactttgacaatgcaagcaacagtagcggcacttttatgacattagtgaaaacggacataaaagggagataggaactcactctaattggacgagatcatgaacatcgaacatgccgagtttcccatcaacgcccgtctcggcggacaggcgaaggtctttactgaatacagtaatctcttgcatgctcatgtcgctaagaagagtgactgtgtcgtctctcacttggacaaccatacccaactcgtcttggtacctactaccgccgataactttgacgtggtctccctccctgaagcgcttgcgaagagtcttcacaggagcttcaatcgtttggccagccagctcaccttctgtaaccaatatagtcacaatatctccacgggtggaactagtgcgaccgacaagaccctgctgttcgcccttgaacacctccactgggtccccagggagatatgattcttccgcagtggaattcttgagtgtttccgcaagggaagcaagatcaagatttgaagtaccattctcggagtcacgagcaaacatggtgacctcctccagtcgagggttgacgttcttcgtgatcaaatgctggactttcatgtccttgatcaggaaaccgtcaatataagtctcgccaaggtagttccatgacttggcacccaagccggccgtcgcagtgagatacttgctgtgcttcttcttggcctcggcctcgctgaacagccgctgtggaggacgtgcaacagcgggattcgctcccggccgtttcctcttagggtccatgataggagcaccagaatcctcattcataccgtagtccagacgagggaccaaacgaacagtgacagccaggccgttcgtctcaacctcctcaatctgagcaagatcattcatgtacttgccgcgcttgatcccggacccaaccgccagggttgagctcctcggacttctgcactcgcagtaggtccggcatttccttaaccggaaccagaatcatcttcgtccttggataaacgtttgacatgtcttgtaaagcatccatgacatcggcctgtctccgcgcttcgacatagatgtagccactcatcgcgcccccacgctcgaaggccgagatgatcttgatgggatttcgagaaccgggcggtctgtcctcgatgcgtttctggatggagaagacaacctcacgctccttgcccgccttgcaccggacaccccatatactgggatcatcaacactggggagcagcagccgcttagggactatgacggcatctgtagcagcggcacggtttctttcgtagcgctccttgagtaactgtgcct

SEQ ID NO: 15702 - DNA, 2568 bp, Emericella nidulans
tggattgtactcggcgttagactcgagaatatcgtataggacgctgggcgcaagcatataggtctgaacaacggcggctatgacaaagactaggacgttgatagtgatgaaatgaaggtttaggtctgtgctattgcgttcgtacagatcccgcatcatcatctgaaggagatcttgcggtccatcttcgggagactggccagagcgtatgaaactgagacgcttatcatactgtggccgcaagatggccttgagcttctggatcactataaaacgcggtatggagaaaatgtggccgacgaccgagcgcaaccctcggggcgtcaggcgcagcagctccccgacgggagtgatccattcgatgaagatcaagatccatcggaggaactgctcatcggcgcctagatagtgtcagtacgaacaagagcagctgatcagaggggtggcatacacagaggtgatccaacaagatagcgcgtggtggcttgtagtatgattctcttcgtcgctatggttggattgacatccttccagttcacatggtcattgcccaagacatcttccatactgcgctctaattcctcctgaaactcaacaatgccagacttgctcaatggtcgcagagcgtctctgagcatgttaagatgccaatcgtctgagaggtaacgtgtatcgccaagcgtccatctagcctggacgatctccgcgatggcttcgtacgagttaagcacacccgttggctgtgatagcatccacttcatgtagcggtttgggattaggatcatagtgcccagactcttgtcagggactcgacatgttttgccgtgcttcagatactgtagtagtggttggcctgggatcatgaatgcacacagggggtactaaccgtgtcgtatgcctcttgaaggatatcattcgcattgaataaatacgatacgaatgttgacgtcctaaatcgttttctgcctctatctcgaaccagcggaatgtctatctcagattgaggcgcggagtagagcagcacgaacacagctacaaggaatgtggtgactgctatagcgatccatgagttggtccaggctgtcgacatgatgcttgactcttgagttctcgcaatttgcagaagagagagatcacttgggcgaggagattgtctccttatccacctaggagggaccagcccgatcccaaacagcactgtagtgaaaccctggacgttacctcgagacgtcggtaaccgagtattgcaaccaagaccggaatgcgaatggatactaactactctccccgtacttcgatctctcttaagagtacataaacctcctgcatggttgcaggttgcagctatagacccagaacccaattccctattattaggtccgccgtcaataccacgccatattgggaactccccaaaatagcttcaataatcatggccaccagctatgccgtaaggactaagaatcctttgaacctcaagaatagccatgagcggagcgacgacttccccttctctgtgcggactaccagtcttgatggatggcgcttaaccgtggagaatggccatgaacgtttgagatgggaatatctcaagacggggaaggaacgaacagcccagccacaggatccagcgtcgcgattctacctcaatctcccaacggtgcgttcccctgtccacgtcttggatgggttactgacagtgacaagtctatcccaggttgcgcacgcgccaaaacgccctcggccgccgtgctgaatggtgccctgtatcacagccaggttcaagtgaaagagctcggctgttgggcagccgacctgagctgtatcttcttcgtaacgcctatgcttattattgcctggtatatcacacaagcagtcatcgatgaagcatacgctgttgagctcgtgaactttatattgggagttcagaatgcggacggtggctggcccacatatagcggcgaaagcactacgcttatggggacgattcttacctatgtcgcattaagattgatgggactgccggcggatgaagatcacttggtcaaggcgcgcctctatcttctcaagatgggtggcgccgtttatctctctggctgggccaagttctggctggctatgttgggcttgtataaatgggaaggcactgacccctatcctgttgagatgtggctacttcctgaatggtttccaatcagtccctggaaatggtacatcattccgcgacaggtttatctggcgatgagctacttgtccgcgaaacgattcactatgcccaccaacccactacttgacgagatccggaaggagatctttgtgcagccatatgagaggatagacttcctcgcctatcgcggtgtcagcctgcagtgctctcgggagctacgcaagccctggccgctaatattgctgaattggatcctacagaatatctggatcccctggctaccggccatattgctcgcggaggaaaggcacagcacaaagtgggacattatctaagactctcatgaattggcctaacttcccgggacaagtaaaagtttacacctttcttaaaattaaccc

SEQ ID NO: 15703 - DNA, 599 bp, Emericella nidulans
cgacctgcccgcggcatatccttattgctccaaccatgacgatgactcttttgactatcacggcgcacgggaggaatcgagccttgaaatgcattgtccgaaggctcgcggctatgtcgattccgaccttccgagctctattgaaactcggcccgaagctgacttaaaccgctccgcctgacgcgactagcatggcctgcgataacgacctttaatgcctgacccccgacgactttaatctatagttacctagcttcgggagctatgacgactaccttagacgcccgtgggactattgccactacctaacttggcactgaccagctaacgtttatcactgcctgatgaagagctttaccttgttctcagtgatacgactatttcagcccttttagcatacttgtgcgtgtccgcataaatgtatgattatgtgctcgaccgagctacagcagttcgaggtgctatgtgactgctgctatcacataggtctcgtgtccagtccttctttatgagaagactacgtgtccttagcagactcgatctctgtgtctgacgcttacattcctctactgcttgagcttgattcgtttatcgagatt

SEQ ID NO: 15704 - DNA, 846 bp, Emericella nidulans
gcgcgcggtcatggggggtacccgctgtgcgaaatgcgatcgaaaactacgaggaatgctcccctctttatggatccctacaatatcgtcggcggaagggggttcttatctatctccctgaggacctatcccgactcgtgcgaggtttgctccgctgtgaacaatgttgtctttgggcactgctaacagactgtccaactcgtcgtagcccgaaccaccgtccagttccaatcggacctggatagggcctcgcctcatgatacagtttacttcttatgacaaccgcgcgaattgaccgaaagcgccctgtgctgcatgtgtctgctacacaccgggttaggttctatcacttactattcaaggtcgctgcgctgtgggggactgatggagattgcagaagattccgatgaatgtgccttaagggagacgagcctgctgtatattctaaccgatggtgcccaccagagaatccttgagagccgcatgaccaggcaccgacacttatgcttttggcggtttactgtggcttagggcactaggaaaaaggacgtgcatccaggccaaagccgatccctcaaggccttctaagcgtcctggggttcctgcctttttaagggccattcatgaataattttccccgccggttccatgttatcgctggagctttttcgagactccagtatactgaaaatgtccgtgaatcggccgcccttctaggcaggtcgctctacaagaatcgctttttaaaacccctcgtatgggggactgctcccttgggtaccttattcctctcagaatctacctttctggatacccttgtcccccatttagaatttggcatctttt

SEQ ID NO: 15705 - DNA, 511 bp, Emericella nidulans
caccacctagatgtaagccgtggataccggctcgatgatgtcgtagcctattacctacaagtcctaaggctcaagttctccaatggaatgagccgaccatgcttaaacccgactgttgtagcagaaaaccctccacggcgaaacaaaagcagccaacttacattgtaagcctgggttaaatagggtaaagcatcctaccaggccaggactgcgtggctcatgcacccgagcacgcattcctgcgctcggtggaatcttgctatggacatagtgccgtaagtagcctcgcaatacgcgcaccggttgcattaatacatgagtggtgcgtacccatactatcgcccattcactgctggtgctgcactacgggatggtgccatgtctacaacgtacagactcgctgccggccgcccgggagcatcacatcatcgtgccatgtacacacagctccgagcagtagcggagcgacactacgaggagaggtgatgcaagccaaggacgagtgcagcct

SEQ ID NO: 15706 - DNA, 543 bp, Emericella nidulans
cgcgaaaatttcggtgacttcgaccaatcaagctgaagcgggccaggtcaatgctcggaaatggacccaggtttttgctacagacatacaagtccgcgcgtgcgggggccatctagcgcgaaaaaccatatggcgctacaaaggtgagcttaatggtcctatctgaccggctgtggaattatagtctcacagactagtcttatgacgtaccgggactagctctgaacagacgggagactgctactaacccagctgtgatcgatagcttgctttcctatacaaacagggcaccttatatagaggcgtctgaacctaccacgaacagagatgtgtggcgttccgctgcttatcagggtgatcagaacgcccaaagcagactcaaccgagactaaggcaattatggggggaagcatagaggctttgacgaaaagaatgggtaaatcaaagaaacaccagcagctcaaagtttttacgatgggggacttcaattacgggatcgcaagaacgaccactagtcgaccttaaagcggacagtgtacgaag

SEQ ID NO: 15707 - DNA, 451 bp, Emericella nidulans
cactggtggctagcgacaccgccttcttgggggttgtcgacggctgtgtgctctgaggcgcgctcctcatgctattctatggtggatgcagagtgttctacgaggccaagtggcggatcacttccgatacgctcctcacccacgagttcgaagcatagtcggttgtgagcactgcgcgctggagcttactggagtacaccccagtgcgcggggcgagcatgcagaacgccaacgacgcggctgggtctaggacgagtcacaggacctcgggcctcaggagcgtcagggactatgtcatcacgatggcgacgcaacgatgccgcgcttgcagtgaggaggcatgctctgcagtgctactgacatagccgagcactccgtggacgcactttagcggcacgagcctcgacattagtctggtgatggctcatatcaggcctagcctccgagcaga

SEQ ID NO: 15708 - DNA, 174 bp, Emericella nidulans
tttcaaaaaagagccaccagctcagataccatgactcacaccgaccaaggctaccacaacaggtttttagatatggacctctcaatcgataacgagtataactgctgcgcctgaaggtgactacatagataatcaaagcctgtgactatcacaggaactgatagcagacattat

SEQ ID NO: 15709 - DNA, 1524 bp, Emericella nidulans
  unsure (1)..(1524): unsure at all n locations
gcgctacaactacagcttgattcgagaggataaacgcaatggaacagctctgagccttgcattggatcgagctatganccctgattccggactctcgcccgagatagcgaacgtcttaggcgaagttcttagtattgctctgaatccggagcctcaaaagcgagacctgggccgtatcatggaagtacttgatcgaccggaaaagtgagtatcgcattatgaactttttttggtcaaattctgaaaagtctgcgtatctttagtagccttcaaaaacgtctcttcggccttgtcccttccaatgcccagttcctgcgcgagttcaccaagttcgagatcgaccggtttgttgggcacgcccaagcaagtcgaggtctggctcagtgggaatcggttccagcaaaagcagaccaggcctaccacatcgtccgcaagtacggcatactcaactcggactttcgcgggttcggaatgtctcgactgtctcccgtctctggcgctctgagagatttgctcttaacgaccgagaacctgtaccgtacacatgggcaaccaatacctgctcttcactttcctaaactcccagcatcaaatgaccccgccagaaatccagaggccgtttggcagtccctgatgcacaccatttatttgatcagtaaagatgccggtgcaatggtaacgaggtctgtgggtatacttcgattcttttcggcaatgaagcgtgagtacattcgtgccagatgccgtcagatactaatataggactacgttaagccttctgggagaccatacaacgagtaggcagtgttggcaaggagatgaattccctactcgaacgggccccaaaccctcggagagatggacggtttggcgccgtacaggtaagccctatgtctcgtaagtgagccaggctcaacatgtcctgatctgtaccgctagggattgttcgatttcccgggtggactagctgctgcagatacgatggccatgatgagtgaagacattgtgcctatggcggcctcacaagatgcacggccagtgagtaacagcgctatgacaatgccctggatggcgacgtaacaatagtacagtcgtgccagctagatttctatcttctgagctcttatcgcatgcctttaccactacagacgcaactcttcaccgatatcgccttgcgtgcgcggcgccttgtagtgcaagcagacaggtgtttggcggcaattgaggaggcgatctgtcactgcatcggttttggtgtcaaacaggaccattctcggtatcttgctataatgaaggaatgttgcgaagctgggtaccagccggctcaagcagctctgtcacagattcgtcatgctctcggtttgcccttgggagacggtgttcacccataccctattagccatgggggcgagttacctttacctcagtccgtcacttcttttccctatagaacaaacctgcatcgagccgtcgtgcaacggaaccaaacggctctatcgagcttatccgcaacaaggcatctca

SEQ ID NO: 15710 - DNA, 755 bp, Emericella nidulans
  unsure (1)..(755): unsure at all n locations
cgcaaagaggaggttgctcttcgaagacataggaccactgctgcgtacacacagaccggtctcgaaagggagaccgatacagacggaccgctttttcctctaactcgccgtcatgctacaaggaaccatactagagcagcacagagaggagctcgaacacaatataccgacatacgcagaggccagtctagccacccaaccaacggacaccggaccatagcctgaagcaactaggatccacatcccgacatattccacacaagcctgcacgttcaggcccatcccccacccatcctggaccgctcatcccaaccctcacacaaacctacagctccacccgactcacccccacacctccccacaatgcccaatctcgccccaccatccctttccccctcaagctccatgggccccccccccctcaaccccctcacacacctactccatttccctatcacccaacctacacaccatctgagcaaagctcccctcaccccccctcctaccctttctcaacccttctttcaacacctccattatccccatccacaaccacccacaaatctcttccacacaccccacccatacaatctacaccacactaccacaactaatctcacactaaacancccccccccatcctactctcatcaacccctcacacccgcccccctccaacacaccaataccacctccctatctccacacatacacacttatacgcccccaccaacgcacaaagatagaaataaaaa

SEQ ID NO: 15711 - DNA, 3339 bp, Emericella nidulans
ctagactggaggcagcaggctggctatgcggcatcagcaacagaacaggttattatatctcaaccaaaacatcaaaatggggggtttcggttgccttttcaattcgtttctgttttcttgtctgcattgatctgaattagtctggcttgattggcatgtacttatattgattgatcgatcgaatgacggagtatacgcggcgacgatgtcatttgttacgttacgaagccggttccggtgctggtaccggcgcaggtctggtctaggatattcattaggttctgttggtatatggtgtacggtacaccctggtaggttaggtatctttctacttcactttcgtttcttcgctgtctatagtatatagtatacatttgaatacgcagtgtaaataacctcaagagaccttgagtgtatattgttaccatacccagaggggttgttatgtggtagtcgtgagagcagtgcgtattagtgtgcatagcattatagcctattcactggtgaacagtgcatgatcagcatagagtatctaggtacctacgttattgcgcacaggtgtcttgggtctttccctttctgaaacgcgtctaccaggtaacttcgtactcgaagcacttaggtaggtaggctatactaacgtgcagatagtttacgaactcctccttcctacttgattgggacgatttcgctctaagatggcatgcttggtgagccaagcaatctgccccctcatcgatgcctttactcacactaggcttcgtacctttgtatacgatatcgtgcttcatccagcggacccgcatagtccacttcaaccacgtatcgggcaaacggagtcgaggaacgtcgtactcatcgcccactcggtccttatactaccacgtattctttagtgatagcgcacgtgtccttaggagtcgtggcaattgctgtgttttcaggttcaatggcgcctggtacatgttctactatgaaggcttcgaggaacgggggccggttgctggaagaggttcgatacggttattcccagctaagatccacaaaagaactcgtctgcttccagggaaaaaaaaaataaaaaataaaataaaaataaaaataaaaaataaaataaaaaataataaaataaaataaaataaacaaataaatataaatcaagtgaaaattcacgacgctggcttggggttccgatgtccatatgcactcgccatcaaattcggacgcagcgccctcgaaaacttcttgaacgacggagtcatattctttaggcggctcacaatggatcctaccctttctttcaatagaataccttcatccgtaagattcttatgactttctacacaggacggtacgtttaaagatggtctcccgcacataccctgggtccagcatatactgtgccgtagataagccaggtgcagagcctcctcattcagttaagacttctttctcaagtccagaccaaccttactcccttttgtcagaaaagatttaagggaccagtcctctcagcattgctagccgtccgtccagcaaggatatgttgacttgtatgctcccagattccttttatccggaagttccatactggtcaattagtcagcccagggcaatagaatttgtatatttacactggtaagtggtttctacaaggcaatgtctcgtcagtttcatgcaggtttggtctagctgatttccagtccctcatgtacagcagagcacaggactgctggaaagacagaaggccagcttaacagaccattataagactgtgtttacatccgtcttctttacgcaataagcttcgaagaacctagttctacgttattcagaatttattagaccctgcctcctagatgagaaagctaagtgcagtgtaatactttcagtggctcaagtagtatatttcatttacaatgctgaaacaacacgggtacctgtatatcaaaaccaacaatccccaataccgttattgtttccaaaaacttcagtgaatcatactgacattgaggagcatggcattagcaaaaagagctatgatccaactttagctgctctattggtcagtgacggtaagaggacgcaaataggcccgcaagtcatatcttcccaaacaactgcgcaacattctgaaaccaagataaagctatatataacgaaccgaacataggcagtgttttgggatgaacgtgcgctctgtggctggcgcagattatgtgtactggaatggatctgctaaccgtagcataactagaagctttaagctttttatgaccgtacaagaatgggtatggtatctacgatgaatgtggacgtcagcgatgacgaagctcgtgtcaagttccaagagggtagattacgttcagtagtgggtgcacatctggcgtcaatgatgcggtaacatgacctttgacgtggaaaactcactgcgcaatgagtagatgaacaaagttcgaagcctggataaccccgtagagtgaataggagtcggcggtgagcgtatgtaggggctactgagaccttgagggtgatgactatacagaaagcagataatatcggcagtttctcaattgtctagtattcagtttgaacagctacatttgagtagcggccagatatcaggtccttgacgcaatataagaaaagttcatccatgataatcatcgcacaacccgcccagatgctgagaaagagaaattaaacagaacgaaagcaggttccagccatgcagcatgctccttgtatctgtaacgccaaccgatgaacccgacagaactttgttaatataggacctagcaaccgactaaaacaatttgcggttgagaaaaaatggaaggaaaaagggataaatagacgaggaccatggtgggaataatgcgaaagcagcgcggcgcaatgacgcatcgcaggcagtctatgcatgaaattgtagacacaagaatgaccgaaccaaaaagacgtacagctatgccttgaaaacccgatccagctgccgcagcgcacgcatgtcctcgccgccaaatccgattttgtcgctggggatatcacgtggaccatccgccggccggccgtttgaagctgcagctgcagtcgccggcgcaggtgaagatgcaggcgcccccgagccagcgggtgcaagtgacggcggaggcacggctgcagagatcgacggcagagcggcaggagtgctgttcatcagcacgttaatgctggggacaacagtgccgctggtttctgagggcggcctggagggaggatttggaggcgagatgctgagcgctccaggaggagggagagcctggctaggaacgcgcggactcgggatggtaggcggag

SEQ ID NO: 15712 - DNA, 582 bp, Emericella nidulans
ccgacacccacgaatctgataagccacgcgactagacaccacggatcgcctgctcttctatatttcactacaagccagccgtgacccaccccacaactttgggccctttcgctcctcagaggtagactaggtgggagcccaccattactgtccgtacaggacattggcattactgtaatgattcccaaacgaatgagcgtcacgcactaatggctcgattacataataaacgcttgaatcggttcaagctcagggcttgagtgagtgtggccgattttgacagtacaattacaagcaaccataccgataacacattcgaaaacgcatttcgccttatcagaggactcacgtcattactacgcctggactgagcaccctgcactgatgggattccaaatgccgacctggattgtgtagctgatgcataactccggacattgggtgatgcacacactcctattacacggcgtatgggccctctcaccctgattaagactggggatcgcatcctacgcgatccaagactaaccaatgctaacgcacctggctggggaaaggaccagatagttgttttgacccttt

SEQ ID NO: 15713 - DNA, 742 bp, Emericella nidulans
ttgcattactgggttcatttgagctactcgtggacgaattagtatgctaacagtgttctggagtctgaatctggatgctcggctgtagctgctgttgtagccgaactgcgattccgtagtcggcggataatagttgaggagagatagctcttccccgaaccctcagggccttctattgctaaaataggcggtgcatcatcactccctttttcccaagccttaaactcgttctcctcaaaaatccactggcctgtagctggcacagcacacttgcgatagttgtagtagattctctgccagtatggatctggttctttcttctcctggtcgagtttgttgctatcgaaagcgagcgtgtcgaggatcctttctttccgtcttcttttatcgctttcttaagcgattccctcccacttgcattatcatatcaattttactattcaccaaccgctgattgccagattatccagttacttaaaggccacctgattgctatatttaactttttcgtataacagcctctctttctttacaagcttttactctttcttacaaccttccttactttcccttcattacgatctttcttaccatatttactctttcactccctttttacatttctatttctctttcatattactttttaccacctttctttctttctttcttctattttttctttatattgttcaactttataactattcatccttctcttcatctttctatatttctttcc

SEQ ID NO: 15714 - DNA, 710 bp, Emericella nidulans
tcgacataggccccgatggtgccgaacccaatcatcgggggccctcgctgcctgacagacattccgactaggcggacgctgccctgtctgaacaccaaggtggccgtagcgttcaagcacgacaatactccttcgatgaccagacctatgcagaggctttactaatttgtctgactctgagataggggaggcgtatatggctcctttttctctgttaaccggaatgcaattgatcattgcctgttactcacgggccgcactccgggaagccctatcctgaacatgactatgaacctaatgcccctcccttttcaaacacaattcttggataagatactcactgccgctctaggatgggatataaccgcatatgacaagctcctggttgttctatccggaccggtgaggtataccctgtcacttatgtgcatgctgagactaactgtcatatcccaaacgaatgctcacaactagatgcctgctattgcccgaaacaccctcaatataactattcctctctctgaccccttccttactagcaactcagctatccatctcaatcaacgggctccagaagggccccgaccatattcgatgatcagcatccacgtctatctagcaaccgtcaagactgatcctcggtgacttgaacgggctgtccccctgtgatccttacagacaagcgccaagccttatatacacttattccc

SEQ ID NO: 15715 - DNA, 816 bp, Emericella nidulans
tgggtgagactaacgggtttggcgtgctccgtgccgatacccatgtactctatagcctgtggtgataacggccttgtcgtctacaaggcggtgacgagtggctagacactacctgtcgggaagaccctacttcaggtttacgtttccgccggtctgctgattgccggccatgaggatccatttgggaggggagagcttcacacccacaatgcgagcccgggccagaaccagtcgtttggcgtgctcacgccaaacctgactataccaggagggcacccctgaccatgtgggcagtggtttttcacaattcagcgcgtgaatgggaactgaccgaatgggaaaaactatggggtgagcggtgggccccgggatacgctcgaggaaagcgatctgatgaagtaaaacagtgtgcctgatttctgttaaagagggagggagaggaaaaaggcttggcggactggagattggtcctcatctatcctgccgcttacggggattaccatcaagagcttcggctctgttattggcttgccggttcacccgcgaccggacatccaactgcccggttttcttttttttcggtttttgcgtatttttattggactcgcaaacatggatgcttttattttttaaggctccaaccgaatgccccccaagatcactaccccgtccgtggagttcaacctttaaatctttgtttgggttttggaaccgttcattttggacacattttttttcttttggggtgggggtgagtttccttgtgaaaaaaaattgttagcggtttttttatcgatttttcattcttttattatt

SEQ ID NO: 15716 - DNA, 715 bp, Emericella nidulans
gtttcagcattaccaaatcgctgaccgagccctatggagttcgatttgcggctccaggctgatttttaacagattcctaattgcgcccgtcatatactctatcccgatgcacatgcgtactcctatctataggcgcagcttgagaagccctatttcagctgacccatctggattacgacgactctcttaatctttcagcggaggcgaacacatagattccaccacctactagcctgcgtacactgacccttaataggaccctatattgcaaacaccaaattaccaagatgtgctctgaacatgccatttatctcgattgcacggaatcatttggatatatgcgactgggccgatccactcagagaaaggactacgttcagaacaggttgcaaacatcggcatcatctacttaacaatactttctagaaaaagcctctccagggcaggatctttacataccagtctaaacatgactaactgctgacactgagcagatgtgcgtgaccttacatacgctctattctatggtctcttacctgacacaaatgaatcttgcccaaattcggaccctcatattcagcactccagtgtgggcctttcacgaacctgctgtataacagcaagcgaccattcttatgcataccatttaaaccattgctatccaaggtcgtagggtagacatttggccctccgggagtgggacaacaacggctgt

SEQ ID NO: 15717 - DNA, 532 bp, Emericella nidulans
caccgcctatcttgagctgtcttagtacacccacctgcctttactgtgtaggagcccggaaacgcctcttgcgctgtgaattggacatacggcggaacaaatgtttcacgtagagtatgaaatctgatactgccagccagcgtctgagagactcattgtctgcgaatccctctatatcgaccaatcgtgtctgaccttgctagaacaacgtcacgaggaccaggcagttcgaactgttatctctactaacggccatcctcacttgttcgacctgcaatatctctcctaaacaccgctatgacatgtcataatcggctgctaagagtcaccatcgaccgctgtccttctgacatggctatcgatcaaggctcgcatctttatctgtgctatgatactgctggcgtgtatgaccgaacccttgactatgatcgtcgacagtgctgccataccgtaaggaccgtagacggccacgataagctgcagctgcaatactcctggcgattgtgctgcgggtctgcggttatacatccac

SEQ ID NO: 15718 - DNA, 522 bp, Emericella nidulans
ggaggcggacggagccttgactgcggagacgccgcgatctggccaggctaccagagtgcattgagaggcctcgcatatttaacacgatgtatcgaccgtgcaaagccggatgcggcagatccccatgcttaggctgtgcgagctgccgaaggcagaacattatggctggcggaggcagactcataacgaagcccagaccagaaggaccacacatgatggtgacgaggacggggaacgatacggcggcttacacacctgggtggacctggccggacttggatataccagacggagttgactagcgtcaggaacgcttcggggaatgagctgcactgaacataacagtcagggacttggtatctgctaatgatgagaaccctggaatgaacattaagaccggtacggtcattaacatgtagcgagggagtgttagtcgacggcagacaggctgagagacacctagctgctgcaataagaggcttatgagctagatcagacgagcgcttggcagggtgcactcag

SEQ ID NO: 15719 - DNA, 2185 bp, Emericella nidulans
cttctcgaactcattgggtttggcggaacatttgcaatcacgcagacgattgctgctattgggttccctgttatcattttggtcttgattcctgttcgctcgtttttgttaccgcggtggttcacgcaagaggagctctcggctctggatgggcccgcagccagtccgtttaccatggagagtgtgggtggtgtttatgggcatactcctgaagaggagatgactcagagttcccggggtgaaggggttctgctccctgaagcgcatggattgacgcatacaggcgcggaaaatgatattgagatgggcgtttatgagcaccaggcgaggcaaaggaagaacatgggaaatcagagtcaaaactaatcgacacgtagacgatgcacatcccgcagctggaaattgtgaatatatagcatatactaacctatagtcgtgtgagatccatattagataattatgatatgcataggccctgccaatgcattatgtttgcatagataagaaaagtcacgtgtagatatctactgcggtcaattgtcaactttttttctgccggtgaatttggaaacatccagcaaaatagccaagtcaacatggcgcccttgtctactccagagtccatatcacgagaaatttcagtatcatccgatgcttccgccgacgaaagtacctcactcgatcagatgcgcgcgcccaagcgccgccgcctctccgagtcctcaacagactcctacaccgcagcacccgcaccactcccgtcgctctcacgaatcaagaaaaagtcctcatcaacgaatgccacctcaagtaggaaagacgacgagaacccggtcctgatcaaggatgcgcttgaaatcgggctcaatgccgaagagaactcattcaaggccctgaatgtggcgccgtggttggttggctctttgaccaccatggcagtgcgcaagccgaccgctatccagcgggcttgtattccggagattttgaaggggagggactgtattggtgggagtcgaacaggttccggaaagacgattgctttctcggtgccgatcctgcagaagtgggcagaagatccttttgggatttttgcggtgattttgacgccgactcggtatgttttcctcctcataccaaccgggacaaaaagctaattgtgtagtgaacttgcgctgcaaatcttcgagcagatcaaggcgatctccgcccctcagagcatgaaaccggtccttatcacaggcggcacagatatgcgctcgcaggcaatcgagctcgcaggccgaccccacgtcgtcgttgccacgcccggtcgtctagcagaccacatcaacacctccggtaccgacacagtcgcgggcctcaagcgcgtccgcatggtcgtcctcgatgaagcagaccgccttctttccccggggccaggaagcatgctcccagatgtcgaaacctgtctctccttcctcccgggcccctcacaacgccaaaccctcctctttaccgcaacactcactcctgaagttcgcgctctgaaatcaatgccccaaacgcccgggaaaccgcccatcttcgtcaccgagatctccacagaagctaaagataccgtcccccccacgctgagaacaacatacgtccaagtcccgctcacccaccgtgaggccttcctacatgtccttctctccaccgaatcaaatatcaccaagtccgctattgtcttcacaaacactaccaaatcagcggacctccttgagcgcctcctccgctcattaggccacagggtcacctctctacactccctccttccgcaatccgaacgtaactccaacctcgcgcgcttccgtgccagcgcggctcgagtcctcgtcgctacggacgttgcatctcgaggtctcgatattccctccgtcagcttggttgttaatttcgaggtccctaggaacccggacgactatgtgcatcgtgttggacgaacggcgcgtgctgggcggactggtgaggcggtaacgcttgtggggcagcgcgatgtgcagctcgtgcttgcgattgaggagcgtattggcagaaaaatggtagaatatgaagaggaaggggtcaatctcgaagctagggttgccaagggttcgctgctgaaggaggttggggcggcgaagagggaggctatggttgagattgatgaggggaggggtgtctc

SEQ ID NO: 15720 - DNA, 535 bp, Emericella nidulans
tggaaatgctggggaaacacgctgccgacaaacctctagatacgggcggacgatttgcgcaggatattggggacgtgcctgcagtagacggaaagaggcttgccatcacctttgtggctaatgatgcttagaaagtataatgggaagaacatatgaccattaaatgagctacgaccatcatgttgtagacttggactatccatgccatacgtatcaacctggctgaagaagatatgcatagcgtatgctgatgagaggctgacgcatgaggccattggagttcataggccccgctacattgtgttgcatgcgagaggcatatattcagatactagttgaaccatatgaaggaggctgacaagatggtgcaacggtgcttgatgggagattacaaccgagaagctcaatgaaggcagtggacagctggctgaggatgctatcgcgagttgaggttgattatacgacgtgtataaagacattggagatgagataatgctcagatactatatatgaggtcctagttataatcatgcac

SEQ ID NO: 15721 - DNA, 769 bp, Emericella nidulans
cttgtcgacgaattcagataaatgattgcagttcttttaaccgatgcggatggtacattatatagccatgcattattcaatccaaaaatcattagccattctgttgaacgtacatatttacagggtggtgaaggctgtctgtctgtagaccgcgaagtacctggttatgttcctcgttatacaagaattacagtaaaagcaacttctatttacggagaagaagtaaaattacgtttaaaaggtttaccagcattcgtattccaacacgagattgatcatttaaaaggcgttatgttctatgaccatatcaataaagaaaattcttttgccgctcctgatgattccaaacctttagagcgataataataaaaagcgggtaggttaatgtttcggcttttttttccaacacggggatttaatctttacctgtttggcaatccaattctcctttattggcatggcataaaaccggttttcatttacaaccatttgtacacatgaattggcaagttaaccctgacaaattcttgcgttaattaacaatcccaacactctgtggcaatggctttcgaacactttttaaatatttttttaaccctcaaaaaatcttttccctttgaaaccctatataaccctacttttcaatggtctttccaaattcttttgtgggttaacccgcaaccggaggtattccatggatatgcctgccaaccaataaatgaaatttggttatggataaaacttcttttctctttctttaaaaaaatgg

SEQ ID NO: 15722 - DNA, 2628 bp, Emericella nidulans
gctgaactgcatgacccagtcgaacgggttgatagctacggcgccgttcttgacgaccacctggccagggccagttttcgtgtagggggcgtcgccgactttgaaggggatcacctttttggcggggatccacgcggcgcggtttttgggtttgggggtcccgttgccgatggtagccggcgctgctgccgttgctgcggatgtatcttgagttgccataacgaggtccaggtgccgttaacgtggttcagtgcagttccaatgtatggtagcgttgtaagctgacacggcgacggctgcgagaggggttggggggacggaaccagctgaaacaggactggcgaaagaaagctgctgtgttatatgtaggcagagctaaagaaccttgtggagcgacagaaccaaagtcagtctgggccatgggctatcttccataattttgggagctcgaggtccggattgcccgttaatactccgccagactagggcaagatagggctacgcggagttttaggtggacggatttcaaccctccgaagtccgctcgaacttttgtcgacgagattaagccactagcctaaaggaatcagacctttaattcctcaggccgagtcgggatcattgaaggcgagaatgaggtgaggttgtcagccacatcgtcagctcaatcctttagaccacgttcttatctcgcggccgttctccaatcgacgggcccgctggcccccagcgtgcagattacaccgtctcgctccgactgcaggatctggcgtcttccatgcgcggacgtttcggacggcgatgactgtctgagtggttggcagggatgcacccctacctacccctgatcgaagctaatggtaatgcagaatacgaggttggttagactaagcgcttctgcagctgcagcgcatggaagctgttctgtctggtggagagactaagcagtgctctgtgctcctctgtgctgctctgcattgcactgcactgtactgcattgtactgcattgctgttctgcacggatcattcatccatctaccatggatccactactaacctcgcttactctagtcgatctggtcaagacgaccaagacctcggagaattagatggccaaccaaggatagatgcgagatcaactgatccaccgctggcaaacttagttgtgaatgtcgcgaacgcaaataccacggagatggcatgcagccgcacccgaaatggaatgctgtaggcctaatcaagctcatcgattctcgcccccaaatctggctgcgcggtcctgcaggtgagacggatcctggaggctccatgctggctggctctgcctcctcgtggacgagggtacgatggcagccagtctgctggcgtgctggcgccgctggtagcacggccacgagcctattgattgcacgggcaaacgttcgtaactcgctcgtaacctataattacgatagctaaccacatcctggttctctctcataagaatgaatggcattcccgccttgatccgtcagcattgtcaacccggatagaccagtgcctcgtcattcaacatcacagatccagagactacaaagaccagcaatcatggcgtgtcccaccagacgaggacgacagcagcccggctttgcatgcgaggagtgtcgccgccgcaaagcgcgctgtgatcgcgtgcgtccgaaatgcgggttctgcactgagaatgagctgcagtgtgtgttcgttgacaagaggcagcagaggggtccgatcaaagggcagatcacctcgatgcagtcgcagctgggtaggtgtttgtcttgtctcattgtatctcgtctcgtctgcgcttttgtgattatggggctgccatgtttccggtccggacacaggcatctgcaaggcccgccgctgtgctcccccgatctgcagggaccaatgcagctggttctggagcttgtgctgtgctgcttccctgtctttccacatggtcgagtcgagcgagctagctaacatgggatgcctcatgctttcagcaacgcttcgatggcagcttgatcgatacctgcgacatcgacctcccccgtccataaccatggccggcgagctcgatgagccaccagcggatatccagacgatgctggatgactttgatgtacaggtcgccgcgctgaagcaggatgccacggcaaccaccacaatgtcgacgtcgacagctctcatgcctgccccagccatctcatctaaagatgctgctcctgctggtgctggtttatcgtggcctgacccaacctggctggatcgccagtggcaggatgtcagcagtaccagcctcgtccctccatcagacctgacagtcttgtcggccactaccctaaccgaccctctcagcttcgaccttttgaacgagactcctcctcctccttctacgacgacaacaacgtcgacgacgaggcgagactcatgtactaaggtcatgttaactgacctcatccgggctgaattgtacactacctaactgatttgtctaccatgacacctggctgacaatgtgcagagaccaactctacaacggccgggtccacgccttctgccccatcatccaccggcgacggtactttgcgcgggtcgcccgagataggcgtccc

SEQ ID NO: 15723 - DNA, 2403 bp, Emericella nidulans
tattcccgcgggcaaattgtgtcaaatgggaagctgggatgcctaaaattcagccgaatcacgaccaaatcgcttgttctgggttcaatgggttttttacctccgaggagattatcatggctattcgtcatgcggagttacctaagcgtgtaagtcctaatcatcctcttcattatgccaatagcaactgatcacaagctatccagtctcctttctctgagaaatgcccccagcgtacttatgaatcgaccataagtacgctttacaaggtacggctttgctctcaatccccttaaccgctttgtgtccaaaactagctgatcatatctcttgtcgttttagttcccctggtatgctccttggacctatactgtggcagatcgcaaccagctcttcgaactggccaaccgtcacatacaatgccttgcaactggtatcaaacacaagaccgtcggtctccttgagaagcttcttcgtgaattacttcaggctggcctgagttgtcctggattcagcgagcgccagaagtataccctctgcatgaactcgcaaatcgagtccgaaatcagcaagctatcagtcatgagcaagtggtttccgtttgacacgctttctaataagcctgacttcgatgaagacattcatattgtgagttccgcgtgctgagtctcttgagagcactaacattattagtactacgcggaccttatctctcagagtgtcgttccagatttgagaaactcgggcttgatcaataaatttccaatggatatgccctaccttagttctccgtacggacgcatctggctcgaatggtcgcagaacgccgccaaggttcattgggaggatgctgttgagtacgaaatgaagatcctgcacgatctcgtcctccacggctggatgaatgacgacaggagcaacatgctgaatttgaaccttagaaggccgtctggagaactatcgttttcacgtggccttagcgaccgccgcaacatgtcactctccctctacacatctgataccgatgaaagccaggctcagaccgactcgtcatcccgcagcggtgtctacatgcctcacttccgccgtgcaagtgagtctgcaggatcaggccgcatttctggccttagcggccccagtagcacttggactcacgcgttgcttcttgactcatctttcgaagcgcgtcctgcgtaccggcaccaccgcaaaaccgagtcgtctcctatgtgcctcactcctaccacgaataattggagcccggagatgaccggctagagggaaggtatggccaactccagtttatcaggacaccatccattctttttcttcttccttcagatttcaggtatgaactaaccaaagtgtacggtcaggacataggcctacacgcttggatgcgcttcgtccagacctgtactgtattttgctttaggggcttttcaggctcgctcctacccacacgataggaccgagatatcttgtctattggaagaaaagacctgtccgtgctcgaagtctcttaggaattaccaggtctgcgatatcatcgttacgattctgaactagaagaaaatgcttgggaaacttgaatacaagatacattgtcacttcctctacagtcacgcattatttccgtctcttcgatttttgaatgaggctcgtatttttggcgagataggagggtggaatgggtcagacgcagctaaattggcttctatagtccagaatttttttcgagatttatgtatctaacgaaccccatattcctgcctcatctgcttccagtgtatcttggtctttggcctgcgtagccccatcctgcctctcgagaagcttcttcctggccaacccctctgccctcattctctctctccgtttctgcggatcctcccatccaggcttcgtcttccctttgtgattagcgccgttagggttttccgaggaacagttattcagaagcgctatcctaaatcgctttttacgctcagtgttcaccgagaagcgctcgtttgacatcgtgaccagcatctggagatattcttctgatactagacttcgaataacgtcgctatcgtcttcatagtaccctatcacagattctagtgctaggcctgctgatcgaacagcgacgatcggactaggtcccttgtcaccttctaccaggcatcgaagtccctggagcccactttctcggaatcctgagcttgaggccgccgataagacgggctgggcgtggtgtagtgttgcggtcattatatggaggatctacaggtcgtgttagcatggcattggcaggtgatgcttttgcttgcccaacttgggattcaaaggccagagacaccagaccgtttaatgcagacttttaatgcaaaaaaaagcggtgggctggtaggtagatca

SEQ ID NO: 15724 - DNA, 381 bp, Emericella nidulans
ctgcggatggccccgtgcgccccagggcaggcgagcacctggagcctgtggagctggcctttgcacccctagccggtccgatggacacagagcagaacatccgacccaatcagattgacgagtgcctccggatcataatagacctgagagcgctcctagagtgcgatatcctacccgctgctgtgacttgcgtggcattgaactactgccttcgacgcttgaggcaactgctatgctacacatgcttgtcatactgcagctctggagacacagtcctactcgtgtgttcgactgctgacgatggctggtaccacactagcgcctgccattctgcataccagaacgcttcatgacagactgatatatgtcactgcgcgtcac

SEQ ID NO: 15725 - DNA, 2578 bp, Emericella nidulans
aacaacatatcacaccataccctaccgtcaaggcgctggagtgtttgtttggtggcttggttgacatacgctattcccagcgcaaacatcagcgtcagctcaatcttcttccgccgcttcatctgtagcttccatagcacgggcacggggagaaggccgactgtcacgtcaagaattaaattgatgatgtgcagggcgagatatgtggcctcagtgctgccgcagtggccgtcggcggtggggtcccagttcatccgcaagggcttgcacagcagcagtgaggataatatgacggcggccccccagaggatctgtagagtgattaatgtatagcagcagtagcggatggttcgggcgctgccgaagagaccaatgtacaggaggacaatcgacacctttactgcgctgatggcgccggcccagacgggagagttggcgacatagatctgaagttgtcaaggatcattctttagtgccggttagaaagaagatgatggcaagtaagcactcacctttgcgaagtgctgtaactgaatcgtcgggttggagagctcccaggtatgctgccccagccctcccttggctaccgctattcgatccttaagagacaagacaggaaataacattgagcgatagcgacataccagtaatcacaaggaccacgcagccgctagagaagatctgccaatcctccgatcaacatccactgctctgctcgaggctgcgaacttggccaggtaacgtaccaatgcaacgacagaggcccaatcatgcgctgcaatcctccgcttccgcaaacgatgcgagtaaaagcgcagaatcatggcgattaaggccagagtctcaaagaccacggaaacgacaactgccgctatggcccgggaatgcgctgtcccagcggaagaagccatggtgatgggcgtcctgcgagattcgcgtaccaaaagtccaaacaagaggcttgacagcagcttatattttgtgtgtgcaaggaatcgacagattctaacagctttatggagagaacctgggatgggaaaccccccatctgcaatagatcaggacagatggtcccagcatcgcgtcccagggatcatggccggacctcaacttccagaactggggcggctcgtcttatggcgggggtgtgcatccaatcgtggacttgttcaggtgaaacagagagttggatattgatcgaatccttcaagtccacggacgaatcgagagctggtgactggcgtggtcgtgtaaccagccctctgcagctgctggagaatgcctccggttcagaggcggcttaggctagtcttgctgcttgccagaattcatcagagcggccaataaaatagccaggagctctgacatgcagcaagaatcagtcgcactgcaggtgatctgccgttgagcccggcgatcagacgccgagggcagaggcaacagtgggccagtaggagcaccattcttctgccctggtctatttgtgcatcaagattcgtgggcaacttggcattcgcctagcaaatggatttaggtatatctgcctcggcgtcgattgaaatggaggttagcgttggcccgcatggcctcattcaggcctagtagcaatgtcgcaagctgtctctgtgcttattgtcgtacaaaatacgccatgcagggcctctagcgaactagaagagactcgggtcagttatcagctatccggtacagacactgagcatctcacaatagtatttgcattacgatgcttcagcctaaatagatactttgcgcccgacagagccgcccgtcgctgccagcaacccactcctcgctgcctaccagcgcattgccgtagaacaaactctgcggatcatacttcctcttgattgcactgagcgccgcataattctcgccaaagaactggctctggaaatctggctgctggaaatcggcctcgttcatgtacgcgccgctctctggtcctgtgacggcagtcaacgaggggatgtattctttagtaaccaatttctggtgctgtgtattctccgcgtaacttgcagtgtagtcccagttggcgatgacttcaagcgaggcgattgcgtttcgccagccggggaagaccgcgttgggaacggacgccccggctgagacgttgatgccgacgccgaggatgtagaatgatgggttggatataatctcgcggagtgcgagggtgagagccgcgttggacgtattggatgcgagcacggagcgtgggataagccggttcccctggacctgggagttggggtatgcaccaaagtagttgttgaaggccgtgtaatagtcgtcgaaggcgattatgttgaggacatacgccaccgacagggagtccagcgtttcgataaggggttgtaaaatggacttcacttctatggcggagcgggtcgtgaagagcgctggttgaagggacagcaccccgttgctgagcacataggctgtgctggcgcccatatcaacccatgtgggcattgctgcgtggaaggcttcaacggccacccaaaagtcatcttctgatgatgtttgctttatctgcaacatggcgccgccaccgggc

SEQ ID NO: 15726 - DNA, 566 bp, Emericella nidulans
  unsure (1)..(566): unsure at all n locations
cgcaacggcgagacctagcccggcttggcatgaaaaatgtggacttcttcacacccagtgctggacactcggaggccagatattgcacattggcgtgaacggaactgaggaggcacattgggacacgcgcttgataggaccatggccacaggacgatggctttgataattggaaactccttgagtcgtgtagagctggcttcaatttctgaatgaacgccattcataggcaaccaatatgataccgcgcgctacttacagcattgttctggattctatgtgaaggatctaatacaaaccgcacactgacattctagaacggcattacccttgaatgaccccagaaaatgtgagagagagctgtgctacgattgaccttgtctgtggccaccgacgacgccgcactatgcaacaccgcgctgaggcctaagtttgacgatacgcccttatgatcagaacacataacgaagaagcttgatggacgcangagcacatacagatcgtctgaagggatagctaatgcagatgatattctgttaacagcccacgactgcatatcgacctagc

SEQ ID NO: 15727 - DNA, 2759 bp, Emericella nidulans
ctttgggtcggggttttgagcatcaggtgctggcccgttggaaggccgagggcttgggatgggtgctcaagggagagagtgaaaatgtgcgtgtcggaggagacagatgttttcttcgtcagagtagcttttgtccaggctttgggggtaaggaaagtagggcggggatcgctggatgagtctgttgtgtctgcgttgccctttctaagggcttcgagcgaggctttgtcgagggtgccgatatggtagtctggcatcatctttttggcggtttcgctgtctatcatgacgttagaaggacataatagagggccagggttggagaacttacggatttcgaggaactcctcagaagcatccgttccagcagccgagatgatactctgagctccgccggggtgtccctctaggaatgctgtgccatcatatacctccccgttaacgacgaaccagggcctctcgtccgacgagttctttttgaactcctctagatcaatgatcctcgtcacgccctctttcttcatattgacctccaccacgggctccgcttcaacaggctcctcaccctcctgcctctcgccccagttcccattcgtcaagtcgcctcctgctttcttgatttgttccatccacccgctcgagccagtgatatcagtcggatgctcgaagagcaaccgcccattctcgttggtgatcttgacccggaaccaagggttgttcatcataccaaggacagaccagtacatatcctttggttggagactaagtgcttcgtccattgcgcggacgagtagggcatcactgcttgcgagttccgagacgggaatgtcgagggaccagaaggaccagcagaagcaggcttctcgccaggccatgtcgacgcggccgccatagagcgtaccttcgaagtcgcggtatttgtcttcggcgtattcgatccgcgcaaggcgccatgctgtaagatgttagcagtggattcaacgggatgcagatttatgggcttggtagttaggaagcgtacatttgcccttatccagcgagatctcgacacgggttattcttcgtccgcctcctgcataggcatacccttttgctgtgtagaacggcctcgcggcggccagatccagggtttccttgtgctgggggtagacggcggcggaattgacgttcagatcgtagatggcgtagcgttcatcgcgccaccatgacgggttttgggacgacatatctggcgtgaccattgtactgcagaccattagtatgagtgagaaataacagtcaacgagatgagacgtacggtagcaccctgttgtcataaatatggtaccagttatcgctgggcgcgtcggtgatgataagcttcttcagccacttgacactgcgccctccaatctggcccggtacgacggccctcagcggacgaccgtggtctggtctgaggtcttcgccgttcatcttgtgctcgagcataatgcctctattcgggtgcatggcccagttgagtttgatggatgtcccgtaatttccgttcggctataaacgttagacggatcaactaaccctgatcctctaagacagggcttcattcacgcggacataccaagttatcggcaccctccatgcagacatactttgctcttcgcaggggcttggcgctctttatgatatcggccatcatgggcccggtgaagagcgcagtagacagagcggccgagccccatgagaagcctttcgatttccgtactgtgttttgctctttccgtctgttgcctgcacatactagtgtaataggagctgtgatctgatcatagttctgcaggatctgcttgaagctgagggtgattggcttttcaacgagtctagcacttgtcagggagtagttcacaagctgaaacgagactgacggacccttcaatgcggagttcccagttgggaatgtcctcgtcgcgaacatggggcactgggccatgattccggacgtagaatagctcaggaggcgtcaagaagcctaagactgtaagcttttcgattcgaagacaaggtaaggatataccatagatccatagagcgtaccttgctgaaagagtgctgtcaatggaggctcgacattgaacgggtgaacgccagtgagccggatcagccggggatctcgggggacatggctatctggtgtagttttatctagacttagaacctcggttggttctttcgaaggaggaggtaaaggaatatctgcagtatcgagctctgtgatctcttgctcttcgaccctgatctgggaagtcttgagagtcttgggtatggagcccgtccgcacttgtgtgacggttgtagacattgtgagagtatgggataggaaaataatatagaggtacagattactgaagaattcgcagcgaccacggcatgaactggtagatatgccagatcaaggtcgattagatagtatagggcacgggttctggctccaggctgacgtgggggatatgtagttcgtcaaatacaaaggccggcgggatctgacgaaatgagacgaaaacagatggaataagaccaaatcaagacaaaacgagacaaaataagacgaaatacagttggcagccgcccgctgcctttcagcctcggagaaacagagtattttcgttttctaattctaaggacagcaggcaatatgctggatcctacgatccacttcagggctccatctccgcgggccgcgaaccggctgcaagtgctagccctgaccagtactatataca

SEQ ID NO: 15728 - DNA, 710 bp, Emericella nidulans
cgcctaggctcgggaagcttgccgacgaattcagataagacgagtattctgggtatgaaatacatcgaaatatggcgctgaaaaagcggaactatcccttaaaacttgcagaaacgtgttgatcaaagcttgatgctttcttgaataaaacgatggataaattggaatcacatatgccaaagtttgaaagaagagaaagttaacaactgatgatgaaagagatatatacggcgatcagagattctcgttgttcactaattgaagcgggtacaggaacagggaagactcttgcttatttgcttcctagtctttattttgcaaagagagacgaagaacctgtcattataagtacacagacggcacaacttcaacaacaaatagtagaaaaagaaatttcgttattacaaaaccttaatgccattttcatttgaggtagctcttcttaaaggcagaaagcattttgatgcttacattaatttgaggatgctttgcagacggagaaaaaaattttgactggcacttaccaggcgaagatttagtttggttatgcaactgaaacggtgatcggacccttaactatcctgagggcgaaggtacctgaatgggtttgagcacccgttcgccaggagattgtagaatggttatccgtgtatatagcgggagataaacttttgcaaattggattccaaatcgattttttagggtttagg

SEQ ID NO: 15729 - DNA, 3282 bp, Emericella nidulans
gtctgatgtgccggatacggcgcagagccggttagggttcgtgggctgatggacgttagtgaactgtacaaaaagttgtgaggtcgagagcttaccccaggaatgcacgaatgccagtagttaaaggtggtaaaatcatcgaccagattgacaagtgttgggatctcgtcctcagagtagtagcccatgacttcctcggtagctaccttggggtccatacccttgtggtgcaccagctgctgctgaacgaacccgttcatgcttggcttgagggtcccgttacggatagcctcatcgctgggatggtaggtgccgtagagctccatgttatagcccgtgatcgagtggtcaggatcgtgcttgaccgagtcaaagtccttatagacactgcatcgctgtgtgctgctcggctcgctcacgttctgggggtagcaaaagggaccgttattgacgacgttgtcgagtcccttacgcttgacaccacccaggatattgtcgaaactgcggttctctagcagaatccagactacattctcgatcttatccttgagattggcgatggactccttggatccagaagcatatccaaagggggttttgctgctgggaggcacggccgcagcggccgtagcactggcgagactgagaatcggcactagagtgtgggccttcataatggtagatggaagaggctgggtatgcttgtctacattgtcttggttgtctatgtatgctttttatagttcgccttgggaatgctatggctcaagtcacatatctgcccgaaattcccgcgggcaaatggaaggccatgatttcgcgcacatgcaccgacaagccaacctcacaggcgctctgaattccgtgatagccgccagacccatgactgtggagtcgcctgctgcagctgcttatcaagatatcatgcctatcccaaggttcaagcttctgccgcacagaataaacaatgcaaagcatggaagtggagcatcaagctttgcccaagctttcgtaccacccggtaccaccaatcagagtattgattctcagtcacattgcacagcagccaaatctgattggatcataaattcaaacttcaaggtacctcgccaatcatattgcgcgcagcaagcatgctctgaccatttaataaatgggaatgcatgaattgagaccgaggtccatacagtatggacctcatgtacgtctgcgggctgtcaattccactcacggcccagaacagaaaattgatcgtccagtctggagtgacactcaacggacatgtccattcgtatatctagaatcacggtagcccagcatcacgagcctgggtgattcgccattgctacgtagtagactgcagagctctgtcaatgtgagtacgatcgaggatagacctggcttgccaggagttctgcagacgccgatactgggcttcctgagagctcatgaaagtagccttttttctgcagaaaagcctttcgtggcctcaccgggctctgaacccagtcatccattcttaccaagattatgaagagtggacagatcataattgtctttcttcgaattaggccataacgcgcacggggtattaacaggcaggaggtgcgttacgcgagtgctgcatacttatttgcttggaccgaagggaggttgaggcccgattcttgacacagtccagcatcttgatgactctagtgacgatgctcaggctctgtgacggcagcagttcctatatggcagggtatggcctcgtagggtgcgggaggttcttaagcccaacattggctgcagtggattctgtcactgataggtacgtcccaagtatgatccaatgccgcattagtgttgtcaaaacctggaagacgcgattcgctagtctgctagccaacgcgttcgagacccttggtgtccacctcggccaagcagatgtaaatgatatgacaggacgcaaaccagacggaaggctaagatggtggagaatggcgtacaacggtggagtatagcaaagtattagatttgcacttgggtatacgctttaacattggcacatgccgatatcggcgtcccaatgtataggcacaaaaaacaacaccacctctcattggcgcacagctagagattcactggcgctcgttagtgtgactgtcacagtagatatcttaccaagctgattgatatgttcatacactatttctgagttgcctgtcggcgaggtcggtatcacgaatgctctgtcctctgtccaagaaaacaaagttatagatgggccttttttcatatttcttaagcttcttcttaagcttctaaccaaagatatattggggcctaatagtaatcccggcgtccaggttggaaacagttttcgcgccaaacatattaattgtggatgatgagataagatgcgaggagctcccaggtaggcgctggtgcaaggatactaatgccctgtctggaaagttcaatttctgcaggaagatagcgtcgttagttgttggccgcttgctgttcggccatctagattcaatcctgcagaactatgcacagcgtcagcgctaaaatagctaacggtccttcatgggagagatgaccttgcagaggtctggacgcactggtctctaggaagactccaataacagtagatccacacctgaattagctaaggtcagtacttccttgagctcctttggctcttaattcctctgcagttctccatgttgccgacgcagaccagccagcgagaggttagagagaagaattccgtagcacaagacaatggacagtagccgggagggcactttccatgctagactaagcttctgcgtccatacgaagctatagttagcccagtaggtcgccgcgccgccacttgcaatagacgtgcccatcgatcaccaccatctgacacattttgagctgaaaagctggaatgaagagcacggcgctttcgattagtcaggaggaggctggtaaatattgcttctgctgcccaaacctggagcaataaagaagcaaagcagatcaacggcacatcaaacggtagacaagagatataggcccttgaacgaaggagcgacaagagctgagggagtcactagttggacggtatccaggtatccggcagagggagcaaatctgtgagagcctcgatagatacagccgccccaatacaacttgaatgtaccgaagaaacaaagagatcacaaatggcccgcagaagctggtgattgctttgctgtatttgggactttgcaccatagagcgtgggaaccttgaatggag

SEQ ID NO: 15730 - DNA, 2981 bp, Emericella nidulans
tcgcctcctagttttgaaattgcaatgagacccctttagtcctgaaccctaagtcgtaataggttcatgttgtcgccaataaggttttgttatggagactctggttggccaccctttatgggtgcaggtgacctcagccccagcgacttaaagcccctcttcctggcctcctctcaaactcgcatcctttctcttcccgccttcaatcgttgtccatcccacagtaaaatagcaacccaaccgtccaccgttcacttttccttctctcctcagctctgttactgttcttccttctttcatcccctgcgttagtatattctccttctacagaatattccccgtttcgcacccaactacctccttgccatatttccttccattttcttcaaaagctcagcgtctccgactctggtccttgcttgtatccactatctatttgtacattgacaatctcaacgaccgcaacgtgcttattgcttgctcctcgcctttaatacgccgccgccaagatgtcaacttttttctacggacagcaccaacagcaccaccaggccgctcaccacggtgccaccgctcatctgcaaacgtcgaataaccaccatggaagccgctcccggagaggtccgaagatggctgctcaaaatgcccaacgtcaatttcgtggtgtcaagagtatgagggagttggcggaagctccctctgtaactgcgttccgtgccaggttcgaagctgggcggtctttcgatctggacgacgatctcgagttctgtccgggtctcctgactgaggacgatgtatgttatcgcttgacctgagtctctccctgagattcgatggcctctttcagtaaagatctgttattgacatgaactccagctgcactctatccactctgcttcctcggatcgttcgtctctctccagtggctcgcctgacacatcgccaatccagcatcagatccagcccgttcagcaggttacgccgtcgatttctttgtctcccgcttcttccaatacgtacctccactcaggggtcactggtaactataatcaagcgagcttccagcaaccttcggctgctcgcacccgcaaagtcattccaatcatcaaccccaacactgggatgaccctgaccagcccgcccaactccatctccccgggtcagatgcagaacgctcagcgtcggtggtaaaggccagcacgccgagccgccattttgctggcaagagccacacgtccgcccacaattgtttcgatttcgctcagcttctgcatcatcggtctccctaaccgcgggtcataatattcactgtttgcttctctaatcgtttgacacgactcgactcttctaacgatcaacctaaactcgcctttttttgattcacgaaattcgcggagcataaaaggatacattgtttttgtttgtacatacaccctccgatcacgatttcctagatttatgctttcttcgactacctgcgagcgacggcgccctgcgattcgattcttgcattctccagcgataccttgtttttctactctcggttagggaaaaccaaaatacttatttattggccgcggggttcaggccggcgatgatgtatagaaagcggcgattttgccatttgggggacacggagttgtttttcttggagtattctggcggctttgcgaagttccgcttagtggtttagccatgtttcttccggggtttggcttgggtacaaattttgggtgggacggaatttcatgctttacaaggatctagaaggcggcaacgatatacgtcttgcattggttgggatttgttaaatttgtttcggaaggctcgcgacgtttgatatcttgcatatgtcttgtctggccatttttgtttctgttcgtgtatatggttgggactggtaacacaccttccctattgttaggttaactggctgtaaaatccatcgactggattagcgttcaatgaatggttccatattgtagccctgttaaagtatctattcttgagattgtcgtttgattcgatttatcgcttgtctcagatatcgtttgttgacttcgatactgtgactcaatagaacaagtaaagtagcggccaacaagcatattcattcgacgaactgcacatgccgcagttgttgggccataatcggtcgatgtaaatgtcctagatgaccaccaggccattaaaaccactcggcagtgacctgtccatttcttaattatagaagtagtatatttgacttaaatatgtggaattctcgcaagcctggtaaagatatatgtcaccatatattttaccgaccatcacgcgtttgatcattctcttaaactaggactgcaacacttgcctacaaaactacttaaaactattactcgctttcagcaagacgaaagtaaaaattgcttgtctacccttgtatctcatttattgtatgcaaaactaaccgccctgccatcagggcgtatctactattcaccctgcaaatccaacctctataaactcaaaaagcctaaaaaacaagatatcttaagaccctgaacgatcatcctccggtcccttaaccccgagaactatttaagttattacctcggttatcatttgcccagccgcaggtgaagttcgtcgtgaaagccatggtaacctggcctggcaaatgagtattcatgacgtcactgtccatcctcaaatccagcaggcctggttggccagtctgtagcaaaaatgacgtccaggagacattgagcaattgaattcgtggagctttcgcggccgtttataaaagccttacctcccttaaatagcccttcaaaaagctgtaggttaacatactttctccgcatatcaacgacctttcaagtctcatcacatcccatctacaactcatgtgagctactatttaggcaccaccccaacaagcgctttagcaaacttgctcacatttggaattagattcgaatcaatccacattaaaaatg

SEQ ID NO: 15731 - DNA, 3006 bp, Emericella nidulans
  unsure (1)..(3006): unsure at all n locations
ggaaactcccaaagcatatgcagagccgaatacagactgatgctttagtgtttttcggatactgtcaattatggaggtcggtccgggcgagacagcgattgcatagatgccgaaggaagcggcagtgccagcttttgtgttggcaaaattgacgagaaccatgctaaggaatattccgaggccgcagacgcatactgaaaagattagtgggcacttctagttggaagtagatgcataacatacagacgctcgctcgattcccaagaaaatcgatgaagacacctagacatggaagaaggaagaagccttctcctgtaagcaggaatcttgtccccaggctcttgtagccttattcaaagacataccagcatactgtgacaacgaactgtaccatcccaccgtgatactgtcgacatcaaacctcttctccgcgagctccgtagcattctgactaaagaccagcgcggtgctcgtctggaagagcgagaatgccatgacggcccaaaacatccagngcagttgaaatatcttttggaactcgaacttcttgttcttctctgttagcacttccttcaatgcactgtcttggcgcccggtatagtgcttgttgcagtaccgcgtgaagagatagaagatggctgtcacggcgtcggtgaagaggtccatgaaaacagaggtccagaagacccaggcgaaattgccggtgttctggccagccatattggtcattgccccggggatattgagtgtgatttactttggcaataacattcgctgtggattaccgacgaagccaccgacctacattgccaggaaccatttcttcaaattaatgatggcaagtaccttcccgatcgccaactcaaaccccagcgtagacgcaaacccattgctaggaggaaaccacgaggaaaacatcttatactgcgcaacttgcgtagcgatatcccccagtgcaagaatgacccggccgccgatcataaagtttaaagagcgtacagtcgtcgcggctgcgtcaaggatggatccgactgtgttgacgatgtttccgtagacgatcatttctttaggaacatagaagttaggattagttgtagtaagtaatcgagggtgatgtacccgcgcctccaattcgatccgtcacgatcccgctaatcaataagagtacagtggccataaagtcctcacttgcttctagaagcgagaattgcgtgttagagacttgcatttgctgattgctttcagctatgcgcgtgattattgaagtacgataacgtacctttttgatagtactctccatggcgccggttacgccagagctccagtgcgagccgaaactaatgcacgagatgaacaaaacggcaaagagcttggccagcaaagggggcgggccttttccgtcgatagtagaggcatccgggccagagtctgtatcctgtgacggggagacgaccggctcctcagtcttgcaaggtggtttttcggcgttcatggcaaaggttggatggatgtttgggggaaaagaagtacatgcagtctggagcggcggatatgttcagcttaagtaccaggtactcattgttaacagaaaagcttcatcagataagatgacagaccccacttgagtctgagcagctcttgcaaaatcaacgcttattggctgtcgattactgattgataaagatctcggaacctgtccgagacttgtgagggctcaacaaaaggcctacacgaatggcgtattcgtagcgagacccacggctccaatcacccaatgcactagaacttggtaccttgaattttaatagctactcagtttcgagcaagtggtccggtgcttgtacggtgcttgtattttaagtgtggacctgaaacacgtggcctgacctctttctagggctgaaggttgagacgttgcgtcccaagggcatttacgacaacttgaaaatccatagtcaaatcggagagcctggagccggtgtttactaggaaagcttcgtttggaatttctggtctatgtaataacaaagtgggccgtccaatccggggcgtgattgagtccttaagcactatcctatccaaaggccttcaaagcggattgttagagctatattggtgcagctcacctgggggaactaacctgatactttacctgaaaaagctacattcctgagcatatacgcacagtgtgcttggaaaaggtttatgccttccggcgctcccttgtctatccattcgttttcttttcgttttcctaggctggacagtatacattagatacattcgtggatatgcatgtctttggagtcgaacttctgaatgtggatgatccttgtggatgataggtgtggaacgaaatatatggctgtttaacggcaaccatccatgcatcttatcgaagtctgcaatctaaacatgaccgtcttcagcgcatgtaaaggaacttcgtgtgcaaagtatccctagctttgatcttgcttaatcaaaggcgacgaactcgtcaatgggggtgggatccgccatcggtctttgattgcgtcctcgcgcatctcactgaaagtgtggctcaacacgcagtctccagctgcaaaaatggcaagaaatgaaatcatgtacaaatcatatgttttttttcttgaaatgatagccacatttattagctctaggcctgctataattgtcagtgcccatagacaaatattctcttagtactgaaagtctctctcgcaacagggcaaatctttgagctcgtcagtagctacatgagaaaatgaagataaaatgcgttaactgctaagttgactatcgtccaactacggataactataaggactacataggatagatggctctgttgtgcggttcacgtgcgtggctgccgagtagatattgaccactaaacaatctgagcccaaagcataaacttacatcatttttcagacaactgaggtcactgagagatttccaaagaagccgacagaattaataacttgcttctgtgctcat

SEQ ID NO: 15732 - DNA, 698 bp, Emericella nidulans
  unsure (1)..(698): unsure at all n locations
accgcctccaagcttgctcgataaagcttgaccctcttgaccctctcatctttttacctcttcttcctccactcgtcttcctcttttccctctacgcataccactggtgccgccaagtacttcggcatctgcatccaatcagtgccttcaataaccaaaatccagtatcaagaatccagtattaagcgccatggccacctctgagcccgagccggtccacttcttcgacctctactcagacctcccaggcccggccaagtcatggtctcctaacaccctcggagtgcgagcggtgctcaacttcaaggggatcccatatactcagagctggatctcgtatccagatattaaaccgctcatcacgggcttggggctgccacccaaccgagaaggcattccatatacacttacagccatcatccaccggtcttctgttacgtacaatccaaacggagcgctaatggactcgctccncattgtcctgcacctcgcaagacgttccgtctncgtcagtgtttcctctggtgacgccagctaccgctcgacttgctgtcagatagtttgcagcttctgcccccgtgatctcatgtcttgtatccacgcgtggtgagcattgacgatcgcgccagagtacttcatgagacgcgtcgcgggttcggcagccgtcgccagtcatccacgaccggcgagctgacagc

SEQ ID NO: 15733 - DNA, 1367 bp, Emericella nidulans
aagcgaccaacacagtcttagaagcgatcgccagctgaaaacacagtaactgcgtcctctggctgagttgataccctatctgacggtttttgtctggcagccagtgccacattgtgcatgtagtcttcgttcatggcggctagctcagcattgcgcaatgccgtctgtagatctgaagcgaggaacttaggacccctctgtctctgtggtgctgttgccccatgagtctctatttctactggctcgcgtggagcttcgtctccgtcacagaatacggctgggcgaacaggtcgggcaggctcgttcgttatagccatctctatgtcttcatcggcaagcaaaggctgcatggttgtcagcagagtctagttttgaagccagccatgggtttacctgttggtcgactaccagatcattgggcccgtcttctctcacctcactcaccggtctagtcctgacttcattctgagtcctcccaccgagctcaacaatattgccattttcatcaaactcaaagtcaggctggagcagcacaccaccctcgtcatgtaaggacgaagtcagcacccttccaaagtcaagaccgcctttagcagagctcgcaacgtcagcctcagagctgaatccacccatatctctcagaatgttctcatcagacggaatattcagacccagtactgagctgttcgagagagcagattgactgaggtccggagttcgaggtatggagacgttggattgctggctcgattccgtctcaagcaacctatttagtttcgacagatctaggccgagaccggggaggttgttctctgggagaaaggagggatcatagggtaggacgagctgctcaggtctaatattccggtcaatgattggtcctgcaagttgagaagctctgagagacactaacctggcctttccggcggacggatccaatcctccagcagggaccgaccttaacgtttgcctcatcttatcgtgcatcgcttgaacgtcgagcagggtatatccgcactgttggctatacaccctcgagattccgtacctgaacgtcaggtcttatcagtattgcaaatcctcgaggggaccaagaatacatacaaaaggttgctctggagtctgagcgccatcggagctgcaggatcgataataacattgcaagccttgggaacatccacattttgtatagtccgccgatttagtctccttgaaatggatctagcccctagagttgctacaagcctgtgcagacagccatgtcagcccgaggttttgatggcagagtgactgaggacagggtgatgaatagcctaccaaaccgtagctactccatgctcgggagatgtaagtactaggaagaacat

SEQ ID NO: 15734 - DNA, 511 bp, Emericella nidulans
tcgtgagacgtcccgcatactgccgcagaggttgtctgatcatatgcacactctgcctggaacgcggagttttgtgatccttcttcgcgtgaaacagatcctagctgttggtcatctggattatgtccctatcaaccggatgtcgggcgtgcgactgtgcgcgtccatcaccgagcctttggaatcgggcaagggacgcactgggctgatactgcctccaagggcgtggtccgcaccactgtcagaaccttcgtgccatgtatgcagctcagttgcagcctgaacagccccttaccgatgattgcccctgaatgtctagtagctggcggaagcgtaacacacgcggctttgaaggccaatgactagcgtgaccggcgatactcgggtccggctgcacacaattattgtagcactgctcttcctcaactaaccgaggacttacggacttagccgtgctccagaaagacttcgcccgccgagtcaaagagtaagaactggctctcgtataggg

SEQ ID NO: 15735 - DNA, 2291 bp, Emericella nidulans
cgcaatgtacccgtccagcacaatcatggccccgtcaacgccaatgacgccggccgtatacggaatggacgactccaaacgtcctgccgacgcgcagccagtttacttctacccgcccgagtcgagcccgcacgccttcccggcgaccgcggccgtctcgtacccgacacatgcctacggcccctactctgatcccagcccgctggcggtcgtcgagcacccgcagctggattacatgggctatcacgccgtgcacccgtacctcgcacaccagaagaccaaccaatacggcgtgccgctctccgaactgcctccgccgctgctggacgggtcgtgggccagccactaccacgacagccatgcccatcagccgttatctccacactcgtactattcagacgaggccggagggctgcagtctctggcgccgctggcgccgccagcgcccatataccagactgggcatgtcatgtaattattatttttattttttttttattattttattatccgcttcacttctcttcaatttgctcctagctagactagagcctggtcaaagtctaataaattaattaaacaacatttgcatgtgcatatgaaagctctgtttcactttcggtttagttcaccgtttgactgtacttttgccctgttttaccttgatgatttgactattttacttccttagttgtgtctatctgcggctcccgctagcctctccgtcactgagatgacggtatgacgcagccaccatgccgattgcgggaatgaggtgattagggtagggctcggggcaacggagatcaagcgtactgaatcaatggatccgggcaatcatcgcgtcacatcacccttcattgcccgagtcaggtcacaggaccagctataaaggtggagctggatggggtcttggcccacctggatactctgagtaatcatgccatgcttgataacggagtctatactctctacgaaagcgtacgtgctccgtagctatcgctacggagcagctacggaatatggtatctccatctctcctctccaacgagagaccgccccagctctgtggtctcggagtcgttccgctcgtggccgtcttccagcctccttcctccagcctgccctctgtatccccgcattcattccgccccttcatgcacagtcactatactgtcacagctagtctgcttatcctcggatccttcacccctctcccctcctcgagggtctagggatcgactctcgtcaccttaaacggtcgactgtgcgttagagttcgaaagtatccagatcctactcctgccgtcgctaccggtccctaccgatgtatactggtctaactggatccagtagttccacggagctggtgcaggaaatagaatatatataaggataaccttttgatcctgctccaccgtcgtgtcggagatacttcctcgcgcggctagttcccagccattacgctactgtgctctgtagatcatgcactccacagcacagagttaactagcatgcttgctagcgccgctagtgtgttccagcactgtcccacctatacagtacggagtttccaaggcaactccacacttcactgaaccacgagggccaaggccttggagcttcgtctcagagtatgagggtggtcctcttgcacggctgaacgcgccgggcaagttacagaatatactacacagataaattaactagcatagggtcctgggcactagcagaagctttgatttggctctgatgtgactctgtttgactctgatgtgacgctgatttgataattcacactttaagcatttgggctgagcaaatatgattatctaatggagacgagctgagaatgagcagatcatcctgacgtgagattcagtccctctacactgagttagatagcctacctatcagtgtcagaatgtcatgcggcgactcggtggacccgtccaatcagaatgtattgatgagccgacagccgaggccatagaggaattgctggttgcctagctcaccgttttctgccaggtgtatccatggtcattctcgtacggatcttccgacttttatccggactgcttgtatcacgaacgggagtcttgcccagcgtttaatggcctggtgccttcccagggctctgtcccggctggtgtccagggttgcgttcgttacagattcattctttatccattttgggccataaacttgcaggagagcaggcggttgacccgacacgctggttcacagccggccgaagagcacgaggcgaatcgcagaagcgttttctc

SEQ ID NO: 15736 - DNA, 2818 bp, Emericella nidulans
cgggagtgaagcagaggtcgtccttgtatcaaacgacgatttcttcactgctcttcccaaaatccagccatcttccaaacgggagggctttgccaccattcccgacacaacttgggcggacatcggtgccttaagcggtatccgcgatgaactcgcaaccgcaattgtggacccgatcaagcatcctgaactctacgctagcgtcggcatcacagctcctactggtgttttgctctgggggcccccaggttgtggtaagacgctcctcgcaaaggccgtggccaatgaatcccgagcgaacttcatcagtgtcaaagggcccgaacttctcaacaagtatgttggtgaatctgagcgcgccgttcgccaagtctttgttcgggctcgttcctccataccatgtgtcattttctttgatgagcttgatgccttggttccacgccgcgatgatactctttctgaggcatcagctcgcgttgtcaacacccttctcactgaattagatggcctaggtagcagccgccaaggcatctatgtcatcgccgccacaaaccggccggatatcattgaccccgccatgctccgacccggccgtctggaaactcttctcttcgtaaacttaccatcacccctggagcgcgttgaaattctgcagactctcgtgcgcaggctgccaattgagttcaatgaagatctgcggcgtctggcggaggagtgcgaagggttcagtggtgcagatcttaccagtctgttgcggcgcgctggatacaatgctatcaagcgtcgggatactatcaaatttgatgactttgttgctgccaagtcattcattcggcctagtgtgacggatatgaagaagtatgataagttgaggagggagtggagtggcggggtcatctaggtgattttctcatcggcacgatagtagagcttgattcctgatgtaaagacttaagataacacaaaacatagcgataccttagaatatcccaaactacagcgttctagaaatcgtctaaaaatccgaaaaacgtttacttttatgtatgcactggatatcaagaaaaattattatatacacctgaacgcctctctgcagcaaggcatacggaagccctgatagtaagcatgcagcagatcgactaattacatccacagccgacacgttccatccgcacctgcgctgacacaccatgcttcccgtgggtgccaatcgatatccagaacacctaattcacccgtgatcttgtgacctctcagcactttcagcggaacaatggtagcattgctaagcatatcaccagtgacattgccgtgaaatatttggagagaaccgtcatcactagcatcagcaaagagaggatagcggccaccggggtgaaatttgacggcacggatggccttgcggtggtagcggagggttttatagggacgttgagagagctcgagatcgtgccagaggaggcggcggtcgtaagaaccgacaatgaggttgtcacctcccgcggcggtagcggatgtcgggtgaatgtcgaatgaggagatccagcgggcaccgggctggacgatcttgacgaggagttggcgggaaagatcataggcacggattgtacgctggttggcgacgaagaggattggcttagacgggtggaaatgggctgtttgtggggggccaccacccttaatacgtcgacggaagggatactgggtaagatgcttggagacggtgtggatcgcgatagcaaccgaggcgggcgtcgaggcgccggaacagactgtgacgaaataatctccgcggcggtgccatgaaattgttttggcgatgtaacgaagaggaataaccacacatacaccggagtctgccagggctgctgaaggccgtatccactgaggaggtgtgctcttcttctcctcgtctgcgggctttggggcgggcttcgaggcagcataaccccagccagcgtccagtaggtcaagactggctttctctgtctcgggatcagcaataggcggcactgcgaggaatatgtcgtcgcctgcagcagcagcaaggataacagcatccttgcccggacgccagcggacgacgttcaccggctcatcttcacccagtttgacactccataactgacggccagtaattagctcccaaaccctgacagtaccgtcatctccaccagtagcaagccaaataccagtagggtcaacagccaggctgcgcacacggcctttgtgccctctgaagacggctgcgcatgcggtcgggaatggcttcaactcctctgggctaggaagtttggggagcagactctcgggatcaatattcaacttgctcctccgaactcgaggtgccaagtaaagatccaaacatctttcaaacttttctttgacaaagttctcgtagccaggcaccctgcgaagggaaccaaagtcctgaggaaggaactcccgctctctgtcttcggggtctgcatcctcccatgcttttcgttccttcttgtcgggtaaatattcgagcggtgggtggtagctctcctcataccctggtgggggaagcttgggagccgggacatgcataggatgatcaggtcgctcagcctcatcagcccagaggtcgtactttatgacgtccttgtcttcttcatcttcttgtgtttagggcttgaatggtaagatgcggccctctctgattgccttcacaattttcatgacgcgtttggcttcatgctttgacggtacaaatcgacgcttcggttcaggagcagcactaagaggcataatttctttctcagtcgtaaaccattctgtcagaggttcg

SEQ ID NO: 15737 - DNA, 505 bp, Emericella nidulans
tcttgcttcgtactagtgccctccccggccgatccaaagctatctatggctaggcaggagaacagccccttttttgatagtggccgaggaggcttatcctagcgtccaccgatatgagccaacatcctgaggttccggctcctcttgcacagcggaccagggttgccgaaacccaccattggattctacggtcccttcgacatcagagctctgactggcatatttccgacctgagtgccgctccaaactggccaaggggccctgtgcggtgcatgaattagtgtgctcgtgtcggagactgtccgcgtctagaatatttcataacaattccctccgatgctgcacccccactttgtccaccgaatagaaccttccatgggcacgtcaaaagcactgactgcatcaaggaaatgccgctccaaagtgatcgctctaccgaactggacttccctaagaggtacaaactcagcttctccggcaaatcgaaagaggctgcaatcaaccc

SEQ ID NO: 15738 - DNA, 2981 bp, Emericella nidulans
tgttgagaaatatggctcagaatgtgtttcaatcaaatcagtgcgaatggtgggaatcacgaggatgatattcaacgttagtatatccgattccctgggttcgtgtctaatccaaggatttgagcaaatagaactgggttcctcatctacactggtccgcgataaagtagaaggaattccgtcgcggagggaaggggccctggacgtaccctggatcgggaagtaagacggatactgaccgaggttctcatgtgcacgcaatatagggactggcgactgagaactggaaaagtattcgatgcttgtggtgcctccttctccttctcttttgctgtggttctcggcgaatggaggaataatagaaaacgaggaaatgccatcacacagaattgtctctggggcattcacttccagtccttcgcgggtatatcctgtcccattgaaagcgcacaccgcatctcctgattttaaggacgattcataacctagaattcagcagtattcattagactgagaatataatgttagcagcaagtcagacactactcacaaacaccagctcgttcgaatccgactgggagaattgaagacagcctattaacaaccaccgcattagctcttctagtctattcaccagcgtgacaaagatcagcggaggtgggaagagaagggccatactcaatctcgcaagatcggatttcagctgtcccctgctgcgtacaggagatgatggacgagctctgtaaggatgctgcggcgcagtactgcttgtttggggcagggcagaggaggtggttagttttggaatcactgaggctttcaattagtccaagaggccaatgatatatgaagagaggtgtgcgagaagcgaaacatactatctgagttgggcctgggtgagggccgattgggggatgacgagggtgaggatgaaggtgagcgctataaggacggggctcattgtgctggtcttcgtgttcgtctgggtatattgaccagagaagagaaattgagggaaaggatatgaatgagagaaagtgagaggatgagcaggttagcatgtttgtttacagcgcgtcccgcaaaggaaatgagtgcatttgtttagggttgagtccaagacaagctttgatcaatatatttgttaagcactttatgtccaaagtgccagaatcaagaagcacacttcatattgggagggtattgtagtgtatatctatacagacactatatgcacgtccagggagataaacaagacgaacatcaacatataaccgactctagaatcccacaagaagacacttttgccgaccgaaatcaacctaacgccatattcgccgcacatgcgtttcaattctcaaccagaaacaactcaggcttgtctcaccttccacttgttgatcctccgtcgcaagtcaccctcagtctgctgcatcgggtttaacttcctgtcccgcgccatagcggcatagttgtcaccgtgtttctcaatcagccttgtgatccattcctcctcccgcttgctctgatgccggggcttctttggtgctacgttatcggcctggatctcaagttgttgaacgatctggtttgcagctttcttcacttgcggtttgatttcgggctcattatcgataggtcgtttagcgggtcattgagcgggttcgagctacggactttgcgcaccgcgatctcaacctgttcgtcgtcttttcggatcactcgaataattttgccggtcttgggatcccgttccaccaatgtttcgctgatggcggagtctttcattgcatcgacgctacccttgatgtgaagcgagctcgcaacttcctccaggccattctcggttttgcgcttctcggatcctcctgatggtgcgtttaggcggtgcatcaggcccagccgacggtagttttgtgtaagtgtcgccttgcggtccctgagttaggatagaattagcttttcgttccatcgagcttgtgagttagagcgagcataccagttttccgcgatgatggcgttacccagcacattgatcttcttctttccgctcttaagcacgcccttgcgcttcatcctttgcttgggcgccgaggagcggttcttctttgcctgacgaatattacccatcctgaatgtgtagctgtgtggccgttggattagctgtgagggcggacttgaagcaaaagctcaggataaaaatcgttaatcttatcgtcgaaaaagtgcttgacattgtttgcactggtcttggcatgtttgactagaccctgatagttgataagcgacatcggccatttacttcccgacctccctcttaggacaacattcggaaactggaatttttccttgaagcagcttcgtgttaaggtctagctcttctagattgagcttcaggatgttgttctacaatactccgtccgcacgcaggattgggcttgcgctgattgttggaattgctttcttctctgctttggctacggctcacgaaaccttcgcggttggtgagctgtctgtcagccagatcgaggagagattgcaggtacgtcattaaggaatttgaatatgtcaagcgcatgcagcagcgctttgttctctacgtcagttttttttcagaggctaatctttattagagctgtccgttcgtggagtccctcaatgaacacaagcgtgctacaagcccaccaacaacaagcttaacgtccaagatcttctcgattctcttccccggcagcccggcggtgaatgcccttcttgctacagtatacatctccggacctccgagtatgttttgtctgtagttcacatacagtcgcgcgcttttaacccttcccccgctagacttcctcctagccctatgccctcctaatatcgacccctcgtcattgtccgtcatggtcgcctttgccgttggaggcctccttggcgacacgctattccatcttctcccggaaatcttcctaggagaagactccgcagcc

SEQ ID NO: 15739 - DNA, 457 bp, Emericella nidulans
ttaggatggctgtactatgatttctgcgtgacctgatcggaggtgattgataaatgctgaaatgaccaatatagttcttactgtgtagctaagcctttgttaaagctttcgaacactattggagcgctcaacactgaggtgcttctatatccaatgttattgatcaatatcctgaaaacgccgatccttttgcagatctctgtgctatgatggttatcacttaggctgattgtcctacctctggtgatccggcgtttgcagaatacgacccttatagagagcatactgcggattgcatggcacatcatgacggtgtatgcgactacattgcaggacgagtgctagacagctctgtgtatgaggtggagagctgctacttgcgtatctaatagtgcctgttgaagccagatactacttgcccatcatgacatgcaactgtatagacattcgcaaccgt

SEQ ID NO: 15740 - DNA, 2800 bp, Emericella nidulans
gtcaaaggcgcttgctataagggacaatgagatgaggatgtgagggagtacaaagtacaatgcgacgaacgaccagttgccgggatgaggtacggttctggatctaaagaagagctcctcgagagttaagtaggttatgacaacagagacggtggagtaagcagaccgcaagatactggtagctcatggggcatcaaccaccatcgtcacaaaccggcccaatctgcagcgtacacatcgaagctgttccatagcaacgcgctggtgcccaggttgcccggtaaacaatcaatttcgggacgagccgatgaggttaaggcccactgtttctccgaagctccgaatatttgagcactattccatatggggaaacattccaaacgcagattagtgtccgcttgtcggtaatacagccaattatatcgtggcacacaaaacctgtcgtgccctgaaccctcttccgtgcacttcgcaagcgaaaaaaagaacgtcggacgcggagaacctcattcctcgaccgaagcatatcgacaaccaccccatcgaccttgccgctttcaaaatgaagtgttagttgtttacccatccgaatggtctctcgttttcgatctcagctgatagtaatgttgcgacagtcatgaaagtgggccgtgtggcatcatcacccgtggccgttacgccggtaagaaggtacgacacgatctataaatctttgtttttgcgcgaagagggactgcgttctggaaacatgataggggactgggagaaatatcgacaactggacgttgattcaagaaggaaatgggcgaatgcgagaatcgaagatattgggagttctgggttcagattgtgctgacgaggcccgtttgcgattttacaggtcgtcattgtccagcctcaggactctggctccaaggctcaccccttctcctacgccattgtcgccggtatcgagcgctaccccctcaaggtcacccgccgcatgggtaagaagaccgtcgagaagcgcagccgcatcaagcccttcatcaaggtcgtcaactacaaccacctgatgcccacccgttacactctcgagctcgagggtctcaagggtaccgttaccgccgacactttcaaggaagtttcccagcgtgaggaggccaagaagaccatcaagaaggctctcgaggaccgatacaccagcggcaagaacgagtggtttttcactcctctgcgtacgttttcaataaatgaggtatcttaatggggtagtactgacagataactaggtttctaaacgggatatcctggggcgttatgtcgtttgagctcgcgaggttctagatgaggcaatgggagaaaaacatccagtacgctcggatccagaaatataccatagctggaagaattggaaatgtatcgatgtacaagtcaaggacttgagcatttaatgcaggatgccaccaagatccggcgtccgtctcgaaatgaaatggaaaatgaacaatttatttttttcactcttccacgtgcgactcattacccacatcgattagatacgaccgccggaacctaagagacatttgcacggagtggcgaccgtaacggacagcaatggagatcccgctctcgcgttgttttgaggagccctcatgcgacattcttacaggcctttctccgatgtcactccaatctcgatattccgaactgaaataatgtagaaggacagaagcatcatactatcccacgacaagagctcagcgacatgttcccgcatctacattaactacatgctctcccgacggccggggtctgggcggatttcagccaatatcgtagatcacttgtcgtagacccgggataggatggattcaccctgcctagctcattgtctattggctgggtgaaatctgcgcaaggtatatagtttgaaagatcgcccgtcagtgataccacccacgtctgtcgcgcggacgtcatagcactccacacaggctgtggtgtctcagaacgatcccaagtctagggttatgccgccgaagataaggatgcttgagcagtaacactgtgcattctcaagccatgcaggaagtctcttccacagagtccgaacattaaacctagatgcaattatgcccgctcgaacctagaaataatcaggcactcagcgttctgatgtctgtcaccaattactcggggagacttgggcgcagcgttgtgcctggtgcgacaatttagtagtacatgaaatatagcctttttacgaataccttccttgcatgctgtactttgggcattggcgaactgtgtcagcaatgttggattgggtcttcgtctgaaaaacattactgcttagatacactaaagaaaacaagccaatgacgcccaagtctatcataaacattgttcttgaaggaaatttacgcacaaggccaaaacaggcaatctaacatatacacactacctgtacctaaggacaggctctgggggttgagcatactagtagctgcacaatcacagtaggggcttggatcctcgcattagactcacagccagccctacgcagtaaacagctcaatagaaaagagaatgccatagcgatgagttcattcttctgatccagatagtaacggctacgattcttctgctgtcttacactccaaaaggcctcaaatggccgtcccatcatgcgtggcgcccttgttgaagcagatccaaactcgtccaggataccggatcactgccagagagtcggaccagtcagtcagtaacctaggtggcaatatatggagtatgattagatcttccactggtcact

SEQ ID NO: 15741 - DNA, 2192 bp, Emericella nidulans
caactgctctgcgcctgaaccgcagtatgacttctgattcaacgcccgccaaaccgggcggcatgctgtcgctctatgccaatctgctagatccatctgctgacaactcgcctggaaccatttctcgtgccccagtcgtttttaagcaagccgaaggggaagctcaatcggaggaagctgctgcaaagaagcaggtcaataatggtaagttctgtcttctcatgttaagtttgctggcgcaaaccacgctgacagtttatcggttcgcttatagttcttcggtttcagccaacgaaacgccctcaactggcgacccagaaacccaagccgaagccaaccctaccgaaagcggctgctttagctgcaggggcagcgcccgtcaagtccactcttgcggactgggctgcaaccgaggacgacgatgtgaacggcttcttcgcgggacctaagagacagcgcggtggccgcaagaagcgcaagaaaaatcgggaaccgcaggaattcgtgcagaattgggatgatatctacgatccttctagaccaaatatttacgaagaatacaagcacagcgatgaacagataacggaagtgcgagagtggaaagaccgtctatatgcacaccgtatggccaggtcatcgagtagggactcgtatagtgacgaagaatatggacgtccggtgaatagtaagtcatgagccttctatgggctggtcgatgaagtactgacttcacctcaggacaatttgcgcctccaagcaacttcgctccacctcccaacctcaataacatcccaccggcaccttctgagaatgtcgcttctggagaggatgcattcgcgcggcgagcccaaatgccgtcgagtctagctcataacaatgaacaggactcctcacctaaaccgccgccaccccaacaaccggttgctccgattgatgcgcctactggtgacgacgcttatctacgccgtctacagatgtccgctcagccccaacccttactaactccatcaaatcaactgcataagatccaaacaccgtccgcaactatatcacgcgcaccagttcgatatactcttccgccggcccctgacgatatccccgcctcggaagcagaactcgaagaagtcctcgcaaaggagcagccagtagaagaggaagcccaagatgatggccagcgctcgctccgaccaggccagaaagggtttgctgagcgactgttggccaagtacggatggacgaagggatctggcttaggtgccaccggttcaggcattgcaaagccattgcaagtccaagtcgaaaaacgcaagaaacggcctgactcggaaggtggaggctttgtcacgccagccggtaggggtaagatcatcggcggcgcaagaaagcaagaggatgtgggcaagttcggtgcgatgagtgaagttataatcctgaaagggatgttagatggaatggacgtggacgcagaattggcaggcagcgaaggaggtggtctaatgcaggaaataggggaagaatgctctgaaaaggtaacaactcgatttctccatattcgtctatatctaacgttaagcagtatggtcgtgtggaacgtgtctatatttctcgtgagtccggcccgccggttctcgtcttcgtcaaattcaccaaccaactgtccgctcttcgggtaggtctcccaatcaaattaatcgatgcccagagatgttaccaatatatgctgacgtgcgaaatttgtaggccgtaaatgctctcgagggtcggatcttcaatgggaacaaaatcactgcccgcttttttgacgcacagaaatttgagcaaggcatttacgaggactagtccatcagcatcgcgagagaaattgtcgattgcactctaaaagtgaccggcgtggtcagactgcacgtcgtgtctttagcccgattcagcagcatgccatgatgcacataggcgcggactgctggcttcttagagaggggtacgatagtctcatcgttcgtgtggttcccttagaatgtgaccctgtcaaacacttctagttcctcaacagagtcttcgttatgcgcgccagacaagtaaaacttgtcggttcgcaccacgggctcgcactcaaagctttccattatgggagagaacgcgtacggcgtcttccgcggtaaggtctttgcaaatgtcgcttttatcttgcagga

SEQ ID NO: 15742 - DNA, 284 bp, Emericella nidulans
cgaaaaacggttggtaacccatttgctcaggccaccccaaatctttgggataaggcccccctgatggtgttgctaaagaccaattggtcttaggccttccgatgtttcagagcaccgcatgttcatgtatcaagtacgactgtgacacgggctgataacttaggcgaacgtacaccggtggctaagagcctgctttgcgcgcaatcactgtgcgatcctacccggtagggaagaagcgtcaggatgcttcttcaatgcgagtataatgtgtgctacattagaca

SEQ ID NO: 15743 - DNA, 3799 bp, Emericella nidulans
  unsure (1)..(3799): unsure at all n locations
gaccgttagttatcactcataacaaacatggtagagctgctggcagagctgttgctgctatctcatgattaagatcagatatcccacgccatctaacgatggtttcagcaattggcttgctaagaaaagaaaacacctgcgaaggccgttgatcagctttggtcttgggtcataagatgaaacgtatgctcgaaactacccatcgccgtactcagtaagaattgtcttgccactctcctctctttcccaagtccatttcttttcttttctttttttacttttttgtctcatacattgtgctcaagcatgtggcaagactaagttgaatcaatgtctacaaagcacatttataataaaagtcaagggtctcggttggaatattgtcgtaatatagacttcagtcaccaaactaaatgttgtacgaaatgatttgcggtgcttggaagtgcaggccttgtccaaggagtctggacacggtaaccagccgaaagagagatagtgaggcagctgataaaactgggccgataggaacaatataagcgaagctttgtagtttagaagaatccaggttcgtctatgcacctaaaatctagagtatggctctgggtaatttatttgctcttcgacatggtaatgcgaacttatgagagccatagtcggataggtagcagcatgatcctatcaaataccatggttcccagtctgtttttcgagtgcctctggcagctcaatccctcagtacgtttacactgtgtgaattgggcactagacaagcctagccaagacgggacgagccgactgccggaaccaaatataccacaattacccagcagacggaaaagcgcgccaacagtaatcatggaaagctgccagaatagtatggtggtaaagtagtccagctaggctctacttgcttgaatacagtcagatctgtggaaaagaggactactggcgagatggccaatatattgtcccactacttcgctatgtgtaaaacagatccacaagttagtagaaaagcagaagcttaagacatccctggcccccatcctattattactttagcctggtggaccctttatttgcacggcagacggcacaacccctcatttgagtgtttgttgtccaaagaagccccgtcgagtcgcggataaccttaggagtaacacatcaaccctcccctcacaatcccaaaacacgactaaataatatgggcttccgcgacttcatcaccggcgttatcgaagacaaactcgagggcggctcctcgcaagcgcaagcccacccccaacctgagagctccgggtacggccccagctacggctcgggctccggctacgcagcgccctcgggccctccatcagcaccccaggctccctacccctgggtaccacgatgggacgaacgcagtcagcgctactactatctaaatgaacagaccggggagacaacctgggagattcctgctgccgcttcgtcgtatggcggcggtggttacggaggtggttatggccctccaccgcagcagcagggctattatggcgcttctgctcctcagcagggttactatggggagcggcagtatgaggagcagcaggagcagcagcagcagcagcagagtgcaggccatggaggagcaattgctggcgcggcggctggtgcagctgtgggtgtgattggtggtgcgattgcgatgcacgaggctgaggagttaggtatgttaattttcacgttgtctcagagccttctaggctggttctaagcagtcccacaataggtgacgacattcgacatgaggaagacaagtttgagcagggggtagaggactttcctacggatgcggcgcggtgggctggagaagcggtacggatttctccctgttgagcttacttacctacctactccttgactttatattgagaagagctgactggttcgtatcggttcggttcaggtcggcgaagtcgagcagatccccgataaggtcgaaaataaagtggacaatgccgtccaggacgttgaggacttccccgagaacgccgctgaatggacgggcgaaaaggtcggcgagattgagcagtttggggataacatcgagaacgattttgacaatgccgttgataatgttgaagagtttggggacaatatggagaatgcgtatgatgagggaaaggaggaggcgtacgaggatgattactgacgggcgcgggcggacgggcgagggcggaaatagcacagttgagagttcgcggtgtcccggcaaacagagcgaatgacaaaagcaaatagaatatttggcatgtagaccgatatcgatgatcagcctcgctagagcggtactccttagaagagggttttgtcccacggtccggggtagatagatattccccgcacgtggccggacctcggttgaagaacgaaccaccactaaggtttgatataagttatatagggagtaccttgctgcgaacgctttgtggattgcaggcgcttacgaagaagtatatcaagcaccatgccaacacaattaccactcgcgggtctccgcgttgtcgagctagctggcctagctcccggttcgtcacgcctaagtgaactatgattgcagtcactgatagtctgtaggcccatttgccggcctgctgctcgcagactacggcgcctcggtgctccgtattgaccgaccaaaatccatcagcgccgaccagctcacgcggggcaaatcctccatcatcctcgatctacgagaccccgcctcccacaaacttctgctcgaattgctgtcgaacgccgatgtcctcatcgacccttaccgccccggggtgctagagcgccttggcctctcacctaaggatgtgttgttgaagcggaatccgcgattgattgttgctcggatgaccgggttccggagagacgggaagtataaggacatggctggtcatgacatcaactacattgccgtatctggcgttttgtcaatgcttgggcgcgctggcgagaaaccatatgcgccaggcaatatccttggagattttgccggtgggggcgccgtctgtttccagggcattctactggcgttactgtcgcgtgcgacaaccggccgaggccaagtcgtcgaagccaacatggttgacgggtccgcgtacctagcggccatgccgcggttgaacatgcagacgccgctatggagtggcccccgaggaacaaatatgcttgatggagggagccctttctacgatacatacgagaccaaggacacaggcaaatacttctcggtcggcgcattggagccgcagttctacgcggccctgatcaagggtctagggtttcaaccggatgaactgccgtcacgcgaagaccgcagtaactggcctgcgctcagggcagccttcacaaagcggtttaaggaaaagactcgtgcggaatgggaggccgtattcgacgggacggatgcgtgtgcgacccctgtgctggaacagtcggaattgcgggaggccggctttgagcagcgcccgatcgtgcacttgtcggatacgccagcccggccgatcgctgcggacgacggcgcatgggcctgggggattcttaagccaggaactgaggggagagagacgctgaagacatgggntgggtgggagcagggtccggaatttgtgtgaggagtgatggggctttgaacaaacgatggcaaatccaggttgaacggatattcaatattagtgatgaacttgcatcgcaggttataagttcagcaaaatgatatgactcagagccttaggggtgtgctacgccaactttg

SEQ ID NO: 15744 - DNA, 2613 bp, Emericella nidulans
gccgctacttagagggcagtgtcaaggcacaaatgaccttatcaagcgatgtactcaacaaccagagcactggcaccacccccaccgttgcaaatacctgcacagccaaccttgcccttccgagccttgaggactccgagtaaagttgtcaggatacgggcaccgctcgcaccaagagggtgaccgatagccacggctcctccgtgaatattgaccttgtcctcagaaagtccaaggagcttcaagttagcgagggcaactacactgaaagcttcgttaatctcgaatgcatcgactgcatcctgagagacaccggcatgcttgagcgcccttggaattgcgagtgctggggcagttgtaaatttgctgggttgctgtgccgcctcaccccagccaagaatctttgcgaccggcttcaggttaagctccttcaacttggcctcggatactaaaacaactgcggcagctccgtcgttaacaggagacgagttgggagctgtcactgtcccggtgccagggataaaagcgggcttcatagcgcgaagcttatcatggttgagctgttaaagtaggtgagcagctgtatacgtatagagtgacagcttgaagtcttacgttctttggctcgtcatcctgagttacagtaacaccaggcttgcctctaaaaccgggtagatcaataggagcaatctcatcgttaaaaagaccagcagcctgggcagcttgagctttctcgtaagatcggatggcgtaatcatcctgctgttgcctgttgaaaccgtggtcctgcgcacactcttccgcttgtagccccatgagctcctgcttgcccacgtccgtcaagccatccttcacgatgccgtccaccatggtttggttgccatatttagctccagtacgaagattgggaagatagtgaggagtgttcgacatggattcagttccaccagccacaacgacatccgcgtttccagtcatgatagtctgggctccaagaatgacagcctttaatcccgaggcgcacaccttgttgacagtagtacaaacggttgatgtttcaagaccagcaccgagtgcacattgtctagcagggttctggccaacactattaaaggggtcagtaacgctcatggacatggtattgggcgagctaactttgcagagagtacgtttccaaagaacacttcctggacatcggaaggcttgatcccatcggctctttcaagcgcagctaaatgaaggtgagtcaagaacgcctttggtggccgagctagatatggcatatacctttgattgcatgcgaacccagctgcggggcagtttggcttgaaagagacctacgggaaggatcatgtgttagcatctcctctcatgaaatccttggaccgcataatcataccccagaaatgagcccacgggagtacgagcgtaagacacgatatagaccggaggaagggaagccatggcgaaggaagaagttagaatctgtgtagagcgatattaaccttgcgagaaatgcctaggtcggctgaatgaacgttctaatcgagaataagcaacaagaaggggaattcagaagatcaatatatgggcacgagtccaaaacccccttatatatatcgaaaatggggaaagacaggttgagcggtgaggtggggtgggacagaagcgcaggtacaatatgggtaaatttacgtttaaaattcttgatattttcagattctaagagaagccccagtcatatacccgtcttcccacttttttttacagaaaatttgcgttgggattaccgatttgcggtcatcggggtcagccatcagcgtgtatcgggacgccaagctcggtgaacagaagttcttgaagttaccccgaagagcttgtaccggctgagaaaaagtaatgcactaccgacattgagagctttggtgcaactggagcttctccccatccagcacaatggatgacctctatgacgagtatgcttcaattatcttaattctccttcagattgttttcgctgactgactcccaggtttggcaattacatcggcgaggccgcggaatctgacgaagagtttcaacatgaggccgcaaaaccacaggcatttgactatgatgaagcatttggagcggacgagcttgaagagccggctcagcaggaattgatggaagtagatggtgcgttatccttttctcctccatcgcgtgagttctgacatatgagcccgcgttttacagaaggcccatccaatgccgttatcctacacgaagacaagcagtactatcccagcgcgcaacaagtatacggagaagacgtggagacattggttcaggaagaggatgcacagcctttgtctgagcctataattgcgccggtcacacaaaaaaagttcgcgattgaagagagcgagttgccaccagttttcttctcgcgcgagttcatgacagacctgttaaactttcctgaccaaataagaaatatcgcgcctgttggtcatctgcaccacgcgaaaaccgcgttcatggacatgcttgtcatgcaaacccatgatttggccgaacgactcgagaagagaacagcaaggaagagggacgaacaacttcgcgacgcgt

SEQ ID NO: 15745 - DNA, 421 bp, Emericella nidulans
ctggagatgttaggcgccattgtccgctgtctgccgccttacaattctaatactattcatgaccgacattgtgaacgcgacatggttacacattattacatgactaactgagcaaaactacttgagactctgtgcatcaacctacctatgcttcaacgacattgacagaccagagtgcagcaagagcgcaaacagcgcgtcctctccatagctttcttattcgcagcgatacagccatgatttcctatcagactactgacgcattcgagtctacagaccattcgatggactatatatctatctcctccctgggtctagcatgaccgagacctatatggcacacccgtgggacgagaaggagtcatgctgatgttgccaactagccctctgagtgggactcaatacgagcgcagggagcatg

SEQ ID NO: 15746 - DNA, 524 bp, Emericella nidulans
gttaaatccgcgctataggatggtgatgagcggtaggacatggagtgcgataccaacaccttactgctctttgagatgcgcgagtggacgctagagttagtagacctggccaagcccctcatcaaatgcgaccgtgttaccaacatgatctgaaaccgaaggcttatgtacatccagcccaacaacactctgtctctcctagaccgctagggcctactgctaatcactcatcatatcaatattcatctattggcaaagcacgcagagatagccttaatgcatccagcaatacccattgtgatcgcgctgggcggaaaatgtccgctgttcccatcggtcaccttcaagggtgtctttcttttgtcgcacttgcaacattgcatgcttcaaattttggcccgtcttccgtgtgtttaccatagtcagaatagactagacatcgcctgcagcagcactggagcttgagtgtgttcactgcatgaagtgacttgatcagctcctattgccattgtggggtcagcaat

SEQ ID NO: 15747 - DNA, 517 bp, Emericella nidulans
tgatgctccccggccgtggtcctagacacactgctcgataggtcccacgaaaaccacccctgcttacgataggattgcctgctgaaccgtagcacgccgcacgacgggctgctgcctgacaggatggcgacccgagtctcccctctgcctgccgcgtctgctttgtcgcagagacatttgccgtgcgcttgcttgaggactaggcaatttctatacagcgatggaatcctactcggcatatggccgatatatctgtgccataccattggattccgttttgtttcacctgtgaccggtggatgctcgcaccccaagaacgctctgcgaatgatgtattacttcccggactctgatcgcgctagagtgctgtgcaagacaggggccaaccagacggctcgctagtagccctaccgcgtgtggactctctcagccggtcgaaagctgattgtgcgatctctgggactgctcatctgcaaggcaccttctggcgataccatgcccaccatatgatcttgcc

SEQ ID NO: 15748 - DNA, 485 bp, Emericella nidulans
agtttatgcccacttccttagtggctccgggcccgaatcggatactagaggccgctttctcaaatgcgtattctttctccctgtagagcgacccaatatagtggccatgtgccgtcaatgacgtatagttagctcaaaaaaccgatgatgcaaacggtaattgggacaactaatggctctcacagcatacacgccacgagctgtggacgattcccaagctactactgtctatggtggcctacgaatcacggactcctgtgggcaataccatgccggggatatactcacgagctagagtgtacgagttgagggcaactgacgattaatgacagatatcagtgggtgatacatccaagtacaaccattgctgcatggatacgaagctggcctaccagcactgcaagtggaacagtgacaaacatcttcacagtatggaacgggattaggctacctccactacagaatgtttccactgggtgcgaatg

SEQ ID NO: 15749 - DNA, 290 bp, Emericella nidulans
aacgcatgaagttttttttggctcaaacggctacctgccgacccggcttcctgatttgaggccacgagaccatccttaggtggctgtactccacccctatcacttggactacggctctttctactgggcttatgtagactcccaaagagatccgagacgaaagcggtccagactgccgtgcaataattaactgctcgcatgtcacgtcagacacggtgtacatagatgccaaaaactccaggaactcagtttgcttcctacatgcaaaaacaagatgttgggacatggca

SEQ ID NO: 15750 - DNA, 3742 bp, Emericella nidulans
  unsure (1)..(3742): unsure at all n locations
tgctctcttagccgaaggatgtaaggcagagtgatcgaccatcagatgggatatgtcatgatcatagtacaggattactgccaacaagactctctctcacattctcgtacttcaccgatcaccgcctggaggtatcgcttcctgccgatagaagacctggagaaattgaccgcgatcacgttcagtcgagctcgaatcgtccaggacttccagctcgctctcacctttgttttgtcttactttacgacagccagagacgctatggcttgagacagccaaagactccataaagtttcatccgtatatcgcacggatgtttcgggtctcatctgcgacttgctctaaagtcagagcggcgaaacagcctcgagctatctatatgaaacaaatctctcctcacctcagacacccagccacggcacagccagctcattaaacgcgcatttacctgtctctctattcaaacgaaagccaggaacccgacaagacagtgatgtatatatagtcgtgcacctgctaactcatattttactgtatctcccgaagcgacactgcatctgcattatcttgcataatgatccgagataaaatctagagagcttagcagtctcacaacataaaatctgccgttctctgtgcttgcttcccttgtgcatacagcactgtatgacgcagatatcctgtttctctacacccacggatgtctgcatggcccgtactacaacaaggcgccacccgatctctatttaatatagcttgggtgagacattgatatctggtgccagtggggtacatcactcgcctgaagcagccatacgcccctgcatcacttgcgacatccggagtcagcattcgtgagtgtggctaaacagtcccggcaagggaatcttgacctcctttgtgcgtacatgtggacaatggacggagaataatggattgtcggtcgtgcctaccacttggcccacatcgttgaatgatttgcgcctcttatgagaatcagcttcacgttgctctagctctcagtgtctagaggtagtttgaagcggccgtttccgagtaaagacgagcagccgaagcaaggctactcgctacgtaccttcaggctgctgacctttgcgtctctttctttcttacccatgttgcggcctttggaacacgggctgccacaaagtgtctcgtcgtttctgactgggccggtcttcatgaagatcgaacaggtaacgcagcctcgaccgtgcaagaaatcccgcaatggatagtctatttggggggaggccatggaacgcactgccctgtccagactatatacctttctaaacaagcgaaaagaaataaactgatgagtacaccctgttttgccctggccgacagctgcattttttgtattgcctccatgttgtcccagcaaaggtgcgaaggtttacgaatgagaaccggagggctggaaaccgatggcgaacgattgatgcctgtaggcccttcgctgatcaaaaacgccatttatagaccgcggcgaagtgttttctgctctctgtggttaattataatgcatatgcattttatcgcattcattttgtgtggatcataagttagaaaatggtcttaattgcgtatgatggccttcaaagtgaacaacgtcagagaattagtcctcatctattataaaggaataatgaaacgccttctagatatctgaatggcctccactatacctggtatggacaagacttgccattcacacattatttttgtgctgggatatagtagacctagtaggtgcgcgaaaccaactgtatgatgatcccagagacttccgcgaaagacgcatagtgaaaccgttaaagacatatatccatactcttgtcgcagtttcttattccaggctaatccagatgaatataccatttttgtaaacgaagagacaagataatgcattacacaacctgcccagcctacgaaagagactgcaaaatacctaatacgtgtggcctctttcatcctgcgctctgacgttactctttactatatttcagtctgtactatccacagatcagccatgaacgaaggcggaagacgttgctttggttctaccaacgcaagacacaggaatagtccagtgctaattcgtatatcttcagataaatagcctacacaggctacttttaccacaaggatgttcaagtcccccttttctaatgaatacttgattataagagccattagtttcataattttgatatatactttgggtgagaaatctgagagcactggtaaacggggccgatgtccacagtgaggtttggtggagatctgtgacctgctatagtgtcagtcgcttcatccttactgatctattcacgcggtacccctgggtttgtagctgacgtagcctggtgttgcaaactgtctatgaactttcatggactgtattgaacaaaactgagagagaaaggtgagcgcgcaaagtagatatttacaccatattcttctccagcgacttaccaacaagtcagagtaaagaataacatattacaaacggcaagtaatgctaaaagagaaattatccagtatgcaagctaatgatatctttgaccacggtatagttgcagaggtgctgttagggtaaatgtcgatcgatatgtcatacttaggaaggtgggactggggaaatggagtcctgcctactttacgagatgattgacaatagccctcatggggccaacgattcgctcccaagcgtaatagacctctcctgagcctgagacgcatcctcgcattgatgacatctagtccttctcagactcttctaacggttgccaaatgagcaacagcgaaccatcgggtaaccagaaagcagagtaaccctcagggagctaacttctgacagcaactcgtatattagtaaggagcgagcctagggctggggatggtacttgccataaccagcaggcttctgtagattcttgtctgtaagaaggataagcgtaaacatgtatgcagtaaacacttggtgcacaacggcatagagcatgcttctagaagctttgcttcattcagtatactacctttgtttgaactaaacaaaattggctgtacccttcacagtacgtggttagcttaatgttagattattgctaaccaagctacgccctcaagcattcacttgatttggctatatcgacacccgtttctcactcatgctcatatgatcttatgacaaagactctcctcgttggaatataaataggtcaatcatcagcatctcaccccttcctgcgggtctgtccgactattgtccagctgttcagagctcgctacccatcgcgtcatggctctgactttatataaaccatccgttcccgctgctgtcgagtcaggcgagatccagagacatcaatgctttgtcggcgagatccttcaaatcggactgagcgtcaacagcaccaagctggcagtcaaggaccaagacggcaacaaccttcgcatcggtttcaccttcacccctgacacttacgataaagaatgtatcccattaggccttctgaaacgaggccttactatcctggttctgaccgaatcgatcgaggacttgcctggtggcgggaagagcattaaggtgcctcacccgcggctcgcaaggtaactatatctncttttcagcccccgtatagaaggatgactttgaccgtacactgtctggaatgccngcagaatctccccttnggcatgtcccttcttctta

SEQ ID NO: 15751 - DNA, 652 bp, Emericella nidulans
gttacgcgcctgtcgcgtaggagcacaccattaatacggaggaattactccctttttctgtacctggtacgagtggtccaacttggtacgccactaacactgagaccaggctctattttggggtggtgacgcacggtgggacgcgtgacacaacgtgatgcgtgtgagaagggcttagatgtggtatttgtgctgtgcacttgatgatgaaaatgaactgatgcagatagtctctggttaagtcatagatctattacattcagagacttttacatgattaatgttagaacctggatgcacaggctatgagtgcatttgctggacataaagtacctcgtgtctttgtccgagtgcagctataaagctagcgcatggtacacagagcaatttatccgtaatgacactgataggcatgaacaggatatactctttctcagcttataactgcatatgtatgagacatagcgcgcacctccactgcgtgcactgcagggatgacctcagcaatggctgtatcgcatggaccatgcgaaagatgtcaaccgttcttttgaacttactaatgaacaggtgtatgtattatcacgtcctagatctgttgctgacctggcgattgttgagtggctgcgtttggcgtcgaagatgccagatg

SEQ ID NO: 15752 - DNA, 489 bp, Emericella nidulans
gtggaattgcatatgcacacaccttgccaccgatcgcacaaggacgggcttattgcccgcgctattaaaggctgattccctatatgggatccacgcacgggtggcgcagcgattaacctgtaatgccgggatgaaaatggcggcggattctctaaacttatggagcgttcctgctggaatgcacacaaattcgcgccccaatatgaaatctacctgccggatacgctccgtggcaaggaaaccgccgattactactgccgaacatgactatcgcatggattatgtggcttagatcctacctaacaccgcaggcgctaacgctgtcacagctggtgtagggcccgatcgatgtctctttttacccttggcctgttgctggatactctcattggataggtcaccagttcgagctatacctgtggacgccgagccatcctaagactgtccatgcttgagcctactcgatcccgtattgtgagagttgtacat

SEQ ID NO: 15753 - DNA, 553 bp, Emericella nidulans
tctcctgcgatagcagctcacgcgagggtcaactgactgaccgtacaccctttttctttggccagggtggccagcttatcgaccgcctcgagatttttcccgaagttctctggactgtatcgcggcagcatggcacgcagatcgccgggcccgaagtcgtcgcgtgaccggatctggccggaaagtatcccccggctaaggggcgaatacgcaacgactgcaacacccagctcccttgccgttttcaagaggccaatctgctcggactcaatttccaacgagaaggggctgtactctacctgcacagctgcaacgtgatggactttgcaagcgcggcggagagaatcggaactgcattcgttgagcccggtataggcggatcttggccctcctctttcagcttcggcgagcgcttttatggttctcttcaatcggcgttttcgggtttaggcggtgcgcgtataaaagaacgttggaggctttgcttaaggaaggcatgttttccttagggattgttggtaaatctgtaacagggttttggcaatacttttac

SEQ ID NO: 15754 - DNA, 746 bp, Emericella nidulans
cccggacggagacattgtatctctcatgatccggccttcggttcttttgccatgcgcatacggccaagacgtggggacactgtcgcgaacggggggcataaggatacaggggcgcatcacctgtcctacagcatgggaatcagacgactgagctggtatgcgacatggatctaccactgcaggtgtcgtgagcgggaccgagctggtacgcacagtgacagtttgggccagcggggtgggaactacgccagcatgacaagggccatacgtcgtagctaccacacgactgatggcaaacacggtgaggagtggatgcacttaaatggaagctgacgtgctactatgcgctcagccatcacaagaggctgcaacaccaactagagcgctgaactaaagcgcgagaagccagaccccggtcccgggctaccaagcacgtttgagagaacctggacggcaagggaaaaacggtggcacacccatcggtcgcagaagaacgaatgtcagcatatgacgggctattgcaagacaccatggcagatagccgccctttaactatacgtcgcttgttcacactgccaacgccaatcgtaatcgctcagtaatgtctcagcatgctgaaacctaatggacccccaacaaaaaccctggcgggaggactacctggtacccgataccttccactccttcgggccaattctggtttcttaacgtccgcggacggacagagctcttattttagccttggg

SEQ ID NO: 15755 - DNA, 3171 bp, Emericella nidulans
gttagatattttatgggctcctctctggtccttctacgtggctgtccatcgctatcttatagcttttcgtttggctggtgggcacagcttcctattgtagtaacggtgccgcctttatcccaaagcgtgcttaccgatgccatctgggctgcggatgcagttcctttttcagcttgtcgccgtgtcttggataacaccggtggattgaatcgattcgacttctaatgaatcatatcatctactgactaccactaacatgctcgtcgtggtagtgcgctgctcctctgggctcagagttagggcttctcttgtgcctggctggaagatttgccctatctggcaagccgctacactcctcagccaacgctcaggcccacggccatgatgtacttgttaaacccagcgagaaaccagccaagccatcaactagggtaaggtattgctaagagaagagaacccagtcagtaatgccctatgaggtctgaattagattggggagcaccctgagttacctacgatgttctggacggattataccgctagtgacgcttataattttaagtatatcattaagagactgcgaaaggtcgtagaaaaagaacgtcgctactcctgcaacagccgaaggggcttaataatgtcattctagcttcatgttcgattctatcagcttctccgtctcgcaatcatacactctgctaatgttatcgaacatgaaagttacggtttcttagtatgcctgttcgctcttatggtctgcccgtagccactcgaagtgcataaaggaaggtagagcctttcaaaagtaagagactatagatagaatattggttcaaacggtaggtcgacatagcatcatgcagatcatggatctagccattaagaatgatatgcacgggcttgtaatgaatatcgaccttaataaatgggaatagtcatcgaatagtagcaaacccagaaattcatattgtcaatcgtatgcctaggtagagctaatatcatatatttttggaggtatttttgggcgtatggccttggtttctcattccttctcctgcctagttgtagccacccaggccggtcagtgaccactaccagcgcctgctacctactcttctgatcccagagactccgaactgtaacttccgactgccactcccagtcctgatccttaggcccatcctgaaccacaaactgaaccttcttcttctgcccagggactagtaggaatgcgttctccgtgaagtaacccaccagcccagccggatagtcgagccaggtataaagtgacacaccggatttggcttcaactgtgaagattccggaatgcgcgtcgtatgagagctcgagaccgggattgaccagttccaggtcttttgggaacgatggcgtgaagtgattttcgtgtgtcagcgaggttttgactgcagcatttgggagatttgcttggctggagagtgaaagagtgaggatggaggcccttgtgtctggtaggttcaggtcatggatatttgtgctgtagacctttgttgtgtttatcgctccaacagtaaatggaatttctgtgggtgtgccggcattgtcgataatctgctccccagagagatttaaccattttagattcacagtgccagccgcactttcccatagatccgcggtaacgtatatctccagatcacccgtagtgtagttccagaacggagaaacaataataggctgatagacatctcgcgcaacataatgcagaaccttccatcgaccgtcgtactcaatcccagcccacgtcggtccctgccagatatcctccagctgccaatagagcgaccccaactgccgctcaggcatcccgctcccccttcggtagaactgtatttgggacttgtagaaatcggcctggaaaagttgcgttgcgagacaccaggcactgaagtttgccaccgagtctggattgtcagggatagggtagtagcgttccacacccagcgtcatctccgccatgccacgagacgagttttcgattcggccatacccttcggatgtataatgtcggttgtgaatgacgactgtggtactgttgaagtataagtcttctgggtcggcaacttgctgccatgtctggagactaggcatgctatgaaagccgaattcgttggcgaagcgtcctaccgggtagatcgagtagtcaaatgagacggtcgtgtcgtagttgtaatagtctgtgtcaccgtagtatgcacccggttcatcgttctcgtaccgttcagtcatggggacaggggcggaaagattgacacttaggtacccttccgttgtgctgctaggggagtatgatattgagcgggtattctcatacacgagcggtaggatgagactgatgtatagcttttcatactcggcgagatacttcggatagttatccggatcggcctcccgagttagtgggagcatcagactctcgatttcgtttcccccggcccataaagcaagtgacggatggtgattcactctccgcacgttatagactacctcctgagcaacgttgtccaggaaatcttcatccacagggtacatggagtcactaaattggaactcactccatagcaagattccccgctcatcggccaagtcataaataaaatctgggaggtacgcgcctgatgaccaaatccgcagcatgttctgattgccggcgaccacggcatcgagtaaccgagtcatcttctgcttggtaactcgaggccagaatgtgtcaggcggaatgaaattagagcccttcgcgtaaaactctttcccattgacctcaaagtgccaattcgcgcctggcgcaatgccctgggataactgggtggctgtgatattgcgctgattgagaaagatagtccgaaacccagttcgcttggtgatgcgtgctacctcttccgttttattgaaaacggttattgtaacgttgtagaggttctgagctccaagacttgatggccaccatagcttaggagatgcgtctttgagcgtcgtcactcctgttatcgaggtcccaatcagggtaacagagtcggaaatttggctcgcgagtacatcaccagtttcgagctccttgatttcgatcaagagtcgaggtccgctggaagacgacctataaaatcaatactagcattgacaacccagggttgt

SEQ ID NO: 15756 - DNA, 516 bp, Emericella nidulans
ttcgcggcaaactgtcccctaagctgaatcccactagcgacaaggccgcagattgctccatgcccccaaatgctggcccggcgtgcagccctctgcgctcatcgtagtgggtatgccgggctggctgactcctcgacataccgacaatgattctgctcgactctctggcagtcattctaccctggacccatggcgtgttctgggccaaccgggacaggcccgggaaccacttagtgcaaatctgcagagacctaatcacgccggcaatcatcgggcctacatagaccgaaaacgagctggtcgtcggatggcccgtcaacagcactaatatgcacgcaggtcgaactgggaatttcgctggcgataggggtagccgtaaaccgacttacattgaatcagggaggctctcgtaatgaaccttgccataagtctgccaggagtgcgacacaaccgaacgtggaccctgcctgcagaagcaaattgtagaccaaccctgtgagcgtcttcagctgctta

SEQ ID NO: 15757 - DNA, 715 bp, Emericella nidulans
acaggtgcattacgtcaatccatcggttatcctttctccttcctgtcatatcggatacgcccacggtaggaacatggtgattcataagtgtaccggggccacaaggtaacaggaactagtgacaggtcatcatacatcggagatagattatcaaggcgctcggagacattgaccgcaaatgttttgtttcaggcagaggaaaagcacttgctaacacagggagactcaatgatatgcttgccactatggcaggcctacaggaccagggcttatacgcgctagcatcacaactatggcggttaactggatcgtgtttttcttcagcctatcgaaaagagcagtgggattatcttctcatcactcctaagcagatgcgagagcaaggatctggtggccaacgttaccatatgccaaggaccacgttgctgaatgtcatgagaggattcatgatgctagcagtcctgataacccccgtggccatactatggacccaaagcacttcaattcttgaggtgacgactttggcagcgccgaggctgatggcctatccgcctatactatactaatttccgtttctgcttctatggtattggcaaagccttgttccttgggttaaaataatggaacctcaaagcagcttttggaagaagatatctgatgcttaccatacatctttttggttttcggggtagctaattcccttggttgcaacgca

SEQ ID NO: 15758 - DNA, 458 bp, Emericella nidulans
actgaatactcgagacaagaaacgcccactttgggttcctgtcctcggcgcccataatgactgagctttcatttctggttggaaaaggacagcaattgaggagtaaatgtgatgccttatgggattgaggactcagaacctggaagagctagaccagcggtcaaggttaagcagatgcaagggggaggaaggtcgaaggaaccagttactgacattaacaaaagtaaatatagctcgcagcaagatcttgctgcatgaatcacagaggggaacgaatcgagtcaccaagtgcggctatccgcgggccaagccctgacggaagcacgtgatatgccctatttagagcttaattttaatcaccatgagaagtaaattcattcaactttaaatggaaatggggtacttgtgaataaggggaccattggaaggatcccggttccactccggcaaaaggggtt

SEQ ID NO: 15759 - DNA, 5159 bp, Emericella nidulans
  unsure (1)..(5159): unsure at all n locations
tcaccgtctccaccatcctccagacagcatgggcactggtcctgcgccactacacaagcaccgaagaaatctgctttggatatttgtcacacgggagagatatcccgctagacgggattgacaatatcgtcgggcctatgatcaatatgatggttctccgtgtgattttgtcgggcgatagaacgttaactgatatccttgagggcactcgcgacgatgtcctgaatagtctgccgcaccagcatacttcgctggcggagattcaccatgcccttgatcttcaaggccgatcagcattcaatactactctttcttttgcatctgccgctgcagatgccgagaattacgacgggatcgctttcaagaacctctccggtagtggttctactgaggtaggtcgatacacaatcgaacatccgtttctcggtatgagttgctaattcggacagtatgatattgccgtcaacgcgtccgtcgtaggcgaagatctccaaatccactttagctactggtcttcagctctttcaccgcagcaggccacggcagtcgctcaagcatttacgaacttcatggacatcctaaccgactcctcagacctacccctgcgcgacatcgacttcaccagtgcagcaatgagagcccaacttcttcgctggaacgccaccccgtacgccccagttcacactaccgtccacgaactcttccaccgtactgctctacggtaccctgaaaaccaggcaatttgctccacggacggtagcttcacctacagcgagctagacaatctcactacacgcttcgcatccttcctacgtgagaagggtgtgggtccagaggtcctggttccggtgtgctttaacaagtcctgctggactattgtttctatgttgagtatcctgaaagcagggggtgcttgtgtaccacttgatccatcgcatccaccggctcgtatccaggaagtttcttcccgctgtgaagcaaaactaatccttgctgcaccgcaccttgttgataggttgcctgattgtaacgcaactgtcatttctgtcaccgacggattgatgcagggcctgcccaatctgccgtcgaattttcagatcgaccttgcaaagcctgcaaatgcagcatttgtgccattcacctcgggaagtacaggtctaccaaaaggtatcatcctggaccatatgggactctgtacgatgttcgaagcaaacgcatcggtcgtgggaatcgatcataacactcgcaccttccagtatgcagcatataccttcgacgtcagcatcgcggagacatatatcacgttaacacaaggcgggtgcgtctgcgttcccactgatgcagaacgaatgaacgacattgcgggcgcaataactcgtctacaagcaaactggaccttcctgacaccctctgttgcttcgctactgaaccctatcgacgtcccgacgctaaagacactgaccctgggaggagaagcaatctctcgggacctgcatagcacctgggctgataaagtccgactgatcaacagttacggcccggcggagtgttccatctggacgagcaaccagcggctctttcccgacagcttctgcgctgatatcggtgcgggtatcacctgtcacttgtgggttacagagcccgataatcatgatcgactggttcctattgggtgtgtcggagagcttgttgtgcaaggaccaaacctggcgaggggatatctcaaggacgaagagaaaaccgcggcaacctatattgatacgccagcctggctgcgcaacgatacgagatccattgctaagcgtgtttacaaaaccggtgacttggtcagacactgtgctgatgggcacctggagttcgtcggacgcaaagatacgcagatcaagttccacgggcaaagggttgaaattggcgaagtcgaatatcagttgcgcgctcgactgcccaaaaacacgcaggtcgcagtcgaaatgatcaagccgctcagtcaggacggtagacagaccttggctggattcatcacgacagaggggggcagtggccacgagaataagggcagcccatctttgaagggttcatcgggtgacccggtctcgttattaagagacccggacgagaccttcaagaacattgtccgcaaacttgagcaccagctagccgagaccttgccttcgtatatgatcccatcagtcttcatcagcatgctcaacatcccccgcaacacctcgatgaagatcgacagaaaggcccttcgcactctgggagccaatctaacccgtgagcagatcgctacttattccttcgtgcaaggcgacaaacgggctcctcgaacagcgatggagaagcggctgcaggaatgctgggcctctgtcctgaagatcagccccgagtccatcggtgcggatgacagctttttccgaatcggtggtgactctataggcgcgatgcaactagtctctgcggcacgcaagacaggtctctcaatcactgttggcgatatcttccagcaccagaagctcagtcaaatggccaatatcgtcgcgagaaacgccgctgcgactacagaggagatctccatcaagccattctctctactgcccaaacagagaccagacgaggatcttgttgagctcgcagcatttaaggtcggaatagatcgcactctcttgcaagatgtctacccttgtactccactgcaggagggtctaatatctctcactgcccgagaccatggtctttacaccttgcaggcagtatacaggctaccggaaatgatcaatatccaggaattccaactcgcttggttggccgtcacagaggaactagacatcctgcgtaccagaattgtcgacctgggtcatctgggttcttaccaggtcgttattagcccagtcatcagccaaatgcgctgggtgtacggtaacagtctgtctacatacctacgcgaagataaagaaatacccgtcggctacggaaagccactggctagatatgccattattgaggaagaagaggagggagaacagaaaaaatactttgtgtggactgcgcatcattccatttacgacgggtggtctcttggtctgatgatggatctagttgagaagaagtacctgaaaacgtcaaccatccccagcccaccttttaacaaattcatccactggctcacaaatctggacaaggctgccacgcggcaatactggaaatcgacgtttgaggcttgctccgcaccccagttcccgtctgttcctcagcattaccgaacaaaggccaaggcagccatgacatactcgatccgtctgccccagaaaatagattccgagatcactgtgccgacgatcttgcgaacagcatgggcgcttaacatctctcaatacacgcgctccgacgatgtcgtcttcggcatgacgcagacgggccgcaacgctcctatccctggggtgactgagatcgtcgcgcccctgatcaccacggtgccagtgcgggtggtattcaacagatcgcaaacagtcgggaatgttcttcaggaggtccagaaccagatggtcgccatgattccccatgaacacgtcggcctgcagaatatcagcaagtttagcgcggagtgtcaggcggcaagcaaatttgaaaatctcctcctcatccagactcaacaggatcagatggtctcgccaatcggtcttgaacgaatcccggtgacagacctcgacattccggcctttggcatcgtcgctgaatgtgaagttgccgatgggcaggttctggtctcggttggctacgatagtaccgtggtctctgagaagcaaatgaccaatatcttgcgccagttcgacttccttgtcaaccagatcggcagcgaaagtgcacgtaacacgccgctcgtggagatgcacctactgggtgataacgagatcaagatgctcgaagcgctcaaccagtcgcccgatgaccgtgtctcccgtctggcccatgagctgatccacgagcgcgcggttcttcagccagaggcaatcgccattgattcccaggaggttcagcttagctacggcgaactgggatggacctnttcacttgccttgcttacttcttgatcgatctgggcaccggcccctgataaagtcatcccacttttcttccgacgctctccgtgggcgatggtcgccatgctaggagtgatcaaatccggtagtgcgtttgttttccttgaccccggtcatcccattgatcgacttgagtttgtcgtgcagcagatcgacgccaagttggtccttacgtcgccggacctagaatcaacctggagggagaagctcgccgtcttctgcgtcagcccctcagcgctccagtctcttcctcgcctccatgatggaaacctgccggtgactgcagtgactcctcagaatatcttgtactgcatcttcacctccggcagcacaggccgaccaagaggatgcgtgatcgaacactccaatttcctcagcggcgctgtccaccacgcgcgcaggtctcgtatttccgaatccacgcggatcatgcagatcgctccatacacctttgatgttagtatcctggagatgctcacaggcctgatcggtggcggctgcatctgcctgccccgagactatcaccagggtgcgcgggtggcagacattatcaacgatctcaatatcaactggactttcctgactccgtctgtcgcccgtacgattgttccttcagaagtaccaagcctacagaccctgattcttggtggggaggcacttgccaaggtcgacattcagacctgggctggcaagcttcacctccataacggctacggaccaagtgaatgctctgtggctgttgcctcgaacgaagtccgcgatccaactattgatccagccaacatcggatcgaagatgggctgcaatatctgggttgttgacgcggaaaaccatgacattctcctgcccatcggcgcagtgggcgagctgctcgttgagggagccatagtcggtcgaggttatctccaagagcctgaaaagactgcagctgcgttcatccaggatcctgcttgggtgcattacctgcccaacaccaagagctcagaacgccgccggttctacaagacgggagatcttgtccgactgaatgctgacggtacaatacacttcatccgaatc

SEQ ID NO: 15760 - DNA, 4566 bp, Emericella nidulans
agggagagaggaggaaataacgaaaaaaataaggatataaagagagtatgagatacaaatattaaagggagtctataatatgaaaaaatcaatatgatttgaaaaataaagagtaaaaataatatatctatatataagagtaataaagagttaataaaacaaaggggaagagaagttaaaaggggaaaaaaaaaatataataaatatgataaatgggagaagggagtgttggggaggaggggagatgaataatgatcaaataaaacctaataaataattaaatcaaatatagggggaaaaaaaaattaaaagagggggaggaagaaagaaggggtgagagaggaaataggagaacaaagcggttaggtgagttaatatacagggaggcgattggaaggtgagagagcgtagggtgggaaaggacaagtggagaaccacgacagcggttctctcattatacggacggcggttaaccattgatgtggaagtttgtaccagcataaatgctgaccatgccttcagagacgaaattacctgcagacacttcgcctcaatcgcgcatctccaaccttggcaactgcccgtatgggttcatcggtatattctttaacgcctcttaatcttttagcactgaatattctgatgtacaccaaccgaactaccgccttatcctcttctttagcacctcaattgacgacaagataagcctcaccatgacgatcaacatagccgtagccagaatcgtcccgttctagtcggcgaaatgctgggaattccggccgacttccagtatctatcctcatacttagactctatcattgccgcaaaatcttggcgatattttttcccttcacaaagacgtattttgcagtatttggattgagggcatctctggcgctctcggtatgggcccctggcagagtaagacttagttgttgcacttacctccattgcaagtgttaaagttattctcatacaattctcccgccatatattgatcaagttgctcatgctgatagagatgtacgagcgtcggcatggctctttcccctggccatgttccaggagagtaattaacctatggcaccaggtggttgtttggtatctgagttctaggcccacaaatagtctgatcgaatatagcaatccgctcctcaaggaaacgtgttatgagattttgagtgacggctcgattgtgaatatatgcgccggcaaaggtaaagagaggagaagggaccgagaagacgggattgaacagcgactgaatgtcaacgccaacttcgccgtcagctatggtcacagctactccccacgtccctgaggcgtagcacgctgtgtgatatttcccagatcctgctcagagagagaagcaaaatcatgaatgttagtgactagaaaatctgtcgggaggatctagaaaagcttttgataaagtatcagacagtcacaagggaacagacacagtgaccaaaagaagctaatttgttcgcaaataaattgaactgatggtgattgctgtattaaaggtgtagattacgagtacactaggtgagaaggtctaataaatttcaagagcaatgtaggtaccaccttctagccacagcttaccattatttagtcactatccgtgttcaggaatggctgagttaaatagtctctttagtggcttccggcgtgtttttatgcagatgtataatggggaactgataccagtaattatatccccagtgtcctcatccagcacaccacagacgtcgaatgtaggccatgtctttattgttacatataactcaaaagcattatcccaagacgaatagcaaaggtagcaaatatcgttcccatttcctttagacttagaaaagtcatgtatgcgagggcttgcacatgttggtttctgggtggtggcacttcatatattatcccttttcagacattcgaacacttccacaacttatttctggtgttacaatactgatggcagcaacataggtgccgcatatgcaccgaatttgtggttgctgggaaaccaaatgcgtgtatagcatgccactgctacagctaaccacttagaagaacgtttgaagagtagaacatactgggtatgctatgatgcaccacaagtgacatgagttagtgaacaatatgactagataattgttagggcgaccctgttatcggtccactcttgcctgctgtcacgcgtatatccaagtatatccagctcagccaaccttttcattcacctcagctccggccttggcctccattgtgtcataattaatgtgcttgctgtgtgcgcggaccgcatcaatgtgcgcgtcaactttcgagccaccaggcttcgtatgccaaggcttcggtcctccaggcgcaaacatctcctcgatctcctcaagggtcttgccacaggtctcggggtaggtgaagaagaaatgaatagctgcgaggacacacatggcaccgaaaacgatgaacatcttccaggtgatgttctggaatcctagcggaatgtagagacctagagcgaagttgaagagccaattaccaatcgcagcaatacccatgcctgtagcacgggtttctagggaccacacttctgtggcgtagacccagcagacaggggcgagggttagagcgtagaagatgatcaggaggtaggagaacgcgataacggtgtgagactttggcccgttactcggatcaacacatttccattgccgtcaacaccgccggggacgtactcgccagaggaaagaatgccgccaacgacaaaatggcagagtgccataatgagagcaccatagatcaggagcggacgacgaccggttttgtcgatgtagaagaagatgaaggtcgtgaagatgatgaagagcgcgtactgtataccagaggagatgaggttgatgttgccggttaaattggccatcatgaagatgtacacgacatactgcgccaggttagattttggatgtcagtactgtcaaggaagatcttacataggtcatcacattagcgccggagttctgctgccacatttgcactgtaaagccagcgagggtgcgcttccacatgccctgccatcgtgttaacacgctctattcagataatcaacctagatagccatacattgtagacgaacttgcgccaccctggtagcgcgttgcgctctgcctgtagcaccatcgtgatctcctcccactcggcaacgacaagcgggtcatcacgattgccgtcggcctggatgttggccaaagtcgcaatagcttcctcggtgcggtcgaccttcgcgagccatctgggagatcgcggaaggaatggcaggccaactatgagaaagacgcagggcacaaattgaattcctcaggcggtccggaaagaggcggtaccgggaatgaagctgcatccatatccgacaaagtacatgatcagaataccccattctgtagcagctttagttaattgaagagcggattcattgatggtagaccaaagccttaccaatggccaactgctgactgacgatcggctgtccacgcttttcctttttggcgatttctgcaagatagacatgtatttgtgaactggtaattccaacgcagactccatttaaaacccgacctgcaatcaaggacccaaaaccgttgttcgcggtttggacagcagtcccgacaagccaccatatacaagcgaacgcaattgagtcgcggcgaccaatcttgtcggagacataacctgcaatggcggaaccgactacagatccagcagcgagggaagagtcgatagcgccctgacgaagtccagaggggttgtcgaagtagtcattgtattgatcagtaccgatgattgctgacatggacgagatatcgaaaccaaagagcatcccgccaactgtggcgatgaaagccacgaagtactgttgtagatcttagggaacttcatgatgaagcctaatcaatagtgcttttttttttccataccaattcttatgaatgcggccgtagagaaaataggggcagtggatagttgagcggttccatgactatttatgaaagcctagagtattgcatggaaagctgtgcgtgaacgccaaccgtgagaggattgcatggcagcaaccggcttgtgctttgcaacctccagagctttcattaagaggcatctgccagccaaccgcatgtcgacaagcgggttccgccgaaaagttgctccatttccccagttccctgtatgttgaagccagtcttggcttaaacaagccaagagaaaaatgagccaaaaagaaggaatttaagtcttaagtccccccgggtcaacactattccccagctcacaacgcccagactcacactgcaaggatcatggacccacaaccatcccattaatcctagaacagttctattaccctctcggctggccagagaaacgacatggatgtcatgcggccgcacgagcacacagcaaagagagcatggccctccgcatatggcccattcgattaactgactcttttgctactgtcagtgagaggtgggctcacgtgaatgtgagatgtggccatatcactgc

SEQ ID NO: 15761 - DNA, 2896 bp, Emericella nidulans
agcgctgaggtttgtgcgtgcgatttaaaggtgtatcatatttacatggctggctatacgaaggaatatgggggatgcttgcgtggctttctccagtagatggctggcgacaatcgaagtataggtagcccctccagcaaagcaatgtgtgcagtgcccgagacagctttccgagacttgggtgacagtcttatcaacatccagcagttaatcttctgcagagacctaataaactaagtaaactgtgccgcgacaaaacgagcctcctacaacaaatgactttctgcgctgcaaaaatcgttgggttggttgttgatgaggttaattgaacatgtcttacgcgctgcacttttagccaatctccaagctccggttgatgcagtatcgtgatgagagaagcaccgaagcctaacgtttatatgcaaaggcatcaaatgtaaagcaagtgaggatttcgttatcagcccacaggttttattaccgggatttaaactttcatctgtgcataacaaatataactacgtatgcatcccaagccggctagacccaaggttgtgcacgcggtttcggccctctcgaaactgtctccttgtcgacatgagccaacagcgccgcactctgcgtcttgatcccagcaagaataatcgaaagcgtggcaatcacctcgggcaaaaatcccagcaccacacgcacagctagcgaccctgtagtagggttaagcgacgccctctgcgtgcacagcgcggccacactgtagaagactcggatgccgataaagatgagtgagaaggcgacagccataagcagctgttgagatatcattagcaagcattctaaacctcacgcaggagtaattactcacggcagtacccgcactcatgagcgaggaattccgtcttcggggagcaataaacgagagcccggtccagccaaccagaacaccccacgcgaccgccagaattgagatacctgccttggtaatcttctcggctttgtcgagaggttgttcgtgctgctggagcttcgcaaagccggcagctgttaaggccacgcctgcgacgacgagaatgtggtaggcgaaaacagcggcccattccaatttcttgtcaagtgattggatacgatagtgtcgactgctgaatttagcacggatctcaaattgggtctgattacttacgcctcgtgtaggatgctagatattgctaggaggagaggagagaggccgacgctggagatgatattagcggcgatgctggtgtcgtggactgcaagtgcgccgccgatgatgcgaagggtacagaagaaaaagaggaagagccatcctaaaaggccgtagcggccgtgtcggacgaggaggtaaacgaccgggatggcgaagaccgcgtagatggcgcaggtagcagcagagagggcgttggtcattgtgtaggccagtttagtaggagtgccacttctctcgttctatcttgactgaagttcatagtcaagagacggcgcaggagctgtaatataagacaaacaggcgttggggttgtccttgtaaaccatcctagttgggtatatcactttgacgatctctcagccgcttcgccacgttggcgacagacaagatcgacattcggccaatcagtcatattgatgttcaaatgtgatcggcatatgcgacaggctgaaaccccgcccacccacaattccccattctaagaattcctgtgagaggctgggcatgagcttgtccgttcccttgaccagctagagataaaaacaacagcagatatgaggtttcggccccttgatagtgcagaagcgaactctactgtggggcgaggatacaaggcagaaataattagtgaaaaatgctcagcccagctccacaaaatcaagacaaccttgtcgaagtataatttgcaaggctcaagtcctcaataacccaaaagaagggtatctggggccacaattagcaccctaaccgagtaagtcttttagatgaacagatctgcgggggatttgggctatttttggaacctacaaaataccaactaaacatattttcccgggtattactaaataaaacactctttgacggcaagatgatcggatcgcccatgcaaccaaggatccgaaacgaagatacgaattatataattactagctatggataggatccgtatacaccaatagataatgacaccaataaataatgaaggatacgccgctccttttgttatatgcctaaacaatgatgctgcggacagggagataaaaaatggcatcctgttaacacagatcatggtgactcgtaactgtttggaaaagcagcggaaggaacatgatattttagtgtcaaatatgataacaggaaaggaagaaggttaatgagcaggaggtgaatgatccaggattggctatacaaatagagtgaataagatcatgtcatacaagaaaaaccgaggaattaacagagtaagtattatgataaatgtgaccgattctgctagacttgtactgagaagatgccattatgccatacaaccaatcacgcgagaatatagatgactgttcactagctaaatatgtctgcccactactgaccctccatcgcccttttcaaactcgccaaagcttcatcaatcagcatcgacatccgctcattgttacaagcagccctggcctccttcagcgcatcctcccagaccccccatcgctcccgcgcatagcccgtccagctttccccttcatacctcttccccggcccagcgtcagccggcttaggatatgtgcgaccattgaccacattcgcccacagccggtctgcggcgtagatgaaccactggcaagcagcctccatcgctgccgtatctgccagcgacgcaggagggcgctccttctcaatgcg

SEQ ID NO: 15762 - DNA, 3735 bp, Emericella nidulans
ccaaaaaaaagatcatttttgttcccacaaaactttggttaagagaggggagagagatcgatcttttattaagagggagtgaaaccatctgagtaataaaccggagcttaacaatttttttaaaaagtttttgtccaccgcgcccctttggtgaaagattgggcggaagttccaagtgggataacaaccccctatttgccgtgtggtctgtatgaaaacaataccttgatgcagggattgttgctcctttagcaaatacaaacgtcatatgttgccaagccgaggcgggtcatgctcgtagctcttcagtaatgtcgctagaagttcgggagtcggctgtttgtaaatcaataacttcgagtcatcgtctggggcgctgaaagatgtgacaggccgcgggtaatcgaagccatctcggggaaaccgcgttaaaggcatgtttagaacatgtgctgggcctggcgttgtgttcgaggattgagcatttggagagcctgaaggctctcgacggggtcgctataaaacaaaggaaccatcagaagttagattatatggtatgggataagtaagagctaggaccccgcatcaagagggtcaggaatgaggcaatactaacctttcttcgccgggcaataaactggactccggagtcgctgctcatcttatgaagagagccgtttgaaaaatgtttgagacgataggataggtaggcggaaaagtgagatgtgagacaaaggcgacggcagatgaaagggagataaagtcttgatgagtagcgaggccttcaggcgggcttggtggaggccgcggttactcttggattgcttagttatgatgtctgtaactttggatccaagtccttcctcctagtgccctccctgtacgcttaaatgctcccgactgtaatctctccaaatccgccactcgatcacagtgaatatgaggttaacaatagcgcccacgagccttcccttcatagttttcatggctcttatctatgcagacgtaaagaacggcactgtatggtcaaaagatacatcagtgcatcatgcgtttgtccttctgtcatttattctccttgctatttcccttgcgaaactcctataagtacaaattggaaccatgaagcaacgtattgaccaacgacttctccgccactcatctggcattaggcttattactgcgccgtcaacactgtaatcctgccatcattatccagcgccatgatactctgagcggcagaaccccaggccacggcaactgcggggaccgcactgcgtaatggttccgtccacaccttcgaagccttcgaatattgctggacggtcagcccgctagggccaccagtcaggaggaattgaccggtataatcccagtgaatcgaatccacctggctgccagtctcgagcaccttaatttctttcgagctgcgtaagtcccagattgagaccatcgtcgagttctccgtgacagctgccaagtaggttccgttttctgagaaaaatacgcgtttcacagcaccagcaaggtcgtaagttgcagccaaggctcctgtttttatgtcatagatcttaatttgaccatcggcaccaccagcagcgagaaggtggccgtctgggtggaactgcaccgagagcagggctgaagaagagaaggattagctgaagcccaggtgtcttcgagggtggtggggggggggtccccccccagagaatcactcacatgtgttactgaagttttgcaaaatgacaccgtttgttgtaaggtcatacagaacgtagctcttgtcctctccaaccgaggccacgatatccccagttgcatgcaaggcaagacccgtggctgcgccagcgtgggaattgaagttcgcgatctccttgccactctcaaaaaccttcacagacccagtggaggaagcaacaaccgctttctcgcctgcccagaggacatttgtaacgtggccatctgtctgcagagtgtgaatgatctgtttttgagagagagaaaacacgccaacagtcccttcagcagtctcgacgagcaccaaatcaccggatacattgactgataacgactttccaccggggtagaatgcgtccgtgctttccgtaggtttgtacgcggaaattgcttcacctgtcgcccagccttcaggaacagggcgcttgcgtcgagtttttgagagcctaaacaaagtcaatgatcacatttagatggcagtatagtagtgagtgagccgggtgacgtacgatgcctgcgtgttctccaccctcgccaaaacctcgtcaggcaggccagctgagtccacctgcatggcatctgcagcggcgccagaagaccttgcaccaacggtgaccttggataacgcgtcgcgtgcttcatctctttccttcgtcaaccgcgcgatcaccctgacggctgcatcgtgctggtaaagcgcagcgcttagttcctgtcgcgtttgaaccagggtttgacgcaatgtgtatgtttccaaagcgagggcatcccattcttcctgaaacacactgagcagcgaaggaatcgaagtaagcgtaggtggtcggggtcggacgacgcgctgagtcttgacctcgatgaggtcttctgtagagagttcctccccgttcaccggatccttcccattctcagcgatgtaagcctcgactagacgcttctcaaagacgctgcctagacagatttagaaattgaggatccgatcagtggtgggttgtaacctaccgctcttaggcgagacaacaggctcttgcggtgcctctcccgaaactgccaatattattagtactcagtcaggttcggacacaattgaacttgacttacttgcgcacagcatgatgtgtagatagactgattgatggacaagacactcggagaaggtgaaactgcggctccttgacttttcgacggtgctgaattcggactagtgccacctctggccgatcggtgattcatgcttggcggtcatcccgaaacgcccaaccacccgtcacccatgacgctgcggattttccatagggtccctccaatggaacagtgcgcttgacataagctagaggctattgccatctagagtcaatttctgatatgtgcatcgttctgttgaagccacgtttcgttacaacttgctggacttgacgtaccgaagcatgaggacaggctaggactcttgcgtcttctgttcagtacatcgcagtgacccgactccgctatcaggtgtcggcggctcgattcaaatgagccatgtcattcaacgcgaaaaatctcgcttacggtaggtgccgtcttcctgaaaaaaggcttacttctctaacaccggtttcagactcgaaggagcctgcattcctgcagcgactaagaagccaattcggaaactcctcaggtggcctagagcgtccgtcgctgcgacctcgccgagtacacgacgataaagatgatgatgcgcctacgtatgtcgatgcagaaagcaatgaagtgatctccaaggaagattacgaggctatggtgaaatgcggcgactcagaaactaaacagcctaaggatggtgaagaggacgaagatgccgttgcaaaccaggatggagactcgcaaaaggcggaaacagctattatgaaacaaaatcttgcggagatcggagggcctcgcaagcgaaagcaagcgaaagttgttggtgatgaggtcgaaggggacgatgtcgaaggggttgagaaagaagag

SEQ ID NO: 15763 - DNA, 404 bp, Emericella nidulans
aggcgcagattcatgtattttaaatgcctagactcataatacataccaaccacagctagcgggttataggcccgggatcatgaacctctcactgcagagtgaagggcgcatatgctattcacgcctatgtttgatggccgtcacgctgacatgcaggcttatgaagcaagtagtatcctcactgggaaagggccagcactggccgattgtagtctatataggcgctcggctgctgtactgctactatgaagtcgcgcgtcatgtcaacagttgccacaatatcatccacacatgtgactgatatgaacgtatctttctgcactatacactggtatatatagcgctatccaagactggccgcaaagataccaatactcgctgtgtttgaaggaaatgcgcttact

SEQ ID NO: 15764 - DNA, 403 bp, Emericella nidulans
acagcccagctactgcagagaatatacctggactaccgctcataccttattttcaagcatgtgacacggtgtggaccgtcgcaagtggatccttacttggaccagctgatcaccggattggggattcatgctgtttggaatcattgcttgatcacatgtgcaactttgctctcgataggacaaccgttactattagtataccatccgagcgggccagattggtctaaactatataacgtacgacagccgttatgtgataatcttcacagagagcccaagctgagctgagaacaatcaactcacactcagtagttcccagacccgacaggcggcctaaatgcacccgacatccggcaactaataactgtattcgaagttccatctctcatgcgcaatacgtgcc

SEQ ID NO: 15765 - DNA, 3933 bp, Emericella nidulans
aaagcaaacacatttcaggttctgggccaaagcccatgatatgccaacaaagctcttgaacgttacccctgtagtggactggaaatcactctacatatctcgacacttggttgatcgcgccactagtcagctactggacagtatcattatgagccaaaccgggagaatagagaaattccgatctattgtcagcttcggctatgatgctaaagacacccttctacgcaatatctcaattgattcgtctgcagaggactacctggcgaggaggtatacgcctggaaaatttcaccaaagaatgggctaacctttgccatagatattacgccagagcgcttcttactagccttcatcgaaccattgctatcccagcatgggccagtttgagagatggaaatgagatatcgcttgctaatgcactcggagcttttgatttgttcataccagaaagtggattcgggaacttcgacgaggtacgcagactcagatggcgccgaatcactgtctaaaagatccgcagattagtgctaggctaaaccaaatattgtccggctgtcttctggagtttccggatatacaaaatttgagccctcgccgaaaagcgagcgctatcgcggcgtacttaaggtctcataacatgactggcattggaccgggccgggagtatcactgcctggaacataactttcttggaatcgcacttaatgacccagcgcacaactcattgcctctgatatcggcagcgatatattgccatgttgcgcagatgctcggactagacgcccgcccatgtgggtttccttttcacgtccacgttatcgttatacctccgtcggggtttgacattgacggaaacccaataaccacccaaggtgaacccatttacatggacccttttcgctccgatcaggagactcctgcatcagatttaagaactcaactgaactttctgggagcctcgccaatagaacaggttgctttcatgggtgaatctgagacttccgagattgtcctacgctgcagcaagaatatcttgaactcaatccagcgtaggaatcagtcctctagcattgacgcggtatgcgcgcggtatgccgcactttggtcctctctgctactctcgaaccaccttcgaccagccgagctgcaacatcacctcctttggttgatggaactagtagccactgacttcccttgtgatattcatcttgtcgagaggtatattgcctctttattccgcggtacaccagaggttgaacatatcctggagagcctccatgtcatacgtgctgtcgatatgataccgaaacaggtgaagcggcggtcttttgaacacaagagtgtgaagtatcacattggtcaagtatttagacatcgccgttacaactatacggctataattacaggttgggatgcagagtgcggcgctggcgagcaatggatgaggagaatgggtattgatcatctccagagcggaagacatcaaagcttctaccacgtaatgtaaggcgtccttaatgtgatgttatttggtactaacagccccccagtgtagaagacaagagtgtccgatacgtcgcagaggaaaacattcaactcatatcaccgacagtctcagaactgtcgccgacgcttgttgccgtggcagggaaatattttaagcggtgggatagttcatcgcgagagttcgtgagtaatatcaaagacgagtatcctgatgattagaccgaaattcatcctatgtttgcaaagtggaaatattacttatgttttctctacaagtacttgactattaaacactgttccgcctcgaacgtagaaatggctattagcaatgtgaagctattcttaatcagccaggtcgtaacttactcatgactatctctagggaagatatccgggcagggcatctttacatcgaaaacgacgaaattggccaggacgaagaaactcaatcaaaacctttcaatctattttctcaatctatcttaaacccgctcctggactttcacgaattcgaaagactagttctggtatacaacgtctgaagacggtcatattcctgcgcacggtaagcggattccgttacatgcaaatgcgtgaacacaggttccacagcaacagccaggtactagtgcagagtaatttgattgaattatgtgtgtaacacaatggaatctcggttcagtccctcttcgacatggaaaccaaatacgtggcgatacaggtcatacagccagaggtactgtccactttgggccattagcttaaccgccctagctatatccattgcgctcaccctggttgaaggtccgatggtctgaaaaactggctcgtaagccaccaacgccttgtaatgattcagaagagatatctgccaaggggcggacccaaacgcgtcagacgagattgatttgacaaacgacataaagccctgtgctccattgcgctggaagccgttgttcaaagccgccttggctatcagtgctctaaggctgttgactttcaaatcgttagagagcgttataacggtatttgttgatgttctcgagccttgagatctctctgaggtagttgatgtgattgatgaccaattagcgtatggagctatattccggcgttggccgagaacaaatatattttgaacgggcccttcttcgggggaggtagtaccgacatcttcgaatattgtagtcggtgtctcgggttcgcgtctcgtagttgcaatatcaactgtatcagaacgttgagcttctgctgccacaaaggttgcctggcttggtcgaggtgttccacggtcagacttccgtaggcttctctgcgtccacccttctcggaagatatcagaaagctcccagcaggcctggactgcagagccaagcagttcttcatccagcgatcgtccttcttttttgctttggcgtatactgaacagcatttcggccaatgaccagcaggcgctcaggagcgagtctgtctccggtaggcgatttcgctgtttcattagccggtggcataatgtgatgtagaagtccagggttctttccctaaaagcgtctggtagattacggtcgtgtgtgttatagagatgattattgagctcaaaactgacacgaagaacagagtccgaaatttcattgtcgcgagttctagcctcaaaaagagtctgacagaagtcgcggcagaggtcaagtgttgggttaatttgggatgtatcattatcattgagttgacagtataactgttgacacaaccgccagcatgatttccaggcgtcatcctggtttccgacaaggaaactagctcgttctctgtggattgagcttaaggtagctagagtgttgcaaagcgaccagcactctacaagggcggcctgcagtgctgcgatctcactcagtgacggagtttccgggaagtggccgacctccggtatgtctaatcacgctgttgattaacctgacggctagcctgactagaagcatgacgctcaccttcaagattttttgagaggggtctcctgtcgttctcgtcaaaatcatgccgtgtttgtgcgcgcggtgtcgctctttcagaccagtctttgacaggctcgacgctggtggtcaatggaggaggcgatatcgtctagagaagtcagtaatatcctgctcgtcaagagggaccatcataccttagtgactcgttcctcttctgctggtgtgacgttgatgctcataggagaacctgaagaggcggcgccatcgtctcgagaggtactcgagttagatgattgctggatctccaatacgagatcaccgaagccaattggagcatgtattacagactttggttcgccttcatgggaattctccctggaatgacttaggcttgaatttgtagtttgtacctaacaagttagaggtctaagcgaagcccatataagacgcagacata

SEQ ID NO: 15766 - DNA, 1858 bp, Emericella nidulans
gcagtacactgctcggctgtaaatcaggatggcgaatgactggccgatttagtgagttttctgatttgaagccaaggcatcgcgccaaagtcagattatcagacagattttttatgtggctatctggcgaaacttgacaaaaattatggatctctctgtaaaggcgttcataaggaagacggggtttcgcgtaagtttgggcccatttcagctcccgttccccaaccgcgtgaaagacatcgtgtgatgacaaccctatgacggattatcaaattcagttctatatgttgctagagttgttcacttacaagggcccctgtcgattttgagtactgctctttcctcatgccaccaactgtaatgctacaggtcccatacagaacttatgactgttatctggcagagggaccacttctcctgaaagaacatcctttcgatagtatatactaccggacgcagggaacttcaacgacatcaatcgcgtctcccacttaacaatctgtttcatgattctgtgctgttcttttggcgtcagcataaaccatacatcgcccagaggagtgccgtccaatttctccataattatgtactcagcaccaacaggattcgcccgtgttgagcaccaacaatacacctccggtgtagtgatcccatgcagtcggagatagtcatagtggccacctcgctagcaactgcgtagtgttcaggtcctgtggaaggatatggaattctagcgataatttgcttcccgtcattgaacgtcgctttgaataatcggttgaacccgccttctgaaaatttaaaaaacgaaatgatatcggaagtggaatgtccgtacgcggcagcaatggccttcttgagagcaggtacactgaactcgaggtaacgttccttcaaccgtagatgctcattatagctacagcctgttagcctcgaacagatatatgctagaagtgaagacgtacatccatcttccggacgtatacttaaatagttcatcctcagagttttgggctgactgacggacagaccccgttattttcctgaactgttggatctggtacggacggatgggcaaagaacgaccgaggaatgaacggaggatgttgcgaaattgcatgttctagtagagaaatatccaatcctacatggggcattttgaaagaaaatgaaaaaaatgacagcttcagaagtattaggaaagaacgccagggcacggctctggcaaaacgtatttccttatgagtgtactttaatatatcctgagtatgcaattccagggggcctgtactacctgatattttaataattgggcaagcaacggcaacttatttatcaacaaagaacaatctatagcagctgcaatgaaaacaaaaagggttggacacatcatgggtgtatattgaattctgcctgcaaagtgggcatacgaagggtgaaggtcatacatatagctatgtttgaatccactccttctgagatggtgttgatccctactgaagttctggaaccactacccgagccaccatcagcaccagcttctatcgaagtgtagggtgcagccctatacatctcactcttatgctttacacctggatttggctagcttcgtggatcttaactctttatggcattaggatcaaaccatggtcgtttcgtgttctgcttttttgcttttgactactgatatttagtattttatacccggtattggaatttttaccttcttgatggttaatagatagaggatatgatgtttttattggcttatggcttatggcccgtctgacaagttggcaccccacccgcgctggtctgttttacacttcctcaaatagacacttcctatattactgtc

SEQ ID NO: 15767 - DNA, 596 bp, Emericella nidulans
  unsure (1)..(596): unsure at all n locations
gcggacactgttactgaacatcaaactaagcaactgctggtcctgacgtgcatggcaacgggcatacggcatacgcctgccgcacacatggacgctacgtactggtctatgctggagagactcacgtcaagcaattgactgtccaccatccgacataaggtgctgtgtacttaaacgtaacgtcggaatagtgggcatcctcccattcggaggaccgacactaaccttatgagtacatcgagcgtaagccattcgccaaccaccgtgtggatggttaaaatccatttttaaccatgcgaaaactcctttcactccggtaagaaacacagcttcccacgccgatgcgacaccagcgtacgaactttatgtgctactgacatatgctccagcctaggctctgacacgagcacctgcggatagaacactgttcttccctctgtgcaggtcgacagacttatcatcatctgtgcactttgttaccacctctcttgaaggacatctagggcgatgagagttacatagtgactgagccagngtctacgacgctcatattggacgggtgctgctgttctaggtaagcgctactgatgctggtg

SEQ ID NO: 15768 - DNA, 777 bp, Emericella nidulans
cagggttaatgtgcagtgcactctcccggttctatgttccgcggtccctgtgggaccagggagttcctaagaaagccctgcttcgcgaggccgggaagatgacccacggcgacgacgtcaaggacctccatcaccccttggggcccttggtgtcacaagaggcttttcaacggttccagcagtttgtcgacagggcacagagtgatggacacgagctagtctacggtggtaaaacggatggcagccgtggcttcttcgttcagcctgccattttcatggccagcgacggcgacagcgacagcgagctgatgacaacggagctatttgggcctctatttgccgtgcagacctatgatgatagctcacctactggcttcgagagggtctgtgagctgattgacaagacattcgagtacgggctagcgggcttttgtcttttcccgggatcgggatggccatcccggcttgctgaccagaagctgcgagacttgggcggcattgttttggataaagaaaaagtcgggggcaattattggggccatccgttgggggggcgcggccttgtgttaccaatgacaaggcaccttggttatgcccgttccattttagcattgctgtgtaggcacctccaaactgtagtctacctgggcagtatttcccaataaaatttgggtgtaattctaaagctaatctgggccccttgccccctttttattgaccctttcctcccacattaattttttttgttttttaaggaccaatttttttccagagact

SEQ ID NO: 15769 - DNA, 635 bp, Emericella nidulans
caccgaagttctcgtcaaacacccacacgcggcttgacttagaccatgactgcatactgattagggtggtggtatttggtgattaacacatgccccatgagcgcgagggacggcctgctctcctgaagcggagattgtaagacgtcatgctcaactactatgggggtcatgctcacaaataggcccaccgtaagattataggctcgagcggagacaccttcaccatatgggcgggctgtatttgtttaacatcgaaacacactatctggagcgggctacttacccaaattgtatatccggtgatctagctgggctgagaatgttaccagagatctgctgagggaaggaagatagtgtgacgctaatcataatcgcatactgcgccttaatgatcctgatcaagacctatgggctatgggtctttggccaatctagggacttcagagcttatcgacttcggcatggcccgtggttttgcgtaggccgggacgtgcttagcatgccttcctcaaacacaaaccgggttttaatcctttgttgtttagcagacaggtatttgtgtgtacggaaccggtacaagggaagacatgccttttacttctcatagaggaccaaggctgccaaggggccaacag

SEQ ID NO: 15770 - DNA, 1714 bp, Emericella nidulans
cattgattatatacaaacaaacagacaaagacatctcatccaactaaacattgcggcgcccaaacactaccttatccacagcgtgtggcgcatcactctgaagatagccaatctggcgcatatagctgatactcttcctcagtgacgccagtaactcttctttttccgactcttgatccgctcccgttgctccctgcaactggcaacctcctacaggtaggcccatatacccaccaccggcttccaggaaatgcagtacaggccagagacgatgcgactcgccttgcgcatgcactgcagcccgcatagcgtccaaccactctgccggtcccataccgcgcatcggatacccaaattcgtcactgagcatgtgccagagctcctgcgttgttattgctagacggaccttggtctcaacggacgggatcccggacccggctgcgtgccgggttcaggttcaactgcagcttatcggtcacgatggaagcgacctgctgtgcgccagcaagcaggatgacattctctggttcctcggcattgaacccgccgatctccacagcagtcgctacaacgcgccagaagaaatcgtctgtgttggacaccccagattgcgcggttcccagaatcagtccaggtttcacgatcgagacggcagacgttgagtaccgcgccgcgaagcgcttaaccacgaggtcggcgacgaacttggattgcccgtagcccgttgagtgggcgagcacggcagccatttcctcatcggtagtttcgttgtcgtctagttgtacgtggccaccggatacgaaggtcaaggttgggggtgcttgagagcgtgttagctgcgagcagcgagacgacgctggacacgttgacatcgcgcagccggtggtagtcggccccccagtggactagggctccgttgtggatgattgcgtctatccgtggttctgcaggacctgcagtggacccagactcagatccaggatggtcacggccctcgactgtggaccattggctctcgctgagtccaagacgcggtgccgcgagatcgcctacccagggtgtaatccgggaccggtactcctcttgccaccactgtgctgctttggcggaagagacgatcctctccattgcatggtcctggtcccgtgcgcggacaattgcgaccacggtgcgagtgctcgctgggttggacagaagctgtcgaaggatctcagtgccgaggaacccagtggcaccggtgaggaggattcgctccgcccggggcgttggctggctgagagtctgcacgtcgggggacgcctcggtaatgagggagttcatcatgcgatctacctctgcgaggagatcaagttgtggtgcggattcttgcttgtcggtaccggcggcagtattaccgtgctcgatcatgcgcgcgacgtcctggatcgtgacggtgctttccatgaggcgatcaatggatacgtctgcattgaatttgtcgcggatcatcgcccgcatagagaccacggtgatggagttgagtccgctttgggagaggacgatattgcggccttttagggtttcaaggtaggcttcgtcatcgccagccaacagtcggctgatgggctcgctcagggcgagagcagtcttgtcggccgggtcaatagggcctgcttcgtgagtagcagtcttgccgacttgagcggcgattagttcactggttgcatcgtccatg

SEQ ID NO: 15771 - DNA, 3890 bp, Emericella nidulans
tttagctaagactctggcacctatccagaaaaccctttatgatagaacctgcctcctattagctttctttcttagagcaggtagtttgctaattattatgcaatacagtcttttctacagaaaacgggcctaatattgaactcattgctggccgttaccacccatagtagacgtattgccttatgaaggaggattggcaaccatgcgaggtcattccagggtatccacagcttgattgttacacagcagcaatctaccatcagggttctactgacagtccattaagcagtcaagatgcgtgtctgtcgaaaacgttcggctgtcaggtgacgccaccccgtggtatgcccctacctctagtgaccttggttcccgtgcatcgaccacattcagacctgcctctcctgtacactaaacatagtccaataaactcgggctaactcaactatcgagcggaaaggagggaaattcacatatagagacccactgatctacctccattacttaatcgagcagaaagttacaaggaccccaaaccagacttggtgtagctcatagtgcttgctgatttaagttttgaggcaaaaagcttaaaaatcacttgaaaatgaaaattagcacagcagacatgtataccttgacaagcctgcgatattaagtcctcacgggtttgtcaaggtccacctgagacgtgtcatatccgaaggcacggcgatggtggtatcagtagaagtaaacatccgttcgcaacatgatctgaataacaatccaagaagaatagcattaaaggtcggctggggcatagcagctccaacggaatcaacctgttccgcataagctcacacttgatattccattcaacatgcggttgatgaaaaatttgactgcgtcatgtcgagcaagattggttatagctggactgctacttgctttcaattacagactatggctcttttctctaagacaactgtcacatctctggtgttcatgtaaaccataacaaaacccgcgacggtcgaatgtcagaatacgagttgggtcgatggtcaggaaccgcacgggatttttggtaaaccagtggttacccgcgaagaacttatattacataaaatccccaagttagttaggctatattcactgcataaggttgctgattcattagatagttgatttatacggcatgtttgtactgtttgtcaatctaccaaagaccgaactccaggtctatgctctcaaagcccgataccggtatactagtagaactgcatgaaacacaaggatcgctcagctgaaagttaccatcctcttacacagtataggtttgcacttagataatccagctgaccctgaatacgtaatgcataaacacaattggtaatgcacatattcctagtagttgactatatatttttgcccactccaccatcaggcagcacatacgccagtgaaccctccaatgtcggacacaaagccaacaggcagagcatagataagcgtcatccaataagctgtccaaatataaccgagaaaacgaacaaagtctgtgcccgaaattagacaggaacataccgacagcgaggtgaacttactgccgtcttgaatacccgcctctctgccgtaatacttaagaatatcctcgacggtgacgactgccgcataggctggcatctgccaaaacatcccccagccatattcagcggatggaatcagtaatgcgcaggcatagtgctggactcccgataccagaaaccccacataaagcctgctgtacttataaagtaatgtccctttctgcgcattaagagcattggcgacaatatcgccacacctcgtaaagatctgtcggaaaatctgatgccagacgcgtccccagaaattgcgcactgtgtagagatcgcgcatattgccgaagaggctgggccagcgatcgggtgttgatagatggagtcccacgaagagtattgaagcctttcggtattcgctgtccagcatcagactatcacgaattaactgcagagccacgagtccgtgtctgttgagcagaggaagggaactgaagtcgacatgggcgtcgacctgagcgggccagagtgcacagaatgcgtactttcggaccaggtctgagatgtattggttcaacaggactcttcctgcattggaaacaaggaactccctgaacgtagagagtcagcacgtcatccgtcacgaaaacggggagcaacagttcataccagcgtgactgtgttcgttcggcgccccgtggaaggtgctggtccacgaaattccacccctggccccgccagcacgaccagagctccacgctccacctcaatttagtcaacccttgacgaagagtactgctatcctttgtgcccttatgagtgatcgttgtgccggattgggtagtctggtgatagtcgatctcaggtgtccctgccacgaacatgagaagccagcgcacggtgatcgagatcataaatatggcatccataaagaacgcaggtccggagacccaatgagtcaggacatgaagccatagactagtgaaagctgtaagcccgacaataacgcgtagaggacccgggggaggcagagtggttaggacagcgaccgccatgaaaataggggtgagaagtttcgtagcccaaacaggcatctcctcacgagatgagtacgcatactgcatggcttggagattgctagtgaggttctgaattacatagtctgccatagtgccctaactctgagcgagctgtgagatgtatacctgcgatttcggtttgaagaagcagcaaaaacaacatatgtaggcaggctggtagcaccacaggcatccttattttgatcttttgatagaatatactagaggataaaacagagaggcgtatttggagtggaagggaaagcccttgagatagctcgggtggtttgtttgtcagcatcggcaatagctcgggaggttttcgtgcaatttcaggtgcgaaaagaaggctcagcaaatcaaaagcatgctagaagctagttgaacgattggtactgaagctagattccagaactctgaaaaatgtagatcactgtagcaatgtctccgatagacattatggtgcaggtgatctttcagttgcgggttgtgcccagccctaacctcccggcaaccacccgatggaggaaaaaccttcagaatcatgtagctcatctcaagtttcgccatgaatgatttcaaatcgtgattgctaatcaattctctccgggagggacaacgttggcccgccttgaatgtcttaagggggtttgtataggttgctgaaaccactgtctctttcctgacttctcgtcgttagttccaagtttcgggcaacgccatcgaatcctcttcgaatctcttcggcattttctggataccatgtcatcagatgatacagtaaagcaagagcacagctgctctgctgatagcgagaaacaggacagcagctgcgcgtctgataacgagcaaccgaaagaaccccagagccctcgcaacatacacggcctgttatgggttgtcactattctggccatctacagttccacgtttctgtttgctcttgacaacactatcgtcgccaacatccaacccgctatcatatcttcccttaatggcatcgagaagctcgcctggtccggtgtcgcctttgtgatggcatccagtgccacagtcctgacatggcttcagatcttcaatcagttcaacattaagtggatgtacatattctccattgcagtgttcatgggaggctcggccatctgtggtgcagctcagtcgatggatatgctgattggaggtcgtgtcatctgcggcatcggcggtgttggtcagtacgtcggcgtgatgaacttcctcccacgcctgg

SEQ ID NO: 15772 - DNA, 513 bp, Emericella nidulans
gacagcaaccaagagtcacacagagtaggaaactttacttttgtctatctgaactgcacaccgagtgtgagcgtactgtccatactaagacacagtgtgcattacatctacaaggaattacagcactcacgactgcccggcaaatcagagactatggagcgagtacaacatctaaactcttaatgtgctacgacaggtgtacctttacacagaattgcccactttatacgtagagcggatgaactcgtagatgatcctgccaagatggggacagaagagccattccattgtgatctgggctgcctagtccatacacttccagtagactgctagaggctcagaggagacaatgacctcaccttatgaaaggactggtatgaccacaccgtcagctattgccatggcatatatacggcacatgatgtagagctctaaaacggcttagacggaatcgcgtctatctctggttatggggtgtccacaaggttttggatgcctacgcattcaccgtga

SEQ ID NO: 15773 - DNA, 521 bp, Emericella nidulans
atatctacacctcatttacgcccggtcacatacgagcgttaccgatcacaagaacacacactcgttcccacacagagcatgaccaaacgctcgcctccatacccgtcggtccacgaccagctcacgtttatacgcataaacacaccgatgactccgattagccatacgcctctgagcctactgtgaactcctaatcctctacactctgccgccagttacacaaacatcatgtctgcgaggaaatttacgagcccacgaactgtggggaactggtggcgccgtatatccctaccagatccgccccgcaattgaggattgagcatgaatgttttgcgcatctatctcagaaaacctcgaaacatgagggccataatcacattgatatcttcggtcactacccaagtgaagttgataccggtctctttgctcttaatactactgtgcctacatgaaaagacctcaatagagctggaagaacaccggctcgaccctcgacggcagacaccgagaccgtctcatca

SEQ ID NO: 15774 - DNA, 470 bp, Emericella nidulans
actagttgggccagcaatgttgcaagtcgcccaggtaccagctttattaggggttgctaatggacaggcgccaaatgtgcggtcgagccggccgcaaaggcaaagatgaggcgggtgagacataccttattgtcggaaaatctgatctgcaggctgtttgcgaccttctggaggccgatatgccagcaattgaaagttgtttggcgccggaaaagagaggactgaaacggtaagtgtccactgttgccaggtaagaaagttgttcacattcttagagcactcttggaggcaattgcaaccggtcttgtctcaaggcgttgccgccatcaaagaatatgtgaaatgtacccttttatatcggactgctgataagaaagctgtcgtacagcatcatggactcagcccttcaagagctggcagaagaaaagctcattcaactgaatgaagacgagtcttatgtcgccactcag

SEQ ID NO: 15775 - DNA, 4213 bp, Emericella nidulans
aacatctagatagttgttagaatagatgaatcaaggaccgcaattcaaaaaacgtaccatcaatagtctcacattgtgtcagatttgaatagtgttgcccgttaagcaagctgttccgatatccacggacaatcccctcgatatagctgcaagacgttagctctccgttctaaatacggcgtataggtcagcttacccgctattgacgttgaaaaagaggccctccattgtgtgactctagcagatcagacggctctccgcatcgacatggagagctccaggtgctgctgttctttggccggccagttttacgtaagccattacaccgcctcacatactagccacaaatgcgggccacaagccacagcaggcgctttttctgcactttttactgacagccaaaaaaaatcctccagcagcacgctctcggaggttcgaatccacggttgcccacacttcgccagtccctcccttcttactcctggccgctgccctttcttattttcaacacctgggagtcgtgaccgcacacaatgacgcttttcatcctgaccgagacgagtgcgggctatgccctgctcaaagctaaggacaagaagcttctgaagcgagacgatcttgctaccgaggcttctacggcagagggtgtttccaatctgtgcgtttatccctgtcattttttctgtcttttcctgttgaatctcttgtcctgttcaatcgacaaagtttttccgttgcgtctaacattcaagataggctcaagctgaagagcttccagaagttcgacagcgccacagcagccctcgaggaagtcgcctctgttgttgaaggaaaggtcacccctcgcctggcaagccttcttgatgaaatcaaggatgagaagaaggtctcactggccgtagctgatcctaagttgggtaggtctgatccccgcttacataccgacagtgtaattgacttgccgctgcgtaggaaatgccattggcaagcttcccggtcttgatatttcattaattgccgattccacaacggccgacatctaccgtgccattcgtgaacatctgcctacgctgattcctggtcttctcccccaagacatgtccaccatgtctctgggtctttctcactctcttgccagacataagctcaaattctctcccgacaagatcgacactatgatcgtgcaagctattggtctgctggacgaccttgacaaagaactaaacaactacgctatgcgtgtgaaggaatggtatggctggcatttccctgaactcgccaagatcctcaacgacaacatcgcctactcgcgactcgttcttaaaatgggtatgcggtccaattttgagaacgccgaccttgcagagatcctccctgaagaaattgaggcggctgtgaaggccgcggcagacaggtctatgggtacagaaatcagcgaggatgacttggagaacattcaggccctggctgaacaagtcgttggtttctctgaataccgctcccagcttgccggctatatcactgcccgtatgaacgccatcgcccctaaccttaccgctcttgtcggtgatcttgtgggagcccggctcatcgcccatgggggtagcttgaccaaccctctccaagagccctgccagtactcttcaaattctcggtgccgagaaggctctcttccgtgctctaaagactaagcacgacacacccaagtacggtttgatctaccatgcctctctgatcggccaggcgactggaaagaacaagggtaaaatggcgagagtgctcgctgcgaaggcatctctcggtctccgtgtcgacgccctcgccgaatgggacgacgatgtcaccgaggaggacaaggctgcccttggtacagaggcccggttcaacctggagcgcaagctggccgcattggaaggcaagcccctcaagcctcgtggcgttgctattggtcccgacggcgcctctgcccaacccggcaagttcaacatcaacgaagctcgaaaatataaccctgacgcggacgccgtggatcaggataaggctactccttccaagaaaatgctcgttcaggaggttcaggacgaagaaatggctgatgctgattccgacgaggaacccgccgctaacggggtagactcagactcttctgacgaagagacgtccaagaaatctaagaagagcaagggctcagaaatcgagaagctagccgagaaggccgggctaagcgtcaaacggtacaagcgcaagctagaacgcggcgagattcagttcgacgccgccggtaaccccagcgccataagcaagaaggacatcaagaaggccaagaaggaggccaagaaggaggccaagaaggcgtccaagggcgatgacaaggagaagaagcgcaagcgatcagacgagaccgaagacacggacggtaaaaagaagaagaagaagagggatgattaagatatcagaaagcaaaaaagttcaagggtactatgtctttttccttcttctgtatgatatcacatgtgccatgtgggttgattttccagtgatttattctccttgctctctttttgatctagtgtgcaatgtttgggtggcattaggatgggaatacttttggtccctcccggcgcattgatggtgcttcttcgtttatttccagttaatacaaagcaactgttggattcatctgggcaccagtctaccaataccattggcatgcatagacactcttaacaaagcctcttcgtatacgctgacgcccaatgctcaaccacttccacggggccctgtatgtcccacatctgcaagcagcggagcagggatcccacagtatcaacgaagccagcaatcatatttctgcatactctccaaatattagacagaaattttccagcctttccttctcgtcggtcttatctacggcgtgaggggttacggagctgttgagagatacggtaaaacagtgatatcactacgctgagcaggggcgcacagctcagccagtttgagaactgggtttcggatctgtgtatattatacatatcctttttcttaaatttatggcgaggtttgttgtccacctcgtagtcaacgcagcaccataatacaccgcctactacatgagcctccctcaacttagtgatactgccagcaaaacctcacagtttactttccaccgcctaatttttccctcatcttcccctcacgaatcaccaccagtccttcagcagttgcttgatgaacacatcaaattttcaatttccttgcagtctgacaaagttacctattattctaacacaatgcgggttagtaactcattacgcccatcactccatcccaccacatattccaaccgatccaaactaacgagcactaaaaacagataataaatccccaagatgcaacactaacaaatatcgaagtactctcatacctcactgcaaatccgccacgacggcccccgaccgctccaccaggcgttaatcagaagcatttcattccgagccccgacttgcgcgaccacaataccgtcgtcaaggagatccacaactacgccagccgtcttgcaccgcatttattgcgctacccaacatcttcagctacagctacgtcgagtaaaccgggatcagggaaggaaaggaggaaggatgcgcttgatcatgcgctcagagagcttgtcactagattacagccgtacgggctgacgaaaggggaggtccttatgattgttaatctgggggtgggaatatctactgctgccggtgtcgccggtgctgcggctgagggtggggttgaagatgggtttgagggagtgggagcggaaagaatggatgttgatgaaggtgatcctaagcctgaaaatggggaaggggtcgagcaagagggggctgaaggtcaggttgatggtaaggctgatggagagggaggagagggcgaaggagatgcaggcgactacggtgctctggcgttgattgatacaataattgaagaacgcgagcagagattgagtgatgagaatgtggtggagattttggcgatcgttcgggagacgttgggtgccgctacctcatagccagtttattatcgagggactgacgacgggatgagcggggtgtacaatatgactcacacccctgttatgtatatactgcgtcggagataggaatacggatatcaaagggaaaattgaagtaaaagtaccagcagaggatttttatgt

SEQ ID NO: 15776 - DNA, 476 bp, Emericella nidulans
aggcctccaatatagacaccggtgactaggattttggagagggcgaatgtgcgggccaaaaatgcgatattctagcgtactgacggatcaacgccatgtgccggaagacgctgagaactaccgaccggacactgagcgagcggactacccatgacaacagctgcgattagatatacagaagggaaacgccagggctagcaagcgcaaacagtactgtgcatctatcgtaaaccccaaatacagacggctgtgacacatcttaggacaagacctatcacagcgcacggtgataagacacaccaaaaggacctggaaagcacataggctatctaggaaaccgagcatctgacatttagctcgagccacgagtagcgactgagaggggaccaaagagacaggtcacccaccgtgcccgaagtgcacaatggcgaacaaaagagcagggacactgtaacaggaacgtacccgtgtaaaaa

SEQ ID NO: 15777 - DNA, 806 bp, Emericella nidulans
  unsure (1)..(806): unsure at all n locations
aaaaccanaaaaagaaacttaacaaaaaaaacacacacagacacccgaacccccccctcccacaaacaaacaaaaacaacacaannnttattccacatgtaaaagaaaaacaagcaaggggccaccaaccaaaccgacgatttggtaaccaaaaacccaccaagacaagaacccgccccaaacaggacagaacagacgaaaccaggaaaaaaccaaaccgaaatacgacaaacaaaaaacgactaccaacccgcaaaccgcacaccacaacaacagatggaaaagaaaaggcgccccaaatcacccacgtacaaagcacaaccaacacgaaaaaataaacaatacccgcaaaacccgaaacaacactcgaaaaaaaaaaaatgacccccacttcaagaaaccacgacagaaccgaaaaccaacggaaagaaacaaccgaaaaaaccttaccccaaaaaccccaaccaagatgaaaaacctaaaaaaaacgtcccaaaacgatacgataaacaccaacgcagacccaaacacacacaataacaaaaaaaaggccaaaaaaaaacccaaaccataaaccccaccaaaaaaaacacccaaagacacccgtaaaccaccacaaacacctgccccagcccctgagaaacaccgaacccccaagaaaaaacccccaacgaaaaacccaaactaagaaaagcaaaatccaaaaacaataaaagccaaaccgaaagcagaaaaccccgaaaacccaaacaaaaaagccaaacccgaaaaaagaaaaaacccaaaacccaccaccaaaaaaaaca

SEQ ID NO: 15778 - DNA, 838 bp, Emericella nidulans
  unsure (1)..(838): unsure at all n locations
caaaaaacacaacnagacaaaaccgaaccccacaacaaacacaaacaacaaaaaaccccaacaacacccccccctccccaaaaacgaagaaaaacacagngnnngnnaaggggcgggcgcgaccataagacaaaacataaaacccccaacaaaaaacccaccccaaatngtgagtgaaacagaacgccccaacagcaagacacgaaaacctaccaaggccaacacaaaagccgaaacaaacacaccaacacaaacccggaaaagacacggcaaaaacgaaatacaccatcaaacccaaagaaacacccaccacacggaagaaacacatcacaaaccccaccccaaccaaacctaacccgaccaaacacgcaaaaaagccgcatgatcaagcaaccaaatcaaccacacaaccaccgaacacctgccacacaacaaacagacccccccaccaacatgcaccaccaacccacaccgacaaccccaaaaaacccaacacaaacctcaaaccaaagcgacccccaaaaaacaagaaaccaaagagcactaaaccagcaaaccaatgaccaacacaaacaaccccacaacgggaaccccaacaccaaccaaaaccccaccctccgcaaaccccaccacaaccccaacaaagacaaccgacaacaccaacacaatcccagaaacaacaagaaccaccaacccaacccgaacaccaaaaccccgaaaacccccccaaaccaaaagccaaacaaaacccaaccaccaacaccagccaactgaaaaaacccaacccccacccgctaagaaccccccccaacacaccgcaaaccaaaaccaaaacccc

SEQ ID NO: 15779 - DNA, 6322 bp, Emericella nidulans
atttccctgaaaggacatcacgtcaaaatttcatcgattcaaaatcacaagagacattgcctaaggctcgaactactacgttctatattatcccaccgccttacaatagcaggttaattaggtactgctgtatttatgtcttggggttaacgaggttcagatttcggaaagggtgtatagcgatctgcgtggcgattggagttcgcccctgaagaaagtctccagggcagaccgagtacttgctagttaactactccagttttcggtatagtctaaaagatgaaaaatgtctaatttagagttatcaagcattattaatggtatcatgcgacccaaaaccctcattctctaaacgccgtgcaatgctccaaactactacggacagaaccctactttgccggaggcggcggcggacccattttgcccgcgccggtatcgaccttcttcgtaggtaacgctggaaccttgaaacctccattggcagtctccgacgaatttttggaagtattttgcgcacccacttgggtgaaggtgcctgacttaaaccaacggtcttcctccgccttgcgcttgcggcttagctcagcttgcaccttagggtccaccaattcaagtccttgcacgggagtgaaagcgatagtactcgctgtaccagctgcaccaccaaatgaggttccgatacctgaggatcgaagacctttggcttgtagcacgctcgccgttccgctgggcccttggccgaatgtgcgtagggacgaagcagttccactgatcggggttgctgcaccccagcctttgttggatttgctcaattttgcccttgttctctgatcgatttgggttgctcgaatacgtccgtcattctgttgaccaagcattcctagcccgacggtaccttcaccagtaccataaccaacttcagcttcctctttgccgaaggcaacgcggttctgcgccttgcgaagctcggtcatcgcgacagcctccttggccttacgagcccttctaccacctcgctttcgggaaggcttgtcatcgggcgcgggaagggctttggttccggaattcggaggtggttcagtcagcttctccaatcgttgaaagcattgctgtttgagatcctctcccaaagagccgtcggggctgtattttgaaacgtcggctcgaactgcaagtaccatctttgcagacacaatgcgaattgcctgtctcttcaggtcattgggaatatcctgtatgagttctgagttgtagaggaatccttgcgacctaatgctagtattcgtagcaaaccccagaccatctttcctcttcgaaccctgagcgcccaagttgcaggccgggatcttggcaagctcacgcagtcctcccgtctggttgaggaactgagccgcggtctctggtccgaccaacgctgccagattaggggcgatctggttcatgttcgcctgaatgctctgtgtaagagccgtccgctctcggtcaagtttcaggatcctctcgcaagtgtccatgacaactttcaactctgcctcggtcatctcgcgccctcgcgttgttgtaccttccaccgcgacgaccatcagtgtcggcccgtccaaaatggacttcagaggtactccgaccatgttatctgccgacgttgacaaagctttgatgtccgtcagcggtccatttttgagaatcgcgacggtttttgcgtagtcgatagaattcgtcacgagagtttccagttccggaaatctgatagaataatgatcgcgtagtgatttatgcaagcgtgttaactcatccgcagtcgacaaggcgacttcaaactcatttgtgactgctttggccggctcttgtagcagctgctcttcgtctcggtcttcttcgatggcctcgacgccatcagcgccctcgaaatcttcatcatcttcaaaatctctcaagagctcctcggcgttggacatgatgtataatccgcagcaaagcagttataacaagatcgtgtagtttgctggttgacaaggttgggtttccataaatctcgccgccgctgcgcagttgctgagtaatcggagcttgtccggatggcgggagaagccgcccgcgcagcttttgcgttttcgggcagtcaggacatgcaacggccatctttctacccatagacaccctattgcaccagctctctcagatatggaggcatcgcgcgggccccctagggtcaaaaataaggctcctgcacctgtccagatctcagcggagcagctgctccgtgaggctgttgaccggcaggagccctcactacaggcgcctacgcaacggttcgcggatctagaggaattacacgaataccagggtcgcaagaggaaggaatttgaagactatgtacgacggaacaggattaacatgaacaattggatgcgttatgccgcatgggagttggaacaaaaagaattccgccgggcacgatcgatcttcgaacgagcgctggacgtcgactcgacctctgtgccactatggatccgatatatcgaatccgaaatgcgaaatcgaaatattaatcatgcgaggaacttgcttgaccgcgcggtcacgattctgccgcgtgtggataagctctggtacaagtatgtctatatggaagagactctggggaacattcctggtacacggcaggtcttcgagcgctggatgtcgtgggaaccggatgagggtgcatggagtgcgtatatcaagttggagaagaggtacaatgagtttgagcgggcaagggcgatcttccagcggttcacgattgtgcacccagaaccgagaaactggattaaatgggctcgctttgaggaggagtatggtactagcgacttggtaagagaggtatatgggttagctgtggagacgctgggtgaggacttcatggacgagaaactgttcatcgcctacgccaggttcgaaacgaagctaaaggagtatgagcgcgcgagagctatttacaagtacgctcttgaccggttacctcgctcgaaatcgattactctccacaaggcgtacaccacgtttgagaaacaattcggtgatcgcgagggtgtggagaatgtcattctcgcgaagcgtagggtccagtacgaggagcagctcaaggaaaacctgcgcaattatgatgtctggttcgactttgcgcgcttggaagaacaatcaggggacccagaacgagtgcgcgacgtgtacgagcgggcaatagcgcaaattcctccttcccaggagaaacgacactggcgacgatatatctatctatggatcttctatgccctgtgggaggaaatggaggccaaagacatcgaccgcgctcgtcaagtctatacagaatgcctgaaactgattccccacaagaagttcacatttgccaaagtgtggcttatgaaagcgcagtttgaagtgcggcagctgaagcctccaagctgcgcgtaagactctgggccaagcaattggtatgtgcccaaaagacaaactgttccgtggttacatcgacctggaacggcaactattcgaatttgtacggtgccggacgctgtacgaaaagcaaatcgagtggaatccgtccaacagtcaatcttggatacagtacgcggaattggaacgcggcctagatgataccgagcgtgcgcgagccatctacgagcttggcatcgaccagccaaccctcgacatgccggagcttgtctggaaagcctacatcgacttcgaagacgatgaaggtgaatacgagcgcgagcggcaactctacgagcgccttctgcagaaaacagatcacgtcaaggtctggatcaactacgcacgctttgagatcaacgttccagacgaagaggaagaagaggaagaggaagagcgcccaatcagtgacgaggccaagcggcgtgcccgagctgtctttgagcgtgcacacagggtcttcaaggagaaggagctcaaggaagaagtaagtcatcctcatctcgctgtacatgagaataggacgctaatatgtattcagcgagtggaactgctcaacgcgtggcgggcgtttgaacatacacacgggtcaccagaagatatcgacaagatcgagaaacagatgccccggcgggtcaagaagcggcgcaagctggatgacgaccggtacgaagagtacatggattatgtgttcccagcggacgaccagtcggcagcaaacctctcaaagctgttgcggatggcgcatcaatggaagcaggagactgcgggtggacagcaatagtagtacatacaagcgcccgctggtatactgtattatcatggtaatttaatcaatgccactctggctcttggcgcagagctgctcacacaaattacatgaagtacttgtggtagactggtccatctacggctctacatacagtaaaccgaccccacaattcaggtacaagtggctcgaaagaagtgccatcgcgctgctttgttatcatcaccgatctcgtcacactatttacgcatcaaagagccattgaaacaaacatcggcagccaatcataatgtaagtacagtgcctcgtgagctggaggtcaggccgccgatcagcgcgactcgttgctgcacctctaagtggccaccatctgcaggaacaagagctcaatttatagaagacaaccttcaggcgctgcttccagctgcttactggactatacactgtctcccttcgaacgttccacaaaaacctttgtgctcagaaattggcttcttcccactctttgacgtatcagagaaccacagtgtagagtagcatcaatagaggtcaaccatggatcgcccttttacccctgagattgagagccaacctgaaccacaggtcctgcagtggctcccttacagcagcagatgcaaggatcgctgggacaaacaggcttgatatcatcccgtctgctgacgtcgattgagattgattgatattgattgttgttcatcgaatgatcccaccgtttcactctcaccacgggatgcgtgtgggctgttaattgtctttccctgcgatcctttcgatctacgcgtttggatattgtacctttgccggtcgctcttcagctctttttctcgaatttgctagtattctagttctctccaattgcattattgatgagttatcatcaccgttcgaagcgagcaacagccaaggtgaggaattccgttgtggtccttgctggggccgttgtttcagtgccagcctatccccaagtccaaattaattaatcaccctctcactacggggtgccattgcactactacctgctctcagtcattctcccctgagcagacgcggcccttctcctctcctcctctccttctaagaatcaatcctttctctccttcgctctcgtccgtcctttcgaccctcgcggtctcgcgtctctcgtttttcttctctgccgatttgacatcgcgcatgcatcggatcggtcgccctatgacccgtttcagcccctgaaaattccccgattgacagcctccaggtcatctttccttccggtcctttcctcctgctggattgtcgtatgtcgatcttttttgcttgattccagccgaccttcgctgtgtaagcccacgtaacaacacgccgagtgctcccacgcccttgaccactcgggaccatgagataggactctggcagtcaccttccattcgctttagctcactgtaccccgaccgcattctttatcgggtggctggttacccaccagatcctctcttcggctggtatattcgaagaatcgtttgaatctcgctatcgttgaccataatgcttgcgcctgagcccccggtcaagctagagggtcactgctctgtgatccacgacaacactctttacacgttctcctccaacgggttcgcttacattccgctcgagcgcaatggcacatggtctcctttgaacacggatggcgccgagctagtctcggatgcggtgtgtgttatggggggtgttgatggtaacgagaataagacggcgctctacgtggttggagggacatcctcaaaatcaaatccgccaggaatacagcggttctcgttggaggataagacgtggaaaactctgaatgtggcagtggacaacctagccaaccggacgggtcatagcgccgtctatttaagatcaatctcgactattttgtcgtacggcggcagcaccactgatggatcccggccgtcttctgaaactttcacggtgattaccaagccgacatacagccttgactcataaaactgggtattcatcgcccgcagtttggccgccacttttagatgagcgacgatacagccgtattgtttg

SEQ ID NO: 15780 - DNA, 3224 bp, Emericella nidulans
  unsure (1)..(3224): unsure at all n locations
acgcgaacaggccgtcacgaacactgtttctctcgcctggtggattggtcgcgcaatcgcgctggaaaagaccatcagtgacagagcgaagcggatgattgacgagcttgggggtcctgagagcgcggcgatccttggagaaggaaaaataacaagtgtagaacgcgtccttagaaccggccatacatatggtgtgctcgaggtagacggaggcctgccagatggcacaaaagtcattatcagaatcccgttcaagaacgagaatgccttcgtggaggcggttctgccaactggggagtcccggatactagcgtcggtgccagatttgattgccgttcttgatgcagagacaggagccggctgggtacgcccgagtacaagtacggctaaagtgatgatcattgctattgccgcatccccaaggtggacagatacgccacggggcatggctttaggaggaccaggttcgatgggatttgacggaatcgaatatgtgccaattgggaaatatagaaagccgcgcagcgtaattgacgctttcgcggtataacatgcaggtatatagagctcactagctggcgaatattgaacaaacaacattacaaaggtgtatataaaaatattgggtaccggtaattcctacgtcccgcccatcccacttctcatgattcgcgcggcgtgcaaaaagaaagagtcaattcgcagcgcaactggtcgtaacagcgcaagagaggcatcatcatcagcccaccctcgtaaccgttgaagcgattcgtggaagctgctaaggagctcgaatgctgagtggacttgatgtggactgggcgccaataaaaacaggtagatcaagaagtttccgcaaagggtaagctgagatcgagcatctggccagtcagcatcattcgatatggcgaagggaaacctacgtccgccccaaaaagcatgtaagcatgctgaggtaatgctgttcatgaaaagcgtgaatttgcgaaactcgcttgccgccaggtcgaaataacgacacagagacgaagttgggtcggacttggcggacatccgggcaggactcatcaatgcgcggaagaggagggcttggaccgcgtagtaggcgagagtgagcggcgctatggaataagctttcaatcgtaatatcagttcagctcagcataccgttgtttcgaaaatcagcagcgccaatatatgccatcgtaacgcagttgggggccatcgataaccaggtttcaagctcacgtctgatactgagaagcttggcctcccgggcttgggtttgggtaattgtctgctggtaactcaaatcaaggctacttgggttaataaagagtcgcccatcgcgcgagcaacctactagtacgaatcaatcagctcatgcagaattcgactgagtttgaccatctccaaaaatcgtgcgctcgtggatatatcgaccgcttgactagaaatatcgaccatgtcttggaagtcagccggtacatcttcgtcaaaagcgagatcgtctatttccggcagcgtggttgtaaaagatcgtgggtacacaagcggtggattgccatgacaaacggaggaccagatgtcgctcatgtaagtagcccaccacaatttcttccgcagcttctgctcccctgggacaaggtgccacgtcgtcgagtcacgatgcagtccgatcatttgcgcacaggcaacagttcgggaactgaaaacccaggtccgcggtgtttcgatggtcgcattatctgctggccgttcatgaaggaggagcagacacgcctgtataccccatagattcggcgcatgcagctcgcgctgcaaggatgactgcgccgcttcgaacagatcgtgcaggtcgaattgcagagtaccctccacgtcggggtcgtgctgccagaacatcgacccaagcccgtatacagctccacggagcgaacgtgggatcttcagactatcttccgcgtaggccctgagaaaccgcactttcgaaaccacgcagtagacgggatgaacgtgcttgaagaacaagcgaactaacgttgcagcgtgcggagaaaccatggcttcaatcttctcggatatcctctgcttcgcaagatcgtccgctggctgaaattcgtccatgagtagattgaaatggaccgggaacgcagttgcgtcaaggtcacccgagctaacctggatgacatcggcactgataccatccctctcattcgtgattactgatcgaaaagaagccagcaaatctgtatcttgctctccagcaaggccgagagaatgcgccgttcgattttcgttgtcttcaagagtgtcaatcgttggtccattctcgctcagcggcgatgtaaggacgtacggtgaagtctgagaggccggttcgatccaattactcggcgaagccgactgccctgcggagagcgagtttggtcgtagctcaggtgatagaatcgatggaatgctggtataattagtgtcgacaacgctgctgcttgttacatcggtagaaggagcgacctctcgcgagcttcgccgctgactgagcgcgtcctcggttgacttgcacgcttgtcccttagatcgacagaaccggcctaaatgtgttattcaaaaactcccagccggtgacagtcacatacatggaggagcagtctcaataatacacgcggtctttcgccgtctgcacgcgtcacaagggcgattcttccgacttctccattgcctagcggcaccgaatttggtcttgatcttaaaactacgccgcctcaagggagtgggtcggtccatgaagggaagcagaggggatcctcatctttggtgttggagagaggagaactcgagggccggcacgaagagtacacagcctcttttggactagcgtccgataagctagtccctgatctggggtctcagctgtcctacggggaacagtaacgtagaaacggtagaaacggtcaaatcgaagcccagggagccagtaactggacttggcttcgtgctctgcaaccattttttctttttttttagacaaagggtgactgcccgtattctgtaatttgaagtcgtgctatcttctaaagtggacgtgcatctacccgtcaattagagaacatatggtngtctcacagagctcccttattatataagaatanatatttagtaaaataaaaaatatagtgtatagtttaataggatatagtattttttataataaaacgtta

SEQ ID NO: 15781 - DNA, 4090 bp, Emericella nidulans
  unsure (1)..(4090): unsure at all n locations
cagccttgttagccagctcgacaacttccttctcagtctcgaacgggaacagtccagccacaggcccgaaggtctcctccgaggcaatcttcatatccttggtcatgttcgcaaggactgtaaggtcatagaagttgggacccaagtcagaacgtctctggccaccagcaataagcttggcaccctttgagatggcgtcctgaacgtgctggtcaaccttgtcgactgcacgatcatgaataaccgggccgtgggtaacaccatcttcgaagccagcaccgactttgaagtttctgaccttctcgacaaacttctggacgaattcgtcgtaaatgcccttttgcacatagattcggttagcgcaaacgcaagtttgaccggagcttctgaatttggaggcaattgctccggtaacagcggcatcgaggtcctcgacgtcgtcgaagacgatgaagggggcgttgccgccgagttcccaggagaccttcttgatagttgaggatgattgtttcatcaagagtctgccaacgtttgttgagccagtgaaagagaccttgcggatgtctgggtgtgtggtgatcatctcgcccacttcgggggtgttcttcatggctgtaacgatattgacaactcccttggggataccagcgcggtttgccagttctgcgagagcgttggcagtgaagggagtctctcccggtgactttgtgactacagtgcagccggcagcaagagcaggtccaatcttgcgtgtgatcatggcagctgggaagttccagggcgtaatcagaccgcaaacgccgacaggctgtttaacggtgattacgcggttaccaggtacagaagccgggatagtgtcgccgtaggtgcgaggagcctcctcgctgaaccattcgaagaagctagcggcgtaattcacttctcctttggcgtctgcgagcggctttccgttctcccacgtaataagtgttgccagatcttcggcattgtctaccataagctggtaccaccgtcggagcatgcgagctcgctcacgggcgaaagttgcacgaaacttagggaaggccgcgctggccgcctggatggctntctctgtgtcagatgcgctaaattccgggcatgttccaataagttttcccgtagcaggatctgtcaaaacatcgagataccacccattagcatcgatgtgcgctatcgccagattcataggctatttggggctctataccgtggacctcgaatgtttttccggattccgcatctacccattcaccattgacgaaggctttctgaataaacaaagacttatctttcaactgcatatatactgttagccagatgttccaaaagggttttaagatcctactcaccggaggtacagtgtaccctgtggtgtagagcctttgggggtaggtatgagaaggcatagcgtataaataacgaggccgtcgcattaactgcttagacagcggacgaaaaatcttgtccatctttatattcctctatttctggtccacgggtcggaaacaagaccgaagaatgcgagggcgctgtgcttttcctcaatcagcttgcgtgagtatcaatacaagctcggccgcagaaattgatcgattgtagtagcgctatccagatggagcaaattagcaagcttcccctacgttgaaggagagagttttagtccaatcactaattctattcgagaacccccgagattgtctttatacagctgcttctccaactgctcgcggcgaggggagctataggtcacgtgcatttgcgtcataatgagcaagttcggctcttctattggtcgctaaccccgtaggcttatcagtgacttatgtgattggtgcaatgtgccgacggttctatatactgtcggccttctttgcgatttgctgatttgcttagtataacggtttacatagaagagaaatgcatggggtagtctaagtgttcgacattatctatgataatttgtgatccggattgaaataaggtttctatttcaatacaggactgtattaggcaatcggaaccgttatcaaaccgcactgcgtgtttgcgacttattttctttgggccgataattcggatgcatcgtttttagatgttgattcaggttccaccgccgagaaaatcccttctcatggcgacggcaatttttgatgggacataccaagctttgaatcctctgactgcttccccgctcggtaggcttgggatcagccggcgaagtagagcgcttgcctgtagaagtagcacagcttgcggccgccgagagtggaggagggtcatcaagtttcatctcgactttttcagacgcccactcaaacgcgtcgtccatgtaatctcgggtaggatttctgaagaacgatgggatttccatgtcctcgccaactaaagcagagaacctttgagtagcacgctgaagcacggctgacggcaagcctattatagacgcaacgcctgctacgtccctccagtccgttagcactgtcgggccaagggcgtttgccgaactggagcgcggtccatgtcttgaagtatgtgtatttttaatgaaggtgtcatctcgctgagatgacacgaatgttcttcgcgtgcgcttgcgaccccgagaatagcttctctccggtattctctgcgttcgcttcttgctggaagatagagtccgcatatgagtgctgtcaatggcggagtggcgttcggcttctgagtcgtcgtctatttgtacgccctcagaggaagcgttactcatatcagacacagatggagaactccgtgcgcgcattctgcctcttgaccggcttcggttggactgaacgtcgtcggactgtgacgctccatggaaacggtgaagtcccatcagtaggttttcatattgggtaatcacatttcggacgagtgggcgtagttttcgtcgcgattcagcgtcatctatctggactactgggcgaagagggttctgcaagccctcttgttcactttcccagtctgtggtgtcacccaggctccattggtgagtcccaatatctccttctgtgccagacttagccccctctgtatcagacggagcaacggcttttctgtccgaaggagctgaagaagcccactccctagactggaacctctcctttgctattctcgatagaaatgccgtgatgcactcttcaagctctgcacttggccgtgcatctggtttcattctgaaggtccatctgtcatcttccaaccggcgaagacgctcatccgcacggggaacttcgtcgcttggcatcggccatgccgtccattcttcaaggatatctagtaaatccgcatggctcaattcattgttattagctccgtcttcatccgacgaatctgcgctcgcggtccctagtgccgcaactccccgcgtttgcagaacatgtgcattgtacaaatgagctgcaaggtcccttgcaccggtctcagccaatgcttcggcgatctctctatcagtctttgtcaaatgcagccacagatttggcttgccataaaacctattagggcgatatggagagggagaggtaggactctcaggggttgctcgcgtcttcgggataggtttcgtattcgtgttcgataatgagcgagcgccggtgtaactcctgcttggcgaaatagacgtctccctatcgctggtttgtatgtaatctaattcgtctccagagtcttcatatccatagctcaagccatcgccggccgcagcagcgccatcaagttgatctagggcttcatcttctctggagagtatggactgctcctgctcaagcgtcgcctgactagaaccaccaaataaagatcgatacggctgtgcagatggaggaacacctgagttttgtgattggctgtccgagtagtaggacatgcctcgagattcatgggagtatgaacatcaacggccgctggctaaatagtattaggatgtacggtaattggcgaagcatggataagttcgcagccgcacccatgtgggtaggttcctgggtggttgatgctgggttaagatgcgtgcttcgcagatgatccctttagtagggatacgggggctgaaatcttg

SEQ ID NO: 15782 - DNA, 4116 bp, Emericella nidulans
ccagatggttggatgatctgccccaagccttgctttgatgcatttgtttgcaaagcaggctggtcttgaagccggtagcgagcgatatacgagatatacaccagacggttctggtttgtgacagctgtatcggagccgttgctcttcaggtcccgagtgattgtgcgactgcctccgtcgggcaacggtatagtgtccgtaacggtgaaattcaaagagaagtcttcaacgtccccgggataattcttcaattgtaactgaacgggaagttagcacagatcgtattgcaagaatatcattacgcaccaaaccttgatagagacctgagtccaggtccttcaagtcgttgaggttggctcgatatgccgtctcgcgttgagcggaacccgttccgcccgtcaatgcccactttagcaggaagaacggcgcgaaactaacatccaccagaatgccttcgtagagacactttccaattacacgccctaagaactcatagcgcctgagtaagtcacgaacctgatcattccactccggagtgttctccttcaatccaagctgccgcagattctccttccgttgttcgacagcgaccgggctgggatacagcaagtgttgatcgttctcctcgaacaagcgtagaccaactgtggatttaaacgcttcgttagttacactggtcaggaattccttcgtaacaccgccgccgtcaatgcctgcttctggagcgttgaacttgtcgatgaaagtgatctgaattggctccttcagaccctctccgagctcatagaattggtcgaacgcgtcatcgaacaaactttcacggcggatattggcgtgatggcggctgaggatatcctgcatcgttgagcgcatatcagtcaggcggcccatggaagcctgcgccactgacattcgccacgaatcggggtcgataaatccgtgccttcggcgcatttggtcgcggtaaatgaactcgcggaatatctgtacccgtgtggcaaaaggaatgaagaatggcatattcttcagaatttccaatcgtgggggccacggcttccagctgttttcggcgagcagcttgttgttggcggcgtctgagagcctcaattcgccgcgcttgttgggcacgacctgtgcccacgagaccgagtgacggctcctcgtcgtaagcgtcggtcatcaaatcgtcagtatcttcttcatcatcgtcctgaagctggtgcctgctctcctcctcagcaacgacagcgggaatgaacccttccatatcaaatcgactagtcatcagccagtgcccatcgggaaggaatttacgccgtgaatcgcgttcatggaccatccttaagaggccagttacaagacccttaaaatagtctagcgggataccagtcaccccaggcaggcctttctctttgttcttgttctcaaaatccctgacacttgccagcgtatcaagctgtgaagttgttgagctaaagtaattccggatgcccccagcaacttgaaccagctcattctctgtcaagtctgccgagttccagtatagagtgaatgcgaggtttttgaggaaaactgtcatttccttgacgtcatttagaggaagcgcgctctccctggtccacgataaacgtatgttcgaggaggcagtaaaagaagaaccgccagaaaaaaattcatcatcatccataacctttagtacgaaagtgtacaactcgagaaaaagaagaataatggtccattcttggtctctgtcttcttgagaaagatctgtcggtccagagctcgagtcaactggcttcaacaagggcaataccttcgtcgagtcctgtttgatagcatcaaacactttgctagagcgagatgcctgccagaagtacttgatagctggaattcgagattctggtcccgcagcacgatcacccagggtggccgatcccaggtataaccacatgcggatatcatcgccccgccgagggaaaactctcagaagcgtcaaggcataatgggccaggtctttagcttctgtcgaggcgccggagccggtactcgcgagctcagtttgcgaaatatgagttggctgcaattgtgagagcagaccagttatgcttgtttgattaaccaggctgaacagttgatcccttataaacggatgcagatatgcatctctgttatcttcatcaacatcggcagagtcttccgcctgcaagcgccgggaaatctgcagcactgtggaattcagcagccccgaaacgacctttacaaaaccaagctccggggtgtggttcgtggtctggctccctaaagcatatctgtggaagaagatgaaataagcaagcaaccaaagtcgagattcgacggcgtccgagtcttggctctgagcaaggtgcagcggcgccagtgcggatgtcaacaatttatagttaatgttattcgccaaaaaatctagcgatcccagtttttccaacaagttggggatagtgagatagcttttagcgaaccactcgtaagcagtaagagtctcagaggtgattggcaatagcaaagtaagaacactctgaacaatgtcggatttagacaaaggcgaccggctcgatattgaatcatgattatttgtaatgactgccatagtagaatagtattcccgtgcaagacgcgccatctgcttgggaatgagatctgtaaggaactttagaagctgtaggagccgaccgacagcgtatgcgggcacatttggtgaacttgctgactgcaagacacgcaaggtgatctcggccagacgcttgagaagcattgtccattcgccctccgttgccagtgacggcacctcgtgcagtgttttctgaaacgcgtccgaaaagtataccaagcgaactatgtcaccgccattccaaggctcgataaattggaccaaaaggcgtaactgagacaagcatgccgcggcagattcaaagggagcggctggctgcactgcggaactcggctgcttcgccatgtcatcgaacgaaggcagcgagtctgtccttgcagtctcggtagtgtcccattctgcccgccatttccctcgcattatcttcctgctccaatagcccctccatgtccgttgcacgacgcggctcgcccctaaccgatctcgttcgagctgacgtagctgtctctcctgctgtgcgatcgcaagagtgctctgtggtccggggccgtgggggttttgtcttccggatggatatgcggcgaaggggttgttggtgcggcctgagaggtcacttgccgtggtcggcgggagttgcccgtgaatgtcgtgaacatggtttcatcgactcagtcgaaatcagagggccgcaggaaggactcgatctgttcgtagtaagtaatgctatctagggaggcagataaacgcccacaaaccccatgccgcaggatgaagtgatgacttatcgggcggcgatgctgagaaggagatggaaagtcggagttggtgggtatgtgatgacagcatgcaggctttgcacacgcactggagctggtacggccactcaccatcaacactatttggggctcgtccaatatacgcaccgtgacctcttccacatcgcctcagcgttcacgatcaaatgcctggagtatattctggtcctgattaactaggatcgctgaaaccgtggttgtttcgagctcgggacgaggccaggatgaattgctcacctatatatcttctactcctaggtgatcccttacccaacaagagcataggatcaacttccgaaagagaagaagagtgacagctatcaagccagactgataagacaaactaacaacagggcggttccggctttcgatgttgtccaaatctcgttgataggtcaccaagggccattgacgccctttctagtctctgtatctctccacgtcctatctccaagcagtgattagcaaagtcaatgaaaggtgttgatatagtactttattgactacaagtacccttgaatggttgttgaccatttctcactgtgaaatcttgatatccctgctatctcgctccattcctccattctgtgaacattctctgtcttgagcggcttggacaatatgacctcttcctgacccccggatcctagactt

SEQ ID NO: 15783 - DNA, 576 bp, Emericella nidulans
cagcgctgcgcggttattgttagcgaacgcgctggagcgccgccgatctagcgaagcccttgctcggcgttttatgatgtctttcgtcattgaaggccgtgaggcgctgtacctcgatgacattatggaggatctcggaatctagaaaggaggctcaggcattttgattcgcttacttcacttgacctatatagatagatttatctagtatggaagagatctttctggtcaatacttgagatcgctcgatcaacatgtctttttactaaaaagcgctttgtttttttcatttcaatttcattattatacactttaatataaactaagttcttaaaaatatttattaaaagtacttatttctatttttcaacttattttttatcttctatcttaccttgtattgtaacttttaccttcacttgtatctaataattatttcttacaatactttattatttatttattctcaaattatatatatatattataatttttattatatattatattctaatacatttaatttcttattttcttcttaactcaacatttcatcttctttattaccgatttata

SEQ ID NO: 15784 - DNA, 5258 bp, Emericella nidulans
cacttgcctctacttcccgctggcgcgcgatgaccgtattctgtatgcgtgcaagctgttaacaatcctgtttctcattgatggtatgtagaatgcgcgctgccttgtctgttcgggctctgctaaagccgtgggccagatatcctggaagatatgtccttggaggacggagaggcgtacaatgcccatctgatgcccctcatgcggggagatgtgctcccaaaccgtaagacatttttccgtgaattctagctgaacacgccagtacccagaacttactgcgatatgagagagacaggcgacatccccgtcgagtttatgatgtacgacctttgggaggagatgcgcgctgcgagcccgatcctagcggatggtattctcgagcccaccttcaccttcatgcgcgcgcagacagacaaggcgcgtctttcgatcaaggagctaggtcactacctcgtctatcgggagcgggatgtggggaaggcgtgagtcaagatccatttggcgtggtgatgcttgctaactcgcgggcgtcgaccgtcagtctcctgtcggctctcatgcggttcaccatggacctcgagctaacgcccgaggagcaagcggcgatggtgccgctcgagcgtaactgttcgaagcagatttcggtggtgaacgacatctggagctgggagaaagaattgcgcgcgtcgcagtcgggtcataaggaaggatcagtcctttgctcgggggtcaaggtgctggctgaagcaactaatctagacatcgcagcgacgaagcggctacttcaggccatggtcgaagagtggaatcgggttcacgatcggctcacagcggaacagctcgcggcgggatgtcgtccggccgtcaagctctatatgaaggggctggaataccagatgagcggcaatgagcggtggagtcgtacgaccctgcgctatgttgaaaaggaggcacccgctagcgcgtagggggtatgtttggagccccccgcgaacaagtcggacagaacactgtggatgcccagcacggaaggtctcaccatttgttggacgactaaaatgtccataacggattccgtattggactatggtggctgaggactctgacgccattagcagcaccttgaatgaatcccctactacagccctgctcttctgtgagatattcctgatcgctccatgtagtattttcccctacaacctgcttctctccgtagaccgtattagccttctatgtttcctcgtccggcagggctgtttactttcctggggcttttgtaaaacttagctgagagtgattgggacatccccatggtcattcaacgcgctagggccaattgcaggttgttcggagacaggggacccccattctacctgacaccaaagcagaggcgctagctacgtggttgcaaaccaaaaggtgtttcttgttctcctcccgacgtcaaccccggaactttcccttcctagcacttgggggcaaggaaaacagagaaacgaaacgtctattcttttccctcccttctcccttgcatcttccgactcccgcttttctccttcttctcatcgacagtttcgcaatgccccgttgcgccctcgtcaccggctgcagtgccggaggcatcggctcggccctggtagaagaactccacgcgcgaggactgaaagtctacgcaacagcccgctccccagccaagatgagccaccttgccgaacttgccaatgtcactctcgttactctcgacgtcgtcgacccggccagcattgccgctgcagtcgataccgtccgccaggatttgtcttcgaatggtgacttcctcgacattctcatcaacaacgccggccaatccctcgtgtatcccgccctagacacgtcgatcgacgaggccaagcgtctctttgatgtgaatttgtggggtgccatcgccgtcgcccaggcttttatgccgttgcttcaggctgccaagaatggcagtacgctcgtgaacgtctgctccatctcgggcttcttgtacgccccgtggatgagtgaggatcctataccccgtcggtcgcgattcagcgatgacgtccgcgctgacaatttgcatcaggtgtctacaatgcctcaaaggcggctctgatgtcttggagcgagactctccggttggaactgcagcccttcaacatccgggttatctccctggttaccggctccgtcgccacaaatgtcatgtcgcattctgacctgaccctgcccgaaaactcactctaccagaaagcgctgccagaaattcaattacgcggcgtggggaaggatgtctcgagtaagagtgcgccggcagactttgctcgcgaggttgtcaaggatgtcttgggcggagcgtcgggacccgtgtggcgtggtgctatggcttccatggtgaggtttatgtccaagtacatgccgacaactgtcttggtaagtgccctgcggtcttttaatttctattcctttcttatcatgaactggttgctcaccaatgtcgcgtaggaccgggcaatgaaggggggaactggactggacaagttgccttgaaagaatattgcatagactggttacatcataggataaagactagttaggtctgtccatgatatgaatctcttttaattcttcctagataattatctgttggcctgaaggatggtaatctcccagtgggagtcttacacttcagtggatacccacttccacctgctttataatataaatcttgtcctaccaaatgacatccggaggaggcctccattcctattggggttatagataaagtcccagaaaggtataaatcgtttacaaacggtagctagaagatcagaccttcaattcattcgggcagacctcggtcaaatgaccatatttcagcacagtagtcacctcaatagcccacaaacagaggagccccagcacaataaccctaacttgaaaagactatttataagtatttagtttctcatgcttacagaaatcggtcaaaacatattggggacactctaaggttcagttcaatgactagcttgatgccgttccacataccacaaggttacctatattcacttctacactttcccactcacttggcccgtggaagtacctgcgtcataagctttggcttaacccacaagagatgcatggccgcatccctgtgccagtccagctcatcgtccaccagcttcaggtcataccggtaataaagctttgccaaggtcaaccgcagttccaaccaggccaacctatccgatcatcgtcagttaaccgtcccggatcttcatgggtaacctgcgggaggagagctcaccctcggcccaagcatgagcgtgagcccattgagaagggttgactagcctccagttggtccttctcactcagtcttatccagcgctccggacaaaaggcccacggggtatcaaaatttgccgggtccatgctggcagccaatgggtttgtggagacgattgtctatggacgagaaatgtcagttgtctttttcgctctcatcatccggcttaaaaggggtgaagaaaccggaaacaatcttcatattgccatactttctctggcacaaaatgcccgtctatcatctctccgccctccggcaccacccgtggcaaagccaatgctagcggaggaaatatacgcaatgcctcaaggcataccgcgtgcaaatacttgagtgaggaggtggattgtccgttgatctcctcgtaatttctaaaggcggatcggacctcctcctgcagtgtcttgagaatgcgcggattacgaccgacgtagtaaatgacagttgccagacatgtggctgttgtttcactcccagcaatgctgtggtcttctttcagcgtcgctctggctggcaaggaaattggggcagttgattgatacgtacacaaagtccgaggcgtgagcggctagctggatatctgatatctgggatgagttgcgctctagcaacaggtagctcataaagtctttcctgttggtcttctgctggattcgcctagacaattgaccgtgagtatcccagcagtgatgaacgccgaatgggggtagagtaccgtttaaccaagtcgatcgtatacgtttggtgtttgatcgcgccatccatgagtttgtttaaccagcgtgggttgagctttagaaaaacgcggccaataattgggaagcgtttcaaaaagtcagagaggcctgcctgtcccatgctttctagaacaaccgctatccagaaatgaagactcccagtttcgagcccatggaacgactccccgaaggctagtatatgtgcggaaaatacggtcagattggccgggacaatgaaaccttacaaggagtgaacaattgaacttacccagctcgccaatgatgtcgaatgtgagcaaattagtccacatcgtcatatcaacgccatctttcgagttgccccgttgtccaacctggtctataaagtcgtcaatgacacgtgtgacaagaccttcctgctcacgcagtgatcgatctgaaaaagcggcggagagaaatttccgcatcgcgctgtgtcttgctggatcacgctcgctgacaatcgagctggcttgatctgcaaagtttccaccatcgtaaaagtcgctcttgatgaacgtggcccggccttttcgcggggcgtatatatctttccacgactgcgcggtgttgaaagaaagctcatttggagccacgcgcacgacagaacctatagggttcaaccccagggatatcagaacgggttcttcacaacagaattaggatgaccatatattcaccgtattctgcgtgcaaattgagaatatcgtatggttgccggccgcccatataggcccatgaataatttagctatataagaatcaccaatgaggatttccagggttggcaaatcgaacgttccaatgatacggacattactcagagctgatagcctggggcccgggaagtgagccaggggatgagacacaaatgcccggatcaatagtcgggctatccatgttatgattcccacgagcgcgctcgctccaatgagtaccaacgcgggttgccctctgaagtggtccattgtctcacaagttccatatggcaccataggtctgtgtggatatgcacttattcactgtaggtatgcatctagagaccttttgtaagattcttcgatcaaacgtgcgggaccagcggctcctgcatctgaaccactgggatgggacgatagcgcggacaccaccctcccgtag

SEQ ID NO: 15785 - DNA, 892 bp, Emericella nidulans
taggcccgacccccctgggcgatggttcgtgagcgctcaggcttgaggcgtgttttctttatgaccgggcagtcttccgccgctttgtgtgtatgtgaatctccatccccctttgcttccgcagggccctacagcgtcaatgcgatgtctgttcgcatctgggcattaccgagagactgcgagttggtagcgtaagtgcgctggccaacatagcgatggaactttcctattgtgcggaccttcgttggtgtagaggtttctcttgctacgatccgtgtcttgactatcgcctgcctccccctacacgtattcccctaacctctttctttttccggcacacaattaacctctcctccctttggacccagctccctgttcctcctcatccaccccttccgaactgcatcttattcccaagctcctctctctctacctacccttattctcactcctcctttctcttcgctcacctatgctctcccatctcttgcatcacctctcccactctccacctttcgtttgcatccagtgtctctactatgctcccctcctttcttctctctccctccccttaccctcttctatccctccacatactctctcctcttccttccattcttccacacttctcatcatcctcccctcttcttaattactgttatcacactctttcctccccacatacctctccccttttatatgcataccactatcttacgttgactcctctctccttcccttcttcactctccaactttatctactcctccttcctcccttttcctctacccccctctcgtctcttctttgttccataccatacctcactcctacacattctcaatactcacattctatattgctacacttcactccctctcccccttcctcc

SEQ ID NO: 15786 - DNA, 2390 bp, Emericella nidulans
aggacaattacctctagagagtcacttccatccgcctcccggtcaatcttgtcttttacctcctcctggacgacctcacggggtgggtatccagcaccccaattattaccagcaccgataccctgttgcccgataaagaagttttctggattgtagatgtttttgtatggaccggattgaatgccgttcaggacctggtcagagtagcttcagctcgttgtccgcaacgcttcgcagatgagtatcataccctcggttccaggtctagcagaattgcccggggaatatatcgtgtatcatcactctaaagtcaagcccgttgatagttaaaccgagaatttcccgtttgacacacacggcggtctacacacctggtagaagaagacatccttgcgatcgccgccttctgtcgcaaactcctccaagtttccatcctgactaattccgtgctcgagacatagctgttgccaaaactgactaccaactgcataatcattccgtcagtacattgtccagcaatggcccgaatgggctgcattcctggttgcggaagaggggtctcgggatggatcgcttcaggtcgcgggtttcgcaccgttattgccgcattggccggcttggattgtgataatctccctagacaggagttagtatcactggagaggaattgccgcctgatgagaagttttggagggtatacctaggcatctttcttgcttgccttaagtgaagtcaaggtgataaatcaacgcgtagcgcgttcctttgtacgccgtagatagaccttacaagtgtggggcctaaggccgcaacgaactttaaaatgacgcaccttcgtttgctgctgctacaccatgctacaatggacgagatgaacataagaacctgtttcaatataatacactatatgctagaaactgagcggtgattcaaccaaattcttcctggttcagaactcaatatgaatatagcaagtatagaatacctctgatgggcttttcaaggctggaagagcccacggtgctgtcccgacgcctggcacgaacagcgcatatcagggtgcttacatgtcagtggtatcctgaaatccaagcaagctggacttgtcccctctgactcctgggaccaatccatttccctgatatactgggaaaatagctcgtctcagaagccagctttgcatgctgtgacgagcatccctgcaccagacacgacgccatcaactatctttacccgactaccttgcttgcggccgtatgctttgatgcaaccttctcgtaccgcttcctccatgccggccataccagcacatcccaggcaaatcgcactgacaggtcgtgaatttgctttgattaatctttcggtagcctcaataatcctccttcgtacttcttcaggaggagtagtatgcaattcaacagccgtgagtcctgtggtttccacgccggcgaaccgactggaagagcccttatgattaccggaattaacaagcatatccgaaacagcattgctgagctcgaccttccaactactcccagtagtaacgataccaaaagtgtccttggcttgcgacttgccgaaccctccgtcccaggtaagttggaaagagctaaccagtgatagagaggttacaatgcttccttcgaagatcccggtcacgaacttcttctttgtgtttgccgtcggcccgagctctagtaaagctgcatcttccagcttttcaatagcttctctgagcattccgacaagtggatgcgctgaatagcatgcgactaggaacccatcgtacttttcgactagcggttccacaaatggccggcagtggagtgcggatacaactgagtcttctcccgaatttatgctgggtatgccgtgaatgactcggccatcggggagtgtgacggtctcagactgcggagctgtgaagtagtcgaagtggatgtctgtatacccaaggttgtcaaggatggggaccagtgcactggtcatatgagtagaggtatttggattgataaccaaaattgagaatcgtggacggctgattgatgccattgtgtttgttgagtattggggtccaactggtttgcggccatgagcagagttgtggcggggttcagatggaggaatgctgctgagagtgggatttgtccatcctcagccagtttgccgcaagaccatctgttggccaagagcaacgtactctaagtaactttcagttcattaacaaacctagcatcatatggatcaattcagcatactacctgcgaacagtggacattctatatacaaccaaaaatcattttcccggagttaaacggctttagtttgatgacgcgagatgtgggggtagatgctagagttattgagccgccgctttggactctcgccca

SEQ ID NO: 15787 - DNA, 1138 bp, Emericella nidulans
agtgcgggacatttcgtagttcaatcatgtcgggctggcaaacttgtccttcaactaatctatcctgcttcgcgcagcacccaggcaccatagacgatctacgagaatcgctgccaaagcactaccgtacgagcaattttcttgaatacctctattataaccaagatcaaacggtgtaccatatcctaccatgttctggccttagaaccattcaccttttcatcttccaatagaggtaacattaatcccgtacgatgtctcaagatctgcctttcattattctatattagggatttatatttgctctattatttttctacctggtattaggtctatgctttaattttattcctcagtctttgctcacatctaattttgtcactcttggttgtattgtttggtcctattgttgttctagtcttttcgataccttttcatttgtatttatatttgtatattattttggtttatatgtatatattatattgtctctctgtatgttttaatgtagaaatgtatgtttagtgattaatgtgtaatatattattttatttatttatttatattttattttgatatattatttatttgtattttatatattatgtttctttatttgaatgaactattttgtttttatatattatatctgtctgcttctattgattattagtatgtatatatctgttgtattatttttatcatgatttgatgtctcttaattaattatattttatattgtttatatgtattatttaatgtgttatctttctcatattcgatttatagaattggtcttatcttatgttgttaataggttagtatttgtttggtttttatttagagatgttgtttattttctaaagatattatgttatatttattttattgtttgtatattgtttgtatttgttgttttagttatttttatatttttatatatgtgatatattaattcttgtgagtaatagtatattatttattctattgtcatatattaaatctgtattatttatatatttagtcgtgtgtattttgttgtcagtttatatattattgttttgtttcgaatcttgatttactttaatattataatgttatatagtatcatacttgtatattaatctatatataatat

SEQ ID NO: 15788 - DNA, 2786 bp, Emericella nidulans
ccccgtgacatgttcagcaacctcatcccagcctttttggatcatatattctgcatacaactgatattatttgtgtgttttcttcgttgcccacgcgacaatgctgagcgcagtcttgattcttggatcttatgctataggtacctcctaaaatgtagggacgacgatctccagccgttatcaccaacactaattccccgataatcgcagcaaacgttcaaggggcactttctttgtttcaccatcttttcagccttccctcccttttcgatattcatcatgctatacactccttactgccaaaggttataatattggctgattaggctgtctgccttcgttttttgcaagtttgttttgttaggcagagacacatccctggaattcagcttttcatcatacgacaatcctttcagcaacattctcattccagtttgctagcaggatcttctccctgtgttcctttactctgaccgtagtcatctcgagcttgacggcaccgatcaacctgtacatctcattcaacgcaaaggccaccatgggagacgccccaaacaagatctcaattactatctgcggggacggtggatgcggtatgttgtgcgacattctcacgttcccagtctcatctgatgactgattgtggagaacgatatatctgaaaacagtcagcgcatggcattgaccgacaataggaaagtcttccatcaccctgcggctggttcgcagcgaatgggtccacgagtaagccaaatccaagcattatttgatcgcgtgctgaccttatcctgttcatagatatgaccctaccataggtaaataacgcaaacccaatcgctccgacaagcaataatactcatcacccggccagaggactcgtattctgtttcgcgtaccatcgatggagaacaatatttcttgtctattaccgatactgctggccaggaggaatatcgaggattgtgggcagcgtccaacctaaaatcggatgcgtttcttctcgtttacgacatcactagcaagtcctccttaagcgccctagattatttcatggatatgatcgagatggaagccgatcaacgtgcggaggacaacttgcggttgatgagagaactaggcgatagtgcacgaggggtagaatttggtatggctgccccagtgaagattgtcgcggggaataaatgcgatctgaaggacagccgggtcatcagcgcgaaagacggcctggaatatgcccggaaacacaacagcggatttatggaaacaagtgctcgggaaatggttaatatcgaagaaacatttgctcgtgcggatccttcccgattctcgaaatgcgcgatctgacattctttagttttggttcgacgagtcgtagaagctcgtcgagaacaccatcaatataatcaggagctgacaaagcccacccgtcatgtgggattctcactaaggaaaacacctactggcggtgtgtcgaagaaggagtccgaagcaaccctttccaaaaagacaaaccaacgccagagcatattccaaggcctgctgaaaggccgacgcgcaaacactggccaggagcaggttaagaaatatccagaaaggacaccagagacggacacgtcagaaggcgagactcccagccgatggaaacgactctgctgttaaacatcgtctccagcatgtcattgcatagcccctataccctttcgtttgtcgcgcttggtggacatgcatgtataatagtaccaactttctgcaattgtctaattaccttcttgtatagtcaatttcaaaagaaccaggacacacttgagcgaagcatgaagtcatattatataggtccagctgttgcagcctatctcatacgagctccaggcctactctgcgatgattcgatatcgagagcgagtccgcaagcagatgccgaccgaattcattcgttacaacttcaaagtccatagtagtattgcaaggtatgaaggacgggtacgcgcatctttatgacgtgaacttgcagagtgggccgaagtctctagaacatgatatccaccgctgcacccacgctgctgagctatcatgatctagaaccttgatttcagtattcagaaagagagctttcagttgttcgggctataaacgtatcacgatcagtatcaaagccgcttagtgtcactgactcggtacggtgatacatgaattctgatttatataaacccaacactttgtcactgccgcgagatcattttgaaccgcactagtttaaaccattttagccacgcagagtgtaaagcctaagtgctccgtctccctcaattgatgtgacgataagatactgtagctgaaagagcaagaattggccacggtcggtgatcgagtggcgcaagaatgaagtcaaagcacttttcttgatagtctacgctactattagctagtagcgctgtcacaggtacagtgcacgtcatgaacttttatgccgtgaagtaacctgtgtctatctttgtactctgagtaggtcggtctgcggagagtattcttgagtctcaaggcaagataaccgaaggccgaaatggcaactttcaactgccaagccacagggtcaacttgtcgataatgccaagctttcaggcatcatcaggagactcattgaattatccaggattgtataatacagaaccggttgtggtgggttttatgccgccgttgaacgaataatcgtcattcaacattgagtattcgctgctcagtgttgttgctgtcccatggggcccctgcagaacggttacatagtgatg

SEQ ID NO: 15789 - DNA, 456 bp, Emericella nidulans
tcgcgcaaattgtcgcttgtgtacggcaccctttctactgacgctcaaaaaacgaatgggggataagggttgaaacatgcagctaatgcgagtttttgtagttggacgatccgagcgatctcactcgtttatgccgcacatgtgacctactcaattatatggctcccctctaagcgttaccaatgccttagttacgcgcttctactataagagtactttgccattcgcttactcatccgtgagatgggtgctcggttctcagttctcttttactgctggaacgtgtattgcctttttctacatgtacttgagggttcttggatgatattttcctttctatagctcttgttgttattgtgtttatccccttacttttcgtgtgaattatcctccacttttctttatgtgttatagtccctcgcatgtgttttttaatcttatacacttttttctacc

SEQ ID NO: 15790 - DNA, 413 bp, Emericella nidulans
gataaatacgcccctacttttatgaccttctgagcgcgacaccgcattttcctccgaacaataatccttctttccctttcccttgctccagttaacgccacgccgcctctatgacctttcttactgaaccgagcttccgcccggtttatctcgatatccctgtctcctgatcatcattatcctcgtcgtcaaacattccgatattccttcgtggatgccgataagccacgaaccacccaccaaaaataacttgctctaatcgggattgaacggatccgctactcgttcccgttctgtctttcactgcagagccttttacttgtacgattggccactgatagacttggttgtttgtgagctcataaacttgaattgattctttttagtattcattttaatatttaagattttgt

SEQ ID NO: 15791 - DNA, 2713 bp, Emericella nidulans
gtggtggctttcgcggatggggttttgggcttcatagcctgcttggcggaggaggtacagtcctgtatatgtgcgcttagtgatctgtctattcggaatggggttgatggcgcataccaacatctactctattccactgcactcctgagccgacctcgcaacttcctggggcgcctaacgccaggacgtctctgttgatatttccaaggtcctcatcgctaaataaatcctcgatattccgcgctgtgcttgcgcttcccgatgatgaaggtcgtggagtgttatcgcctgttcctgagtttgtgctaaaagagatagtgcttgctcgagaagctgaaggcgaattcgtagtcgcggttttgacgatcgcgtaccgcgaagctgtcagacattgcttgatgacggttgggatgaacggcgggaagagtgagaaagtcggcgggcacccggaggtatcacccatagagacttcggccatggcttcgagcctgagcgcaaaaacctctattgaatgagcgtgtgaggttgaaagagacagatgcccgtctccgaggtaagtctcagcagtgaagagggtatgatactgataagaatgtcattcttcggaagaggggtaagatccaccccactatggcgcctaagattaatagagtctgatcataagaaagctttcttataaaagataggaagacgttgaagagtctagtttgagtggcgataaacgttggggggtgcgaatcggacttcgctgcatttcacatgcgtcgggtctcgactgcatgcacattctaaaggtttggagtggatggcctcggaatactgtcgggataaaaattcccatcaacattgaggaagatcaagctaaacgttgatcaccgtcgagcctcaaccaaagaaagaaatgtcaactgcgccctttggcatcagtgtggccaatcggaaactcttggagattgtacttcacgcccttcgctcgtcactccacctcattataaatcagagccaaggtatcagcgttaggtgcacctacaaacttattttcttatcaacagaaccatccattcagactctcattaaaagaaaacgaaaataaacactatcgaaagtacccgagattcatcatatatctaaaggttgaaaatttttactcgtgaccagcacagctcgacagtgcacgagacatcctactcacattccggttctacccgtgccctcgaagtgaagatctggaggaacagcatcaggcaatcgaatatcgggttgcttcgaggccgggatcggtatcggagaggttgcgctactggtcacagccgctgtgcccacaggatcaatagaatcaaaaccgcctccatcgtcaactccgaagctcagcccttgtaagctttccaacggcacctcctcctcataacgatgattcagctgttgaaggaactccggatcgaagcccatctgcacaaatgggtcagcagacgtgctcagcggtgttgaaaaagacgaaactccggccgacgcattactgccccaatccagcgataatccggagggtccaggtgctgtaaacatcccagcactgcccgaaaagcttccagcggaacttccgggtatacttggtgcagcagaggatcggcctgtcccgggaattgctgggctctggaagccggaggtgggataacccgagccatacggctgacgagcgcaagctggtggccgccggagcccctcttgagacgcatacggtggctgcatgccgagattggagaattgaatatgttctgacccctgcgccggttcaagtcctgcatctcgcttgagaacactcaaccagacagggttatcggcacaggtctggttccaggggtcatcggttccatagattactcgccgtccatgatcttggagcatttgatctgtcggcacgatacctttcgttacactttcttggatataagcgttaagctccatcctgagacgctcataacaattggcgtccatggggacggcgagaccaggcgcagttttgtgcgcagagggtttgtatgggtcaagcgtgttgcgttcgtgaccgataagatacggaggcatggcattttcgacaaggtcttgcacgactggttcgaaaccccagtcacccttccactggaccatgtccgcaccgttcttaaagtgggtagcaaggtgatcggctcgacctttccacgtcgtcagggtgattccacagaaaccgcatcgagatataatctccgtcgtatggcttcgccattgatccatagacgggtgaaaccgcacgttatgcatcaaccggaggtgttggttgagatggtccttccggtagaaggttcgctctgccgagctcttctcagcacaggtgctatagttatgcgactcaagatgatcgttatctggatcaacagccatgcagaatacacaacgattggcaccattgatgaacgctacacctccatgtggtgcgcatgtccatttctcgagggccaagtgcagagacttttcatggcgctgccagtcatacttggtctggaaagagtcggcacagaaagtgcattggtagatgcgtgcgcctttagctttctgctgattgaaagtgtttgtaggtaaagagggcttgcgccggcgacgtcgttctttgcgctccattgagccaaacgacccaagggaggagcggtgggagaaggcagaggcaaaagagaggtcggat

SEQ ID NO: 15792 - DNA, 499 bp, Emericella nidulans
gactaccccctatatgctgtacttacttgcccgcctacagtttgtatggcctcgctacacaacagaaggtttgtcatatctgatggcggaatctcatatgcctggccgaccggagcggactacctcacgggacaggggtctagggtatgatcgcaccacgctgtgcatgggggtcctgctaccagtactgcacagcagctctcgtatggcgatctgaagaaggacgggtgcgtgaatcctgtatgtctgcacatagctgctcagatggggtcggtttcctatatctattgaccctgatggttacgtccactcgaatctgtgccgccaggattcgatgttgccggcctatatggctagcagggcgaactctgacggctacgtatactatcattgaaaatggcgcgcttgaaagtgtcgcatcctaagcctgttcaggtacgggactgactccatcattactatgcagaactcggccgagatccgtctgaaccatgacatt

SEQ ID NO: 15793 - DNA, 1747 bp, Emericella nidulans
ctggaataacgccgacatggattcttttgatgcatccacacacgaagcccacgattccttcgactcctgcaaagaggcatgccacaaacacgaccactgcttccaattcacataccaccgcaagaagtgtcgcatggcacgggttatcaggctaggtaactctgtgtcgatggatggagatggagacgccaaagccggacgttcactggcgggttgggatgttaagaagattaaggagtttaaaaaggctcataactgtgaaaaggtcgattggccggaaccaagtacggagcggatattctagaccatttgcctacaatttatgaaacgtaatcatgattgatacgaattaacaagcatgaagagagcatctgatgccttggtttatatccctatccgacttctagatttgtatgtcttttgcggagaatatgctcaggtcggactcggtacttgatgctcatgtccaagccttttccccccctcacaagtaagcttcggtaacttaaatattgattggcatggaccatcttttcttcaatgaaaagcataaaatatgttaaccctttcgtctccattacataaggacatgcagcataatggttgcggacatgagtccacgtgatctcactgccaagccgtgcggcgaacgtgttaggtgagctctccgacctgaacaacgtcaaccatcaagctcacacctcacaactccacacgtttactgtgctttttacgatttacaacacctatcatcttcaatatacctcttttactacggttattgctccacaaatccaagtgccatggccagcgaactgaggtcccttgtgggagacctcaccaatgccgtaaatcgcaagcaattcgacaccgcgaacaccctcctcgctcgcgcaaagcggaccctcctcctccagaacgctcttattcccgcgtcttccacgaatcctgaactcctagtcctcgcccgtgagaccctcgagctcggcgccctctccgccatccgccagaccgacgccccggccttcactcgatactaccagcagctgcaaccgttttacgatctggagcgggaagggagcagcactcttgacacgagaacaagccagcgcagcaagattacaggactttacctcttgctgctacttagctctggagacgggtcaagcttccatacggttttggagggtttagttgaagaggcgagcttgaagggcgggaatgtcgaagatgatccgtttatcaaatatccagttaatttggagaggaatttaatggaggggagctatgataaggtctggcgcgagacgaattcagaaagggtgccatcggaggatttcgcgctgttttcgaacgtatgtcttgctacgattccgccgaataggtcggaatatcacacggaagagaattctttgctaatatatctttaggtgcttgttggaaccattcgcagcgagatcgcggattgctccgagaaggcgtacccatctctcccgatctccaacgccaaaaaccttctcttccttgagtctgaaggcgccgttatggagtttgctcagcagcgtggatggacacttcgtgatggacggatatactttcctgttgagccggaggcggccacccgctcagagaaggatatccttgtggccagcagcacgattatcgagaatgcgattgggtatgcgcgggagctggaaacgattgtctagatgcggctttgtgtgctagtactgggggtatgtgctgt

SEQ ID NO: 15794 - DNA, 943 bp, Emericella nidulans
aagctgcgatatggcagagcaaagatccggaggcaggcagctgccgcgaccgtgttcccaggcagcccgaagaatgccgtctcgcctgtctcgcgagggggcgggagcatcgcgaacaggattggatggccaggcttgacggcgaccttatggaagactgtccggccccctatacgcttgactagaccagggatgatgtcgcagcgaccagcagagacggcgccagaagtgacaatcatgtcgtacccataatctagcgcccgcacaatcgactccttcatggctgctgaatcgtcttgatggaccccgcgaaagaccacgtcaaaaccccattgccgaaggatctaagtgagggttgggccaatggcgtcgtagaacatgaaccggtgcgcctttgctggctatcagacaatcatctctgatcctgtcctttatacagttaatccgtgcctcttccagattggatatttcttttagtaccacccatggcatttcattaatattccgatatttgtatcctatatctggctttgatattccatttccctttgtatactatcttcccctttaacaatttcttctctccaccgtctgctcagtttcatatgataatctttattcttggtaaggttatttcccgtttttttattttacttttattctacctcgttttttcattttatctttttattttttactaatttttatatgtctttctcactattcatctctttgtaatttttttttctcttttctttactaagttattttatgttctgcttcaagttataaaatccccttctttacctattttttccttccttttacaggtattctacaaattttcttcttatttctctgattgctctctgctttcgctactatgccattacttaccattatgtattttttagtaactatctttactttatcaaatttttat

SEQ ID NO: 15795 - DNA, 956 bp, Emericella nidulans
  unsure (1)..(956): unsure at all n locations
gggtctcggcgcccccttaattcatactttgaaggcgataatcgataatcaatacgacacgatactcttagactcaatcactccctctccttgcttgctattcatagcttgatctcgttcaccatgccttctcgcgcggtcaataagccggtcgacccaaagcagagggacaaggacatcaacaacaagctgcagctgttcggtntctaccacgctttcaagaatggaaaacttccaaccgtacgtcacagttcatatcatcactcattgtcgcctattaactggatttcacacacagaacaagcaatgcgatgtcgctatcaactctgccctggctcacaaggcgctcacaaacccatcgaaggaattgtcggaggagggtcgggctctcgttcaggacctccgaatcatcattgaagaggccaagaaacttatccttagcaagaacgacgggcagttgttttaggagtttaatctacgatggccagcacatatctacagagggacgggagaagcccaatgttgccgggaatgatactgaagtgcatggaggcagctagagtggagtaggactaaagactttgggacccttatggatcacaattgtggaaaggacagttgggctggatataaaggttattgaaagggatttagtacaaagttttttaaagtgtaagggggaatattattggttgatatatgggggagtggataagaggggataaatatagtaggttgtgatttggactattaagatttagtagtgtgataaatttatatgataatatatttgatagatataacttagtgtgttaagaaattgagcggggtaggatagatatgcttggcattggaatttaatgagtagaggaatatgtattgagaatgtataagatgaatagggaaatgtgtgataagtggatgtaagtaaagataggatatagtggaaagatatt

SEQ ID NO: 15796 - DNA, 4366 bp, Emericella nidulans
gtgtgtatgatgatgcggaagagtgtaaagattgatgtgtaaagaaggggtgatgcatgttcggtatggtagtagttgtatggggttggtttgttctgtggagatgactttgtgttggtgggggcgtggctccaaggggagggttccagtgcgtgtaggtttgctgaccattgcctggagagccggttctccgagtgcgtcgaagcttgtggggtgttggtttcatattcgggtggtttgggtctagtcggaggtttgtcgagcctggacttgtttttgggagcgtgggggtgagcttctgcccctcgtgtattctttgtgggttgcgaactttagtaggttatgactgtcttgaccgatcgtgtttccgcttgttatcgtgaagggttgggctcgatgcggctaggagcaggtttcccgttcgtgagaggtggccgtggcacccgcaatggttgggtcagccagccgagcgggccttctgttcttgtgacagcgatgggctttgggagtcaggtggtggcacgggcaggggtgccttttcagcttctgggggtcgtgcaggagtggccgcttctggaggcgctgccaagccctccggcttgacctgagtccctcgctttcccgctgtccttctcttacctagccacaccctctgagggagtcgccatctcttcgttgcatgtcttcttattatcattgcttccttactcttttctcggccttatatttatgagcatattttcgcatacgtaccccgccggaggaggcttcagttcctcaatggccccaggcgttcccgaatagcttctcacgatctcaccactattccctggcagatagttgccgatcgcatttgcaaagcagcgcgcattttcgtattttacacctgtcagatacgtatcctcatctgctgtatatatcgtgctcgagactcggaattgcttcaagcaggcttacaacccttgttacccgcttcggaatcggctgcctttctccacgcctgcttgttgcgatgagatccaacctgcgatacaatcacctgtttgctgatcccgcaactactacaaaagtactattcactataaagcttgaatggggggaggggggaaagcgacttgaataaacgttctgcatcctctgtctgcctcagctcgctgcgttgatcgttctcctttatagtttgtgaaaacgacgatacgcaaataaatttagctcattgcagttctgaacaatcggactcgttgatatatcaaaaagcagtcgccatacaaattgtttcagagtctcggtggagttccttgctttatacttcgccgcggtgttcgtctgtcaccaggaagacggcaatgtcgtctcgctctatcgacgcctctgtaagaccttcaacattcaaacctggaaaatcgacgcacattgaacaagacctggttgattggcggctgaagcgtcttcgtgaagacgttctccctatctacccctttctcctcactgtgcccaccgatgtgccctttcgactcggtagccgctttgtcaacaattgggcagtgagtgatgcgggaccattcaatcccgaggagcagcaattacagtatatgacattcttaacccacgacgaaagcgattctctattggtggctgtgggtgattggtctgacgcctcagggagcgtgatggctgatcaacgttcacggcctcagagtgccattagtacaccatccagcaactcaggcaaaaagaagattagcctacatgattataggcataagaggaagaacggtacttcgccttcacccttgagtcaagaagctcctggccaacagagcgcctttacccttcatatcgccaatcataatcagactcccaaacatattcccgctagtgacaacaaccgtcaaagaccatctaagacgcatccaccgtcaaacctcgccgcccaagtgcacaacgaacatgtagacaggaagcgcctgtccgatcgggaccatgatcgccgcggcctacaagccaaagacagcgcgccggcaaaaagacggaagctatcacatgagcctccgacgcctccttctaaagcagaaatctcaaatgggaacgggctgcccgagcttctgtcaccaaccctacctccaacttcgagcactccgcgattacctcgacttctttctcctactttgccaccagatcttgaaagggaactggctaggctcggcgatgagcctctagcgtcggactctcaaccggagcccactgtgactagcgacactgttaggttgaaagcatggaagggaaagtcgtacgcgcgcggcatctcacatttggaatcaacaagtgcgactactaacccgaatctctcgggcaagtcaccacgcttagtgtctgaaaagaccgcaacaaaagatacagacaaaacaagcctcagttctcacacagttgcaagtgccgattcaaaaggccaagtgagttgtagactatcacagcaattgagtaccaaacccgtccaactcttctcgtcgggacctcgactagttgtgaagttgaaatatggaaggtcaaatagaaagcgcgttgaagccctcctcaaattcactggtaagaggaagctttcccgtcaaagctcgcccttgcccgatgcagccgagcgtggactggctcattctatgagatctgatcagccaaggattttggtatctagtcaggccagcaagtctgttcaatcaactgccaagtcgaaaactgcggcgggcaaccaggcaaattcgtccctaaaagaccacccgaaagagccccggttaggcgctgagaaaccgcaaaccccgggggtgaatcaaacacaacaggagaaagcagggccagtgacgatatcgccggggaaagagcctaagtattcaacccgacaggaactgcttagcattgatgggaaagggcattctcatccagcttatcgaaaaccgcccgcggattactctctttcaagcacgactacgctttcaccatctcaaccaaatagcgctgatagaaatggtgagcgccgggcttggaaggaagagtatcagaaatatggaaatctgggccgggaattgaaacatgccgctgatcgacacacagccaaagacaaagtcacaagtaacgatgaaaagcttgctgcagctactgcaattgaggccatcatctgtttcgtacttgctttcattgcggaggaccagtccaaggcaatttcgcgtcaaatcggcgattcctcgacttggttatctatcatcgcttattggcgggttgtcaaaaaaaatagcattccatatccaccacttcacagcctctgtctcattctcggtgctgtctcttacgatgccatccatgctctcgacttagaacgcctggctgtcacacctgtgccaggcgagcacactccggttcccacgccggcaagtgacggacaacccgttaactcggaggagagtaaacgaagcttgaaagattttctagagctgaaaaatagactcccagagtgttatagagagtctcaaaagttgtggtctgatggctttcgcggcctctcagaagacatcctcgcccgcgaattcccagaaacttggtcgaagcgcgctaggacttactccgaacagggaaaaaagcggttgaaacccggggaatattccggtgagatatatttgccgcttgggaaagccagcacacctcttgaaatagtccgattcacgtgcgctcttctgagagaatggtgctcgaaggaaaaaatcaactggcggagcaagctcgatttatagccgcttgcttccacctcatgatgaaatgctttgcatgatatcattagttcgatgggaacgccgccctctcttttctctacaaactattgacacgaggttggcgttttctgctgccgtgctttacgctggcgtccggagtaaattgagactcatatgaatggttacaggcgacaagatatgatttattcatatctccgttcattttcttttgctccgagttgttgccattttcctttgataccacgggttcacagatttgcttcatatttcatctcttgtccatagcgattgagcgtatcctaatattatcttattttcaacagttcagtacaatcctattcgtaaacaccggtgattgacgagaacgctggaaggagagaggcttggtggtactcaacatgagggctaaacacatagctgcttgtaaacacggtaaagatggccatgtacttcgtatcattcaacaagtacagcatcagaaaccagagaacattaggactacacggaataacgaacaacaaagattcggttcctgaccgaataaccaaccagcctcacgacagtatgttgcttctctgcagtaggctccc

SEQ ID NO: 15797 - DNA, 927 bp, Emericella nidulans
  unsure (1)..(927): unsure at all n locations
ttgccatctcctatgacagcctgtctgaccacaatacagaagcctacgggtgcagcatatacaaaaatcattaatctctccagcagacatagactgctaattcaccccgtcctcaagccaactttgtaccataatgccatatgcttctgccagtagttttgcgctatgtcatcctttgcattttttcccatcagaactctcatggcccatggcctgtcatagccgcgacgctcggtattgacaaaaacaggatccttagatatcatacacagtattcttgtcaccggacaatacaaccggcatcaccgcatacgtgcccaaagaaggatacgagaactggagcgcgctttatttgaagagtcctacaattcttagggccatgcagcagcaggtttaccatcagctgcataaatgttgtgtcttcattatgcgcaataggaactcgatctctgtgaggatccctcgattgccagatggcgttagataaacgatttgcacaccttaaaggtagcgtctgctgggcatgttgtcggacgggatagggtacgattggatttattttcttgtggataacgtttgaaacaacgagattaactcgtgaatgagggaagctgctgtgaatgcttaaatgcagtttatcaagaatattattgtttgagcccacctgtagtgaactgtatattaagcgccggtagttctaattgtatgttgaagcctgatagcgaactgtagatgtcaattctatccccactatttgtttaggttgaaacacttancttatgtagagcaacgacaccagtatgcttgtttctcgataaaatagtgtcataacctaagccctctttttcatccaaaaaaaacagcctacggcaactcttgtcccctaataaacccttccatatttatcaaaaaatataaggtcttttt

SEQ ID NO: 15798 - DNA, 851 bp, Emericella nidulans
  unsure (1)..(851): unsure at all n locations
tcaaaggtacaatttgccgtgatttcattttatgaaacgtcagagaacgggagacacttgagtggagagaagcggcctccacacatacagaggtggagtttccaatgtagctgaagccatgttgccctccggatagttggttgacggtatactggatgcatacttcaaaggtacgaaggcactccacaaagcgaggaacacgtttgtttacatgtgttccaaacgctggaagatcgttggggctgcgcgatacgcacattgtgttaagaactgtggacatacccatgaccagcaaaccagagacttgtgccgaggcaaactgactatgtatgaaaggcttgagacttatgcgatgagcccgcacattatttctagaacggttacctagacagtcgtactgtatgggcaccatgactgccacaaccgggaatcagatacagggctacaattgagctaacttggttacatggggtccaaattaaagacaacctattgcgcagacaactatgcaaatgacgttantttgtattagattctgcaactagaactgctcggtccaccctgcagaaggccccccttatgacttttaaccgggtttccaggccttgcccctcccgttacataaaaaagaagtcctctataattccccttttaagggggcccaattttgaaccctccccaaaaaacctggtattcccctcgcaaaggggacccactaacccctaggctagggccgcacacccccgagattttttcccccgggaaaaggaaagggattttattttcgcccccttcccgggggccccttcgtacattttttgggggcacccctttttggatctttttaaaaa

SEQ ID NO: 15799 - DNA, 741 bp, Emericella nidulans
  unsure (1)..(741): unsure at all n locations
cctccaatgatccgtcccaagtctacttagcatcgaatgtgcaacctccccgcggtgtattgttgcatggtccgccaggatgcgggaaaaccatgattgctaacgccttcgctgcagagctcggggtgcctttcatatccatatccgccccgtcaatcgtttcaggaatgtcaggtgaatctgaaaaggcccttcgagagcactttgaagaggccaaacgattagctccgtgcttgatcttcattgatgagatcgatgccattacgccaaaacgagaaaactcacaaagagaaatggagaaaagaattgtcgcccagcttctcacatgtatggacgacttggccctagaaaagacggacggaaagccagtaatcgtcctcgcagctacgaatcggcccgatagcctagacgcggcactgcgtcgaggaggcaggttcgataaggaaatcaacatgactgtgccttcgagccggttcgcgagcagatacttcgtgcactaacccgccagatgcgcctcgntggacgacttagacttcaagaccctagcatagagaacgnctgggttcgttggcgccgatctgaacgacctggtttctactgcggggctcacggcatttaaaagataccttgatctactngaatctaacagcggcgaatagatggacattgagggccaagacgaccttatgcccagcgtcaggaagcttcngcggcttatcactcacgctaaggagactccca

SEQ ID NO: 15800 - DNA, 891 bp, Emericella nidulans
ctattataacttcggttagggctagtgagaaaaatgagtactacaaggtacagaatagactaagtagcactcggagtattgttaaggaaccttccagaaagaagtacacagtactacctaccgataaggcaggagcggtccaatgtgggcgggacattcctcttcgagtagcttgggggtgggcactgcacgtggccaagtcgcttaagctgggaactctttcatgtttggagacggttcttaaagcacctcgcgccgtctccctgactatcgaggtcgaattgccaacagctactctatccaggatcgcccaagttcagggtcaactagcgacggccatgttgacagccagaaacaaccaggtcgagctcgtttaccccagctgatcacgataatttgcaccacaggcaacaacgggaccttctcatgcttatggaaagaaaaacgcagatccaattattttacagcctttcttatcaccgtttacctacaatgagcgaccaagggtggggcttctctttctttatatgccctcccaggtgggtcttataaggaccttttatttggggggctcggacccgcccttttcgacatcaaacccggggtttcttgactttataacccgctaggatagatttccgggggtgacatccactggatatggggcccccccctttggataccggttaaagcccaatttgggccttacagcctccgattgtttatgggagcctttatttatgggaccctggccgaggtctggcgttcgccacactaatttttttgtttctggacctggattgccgtttaaatgggatctcggtttatttccttagccacccttacaccttgagtttttttttttccgcggctggttcctcttcctttcta

SEQ ID NO: 15801 - DNA, 477 bp, Emericella nidulans
agacgcctgcagtatcttgcgccctgccgctttattgcctgtcggtaaaaagagttactgttcccagcttctatgcttatctccgaatttaagcggaccccatgcatagttggccaaggtctgtttttctgcgggggcgtttgtatacgtcgaaaaagcccttctcactgctgcgactggtcacatgccttctggtctggcgtcggagtctcccgatccccaggctttgaatcaagtctaccaagtctatcccggcgtctgccgcacgagacgcctgcctggaacagctctttgatttcgggcagccgatcctaccttcagcagaataagtcctgattgagcaagctcgcaaaacgcaaacagatcgtaccccgccgcaaactcggcctggtcgtccagtggcagtttgtcctcgaatgaagtccccaaatgaaaggaataccacggtctatgccttaacgcaagctgtaggttcaa

SEQ ID NO: 15802 - DNA, 4082 bp, Emericella nidulans
aaacgtgttttcctgcaacatattctgttgttatactgcaatgagtatgggatggccaagctagggtgcgcattcagttgatgtcaggtttggagcgttagacatttgacatatgaatcagtatgaataacattcacctgcaatctttatggcagatctatcttgtggcgtcgtattgttgagcccaaacgcctaccctagtagaattgaagcccaaatagattatactccacaaggcgttatttgagttgcttatatgaatccggtgcagttcagtcttgacccgtaaaaggtacatacccgtaattgtgtctgcatgaacagaaatatgtatggcgtcacttatctcctcagaaacagtgaagattgttagttcatccattttggtcggctttattgatgacagagtagaatagcgaatttcatacgccgttcgcctgggttcaatccgactctacaaagatatgaaaccaaacttagaccaagccggctaattacctacttactaccatcgcaccgtaaaatgtcgcttactgacgaacagagcatccacagcagcaccatgaaccaggctgcttttcagattgggtatgattccagacagtatccaaatcagctccgtcttgcgccacccggtcgtaataatatattctggtaaaatgataccgggaacaaaggctttgggagccccttccccgtatatcaactagagattgcgctgtccttgattcagggaagcacgcagtgccgttcgcaatggtccgctcgtttcaaagacatagttctgccaggcgcggctatagaagacaccggcggccgtacgcaagagaaaagcattgagttgcgcgaagctggttgtcgttcatctaacgcatttccatcaacatcaaccggtcacggggcggaggggtggagacgagcgggagtgcggactgcggactgcggagcggaggcggaataccctggtcatggccatggttggaggcggactaagaacaaaggcgcggtgcgtagtgtagttcgtgctatgttcaaagagttatgtctacgttatttctcgactaagattatgtattagagaggtgaatgagatgggcacacggcagcacacattgggcttgaatatggtgaggatgcgctttatggcgggctactgcgggcggagagagaacgggtagtgcatttatgtggtgcctatgcggccaggaggatgcatggtgagctggacaactggtgtttgggcagaaccgcgtgatgattatgtgctatccacgatagcaccgaggtgagaactaaggattgacgaccagttgttggcttagacgtatgtggagataatggaagcgggtgatcgcggagcggggtgaggggatggtcgtgaggcgttatcgtgcggggctggactcgtaacgagggttgaggggaacgatagtgtgtaagagaggagtggcccaaaatttctcaagcaatatggaccctcacgtcagctgaattgctaacagtacagtcccagagagattttgagatatctaagtgccaaggcagatcaagaaaggcttggttactcaatactttggtagctccgttggaccgcggctgaagactttccaaatcactgatctgcattcatgctaatgataatttgtcctcgttcagaacattcccctctgacgtggaagcaccacagagtctccagcggattgcgaattctatggactgtacagagtactgcgtaaggtaaggtaaaatctgattacggacaaggtaaggaggaccttggaagccaagcgagccaagggcgatcctagctgtacagagtatgtggtacccgtaatctatgggtgtacggactatactgacagaaatagcaaagaagcaacaatggccgggggtcatatgaccctccctgtagaggaacaagccaagatcctcgtacgacccgcctagtggttgtcatcgccgatggctggccacaaacccggatacggcgtgctgcgtacgccatcaggaagagctaaaaagggggctcggtaatgataggtatgtgacgtttcccgcctgggtagaaacagcatcggcgcatattgctttttaatggtgagcaccggcgtggataggagcctgtgattggcgcgtaccgtggctatcggtgtgtcaatccagacataccggcgcaaaataggttggatgcaggcagataagctaaaaagatacgatgagattacgggtccttctagggagtctcgccccgcctagtcttcccacaatctcgcatcctcgtctccggggaaggttgaccgggtaagatgtttctggaacacggaaagcctagggttgactctaaaatcttacttttcagtttcagcaatcgagtgtaaccagatctaagattgcctctaacgttacgtctacattgtacgccggcttattttgcagagggaactcttattgttcattccgcgagatagtaatcaggggcgaagtctagactatcattgcttggctgtggaacaagagctgcaattatcagattatccattgcacagagcttggcaagtatcaatttgtctcttggcagttatccttcagtgcccctcgcttccccccctttgacccttgattgctccgggccaacgagctgtagtggtatcatagtcgtcatggtcaaagaatacagtaatcgtccagcaagcatagaaaacacgacgtgaagatcagaaaatttccaccaaagacttcagagatgacgatatcgtgtccagcgcgatccgagactccaaggcggagagcatcgctaggcttcttattcagaggccgggactgagggccgtggggtggtcgtagcctaggaagaggaatcccgctgggaggcgggcagcagcaccccgactcagtcgggtgctgctggtggtggacgacgagctgtcagaacgctcacggactgaagagatgtttgtctcggtctgctcgttggtagcagcaagcggagcagactggataggagccagaacgaggaacttggaagtgggagtgtaggtgtacatgatgttcggttattcgcggttaagcaggaaacaagaggtaggtctggctcgagaagaggactttgagaagttcaagacggacgaagatgggttttctcggaaggagttcgaggatgctggtgaagggggattctagccggtcggactcgccctctttatagacgtgaggaaaacagccaagagtggtcaagttcaagaggggtcaccgaaagacgtcgatcgaaagcacggaatccattgtcctcggtcaagcattgctctgctcatcccatgccctagggtggatcaatggtcaaacacgctgtattccgtatttcacatgtttagaccggtaaaattaggaactagatagcccgcaaacgtcattctccgcatccccctgttccaatctcaggcttggccttgggagatctgctttccaccgcgtagggaaaaccccaccatattgaccgggatggccatggtgctgacgctgtatcagttcgtgcaggcctgattgttgccctgtgttactattggatctcggcgccggtgagttatgcttgttctgcgacctcacattcagcccaagcacctgggccgacgcgctcccgaaaccctgcctcggatgatcagcagccgggaagcgcagccaagaaacgtgccctgactattgatctagattgagcgtacgagcgtggagttgttgtcttccagatagagcttggtgtaacccctgaatgagcgggctcctttcttcgcattcttctgtccgccgccgcccaggccacatgaccccggtatattgcttagtcgtcgcttgattgcaggctctcgcaggtcgacaatcgccaatctcatttttcggctcatgcgtgcaatacaggagattggccaggtattttgatagataatgcgagtaggacttaccccgtagaccagcagccatttaagagaaccagttcgacggcgtctaacgctgtctccccaccatcgctcgacaagcagaaggggtcagaccgtgaccgaggcagacgaatccaaaaggacgatatgttg

SEQ ID NO: 15803 - DNA, 2715 bp, Emericella nidulans
ttaataaactctaagtctactaatcttgtcctaaaagtgctgctcagtttcctctcggccagcaggccaggtgctgggtgtaaacccggcccaaacccaggtctattcatacctgcaaggatatgaatgtttcttttatccattttacgagtttcggtaaggtgctagaactatttcaatgtagagttatttggtttttggtggatatgggaggtggtttggcgtgtcggattctgggtcgtgcgggttgcagagatgcacgtacttgcaatagaacgaatatggcggcgcttttttgcttcaattaaaggtaaagtacgtctgactaaggagggataaataatcagataaatagattaattgctggcgagcaaaggcctacatttaagaatataaatgggacgattggtcaattagggctttgcacggcggaacccggattggtcgaattggaccaattttaagaaaggtgactacctgtcttcaatttcgaaaacagatgtttggattataagcagtctctattgttagatggtggatattagaatcggctttccccgtgtagattccgttgagatgctgtatatggaccgaaccatatcattaatccttccatcaattaccggcttgataaacccaaaacccgccaaactcccagtacgccttttcaaacctctccggatgtcttgccaccaattccttacacttgcccggacagtcccactgcctcgagtaaacattcggggcgccaccccactgaccacagagatcgatgttcgcgattatactctggttcttgaagtgtgaggagacatcgcagctcgtgtttgggaagtcggcgagggcagtgccccatttggaagggtcgggtttgctgctgctgttgctgatgtctatgtctaatggaaccgagtgccgtggaaagaaccaggctctgatgcccgcagggcggagctcaagggcgtagatctatctcgtcgttaacatgtcttgaaatgaaggccaacgccgtcaaaggggacgtacaccaccacctctctcattcatcgcctctccataagtcaagctcggcccctgcaccccacagcccgcgttgctatttgtattgttatcgcaggtcgcatacgtcgtgctccccgtctgcttgcgtctgacgtccatgttacacccgggcgtggtatgcagagtaaccgcattgccgtctgtcgcattgtttgtggcttcaagcacgtcaatctccccatgatccggccagttgtagccgtcagtcagccaaagagctggccaggtgccgcatccatagggggtatggatgatatcgaagatgaaaagaccgtcatcgtaggtcttgaatgactcgatccggacggagttccgtccatgcgaggcgtttctcgtggccgtgtcaaccctcagtattgctgaggttggagatgcatatgtgaggttcagctgttgggctgtggttttgttgacgtagctgcgagccctggtcagcaatcgttcacagtgtttgatctaggcgaatgcgtacttgacgaacccatccgttgggtcctcgtcatcgaaataccgaaattggtcaaagaacgacaggccggaatagctatccaccaaccgataatccagcggcgagtattccgggtaccggccggccttggagccctccacagcgccgacgatgatgccgactattccagccaaggcgatgatggcggcgataatttttgtgcgcagggaccagcctcgtggattataccatgagcgtccggtttgggcctgcgcctcgacaggctgttcatctagcgttaggggcttggttcgatgccgatcatctgggtctgttttgagggtcggcgtgtcggccatggcgactggcctggactggacgtgagtctagtaaatgtggggaaaagatcttgattgcggtgttctgcagtgtgaatggcgtttccttaaatcctcgcgagcgttgtttggatttgtttgaagtaagggatggccatgaaatgggtgatgttgtcatcggaatggggaagtcgatcccgtcccaatcgggatatgaggcaatcatgcatcaactggttgagaatataggtcttttactttggagaaagctttacaacgtcttgatgagcaggacctcaatctggtagttgatatgatcccttgccggtcaggcgagttgtaggccgctcagttgctaggcagtcaagtcaatggtgacgaagccgtgctgaacagaatacagactggacggagtatatagtatgaacggagtatagtgcaccgtctgataatatagtctggaacttctgtccgggtcgggcatttagggttacggacacgcggaaactcgaccaccgcaaatcaaaaaccgtcaaaactttgtatagaaatttcgagaaaactcgtgtcgtcatacatcgaggctaaactcggatcccaataaaagctgcaagaagccctttccttttatagtaccgcacagccatctgtccaccacctacgtaaaatgtgcatcgaatgagatggcgaccttccatccatcgcctgcacagtgaccgtcaagaagaaccggtgaacacctaaccctttctcagctcggtcgtctgaaacattgcacgacagaatggatgcgagaaagccatggggcaggccctgctcgctatctataagttggtggaggatctccccacgacgttttgtgcggtt

SEQ ID NO: 15804 - DNA, 882 bp, Emericella nidulans
cggtcagccatattgtgaggcctttctgcttgcggagctggttgcgctcattgcgcgtgatgcccgcgtggtgggtgatgttgctataaatggagccttgatgagcataaccgcggcttgtcaaagatgatggggaacctacgtggccaacacagataattcatccctggaacctggcaccgggagtaagggaaaacgtcgtgctacactgacgacggacgtcatgaactaatcgaccagatcgccttcgactgtcgcgacagtaagcaatctttgcctcgcactcccgtagaccgtgccggtggacgccatgctccgccactgtaggcatcggctacagtgctcagtccatgctctccgaactgctgagctttaagatctgaacccttcactctcttgtactcgaagctggcgaggtagccacacctgaggctgacgttcaagtccatgtctgcacggcttgacaattcaattaaaaacattcctataacgtgacgaggcccttattgacaaggccatatcccgccacaaaggcctggaatacaccttatacccgatttgctgtttatggtgaaaccgcctgaatatccatccgccgaccataccccgccactttttaatggaattaagttaattctgcccccaaagtttctatttgaattaatcacccataacaaaagttaatctcccaaatgtatccctggcttaactatcttaccttggaacacttgtttagccgaaactttattgaaattcctctacacaaataaaattacattgccttttttacaaaccatgttaaaatctaaaaaggtctggacttgaaccagcacttgacctaccaaaccctttctaaattttccctcctgttggatctaatat

SEQ ID NO: 15805 - DNA, 734 bp, Emericella nidulans
gactgtctctttcttgctctttatcaccttctcttccatctaatcctagatgggaaacttcagttatccttttgtaccgttaccagtgctttctgtgctctacacagcaacaggagacttaacatgggtccatgcttttggtaggctgcagcattcttggtctatatacactagatatcccctaaccggtagcagctgaacagaaatcttctgcgtatatagtggccaacgatcctagtcccacatgtcaaatacccctaggtctcagtgttattccagaccctagctacgccaacgaaccatggtcatacacccgccagctcgtctatgtccattgccgtcagcatttccggagcctatacgaagcacccgacttttaatagaagcgttccaacaagcaccaatccttttaaatctgttaagccctggtctttatggctaaaagctacctcatctccggattgttgcttgagatgctagaacttttaacccctgttaagctactacgtacctcattatagaaaaatcctcttctaatgggggcctttcttatatggtctatatatattactcttcttggcaaccctccaatttaaacttcgttcccaggcctgttagaatatcccaccgtgtatattgcccataaccgtgctgtgttaaaggaaaactgagcttgaactccattgtcatcttaaaatcttgggtctagaaacctgtggtactggacaaaatat

SEQ ID NO: 15806 - DNA, 1050 bp, Emericella nidulans
cattgtccagagcccagccgtacaagttgtgtgtaataagaaaatccgccgccggttagaagacctccgacgccggtagatgtcaggcggccacctatgacactcacaccgtgcggctctagggctttgtacacctggccccagttgttaccaggcccaacggaggcgacagacttgtcctcattcagagaaatctcgttgaggtcgcggaagagtatcgtaatgcctccttcgctgttggatgcaccggcaaaagaagcatgaccaccgcttttggctgcaaactggcaattcgtaagccgggcgagaaggacggcgatggaaacttcggtatcaacttctggggcaaacatgcacgccgggctagcttcttcctgctgggctggccaagtagagcgggtgattttcctgaaggcagaggagttgcccccgacacttcttcaggagccttacgatgcccaaccgcacccattaggggctgggcccaattgcctgcttgtcaccttcattaccccaatccctcactccttattccatactatttcccacgtccaccctctcattctcatctctcacaccttctaccaactttccttactcttccattccacagtttagttttatcactctctctattatgtactcactcccctcttccctatttgccctctatctatccctccttctcatctcactgatatttcttactaccctctctctcacaatccctttcccctaccttcatataccctcccttcatctcactacgtaccttcgtctcgattcccctcacattatttcatctctcctactctccaccattcacctatctctatccctcattaatctcatctactactctctctagtcctcacttctcattttttctaattatctctttctaccattatctccctcatcatcctctacatctaataccctaatcccctctccatctcctactcctctcgtactccttcttcctcttctattactctctatctatttccttctactatatttcttcctctatacatactccctccccct

SEQ ID NO: 15807 - DNA, 531 bp, Emericella nidulans
tctgatcacatgcttaacaccacagcttccagcatcgtttagcgcatacaaaccaaccttaccgcatgtgcgtcatgtcacagagcatacgcgggtctgaaaaggactccctgtgaacagataatctggcgcattattgctcttatgcactcagcatcgttaacaatctcacggaatcatcatgcctttaatagtactctacaaaaagatgcagatcaggagacttctttgttagaccagttcgaaggcggaactaaacttacgaaaaaaggtctgcaccacacgatgacgtcccatatttcgatttatagatgcgttgcctctctggtaaaacgttggaccaggcataaccttacttgggctggtaatccgaatactaactaatgtgcagctcatcaactatagtagcgggcataaaactcctgcagctcagacgcgtatttctccgcttgccgacagggatagcacgacggaaaccgggggttcgtttcatgcatctggatcgcacccctcagcgcattcttgcggaag

SEQ ID NO: 15808 - DNA, 4180 bp, Emericella nidulans
actagtagggagcggaaggataatgtgtggatatggagctaagacgaaagtaaatatagcgagaggcgtgtataagaggaagtaaaggaggagagatgataggagtaacagaacaattggaatggacgcatgtgatagggggcgctataaagtgaaaagataggggggtgggtcacacatgtagagagggagaccatatttaaatgtgtgttgccgggagtaaaggaaggtttgaggactggccgatatgggtggaaaggaatgcaatagggttttttaggaagggggggaaattatgcggtgggttatgaagctttaagagaactttttttttgtgaggagtaacgaaggataggagggtaagggtgatgatcaatctgcgaagaaaaggggcgcatataactcccggaagatataggcgttgcgaaagtatggtgggaagggtgttcttttaataaatggaccgaggttgtaataccgaacgaaaaaatgttggggttagaaggtctaggggcagtccaaaacttttcacaggcactgctttagcttgtagacaatgagtgtttgctgcagatcgtaaggagggaaggatattaagcttaatcttgggttgggtagtgtgtaaagtggtcgtaactccaaggatacgtagtctggctgaaggctatctgaatggcaggtctctgaatgatgtatcatattagctttgataagcttgtggtcgttaactttacgaatcgcggaatgatgagtactaaatacagatgatgtaggaatgctactagaatttcctatttcacttgtgtgcagagatcacaggcaatatggtgacaaatttcacacttgcacgttgtaggtgtacacctttggcccgtcattacaattgcacttgaatttgacaagttagcgtaaacatatacaagaacattcaagattcaaaggttgcactcacgcagatatacatcggcccccacgtccgcccatacggagatgaacctccacctctacctccaagtccaggtaagccccttacatcgctgtgggttttccgagcgtttcctgcttgtgatgctggcctccgtttcggaccggttcctgactgtgtctgccacgcctgtctcgcgctgtgcattgtctcaggctgaggtccagtttcagtattgaagcttgttcgttgggaaattataatagacattcggtttagaccgtttatgccgtcttgaaaatgcatataaatatcctggatagctgtcctggacgagtgtttttcctcctgccatagttgttcctcctgctcgtagtcttcgtcctcctgctcttcttcgacttcactattattgtctgagtgttttcctgtgttgcgtaactcgtcttttagatctcctagtagcccttgaatcctatcagctggcgaaggacttgactcctgaccgtcgggaactcattaagtaggccatctagcgaggcatgaccgccgcgagtctgatagacgccaacgtcgcttgcccagattcgaagccgtccaagttcgtcccgccatgctgataggaatctgagcctgcaggtccggatctcgaatacgatcatggtcaagtatctgctttgcgcagtcaagaaattgtctccagccagagccggttaggataatgctgtccatgctgttggcaggtattgtggtagtcacgtctgctattcgtagacaaatccgaatcttgtagataagtagcatcgcaaggctgaagtcgagcaaacgtagaacagaccacgcagtgaaagctggcgctcgcgcctgaagcagaatctcctgcatcatttaacattgcacgctttaaagtcaagagccactaccagagctcaagagtcgacatggacccgattcgtattgtcctggccatgattccactggtcgttacggtgcttgataagtatgccgatatcctggacactgttagcttgcttcgcaccgagaaagatcggcgccatattgaaagatactccagcgtcttgcaggggcaatgggcttcacttgtgaacgctgttgagatcgcactgggggttccagattaatgaggacgatatacaaagcatccaagcccagaccgaaaacatagcatcaacctggaaagaccgtgccctgcaagacaagttacagagaaacctggggcgagattatgaggtgtttgccaatatcataacggatgcgaaacacgtactgcaggagataaaaaacaggcttgaggaaagtttttaaacttgtgagccggtcaccaagcattatctgctcaaagctaaccgactcttcagtctacggcaacccagcctcgtgcaatcctagtggcacgcagagttaaacacatactctcaaaaagaagatctgatagcctctttgatggcccgaacacttcgatcgatctgctccagcgaaccgtcaaccagtcactccaacgtcaggaacggatccgggcagattgagactcgagactcgaaatagtgcgctcccctgctgctagtatctataaaaccctgcttcgagaagaatcttgggcctgcccttgccttgatgagcattctgtcctgctcacattagacctcgatccaggggcagcggagatgtctgaaatagtattccgaatatcattggtacggtcaacgacccatcccgtccctcttctcctggcagcaactcgaaattgggccgcatcagaatgaatccgggacgaatcagatcacccaagtatgttcaaccattactacaatagatgtgatggtcgaggggcgaaagaacgttggcagccttatagacgggaaataccgacacatggtgtcagtcacaagaagcaaaattcggattttcgagtctcagtcgctcgaggattcgcttatgtcgtcgacactggccgcatggatcccagggttctatttccaaaacggaatcgtctctaccgggcagcgcgactagcatggagtgtgcttcagttccacggcaactggctccgtgagcattggcgcactcgcgatattatatcccccagggaactagcggaccggtctctcaaaaccagacacttcagcatccctgtttgttatagagagtctcgagcaaggatgcaacaaggccggatctatcgtcaacaatcacgagcaaagttcttttcgctttagccctgcctttgatagagtcatcgttaggccgatcttctcggcgctcaagacccgaagacgagaatcctgaggaggttgtgacgtttttgaagactgctaatcgttgcatatcttctgtcagtgaagaaagtggagagcgatatggaatggtagttcggagatgccttcattggtcagagactaaggaaacagatccagacgatgagcaattccgaactgctttctataatcaggttgtcgctcccttgatggatatcatggctgccttcaatggtagctcaatggcacctgtgcggtagcgtttctggaaaattgatcacatacaataaaatcattgatgttcactcttcgcttggagatgatcttattactgtaatcactgagagcccaagtttagacaagtggagaaagaggcttctgagaagtgagcattgcatctacaagggtgtatatttgagagcctaaggctaatcccgattcggtagctctgtgggctctgcagattatcgaaggcagaacgaatggcaatcaaactgacctcatacgagcttcaacttcagcaataataatacctatgccgtctctataggtttccttgttatttcagtctgttattactgtagctctgctggttgacttgagtttcgcctgctgagcttctgccctgtgaccgaactcaccttcgcgccgcacgtccgaagaccagcgattgaggccaaccagcaccaaaagcacaccgtgtcgtcgaatgcagttagacgaggtgtggcacccttcgcgtctgcgacgagtgcctcagctaacaacgacggcgtgagtgcgggatttgtgcaagacatcgaactcgtcgagtatcccgttccacgtaccacggggctccaaggcaacctaccccaaaaacgtagccttcgaggcgagaaaacttccccgcagaccgaccgcaatcctttaggccactcgcaccagcgccctgaaacaggaccctttggcagtgataaaccagtcaaacttcgttact

SEQ ID NO: 15809 - DNA, 612 bp, Emericella nidulans
gaagagctgtttgttactgatgatcatatgttataccctataaatactgtgtacttgcgcacagcttgtgtttgtgccaagatatcctctctttgaagctgtttatttggctaaagatggagatacaggactgcgatgacgcttctcgcgccagatacctgagcgatctttataatgagcttgccagcctgtattggcagactggcaatcgtcaaggtctggacgcggtcatagtgaatgccgaacttgctgcggctcccactcaggatactcatctcaatcgtgcggagcgactgaacaggcattcccatcactgtccagtcgctttatgcagactgggaactttctgagaaatccctggactttttagcagatggaatgaagcaggcgtttgcgagatctgcagacattattatccagcgaactgacctgataataggtttttagacgctaaagatgtcctgcttcatggcatccttattgacaatgagccgaactggaaattaatccatccacgtctggtccagcgagcgtcattcgttcgatagatatccgacggcgcgaggaggaatcttcggttgtgatagctatcccttcgcggatttccagact

SEQ ID NO: 15810 - DNA, 1122 bp, Emericella nidulans
taaagcaggctttccccgcagcttgctcgttcttctcgttatgctaaacaggtttgtttaaccttgagaaggcaatttcccagattcgatcgctgattttcgcaggttccacaactatgttgtagaagagcttgctgccatcaacgagaacggtcgcttcactaaacccagccctgatctccccgaagagcaagcaaagaaggcctgggctaagtacgatgaggatcttttccagaccggacgactgtaggtctcgctactgccttacatcgagattgcactgactctccatagcattacctgcggcctgttcattaacatcaccctgtacgattaccttcgcacgatcgtcaacctgaaccgagtgaacagcacctggtgcttggtaagtaacggttctgtcctgctattatgctctctaacgaaaagcaggaccctcgagctcagatggaaggcagcgctacacctgccggtctcggaaaccaatgttctgtcgagtttaacctggcctaccggtggcactctgctatcagtgccaacgacgagaaatggaccgagaaggtctacgaggaactgatcggcaagcctggttcggagatcagcacgcaggagctgcttataggtcttggcaagtacggtgctagccttcccaaagatccatcttagcgcacctttgcgggacttaacgcgtaagacgatggtacctttcaagttgaggagctagtgaatagactgactttcggctgtaggatgttgctgagaaggatctggtgaaggtagttagaaagtgccgtttaggtaatgactcggtgggttgtggctaaaatgggaccatgtcccaaagccgtggaagctataattttttacagtcgcaaagcttggtcccccttctaaggtctcccaagatcttggatttatatttatccttctcaacaaatttctccattagttgtacatcttcaatctggagtctcttatacataaattcacggtctttccagatactaaatattattccatttccttataaatttactttcacaactttttacttacacactcctatctccatccatttttattttttatactatactttcttccactctatacccttactat

SEQ ID NO: 15811 - DNA, 588 bp, Emericella nidulans
  unsure (1)..(588): unsure at all n locations
ccggaacagcctggatgggtgctccctttgcgtaccacccgcagtcgcaccaagatccatataaccggccgccgcctccgcaatattcgcactcaccaggtccccatggatactttggaggccagcaatcgggcattgagcttcagcagccaccgaacgcccaccattatggcggcgaacgggtgtatcagcccccgtctggtccgcctccggtccaacagaatgggaagccttaatgcgtgaaagaactggctggaatgagtatcttctggggaaacgattaccacatgaccacatgattacctgaatcgataccttatatccgacataggcgtttatcttgctatggaattggctttggcttttgatggcattggactgggactgcaactagcagtcataggaaccgcggcttattagccgtaaagatagcttaggctagtaatttatatcttaactccaatattncctcaactagcccgaccttcgacagcgagtaaactctcaagacgaagagtcttgttcagtactctgcagagttatttatgggttaaagtatattaatcagtgatacctgctgcctatgca

SEQ ID NO: 15812 - DNA, 3775 bp, Emericella nidulans
atccccttgctatacaccttacaggtctttgctacccgccatggaattggcctccaaacaaaccgcgaggctccttcggccgtccaccgttcgccttcatcccggtcttccctccgcaatatcaacaacacaaacagccctccgacgaagaaatatctcaacgacaccctggcggaatgcaccagaatcatcgctcctcagccttgcctcatcctcatcctcggggtcaccacctacgtatttctccaaccgacaaaccctgccaatgaacacggtggttcgattcgttccccagcagacagcatggattgttgaacgcatgggcaagtttcatcggattctggagccgggcctggcaattctagtgccatttctggatcgcattgcctacgtgaagagcctaaaggagtccgcgattgagatcccaagccagaatgcgattaccgcggataatgttacattggagcttgatggggtgctgtatacaagggtttttgatgcgtacaaggcaaggtatgctaccactatcgtctcgtgttttgaaagctcatgttccaggattgtactgactttcgagggatacttagctacggagtggaagacgccgaatatgctatttctcagcttgcgcagacaaccatgcgatcggagatcggccagctgactctagaccatgttttgaaggagcgtgcaatgctcaacaccaacattacacaggctatcaatgaggctgcccaagcgtggggagtcacttgtctgcgatatgagattcgagacattcacgcgcctgacggtgtcgttgaggccatgcaccgccaggtgacggctgagcgatcaaaaagagctgagatcctggactctgagggtcaacggcaaagtgcgatcaacatcgccgaaggtcggaagcagtccgtcatcctggcatccgaggccgacagaatcgagcgtatcaaccgggctaatggtgaggccgctgccattcgagcaaaggcagaggccactgcaaaggcgatcgagaccgtggctcaggccattgaggccggacaagcgaacgcgcatggcgctataagcctgaacatcgctgagaaatacgttgaggcatttgggaagcttgctcatgagggcacagctgtcgtcgttccagggaatatgggggaccttggtggcatgattgcaaatgccatggcagtatacggcaaagtgagcggtagccaggcgcggactattgcggcgaaagctcttggggtgcaagatccacagaccactgagaagacgccggaagtcaagcccaatggcaaaagagatgtcgctgaagggattcttgaaggattcgagcagacgcgccgcgaagaagaaaagatataagcgcgtcggcgatcgagtaatatcgatctttccatacggtccagggttgtctactaacgaccctctgatggtcacggactccactcatccctccgcactacgcctatctatactattctgatttgtaccattttacaccggttaactattccctctcctggcggtgtttttatcaggcttcggaaagtgcgtgggaaccacaaagcggaggacggttgcagggagagattccgacgtaggtcttttcacgaacagtatatcatgtacagtagcatagatcgagatatccgtgcaccgtttcgccctgaatgttgcgctttccagtactatttggctggtaaactttagaagttaggcggaacgcagcagatcaaagctcgggccacgtcccgcgccgctggggatcgcgacttttgggtttgggcgcgcccacggtcctttttctgttcgcattgcctttattattttttgcaacctcgaagtacccgctacgaccgtgctgtcgactgcatcggtctggtcttcttcgatacgacattcgttaaatgctattttcctgcgatgctgcgactacctccgctcttgtccacgtcaacttctcagtgatcgagctatcttaacctgccccttcgagacagccaactccaggcgaacagaagtaaggcagaagaggttgcggctatgcatatcatcaagcctacttggctcacacatggaggtattatcttttgctcattccgtttaagcatggacatactataccgtcctatgctgctctccatttatgtttgtcgggcctcgagaaccgtgttggctaacatcttcgtttctttttctggattcttaggcgagcggaaggcgttcgaagtctacagctgcgatgtttccccagatggaagccgcctggtaacagcagcgggaggtcagtcaagaccccattggaaccctcatgcggagacgaagactctaccgaacagcagttgacccgtgcatatttttccctttttgaatacagatggatacgttcggatatggtctacagaagctatatgcggggctgaggatgccaacaagccgaagcagctggcctcgatgagcaaccactctggcacaattcacacagttcgcttctcgccgaatgggaaatacctggcttccggcgcggacgataagattgtttgtatttatacgttggacgcgaacccgccgtcccatgctgcaagcttcggtaggttcggttgtatacggcgctggatggattttttgacggtttctgctaggatcgaacgaggcgccgcctgttgagaactggcgcacgattcggagactaattgggcatgataatgatgttcaggatttaggctggtcttgtgactcgtccatcctggtttctgtcgggctggattctaaggtggttgtttggtcgggtcatacgtttgagaaactgaaaactctctcggtgcaccagagtcacgttaaggggattacgttcgatccggcgaacaagtacttcgcaacggcgagcgatgatcggacggtacggattttccgcttcacatcaccagctccgaattccactgcccacgaccagatgaacaactttgtgcttgaacagaccattactgcgccttttcagaactccccgctcacggcttactttcgacggtgctcgtggtctccagatgggttgcacattgctgccgcgaatgcggtcaatggaccggtgagctctgtggctatcatcaatcgtggaggctgggatggagacatcaatcttatcggtcacgaagcgcctgtcgaagtttgtgccttttctccccgattgtactctccgcagccgataaaaaaaaatcaacaggatagtcatgaccatgtggcacaggcccctgtgacagtaattgcttgcgctggaggcgacaaatcactcagtgtttggattacgagtaatccacgaccgattgtggtggcacaggaattggcggcgaaatctatctcagacttggcatggagtccggatggcagctgcctgtatgcaactgcgctggatggcactattcttgcggtccggttcgaggatggagacttaggctatgctatggagttggaggaaaatgagaagtcactcaccaaatttggtacgaaccgaaagggtgcaggtatcgctgagactacagacggcctgcttcttgaagagaagagcaaggctggcgagcttaaaggggtcgaaggacgtatgggtgctctgatgggcgacggtcatgctacaggtgatgccgtggccaatggaaaaccgacacctttgccatcaacatctaatggcgtcaccccagctgctccgtctccatcgactgatgctcagaaatcacagccgaacgcagctgcagcgccatcagcatcggagactgagaag

SEQ ID NO: 15813 - DNA, 3776 bp, Emericella nidulans
gactactctgatgcgttctgctacttgagcaccctcgacatcgtcaaccccaaagccattgtcttctggggcatctctctctccgcgggcattgccctcagcgccgccagcgtggacaaacgcgttgcggcggtcatcgctatagcgcccatcttcaagtttctcccggtaacagagacagacgcgcgccggctcaagactaaaatgttgaaagaccgcgaggcgcaggtgctacggggcagcgagggctacatcctcccgatcgccgagtccctcgccgagatccctttcaattcgcacgtcaacgcaaacctgggagacgagacggacggcgaggacaaggagcggcgacgacgcacagaagcagagcaggtgcgtgagcagcacgagcgctggagggaagacgccgcggcggcggatcaggacttcgacgagacattgacgcataatccttacgggacgacactacaatcgtaccatcggatgttcctgttcgaggctgtccctgaggccatggttaaggagatctggccgactccggtgatgttcctgacgcccgaacaagaccagatttcacctccacaaaagcagaccgaggtcttcgagtcgctgcgaggccgaagcgccaggtatttgccccgagcaaggagcatgtctacgtactgcatgggccagagatgccgatgttgatgaaatggcagatcgattttatctggcaggtagctagaggactattgaagcctgcagcgtagttacctcgtctcgcagataccaattgctccctcttcctccatcatctctttctctcactctttctcccactttattcagttgtaaagtaagcgtaagccacgtcaattacaccagttcctggaatttacccggtcaagtatcacagttcagccggatccatcagccagcttctccaacaggagcaaagtcctgctcaacgagaaagaaagaaaaaagacctctccgcgtaaggttctaggccagcagtcacccctcatactcagccgcccgccgttcttcagcgaggtagactagtagcgacattagtgcgggttggctgcacaccaagactgggggccaacagcagcgcggagcagacgtccgtaccgaatcgagtaacggagcaatgcccccgataggtgatccttcagtagctaacttcagtagcttagctatggagtgtaatcggttctcctagctgagtctacttgaagcgatgtgcttacgctgaactgcgccggccgaagcactaggtggcgcaatggcaggaatatgtctctttcggtttgacgttcttttgataaggattagtagtgccttagtggcagaggttagtagagacatagacaagcgtcgtagagtatcttgcgagcctatcattctttttattgttggttaaaatttacgtgaggaacgagatatatatcgacccaaccattgacaccctactcgctgtagttatcctcaccctcttcatcttatcgtacagtgagattgcgcagggaatgcaagatgtcatcaccagaaatagagcccattgccatcgtcggcctgggctgtcgctttcccggcggcgcagacaccccagaaaagctgtggcagctggcatacgaaggtcgacagtgctgggaggaggtcccctcgaaccggtacaactggcatgccttccatcatccagatccagaagcaagagggacgcataacgcccggggtggcttttttctccagcaagaccctgcagtcttcgatgccaatttcttcgcgatttccgccgccgaggcagccgccatcgacccacagcagaggctgctcctagaagtttcatacgaggctctagaaaatgcagggatgccgctggaagcaatccgggggacccaaacaggcgtatatgttgcgttggttagtcgcgactacgaccgcatgatctacaaggatccgagccagatcccgaagtaccatctaactgggtgcggtgatgcaactgcctgcggacgcatctcgtatacctttgacctgaaagggccgtgcgtgagcatggacaccggctgctcgggaagtatggtcgctttgcacctggcctgtcaggctttaagattgggcgagaccaatgcggccatcgtggcagggacgaacctgttactgggtccagatatgaccatcgcgatgagcgctcttcagtaagtccctctcagctttgtcctgaattgtctatatcgcggaagactctggctgaccattgattcagcatgataaatgagaatggccggtgctacccattcgacagtcgtggcgctgggtatgggcgggctgaaggtgttgctgcattggtgctaaagaggcaggcagacgctgtaagagacggtgatcccattcgagctgtgattcgaaatacgggcatcaatcaagacggcaagacaaatggcatcatgcttcccagtttcgaggctcagcagcaattgacaagcacgctgtatcgccaggcgggacttgacccgaactatgtgtgctatatagaagcccacgggacagggacgcaagccggcgatgctgcagaggtgacttcgatcaaacaggtgttcgcaagtgcggcacggacaagagagcgcccgcttttcctgggctcgatcaaggcaaatttgggacattcagagagcacgagcggtttggccggtgtaatcaagacggtcatagccctagaaaacgctactatcccgccactggccgcactggagactcttaagccggacctgcatagtctgctggagtcgactaagatcatcgtatgtcctccgcttgtataaagcgccccccgggcctagctaatattgtgctgtcttcagattccgtcaaagccggtttcatggccccatgaagggactcgtctggcctctgtgaatagctttggctttggagggacgaatgcccatgttatcctggaatcggcaccatcattcgagttgcagacccagcctactaacggattccacacagactcggactgcatctgcgtagatactgactcggacagtgcggcaaacggtgtggtgacgccgtcaagtgattacgagcatggtcccccagagccaaatgaagacggccggcctcagcttttcatcgtctccgccaaatcaagggtgtcattagaggcagcaatctacaatgtaagggactgggtctcgaggcacggagcaacgtatataaaaaggcaagagctagtcaaaacactctgccaccgacggtcgattttcaattggcgtgctagcattgttgcgtcttcgcagccgggcatcctgtcggcgctggagaagcctcacaccactaagtcctggacgaaggtccaggttgtcttcctcttcaccggccagggtgctcagtacgcgaggatgggaaaggaacttgtaggattagatagcgtcttttcccactcgcttgatcagtctcaaacaatcctcaccgagcttggagcttcctggcgccttttggaggaacttcttcgcgaagagtccgcgtccagcatcaactcgagcgagctctcacagccagcaacgacagcgatccaaatagcccttgtcgacatgctggccgagatgaatgtccgcccgagtgccgtgctcgggcattccagcggcgaggttgccgcagcttatgcagctggcatcctagggcgaagggaggcattgacaattgcctatcataaaggctttgtggcgggctggtgcaggaacgccatctcatctcaaggagcgatgttggcggttgggctg

SEQ ID NO: 15814 - DNA, 496 bp, Emericella nidulans
gagaaaggcttggattactgttgctggcgcggtgttgtcgcgctggacattacggtagggacacgggacacgctcatatgtcgcaaacttgcgggcggaccacgtgcgatcagccagaccagtctatcggatttgtctctgatgggagtgtgggagacgtgtctttagacttagtataggtgggatcggcccaccagatgccttgagaagagagaatacgccaccgtctgcctatatcgacagagatgatctgcagagtgggggttactgtcaggggcaatgacctgggccagtcgacgggatgaggctggactggtacatacctgtatctgattcattaggcacagatgtagatggccagagagacggtcctggagagacaggaattccatcagataacggcagctggtggctggtacgtactgaatgctacacataacaggaccgtgtggctttacgagcacaggttttgatgtagaaacggagaagggacagg

SEQ ID NO: 15815 - DNA, 4826 bp, Emericella nidulans
  unsure (1)..(4826): unsure at all n locations
ctcactccgctcttcggcgacaacttcccagacctctgcattcaccctgacgaccgcgctcgattcggtcggatggtcatcgatccaggcatcgtccgaatcgcgactgaaaaagcaaacctctaccgtatgctcgagctccggtgctcaactacgaactcgctcagggcagactacgtcctgcgtcctagctctgccccagacatagacaggacggatccaaacctggaaagggacagagtagccctgggccggcacatcctcccaaaatctcaccgccaccatcaccaccgcagcaaaacgtctccgtcaactaatacgtccttggtcggatacggctcctcacctgaggtggagtactacagctgcggcacagaaccatactgcgtttctcccgagagtccgattcggagctcatttacgccagtgaacacgcctcgcagcacggatatctatccttcctcttcatccacaaacttcctccgttcaccacatgaacttctcgcttcgctttcctcgtctgcctcaattgcaagggcacgaatagaaagggcctcaaaaatatcaggagcaagagtgatccccagttccgtgccatctaacgtcgcctctatcgcaacgaaaggaagaggcaataccggccacagtgccctaatggaagagagcgacatcgacgcagatgccgagacagactctggacatgaacacgatctggacttcgagctcagctcgtctgacgaatcatctacctcgtcaactgtgtcctcaagcacaagcagcgccagcttaggctttgctgctaacagtcgcaatcgcccataccgtgatgacgacgaaccccaccgagacacagacgaagagatggttgactaccgtgcaccaaagagaatagcaacagctggagctagagatcggagatggggacggggaaggagagtcattcatcaagagcatagtgatatcgagacctctcgacgagcacgaaaacacgcacagagatcatcaaacgccagactcgtgtgcgagatgacagccgcccatgcccttataagtctcttgcatgacgcgacgggcagtgacgttgatgtcgacacccacaatagactcgaatgtgggcgtacgcagacggcggcgtcaagaacaacctcaagggttcttactttggtatcaggctcaaccacaatccttctactgagtcgggacaaaagcgacgtcgggcgtcacgttgattttggtctccccttaccctacgtacccacttcgccgaacattcggttttacatgaactgcatacacctcgtttttcccccttctcattattactctgcctaggttactgtatggcatcagacaccaagctactactctacctcgaacaacttcacatgcattctaagctccttattcctgaccttccatattcattggtttctcatgcatactattctctgttctatcttccgtgcccccacgaggaaacgaatcgtacagttggaatattatagactgcttggagtttgagattcagatttattgtacatgcagggcacctacccatccgtggatagctgctcttgctcttgatttcattccatttcttttgctttgggtagatatggtttgttcacttcattagtctgtgattatagtgttgtctgaatatgatggtacctatctcagttcaatcacttcaagtatgtactaatagtagcggtggcggtggtcgtcgccgccgtaggttacagattagaaacgcctttgtactacgttgtagttaatttgggcagagcagttgaatgcctactgtcgtgtaacttgtgtaaagcaagtgaagcttcggctcgaacgcgacatggcgtgcaatcattagtccacccacatcgactacacatttacctagaggttccatggtggatcgcgtttagtacggtcgagataatataaacattgaattccctaaacctgtaaacttggtaaataccgaaaaggtaacagaataaagacagagtgaagcacaagagtgagaacgatcaacgtcctgagaaatctcaatcgactaaaatgcaagggaaaccacgcttagtccgacaggtcaaacgaatcatcctgattatccgctccgtcttcactgtcgtcatcctcaattacgtaactcttcttcgtggttgtgcgtcgcgacggtcgactagctgtgctgcgcggaggagcaggagcctcatctctaataccgaccggagagtcaaggatgtcattagccatggcatcaatatcatcctctgagtcgtccatcagtgtcttcttcttggatgctgtagaggccccctttgcttgcttcgacgcatatgccttggctgctggcgacagggtcgtctgtttgagggaagaagcggtggccgtggcatccttctttggacggccgcggcctttacctgtgcctgcctttggagctggcgcagccttggcctttggagcagccttagtcttagcgggcttgatgggcttgtcctcttcgtcgtccaagtcgatactctctgacgccttcacgtctttaggcttaacctgaagggaacggcgtgnggagttttgagggatgagcttgctgtagtcggtttcgtccgcatcaaagtcgttatcaaacttggaagtcttcgaattagtaggcaggcccgtgctgctaccaggtcgcgagagttccgagaagagttgtcgcgagtccgtggcagatccaccagctgcgccaccaatgcccttaaccatcttgctgacatcgccaagcaaatcatcgccgttgtcactgtccgagtcatccaatgtgtacttgggtgcagccttgcggccagcacgagggggggcggtcttggcggcttcagctttggcgatttccataaattcgtcatcatcaagaccgtcgctgtcgtcatccttaggctttggtttggctggtcggcccctcttcgttactggctttaccttgggctcgtcctcatctttgtcttcatctttcagcttcgctgccgccttgggggctgccttaggagggccacgactctttttgggcgcgacttcaacttcagaggcttccatatcgagatcgccgtcctcatcctttaattgtggggatgctttcacagggcccctgctcttcttcggcctgacttcttcaatgccaaaaccaaaatctgagtcgctatctgagtcgttggcggcgggctctggattctgcgtcttcttcaaaaagctcatgattccgcctgccggctcggtcttgtttgccgctgcttttttcttggactttgaaacaacaaaatcgtcatccgaatcatcgcccgcagccttgcgcttctttccgccgacagcacgggctgccgtcgcaagcttcgtagagactcggcggcccttcttctgttggccacgacggcggcggtctgtttcagacagctggaatcgccactcattgatgaactcatcgaggtcgcgcagccagatatcttcacttgacaacttaatcaattcgtcaatctcgtgctccttctcgccaatctggcggcgcaacttttctactcgctcctgagtcaaggaccaaatggccattcccaagagataatcgaaggcatgagcaaggtcctgcgtatcgtcctgagcttcagtgtcctcgtcttccgacgcttcaataaccttctcggtttcaccagccttagcggcgtcggcagttttgttgaatctcttaaagcccaagctgtccaactccttgacaaggacactcttcttcttcttagaaacaaccaaatctccgtcgatgatcatctggacaaatcgtgcctgattggtcagcttctcgagttcaatctggagttggtcgagttggtgttgctgagtaagatgttagcattggcacttctgtacgaggaaaggcgaacaggatgtactaactttgcgttttccatagaactttagccgaagcctatagaactcctccaggatagcctcgacgttagggtatttggtcatctgaccttcggcattgaaggcaaccaggtttgtagttgcgattgtcttggagagcttgaatttttcctccaagaactcctgcgtcagaggctccttcacattcttctcgtccaactgaagaacgaggtgaacgtcagaattggtgttgtagtccttgtagtccttaatcagagagggcgccttgtcggccttgatcatttcttcaagcttattgataaagtcctgcgtccatgtccgaattggaagttccgtaacttccagctccttgtccgagacttgcttaatgagtccactgaacttgtatttgtcgggtcccagctgagtgacttcacctttgaagcccttgaaccagggttgcattggctttatttcttcgccccttatcatccgcttcaggttatcgacgatgtcctctggattgtagtttgggatcgaagtgctccaacctgtgccgataccgtctgcgccgttgatgagaatcattgggacgacggggacatatacccatggctcaatttctttaccatcatcctctaagtatttgagaatggggtcgtcgtgcgggtgaaatattttgcgggcgaatggagaaagtcgagtgtgaatataacgggcactggaggcatcagcaccacctttcagacgactaccgaagttaccgctgggctccagggtattaacgttattcgatccgacaaagtcttgtgccaacccaatgatggtctgatgcatggaggcatcaccgtgatggtacgcagtcaaactgaaaacttgaccagtaaggtcaagcaccttcacatcctttttgatgttacgct

SEQ ID NO: 15816 - DNA, 412 bp, Emericella nidulans
gatttgcaaactaccttggagttgcaggcgtgtcgatgcacttaccgtttggtgacgccttggctgttattgcgctggctagaaccacgccgatttgaagcatttatgcgcgttaggcgcagagtatttactatcctccatagatgtaatcgagctcgatgacatgacagcaagacctgcactatggcattctaggagcgactgtgaagactagtaccgtagacacaagatttcggatatgatagaggtagatcaaactcacagagctggatgggttgcctaggcgaatacggtattcagagagagcagattcccgatttgctcgacatcggctcgacacgtactctattaagcaagcggactggataagaccgtggtgaacatagacataggttttatcagctgatgcgcc

SEQ ID NO: 15817 - DNA, 4791 bp, Emericella nidulans
  unsure (1)..(4791): unsure at all n locations
tcttccaccatatggaacttggtacagccgctcgtcatgccgctctggaccgggtcggagtgctccattcggagtcgtagtcgtggacgctcatctgaggccgtagacgttggagcggtggcggacgtgcccacacatacgtagtagtcgtactggaggcccatgcagtcgtccccaacggcagggttccaggcgtaaaagttggagagagcgatgccgtaatcatccgcaatctgctggcagcccttgtccttttcaaccttgtggaactcggtgcagccgtctgtcattccgctctgcgttggggttggagtagcactggtcgagaccgtcggactcgacgtagtagtcgctggtgctgaagttgtggctgccttgcccacacatacatagtagtcgtactggaggcccatgcagtcgtccccaacggcagggttccaggcgtaaaagttggagagagcgatgccgtaatcatccgcaatctgctggcagccctcgtccttttctaccttgtggaacttggtgcagccgtctgccattccgctctgcgttggggttggtgtgggaacgccactgctcgtcgcagagggacgctgcggcgtcgacgaaggcacggcggtcgagtaaccgggtgtgcaactgccggaaacagcggcnaacgagcnggaaaccactctactacgcgcgtacctcccctttttttttttttcttaaagccaatagccagattccactcaattgaattactcccatagaattggatagttatctcttgaactcgacttttcaaatcactgctcagaaacaacacaaattgcgcacatgccacggtgactaacagtccccaggataatccaagcaagggcaaagcacgtagcatgctaaaaagaccctatgaacaatagatcgggccttggagtgagaagggataatgtacaggctatacatctcacgctggcaccaattaggtcaacaatagtgtcgcagccaagtttgatctgacagttgccaggcccgcatgaagcatctcctgcgcaaacatctgagaatggttgatgcatggattcaagtggcgggtattcataacaactaaggaacactcggcattctccagattatcacacttctaaattcttctccctctggccggcaaacataagaccatggtctatgctgaacccggtcctatactcccgcacctcaacaagttcaaggcgcagggatatgaggactaaagggaagcaggcacattatgtgcgggatactttgtcgagcggaccctatatcaagtgaacaggaatagttcatggtcgttttccaagttcaagatagaactcttgataggcagctgaaatcttctgtctgaataagcatggtgaagcactgtgatgcgacggataccgtgataagttcttgctggccctcccttgacacatgtgcaagcatatgtagactgtcactctgcatatggcgataggtagatcgcatggtatataactcttcaatgtaacccgctagcgaactaaatctggatgccgcaatggaagcatagttattccagacttacaaggctagagaccacgaagaatgaagccccgaataaacagattatccacacaatgatagtcatgagttcttgatttgaatatattaggttctggaaattacctagtattacatattctgccatagcatctttgtgaccgaacgtttcccgtagaacagaaaaggaaaagaaaaataataaaaagaggtaaggaaagaggtaaagggaatcgaaagaggtaaaagaggtaaaagaggtaaaagaggtaaaagaggtaaaagaggtaaaagaggtaaaagaggtaaaagaggtaaaagaggtaaagaggacaataaagttacaaggcgggagaggagaaaaagatcaaacataattctgtaccaagaaatgaagtcttttcccaatccctataaatcaacccaccacgccttccaaggccatcaggcctcttcacgtgcaagcatcacatcagtagtaaccagaatgccttgatccgggctgccatcacgctcactcctcccgggcgtggtagaaggcggattcgtatttccttcgccagattcgataatatactcctggctctcgcccgacgagcccttgcgcttcctgcgctccaggcgcgacagttcatacggatgcgcacgtccgtctttgtcccgttccgtgtaatcggtaacggtctgcaaaacactatcgttcttcttactcctcgaagtgaacatcgtgcccgtattccgcgacttggacttcgaccttgacttcgacccgggtgtatctccataattgtaattacttaacccgttagacgacccgtaagaccggaagaacccaatcctcgtcagaagcggctttatccccggagcgcagacaataatcgcagagacgagagcctcgcgggaggcccaaccaagggcgatcgagagctcgtcaatatccgtgacggagtagtaagcgcggagaatggcggcgatcatgacgaagatgccggaggagaaaagcgcgcagagtacgatcttttgtgagagcgcgattcgggcggcgaggacaagcggtattggaacggccatgatggctatgtctgttctgttggcaaaaatgagtgaattgcccgggccagatggtgtagattgtgggttggggccttgctgatgttggatgttggtgtctgacatacacaatactgagacattcgatcacgatatagttgttaggacggatggtgcagttatcttattttttctgtcagtctttctgtgctcttgtctgtttgattccaagcttgggacgtaccgccagcatagggcttgacctgccagctcctgctaacaggcaagcaaatgaagaggtggaagaacaacgaggcaaagaaggtggcgatagagccgataccgactccgattaataagcgatggtgccagagacccattctgcggcttggtcagagtttcctggcctttccctctacggcatgcaggctagtggaactcacgtcaatcgactgtagaggaaaataaggacacctttgaacgaccacaccaagaagatgtaggaaagccaggcaatgaaggcatagatagagccctcgcgcaagtcctcgacctggtcatccggcacctcgagggcagtctgttcgttcaagccgatgttggatccgtagacatctataattcatcaaatctattagcgagagtaggttatggcaaacagagtagaaggcgaaacgcatacctgtgcaaagatacagaaaaaccgtgtggaaggtccagaatatctgaccggtcaattctcaccatcgtcgatacgtgtatgcttggaaggctcaccgtgacaaagccaaggcataagtcgtcccagtaaaagttctgcttccccagggtccagcgagcatagagacgaacagcaatgatgaccaggccaactgcccactcaacgaagagttcggtcgtgctgctgtagcccatactggatagggaacctggcacagaaattgacgaaacggtctaagagtgagagcatgaaccctgcagggtgagggctatatacacatcgtaaagttgcagaaccgtggtttgatcaaagaagcgggtcaagttgtcccaaaagcacggttacgaacgcttcgtggagaactgaaacattgaagatctttggccattgctgcacacatggcaaaccccccttagcctcaccaccaggacgtacgtcgaattccacggccaagatcgaaggtctcttgtctaggtcaagggaattggataactatttctcatggggcccctcatgattgacccgtgctgtgacatagtggattgtttgtacgagaaaagcaggtgcaaaaagaggcccatactattaggttaaattaggcggagctctaaaccagggttctggaccggaactcagtaccgggtccctggactgctgcaagaccgtgcgtagcagggtcccaaggtaaaaaaggtcataaaataacggtccagctggtctacgcctgtacgagacccagcgaaatccccgctccaagaagagccaatagcaaaattatcttcttggcgggctaatcgtaatctctaagtcatcaggacgtctgaggggcggtggaaactggtggctcgtggaaagaaacgctgttgatcagtggtgggaacaaattgatatatactccactccagaagctttccggtgacagacgtcgcttccgtagccccgatcccgggtaggcgtgggagaccgacagggacattgaataagtaacagaaacatggctagaagcattcgtcgctggagaattgattttgctcttacagattcactcttggtttttttcagcgatcttccatctcatattgatgcttccgccgcgcactcgtgaagcttggcaataagttctgcggcgaatcctgcgctgaaccatgtacccaatccggggtactatcgagacagagtacgttccccgacgataatcaatttccgagcttcgaattggtggctgagtgtcggtcccactccctggagtttggcgtggcctttcctcatccagcaggctattcaacgagccccaaccccatctgtgccctttctctcgctatattctcccaattttttccggccggacaactcatccgtggaatgtgctaaactcttccacggggacaacagctggctcgggagcataacactcctatccaggtgcccagnccgctaagggcaanngggtctctaccaaaaccaaacacaagtccctg

SEQ ID NO: 15818 - DNA, 4793 bp, Emericella nidulans
aaaagcacatttaatgtggatggggtgctgtcctctctggtcgaaggtgccatgaaatggagcatatcaatctcgcaaaacagtaaggagcaaactggcgggtccctccccattgcacgttcctagatatctacgatacaaatatgttaaggaaagagcgactacaaagcataatgaaggaacgtgaggctaatgtaggtagttcatgtgacaggagcgggtgaggtgcctccgacgtcccaggagtggtgctcgccagacgagatttagatagtcaggagtgacccaagtctcggagacaggacgtatctggaggtttacggcgaggaatccttaggaggcatcaggcatgacttgctcctacgtaatgtagagttcgtctcaaagtaatatatggtatcaaattgagcagccggtcagatatcagtatccttgcgatcgctatatcgtacaggatgatcatttacaggtaatgacagcagcaaagaacgtcagcataacagacaaaggagattagcaagagaacaacttgtaggaaaagcctcataaccccagtgtcccattccatccgagtcccaaccgagcctcgagtaaagaaaacaaaacaccagataaaacaaacccatttccctctctatagatgctttcgttcctcggtcataatcgcacatgagggccacaaatgataatagaaagagaatcataacgccccatttggcgataataatcaaccgatcaacccagcctagcccgacccagactcctttccagcgcttaataccagacactgggagatgctaacatgatggtatactgaacgaaaccagaacaatgtatagaaagcaaaacatgggaaacaagacagtgagaaaccggggaaggggtgcgcgaaaacagggagacgaaacaaatgaaatacgattatcccaaggcatggccttggctgaacacgagggctcaaatgcgagtgtcatttcccgcaagcggccacttggctaagctggcgtagaccatgagttatcaccaagtctcggcctcagctcatagttctcgggttccgtgctcgccgggcgtcggatggtggaattcggaaaatacatatgagggggcacagaacctggatacggcggaccgcttggctcaggatatccaaagtcgggcgctgacactggagagtgcgaaggcgaaggccagccaaggctagacatgtggggacttccacctacactgttagggcgatggtccttggtggcaggtggctccagtggttggggaggcgcatatgtcgatggatgagaagtcatcgatggccgaggaagaggagcgctgctgtagctggagagagacggcgatgtggcggtgggagacgcacgagggctcgcctgttgaaagtccccccgaacatgagccgggatagagccattgcctaggtagtattcgcccgtagaacgaggaatagttagagggggaagttcaccacctggtgagattgggtgatgcgcgggagaaggcgtggagtggactgagccgtgaaccgagccatggtcagaaaacattccatccccaggcaccttcgccctttccttgttttgtctgaggttggcctcagtttccgcagcagcttcttcaatggtcccagtatgatgattttgatggcgtgtcaatgttgtgcggcgggtgaatgtcttttggcaattggcataagggcatttgtacggccgtttcccagagtgaatcctgcggtgtcttgctagggaggacgaatcgctaaatggctgtataccaacgttgtagttagtatagagaatcaccactgacactcggactgccataccttgccacatctttcacacatgtgaggcttctctccagtgtgcactcgagaatgcacagtcagagcggaacgttggatgaactgcttgccgcagccgggccagtcgcaagcatgaggacggatccctgagtgaatacgctctagaaaaaggttagagatcatcacgacgctagacggacgtgggcgtatcttaccatgtcttgccaaatcacttcgtcgagcaaatcctttcccgcatgttccgcagtggaaagtcttgggaggtggttccggtcgtccttggggcgcgcttatcgggactgaggctgcggaataacctgacggagcgtacggactctgcagcataggcagctgcgggttgggttgttgaaccgcataccgaatgtcttgattcatgttcgggggctgattcattggagcgtgaggggggtatgagaggacagactggttagccgcctcggaaacgttgggttcggatttcatcccaggggaaggcgaagtgttgagattggaagcctgcatgaactgttgctgatcgaactgggcgtctggcgcaaccattgccacagaagcttttctgtttaagatagttgtgatgtccatgacccggcccagctatttgctgaggagcggtagtcagggcaaatcaaatggtttcttggagatagtttgtgcgacgcgcaactgtgaacccctcggagttctttcacaggcttccagacgcgatggaaagacttgaacggttaaagggagatccgcttgggtagtcgcaaatctagcctaaaaacttaattagcggaccacttttgcgtctgtcgaattaaccggtgatgctgtcacgcagaaaggaagaaaagataacaaaaactaaaaactggctccggtgcaacggcgcaacagcagcaaagcacagagaaaaacgagtctactcacgttcaagtcgcgcaaccgtagctatggagatagataataaaatgtgatgtcggtgagccacaaatcgcccgcgttcgtagccaagagtagcggtccaccgagcaagtgcgcgcaggacacgaagctgagatgggataagcaaccagacaatagttcgagtcgtgaccgtctggaaactcgaaggttcagccccagagacgagttcctcaaggcgcaagagtgtctccgaaatactgggggtgagaccaagtgcgaacacgtcaatctcagccgttcacagcctaacgaagctcagccgctgtgtcaagtccgtcacttcttgggagtcacagtagaggcggtcggggtgcagtgacaagggaaaatgcgtgaaacgagcacggcgcgacaatgggcgaaccgttgcgacttctcaggctgtcaagtacgaggaggcgagtgactggctctcactgagaccggttcctggtagcgaagggcaagggcgacgttcggagatttggagatgatccttcgagaggttcggagcgcagaacgtggtccggagtgatagagctgtgtagtgcgacagggtgttagcacagtgctcaagcaaaagttctccgcccccaaagtccggggctgatggtatgatttttgaaggcgttgcaaagctagaagatgtcgcgtttcgataccgtctgacaacaacccataacacagccaagacaggttcagggtcagggaagggttcctcctgcgagcacccgacaaactgagacgaagaaatcccgcagagctggggcaagcacgagtcggagctgcgtcaccgccgggttgcggatacagatcatcgaaggaaacggtagagatagactcacagatggatgagaatggccgaaggttgaggagactggcaccaccgaggggcctgagggaagggaggagagagaagtagcgcgctggcaaggaagtaaatacaaagccaaaaaaagatgcgggaacctcgtgacttactgttcggatgcgtggattcaggatcagataataatgacagtataacaacaaaagtcaaggcttgagcctgggagataccagaatattaatagagagcggaaattgtcgcaggtttcaggcgctctcctccatcgactttggcttcatcttccccagtggatacacgacgatcgactgggccactcgttcttcgcttgactctaataatgaaacgggtcgagtctttactacagactagtcctacgagtatactccgtcgcagaccctgaataaactcatctgatattcaggagcgctcccgcttgcatctctgatgcaatcgatgcttcgatccagagacatgaacacatgaccctggccgtgatccatgcagccacgcaactgaaggcaagtctttgattctaatttccttttatcagtgcagtgcgttaacctctccatcgtgcgacaaggcgatcgttttgaacccaatcaagccggcagccccgaccattcgagcacctcgttcgatccattcgattaactttcggcgcacctcgacaaaaagcaattcttctggctaccaaggggccgttcggtcatactccacgaggcaggggagtcctcgatggtgaggcatattcccgcggacgctgtcataaaggaggtccctattaacggtgagattcgccgtctacagaacaacggcgtgaagctaatttccttctagaaagtttcgacctgggcaccgcgtggcacgttggactgcatggggaacccatcatcgctgcgacctacgtcagaccttcagggggtacgaacgagagtggatctctgcctgctccgtctgcactttacggccggtgcttgaagccagcctgacaggagccatccttgcctcactgggaccttagcccgtcgactattcctgctagtggaagatgatggaaggttgggagcctgccctcgtgaatcatctgtgacgggttttcgcttatgcatcgaggaaggatcggattcggaggagcctgctgtttccggcttcctgacg

SEQ ID NO: 15819 - DNA, 2309 bp, Emericella nidulans
atttaagataagttgttatcaccgaatatggtcaattgttcaacccgagtttaggcttgttatcccccgacctctcaatagatgtaaaaaagtgataaatctgtataattccttaataacgtatttttaccgttgcttttacactattctaggtcataacttggtaaaccgcagccttttctcatcatctatcttagaacttgcttttctccctgactttgtagagctaccttgctctggtagatttggagttcagaatagaatgctgggagcgaatttgtcccccggcgcccatcgaattcctatgtgctctacgtatcgttccggtccgtccaacccagatccgtacgtccaaataccaggcctttgcgagacatttacgcgactcgttactctcagggtaagccgaaattgcttaaatcacaattttaagtcgtctcaggcgacagtagacggttggcctggctggtgaacactgtagatttaccgcagtttaactctactagaggcgttacgtactgaatggccgtaattgtcagagggaatataccgagatttatatacctgtggttgtatagtaagaggctacataagtgatatataggaagtgagcatcacacttggagaactgcttgaattctgatttgtgtgcattctttacctattcacagcatatgataccacagcagcataaaatcttgttcctgaacggaaaatttgaacccgaagtttttcgtgaacaaattgaataccttcactggtaggcatctctgatcattctcttagcccactatgtagtggaatcactttttgactcaattatgacgtaacacgcctggatggtctagaggtatgattctcgcttcgggtgcgagaggtcccgcgttcgactcgcggttcaggccttttcattccttttttgtttcttagcccctccctgctcctctgtcatagacattaccaaggttgtcttctcggtctccgataatttagagagaatcacatcaagggccaggtgcagagggtctggacctgcagcttcgctgcaccgaaagtatcaagcaagctccaactgcactgccaactcatcctttgctgcattcttccacagctcgatcaccaatcgctccaggcgcacctgacctagcccgtgcggggagacacactgtcggcgatgtagggatggtaagtctttccccctaaatttacaaacctcaacctggatttcgagagaagaaaccataccaagcgaagatgacgcagtcgaactcaccccgtctatacaataaagtcgccatcgtgaccggcgcatcctcaggcctcggtcgagctatcgctacccgatacgctcgcgaaggggccaaagtcgtatgtgctgatgtatctccaacagcgcgatcgctcgaggagtccgatatcaccacacacgacttgatactgaaacacggtggagaagcgctcttcatccagactgatgtcggcgacgcggctcagatggagagtctcgtcaaagccacggtccagcactatggccgactggatatgtaagtatccactggacaaactaagctcgaattaagtgaacttgactgaacatcagggagccttgtcaacaatgccggcataagccttgaggcccgcaaaccggcagtgctgcatctcaccgacgaagaaacctgggatacgaccatgcgcgtcaacgcaaagtcggtgttcttgggatgcaagtatggtctcgcgcagatgctgcgacaggagccgcatccctcgggggatcgggggtggattgtcaacatctcctccattatggggatgattgtcggaccagaaaatcgtacgtcgcgcccgtttccgggttggattgcccactagtgagtgatgctgacgaaatgtgtactcagcttcctattgcgcatccaaaggcgccgtcagccaactaacccgacagatcgccctggattacgcgcctcaccggatctatgcaaatgctctctgtcccggatgtaagttctacattttcaatactaccttgtaatgctgaagataagctgaacgcgaggtagatacacaaactgcgatattcaaagagacgacaacccacttaacgccgtgggaggatttgaatcggcgacatccactgaaggggccgggattgccggatgatgtggctaggatggctgttgttctggcaagtgaggacgcaagctgggttactggggtctgtttgccggtagacgggggatatactactcgctagattcgaccctttctcgtacggcaatcatagcgcgtatagacctgagacacac

SEQ ID NO: 15820 - DNA, 412 bp, Emericella nidulans
cgcttaggctgctgggtaatcctccaatcctccatcctcacaaactgcgcctaaaactggctcgttgcgccctagaccgttcgcctgtggggccaagatctcaagtaagctagcagtcaagctaatgccaggggccaatttttggcaggcgtgagaggtctagatgctcgcttagcgagcgctgggttccgaataaacggaaattcaggacggaagacgcccgctgtggagctggagtgccagagctgggttgcaatgggactggggcttggagcaatattgttaccccgtaatggtgggctttgtcagcgttggataggatggtctaaatccagtatttctggcattaactgggctcgctctatcttgtccaggtagaccaaactggttactgtagagcccacggtaaacg

SEQ ID NO: 15821 - DNA, 421 bp, Emericella nidulans
ctggacccaccaagagatggacggtacagttatacatacctatgcaacgcacagcgctttttttgggcccagaggatgctctaactgctgggctctaaagcgacggctgtccacgaggttgacggacggggagctccctcagacgaccctgacctggaccaaaggattcagtggcatgttgaacgaacaacagctccgcctggatcggtgacattaggccctgatgaaatactaagttggagataatgactgtttctggcatcaggaccagaatatgcggatggatcatgacccggcttgaaagcatttgcggaggcctatcgaaagcagtgtcaacgtcgtacttagagactggggggccgatggaaagcaacctttaatagatccggaaacgggatatcggtgatttatggagcggtga

SEQ ID NO: 15822 - DNA, 462 bp, Emericella nidulans
  unsure (1)..(462): unsure at all n locations
gccctaaccattatgatccgccggttgaggaccttttctagggcgctgcctccattttgatggagagtgcatacggacatcggacccccaaggcagcgtcgcgaattttcactcgatttatatttatttgattattttattttattatattattccttatttcatggttgattgttatccctattctgtccaccccttttgttgttgccccgggagcgtcccaatcacttctctggtcctttcccctgccctttcgcgggtgtatggtgttcaattcttctcgtcctcggtccgctcaatccccttgtcttatctagctattctggggataaggtggccctccccttctccaagtggttggggggaagttcatttcctttactttttcccttactgtgantttttatgattgcataaatggcctgtgaaagataccgggggacataagtctgggatgggtat

SEQ ID NO: 15823 - DNA, 3984 bp, Emericella nidulans
attaagaatattattcaaccagcacgctcaaagctgatatttttgatggccccgattggtcaagccaagtatattattgcagatgcttgatgacagtggtgaaacgcaatatgtaagaccctttggagacgccagctcaagtcggttccccagatcaggcccgcgtgcgtggctggagccgatgtttccccaaacagtctagcgctggttagatccaaatgccgcctaaacagctggaagaagtcactacacagtcggtcaattcgtcgaccggaatatccatccttagccaaatcgaccagtacatttttttgaacgcatatagggcagtctaaatatattttacaacggtggcgctggaccggcacaatgccacgcgcaggcatgcagcttaagctttatctccgattgtacaaggctaattatgacaggccccgcttgtaagacctgccgagagaagtgtcggaaatgtgatcgtggtcgtcccagctgccagcggtgtatctccaagggtctcgtatgccgcggctacccagatcagttccggttttgtgggatagcaagtcgtggaaaatggaaggatgctcgcattccagcactggacgaggaaattagcccacaaaggcaggagaccttgataaaaaaccagataaaacagtctacaagcgggtcatctacacccccagaaccgcggaggtccaggcgtctggcgatcgactcgatgctggtgaagcatgcggacgaggtcgacgatattaccggtcttctaagcttgacacagaccaagacgcttctacaacattgtatgtgaggaaacgcaaacggtgattctctgctaacagatcttaagatgacacgttcatctgcccgcaccagctggctgaaattggcgaccacaaagataacccatacagagcttatattctacccctagcgaagaagcagattggcctgttgtatgcgcttctgggattttccgcagttcacctcggaaagttgacaggaaacagagacatgcatgagactacggctgtcgagtacaggttaaaggcgatccgggccctgggggagttgatctacaaaagtcagaccacgtccctatcgaaggaggagcaggacactgttttcgctacgatccagatcttgctactgcatgatgtaagtacgggttgatgtggatgccagcgactgacgtggatagattgcggaaactggaatctcagagcacggtgttcatattaccggtgcgatgtctgtttgtaagaccatattgctagcagacgggtttaatggccaacgacagagagcagtgttcttcataggaaacttggcatggtatgtgttacctagtatttgatatacttcgctaacaatggcaggttggatataattcgagcttttgccgggacacggcggctttgcttcacgcaagagatccgtgagatggttgctagcgctgggggacacagattcgagctggtcaatggttgcccgcgagagatatttctcatcattggacgagcactggaaaaagcaaagcagtacaaaaacgactggacgaccgacgaagacttacgctctacgctcctcggtgcaaaccaagaactatactcatgggatccgagaagcaagacatacccaagctcagatgctcgctgggtaaacgtgggcatcgcgttccagtttgcttgtatactgcacgtccaccggctgctagatccactgcggccggcaaacagtcctgagatacaagaagccgtgctgaagattctggacgcaacggcggatgtccctgcggactgcaccttgattgagctgctgatcttcccgcttttcatggcaggggctgattctctctcccgacattcgcagtactatgttttggcgaggctccgcgagatcgagcggcggtccgagattcgtaatccagttccggctgatttactggggaaagtctgggctgctcgatctgcaaaggatgggaacgagaacatttcctggcgggattttgtaagtatcctcctgctgctgtgtttactcgactgacaagtctagacatgctttcccgaactgacgcgacagcatgattacctcataatatgaagcaagatcgtgcttaatttacgcctgcaattcttatatcacggctggactaagacaagatccacccaacctccgcccgaatggtgaagagaataggttaggagtgccgcgaatttcctaaataggaagtatccccatccggtggggatgacgcggggctattgatccctgaccatatacccaggcctgtggcagacaaacaaataagtagcgctggacgctgagcaatgggtcaaatagagcaggctctgaaccgagaaatctcgcaatctcatccaccgactaccgacgatggccgcctctaaagaatggcagaagatgctcaagggcgagctatactgggcatgggacgccgacctgcaggctaatcgggatcgctgtagggaggcgtgcaagaggtttaatgaagccggccctgtctcccgacgacgtcgagcagcgctctggagagagtgagtgcggttcacccatgcctatgtctaatcctaatcattaacagtataatcggcgacactcgcccacttccacctgtcaaacaggacccagcagcagacgagaagcaattcgacgagacagaccccattgttgatcctccattctccgtagaccacgggctcaatctcaaagtcggaaagggcaccttcatcaatttcgatacgacaattctcgatacatgcctcgttacaattggagagcgcgtactttttggcccgcatgttcgcatatacggggccacgcacccgatcgatccggctgtgcgtcggggcctagaggggcctgaggctggaaaagaggtgcatatcgaggatgatgtgtggattggaggcagtgtgattgtacttgccggggtgaggatcggacgagggagtacggttggggcagggtccgttgttacgaaggtgactacctagctattcctcgatctatgctccgttgcccggcccactgatcactgactggtgcggtttaggatgtcccacccttccatttcgttgccggaaacccggcgagggttatccgcaagattgagacgagtatggatccagtacaagctacggagggttctgagacggtttagatggtgatcatgggtcttttagtcggatcagttagagcgtcccgtcgaggaggatacggaaataggttggactctgtgctctgaatagtgggtcggcccgccctgtccatacagcgaagaattgagccgaggttgttatagaacgatcgatcttggcggcttccagtcttttcacagccagatgtgctacctacgctagagctggtgcgcctttgcaatatgtcatctatgaaatgcgcttgagctcaatgtacttctgatatttatccgaggcatccgaggattccatgtactcggttgttgtaggtaaattggtacggccttagctacctcatcgatatgaagcagtaggaacctcggcaccccgctctcaggattaatccgctgtaagtgattggcccagaaataatgtctggggtatttgaaacgattttcactaaagatttttcgaggtctagccgctgcctagggtatacttaaatcccggaagcccagcctcacttgtgttactgtggactctcgctcatcccacacctctttttcccacaaaccatctaatcaaacaactatgtctaagacattcacgcgcgacgaatttgccaaacacaacaccgaggattcccttttggtgcatcatcgaccaccgtgtctatgacctaaccgacttttttcacgcacatcccggtggaagcgttttcctgtcccagatagctcggcaaagactcaacaaccgacttttacaaccttcatcggtatgaagttttgacaaagcacccggactcgctttgctcggaaccatcgcg

SEQ ID NO: 15824 - DNA, 2097 bp, Emericella nidulans
attccagtgctggccgtttccgtactcgtcatgtcgcacagccgcttaattgggctctttcgttcatcatgatacgtgtgaagtcgattggttccaaggatgaacatgttcgatcgggatataagcttatcttttacctaggtgggtagctcgcgcgctgcgtcagttagtagtcaagatcttcggtccacatagatcaaacatgttaatagtaatacaacactatcagaatattaaaacattattaaaagagcgtatttttcagccccttattagttgaatcattagaacggtgctcataaacacccatacgtttgacaaagtcctcccacttcctgctaagccacctcttcaccagaaatcaccacaaccttagcagctttagaatatcataccgcgagaagaaaaaccgattccatttgccgaaaatgtctgcaggctcgatttagtagtgacacttgattcatgagggggacttacacataggtatgctcaaagcgcagatagccacctgaatacttgaaatcgccatgaacggctttttgacatacgcttccacaagccagtcataagtataaaaggtcaagacaaagctgaagatgtttttgaatatcaacatgcacgtaaaggcctcgatgacaatgttccctgttaccggttagtatgggctcctttccgccgacttggatacttgcggtgagcatcgacaatatacaaggcgctggcgacagcacccatcaccatcccgcttaccacgcagccgaaaaacacgtcgggtggcagccagccgtagtgtgcggcatcattggccgtgattccgaaaccgtacataccgatgccgcagaagatcaattggaagatcacaaggaggatacgaaattcgggttcgtatctccccttgttgaacttgatcatgatattgttcataaaatcggacaacagccctgacaacacgagtcccaccatggcaccaatgaaggcacctgcgtacatgtatccagtcttatcctcttcgaaccaaagcggaccactcataaatatagcagccaaagtgacgccgatgaataccgtccatccaatgataacaccttgtatcaagcaagcctgtcaagtcagaacgagcattcttcgatgcggtgacggtcttacccagagtactgcgggatggaagaacagtgggaatggacgcagcagaagtttccaccaatgttcgtcggtctttcttccgttgaaaagtttcagggtttgaacataggagaccttagtaagtatactcctttgcgtcggcggctcttggctagcaacgtctagtgaagactccccattgctagctgatgactgctttggctctcgcgaatcggcctcatcctgggcttttcgaaattcggcgtgctggcggctctctgttctgtcacggtcctgaaaatccagttctaagtaatttgggcgtctaaaggctgtctctggtaccaagaatatcgtgagcggcaaggctgccgctgtgaaaatagcaaggagataaaatgtccatttccaacctaaagtttttgtgatcttacccgctgcgactggtgtgaggaatgcagctccgaataccgcaacgttggataaggccattcttttgccccgttgatgcacgtaaaacaagtcatcgacaacagcatttgttagagcttcgaacggagccagagcaacgccctgaaagatacgagcccagagaagactctggtagttcaacccactggctccagcccatacgcagctcaccaccatgagtgtatgtccaagcacaaagaggtggcgcttgccccatactctggcagtcggaacgataaggatccccgcaattccagttccgcagaggtggtatcctgtaaggagggcgatggacatgaagctttttctgtagtatctcgagagcgtgacagttcctgccgccattacggaacttgttgtagcgcagagaactgcaacgagggagagagcaaaaatagtcagatcgcgcttccataacggccaattctatgcagcctcttggttagtgatagtagctcaatggctgcgtgcaagtcatccaacgtaccagtggatcgtttg

SEQ ID NO: 15825 - DNA, 2932 bp, Emericella nidulans
  unsure (1)..(2932): unsure at all n locations
cttatacctgaacacctgatccttcgaacgatgcgtgatagagcggatggaggtgatcatagcagcggtgccgacagcaagaacctcatcaaaaaattccagctcgtcgtacgggatctattcaaataccaatcagcccctgagcctgtgatatgtgggaaagattccatgtaaaggaaacaactcaccggcctaacctcaaccctccatcccagagacctcgccacctccacaacactagtgcttgtcacactcttgataatgcactggctgtttggcacaaccagcgtgtaccctttttcacccccggattcagtatacttgattcccacaaaccctgacgtactaaattcgtcaatctcgcccctggtcttactatccaagtgcagcgtgatcccaaacccctccttcctcgccttatcactccactttaacactggagcataattcccgcctaccttgacgttgcccacgcccagcggggccgcgcggtccagctcctccagcaccactgcgtcaacgggtaaggtgccatggtatgcgcaaaagggcaaagcgtatacgacgaacttatactgcggcccagcggcaacgggcatccaaccgccggagccgaaagcgagagggcggatgtacatggctgcctcgctggcgtgcgggggcacaaactcgctgtttttggcaacggcgagattgacggaggcccagaagagtgactccggaatggagggaatagaaacagcatcacaagaacgttgcatgcggagggcgtgatcagtgggccggaagatttgaatctggccgttggggtcacgataggctggcatggcacaattagaagacggggatgatgagtatggacaaggaggtgacatacctttcatcccctcaaacacctgctgtccgtagttgagcccgggtgctagaccgtggactttgaggtaatggtcttgcacgaagacgggttcggaccaggttcctgtctggtagttgaagtcgctttcgacatggccgtttactagtaggtcttgttagcatggaaataacaagatcgcagacgcgagaggattaccatctaagaaggagacgccgactttttcccattctgcccgttattagcattcattactcatgcagcaaccatcagagccaggatccatcaacgcataccaatgtcgctacgaggctcggcaggaaaggtggacatgttgacggtagctaaacaggctgggtgcaaacgttaaagattgaaggtgtgacaattctacactgagtgaccccgacaagcataagcataacttttatagccaagtcttcgtcgcgagagaacgagccattgacgctcgtgaagttcgtagctcgcaagctgaacatgcttgcttgcatgctaactttgcaatccttggaaccccttctccaagcgagtatgcatcagatcattgggctgttgggggccgtttgttctgatttgatttttgatttatttttttttttcccagtagatccttaaaggaaatgagatccacctggtaactactgcttcggtggatataattgtgtaatgtcatagatattatacataccgtattacagacggctgtatctgctgtaatacccactcgatctatcttactttcagcctcaaacatatcgagtatgtgagcagctgctggcgaacaccagtctcaccccagccacggcaaattgtctagtttctcatctctgggggccgtaatctatataaatccacagctgggcgcgagggcacacccaccagccagtaggacacagcaatagcaaccacaagcagcataccacgcgctcagtcacgatgatcaatcaaacggccatgttgctcactcgctcactacgtcccagatccgcctttgttggcgctggccttggctacccgcgtcgattcctcacaactgttgagtctccactgcacgaattgtaatcatactccgcaccctttctggtccaacgtcattgcctgccgcattgcctgcctcagtgctgacagatgttgtaactatagctttgtcgtcatattcaacaagagaaacgccaaagagtcagatctagcgccagcgccccagactatcaagttcaaagagcaagatgtcatcctcaccttcgcaggcgacatgatggcctccgccgcgccggcgacggattcagccccggaaaggaccctaggagcctgttttgcgtgccaggcacccagcgagcagagagtgttgcaggcgattcgcgcccacgagaacaccgccaaggttagtaagaagctagcacgagtcagggggtgggggctaatatgcacaatttcatgcgtaggggctgtgggatattgagtcggtagagatttctgcgttggagacagttcacacgggagattatgagagggccagggagtaaagagagtgagaattggattgacttgcgagtatccgttaacttcggcgctgtggattaaatgtagtgtattgtgaagtagtggtctccgatgcatatgcattgatacagttgtaagctggatcagtcaatgtttgtacgtacattctgcccgagcaggcctgccatactcattccctcccatgtcagaaatcattatacctccccagcacccctgattccccaaaacccgtcatcaaaggcaacacctccaacccggaaaacttgcctgcagtcaccaaccccttctgtcgtgcttcctcaaattgctctttgccccagctatcaacagatgccttttctgccttctctccggccacggcttcctctgccagtggaaacaagccacactcttgcaaaacccgctcgggcttcaccgtaatcctcccttccttgaagacataccttgccatacaagacgccaacacaacctttgcatttaccttgggatccgnatagtgagtcgtattatgcggcc

SEQ ID NO: 15826 - DNA, 2179 bp, Emericella nidulans
ccgatgaagacgaggactgagtttattctatagacccgatcgtaatcatttccagctcaacaatcggctgtcaataagaatacggtcttctgactgagtactcgcagttacttcagttttatttctcacccctagttcagatgcctactttgactgaggaaacatttgctgggcaagctcttcaatgaacatagtacatttccatatctctaacgttaagaaaacaaaactgatcggcgactttcctgagccgcccagaaatcatcatacgacctccgtctcgcattgcccccattagctttcgccttcttcgtcgagcccggcacgtcgagctcccacttccttttcctccagcagtcgcactgaactcctgttttctccagttccgtaatatagtcacgagcaataagaagctcagcgtgatcctttccccactgcatttctaaccatgtaatacactctcgggcatccataaggtcagatttgtctctcctccactgctctttcacctcctcaatgccctgggttgccatagtcagcttatccctgtatattctacctgcaacttgcaggtccttgatcctctctttcagccgtgcgacttcttttttcgcccgctcgagctcgtgtgcctgctggaatatcctgagttcagtttcccagaccatgctcctctgttctctatcaatagaagaaacgatagacgcgcaacggccgtcaatgtacccctcaatacctacctctttctcggaccagaagggaccggtcccttcaatgcatacatcttcctctgcggactcctcccaggttatcgacccgggatttggctctgattcatagtcgagcatctcgtaccaatatagagaccgcagactcataataggaacggagtgactacgacctttgggtttgccttgcacggtggctttgctctgctcggcttttactgcggcaggagtctgggctcgcggactagtgggcagaggaagggatctgtatagtgccatacctgtcgtaggttcgggtccattcagcggctgaggctcaggtagaggataggagatagtccgaacacggttcgtcggcaggtgccaggaattatcgactccgtattcggcgtagaggcatgctagtcgttccccgtcttcatggtcttggtttccatcgtgattcaaactagaggatcggtttggtcctgttggaatgtgttcattccctgctgggtcgtactggccgtccgctgtatgcttgacgacagccaatgcttgatctgtggactcctgatcctctgggctgtggtgagtaaaggttggcgaaggggggaggaactgcttgttgagctgcgcgatggtatgctgtagcgcatctacgtgattgacaaactggcataatgtctgggccatggctgctcggtgcattcccttttagctgtggaagaatagttttgttctcgttgggatgttcgcttgggtgaaccaagttgtactgacttcgacggtatttatatttgtcgactggcaatgagtacgacttggtatcaatgatcgaataggcttttcatttttgcacctgaaagggcatgcttagttttagagacattaatctcctttcttttctcattatcctacggttgaaaggtgaatgccttgtatacaggcatgaccgttgcgctttggcccttgtaccctcaatcctgcactgcccagagcaggcattatgcaccagacaggaccagtcattgttctgtggagacatagcttgtgccaatatcttgtatggtctcgattcaatcgtgatgttctaggcccatttgttctgagccacataatacatctataatcactgcctcgttcggatagccatatctgccccagtctcatcaacccgcgggcagactccacggctttctttctttctttttttttttttttacttttcttttcctcaaggactgcgtcgccttcaactgttttaagcttctcagccatactttccccagagcatcaatagtcaaaacttggggtgcctacatgtattcaccaagtgattctatccccagtccgctcgagcaagctcgaatacgctggctaccttgcgctatcctttgaccccgcgctataagcacccctttaagtacatgggctatatgcaaaactactggatgcggagagtaggacag

SEQ ID NO: 15827 - DNA, 426 bp, Emericella nidulans
aaatagtagcgtgatggaatttctccctaaaggatggcgtaagcttgcaggagtcggtcagcttgtgtaccaatggggagctaggtggtcaggaatgagacatgtaggctcgtggcatgacccggatggggaaatatgtcagtttcccgatactgataggcgatgtatgtccgtctataagaacggtaggatcggatacaatgagacttattttggcgagtgggcaaaaagtgttttgggtaagtttaaagaaagaaagatggcaaatgttgtaggacgcaaacacagttatggttcgctagatggatgttggtgttgaaataacagagtatgtatccaactgctctttaatgaaaaaaaaaagctaaaggtaaaatatgaaaagaaaaaaaaaatgttaaatttctagttcaagatccaaaaatt

SEQ ID NO: 15828 - DNA, 3609 bp, Emericella nidulans
atggaaaggacatgacgattcggatgccagatgtcaataggcgatcacccgtgcttcaaagcggatcccagaacaagcagggccatgatacgcttgacgcaaatgttgaggaaagcatcataggtcaatatgatatgccgcacctcttcctcgctcgcctattgcattgtaaacccaccgagagccaacctcgtattaaccctgggtttcccacccatacttaccctgcattcaacagggtaacttgttttcgtcccaagttcaaggtttcgtgctagtaggctatgtctttgtagagttttagacggtgaggttcactcaactcatctgcgcccaagggagtccctatggcaatggaattgactccagaattgatctcatccaggccgacagagagcaacggcgctagcaaacggaaatgtgtggtggtttcaactgcaatgtcacatccgtccagcagtttgcagatttgaatactggtgaacgagcttccaggtgtcagtattagaaggtccagagcccctcaccctcataatacatgctccaagcactaaaagcttgcagagttggcgttgctctgtatcaaacgagagcgcacaatggtctgacgaaaattcagtatagcatatacaagccatcaagtccggtcgtaatagtccgtttgtctgtcactcagccacactatccattccggcgcttcgactggacccgtactaaagagcgggtcatagatgaagccgtcaaggctccaatatacctattatcggaccgggaaaaaggggaaaccccgcggtacatttcatgctaacggcgcgaatcgttgtctgcggcgactcatgaggatatatggttcgatatgatccatgagatcagaagccagtccatcgcctagttggtgacagaatttatgttttcctcaatagcggcaagccacatatccgaggatgccacatctcaaagtcctaacagccgtaattaacaacagcgaagctagttgacatgtgtctgaaactgcatgtgagacttgcggtgaccggcaggacgaaatcccatcagctctgttgtgcttaatgtctccagtttcgaaatgacccattctgcgtagctccatcctcctttattgaaagccgtctgaccgctcttgcaaggtttagagataacactgccagatgttcagacgaagcctggagatgcagacgtcgctgtttggccgctctcggatgttgactgattcacaaatcgacttttcctgcggggatttccggattcaactccttcatatctgccgaagtcattctaggaaatatacaccccaggggtagaagtcgccgtaagggcccaatgcatggattggcaaattgacgtacctggtaggcaaccttgtacgagctaggagcctaggacgcgtgtaagacatgtgtaagacgtttacagcggtggtcgtaaattacttccccctgttgtggacaaggcaaaacctcacattatgactgctcaattgctactcggaataggagagcaatggtcataatcaacgccgccgttttcatttttatttttctggttttgctttgctttttaatttatgtataagtggtggattggccgggttgaatagccgagttgcagaatctcgcactgcctcgaattgcaatttaccgatcctgggcattcaatcactaagcctacaacatcattaaccggcttggtgaggccagattccggttctggtactttattgtgagcgggctagtcccgctgccgtctgctgtctgccgtctcgtcgtctggccgacattgacatgctttttatctcctcaaccattgtgtatttacataaatctctgatcgaataggcctggcctaccacttaagctgttcggggcagctacctgaagcggagagtcatgcgatctacaaattgtactatcgaaagaccgcggcacgccgggcccgtggcgccacccggtttatacgccggtattctagtttgtatgcttctacttcgatctaattcgactgctttatgcatagtaagtatatctactctgttgcctcgttgaatctgatcatgccatatgcagaatgagatcaaacccttaagaatctaaaggattagctgcctccttgcactcgcattggtggtgtcaattacggaatacgtgccatgcaggcgctcttgtctccacccagcatgaactcgacgttagtctgtaacggttcattacatttgtataattcaagataccaagcagagtattggccattgaataaaggtcaagggtgtattgatgtttatctgtggccaatacgtaaaatatgtatttttgttaccgagttgcggcgaaaactatatatttttgcttatagcggccgaaaacataaatattctaccattactgcttctgcccgggcggactggggatagatatctcccgccatgccggagaccaggagactgaaaccaagcaagactttacttcctggaaacccgagtggctatgactgtcggcaaggccgtaatgacatgcggaactcatggcaagtactagaagctgccgtctttagggctccagacgacgtccccatagatggcaaagacgattccagacccttttgcgtaccgacggaaacacttttgagcaatccgaccccagttgaagagccctggattcacgtgagatcgagccttgggagtcttctggttaaagtttgacatcaccacgaagagccatggcttcaacagataaccgaggcgcgcaactcgaccgcgatcagaatgctgatccaaatacggcaaaccgactaaacgctctgtatacaaaacatattagttagaaactcatgaaagtatgaaaacggtaacttgcggtgaacgaccagactcgagataagttctgcaggatttccccgcagatctttgatcttgcgtgcgagtaagcaggatcagattccaaagccgttgtggcggatatactccgtatgtactccatatgtacccatatgtactccgtatgcaccccgtatgcacatcagggcgatagaccatctgatggaacacgtgcttggcgatgagatcaccgatgtcgagactgcagcgaggataatccgtccatcacaatggacttgtcttattgggtttaaaatagagactaacttctctgctgataataatagcaggggaagacgtcagcttgcttggaaatcgtggttgttgatccgtgccgtttgtgatgtcattggcgttggtgcttaaatacatcgcatatgacagcgggagcaagatctagacaagactacctccctacgcagcctaccctattgattgttatcggttgacgcggcaatacggagattaatccggacatttttttaatctgaatccataattaagtcttcacgcaaaatgcctgccatctacgaacgcatcgagaacgacctcatcgtccaggaacgcacgctctggagcgcactaacgagtgcctcacccacggatgaactcgaacggctttgccacgagaaggccgtcctcctgtttcccaagagggatatcaccacggtcgaaaccctgggcgagacctttcgcaagggaatccacaagacgatagt

SEQ ID NO: 15829 - DNA, 3521 bp, Emericella nidulans
caaaaaaaaaaaaattgttactccttttgaagaaagattggcccaaccccccaaaatatatcctaaggcgtaaggtgtatacaaaaacacccccccgttttctaaaaaagaagaatttccctaatttccgttgaaaaaaagaacccggacccgggttggtgataaaaaaaaccccccaatttaagcctggcaaaaagcaaaaatttgcagcctcataacgccaaaaggtttcacgcctgaagacccaaatactcccccaaaaaccctggcaaaccagagccaagggcctgacgccaaggaccggaaaatcaaaaggaactttacccattaaggttaagcaggccagggcctcaaaaacttgaacgctctgcgcaatgagcgcaccaagctccacgccgagcaccaagccaagtggactgccatccgtgaggtcaaggccaactattcaagggctcgcaaggcttacaaggagtacaaggatgaagcttggagaatccgtcgggagaagcaaaaggcccagcgtgaggctttcgagcgggagaagaagaggaagattgccgacaagaagctggaggaggcctctcgccctgcttacaccgacgagatcctcgtcgcgcagggtcttatccgtcactttaacccctcttacgactttgctgctcttggtcttagcgacaagaaggaccaagcctccggcttccgtgccgaagttggccgtaccgtggatgactctggcatgaagggcatgaaggtcctcaagaaggaggaagacgactacttcgtcggaaccggtggaaagaagagcaagaagggcaagaagggcagcgccaacggcagccctgcgccgtccaaccttgccgagactaagttcaatatgaacgtcggtatcatcgaggactttgccaaggtcaagatcgatcctcccatgaaccagtccgacgttccggctgtggttgagaagctcgcggccaagatcaccgaatggaagaaggaccaggccgccaagactcaagaggtaggctcgcttcactcaattactaactcatgaatgctaacgtaagtagaatatcaacaaagccaaggaagagattgcccgccttgacgcggaagagagcacggccaccgagaccaatggcaaggccagcgagaaggatgcgactgctgaggtggccgatgacctcaacaaggcctcactggaggagaaggcctaaaccgttgctgatagaactgcatacataagctttgcatgagcggatacctcctcttgttacgttaacttgcggatcctccaaaagtctagcattcctacaacttttccccctgcgcttatcgtcatccaccatacaccatccatccgccatctctcctacctatcatcttcctcatttctactgtgcccttttgttatgatgatgctctcccggcattggttcttcctgttattatattcctctttgtaattgacctcacctctttctctcctcggaagagaaatcgtgcaggaagcgaggctttgagcgagttgtacgttttgatctgagttggaaacaagaagcggttgtatttcatcttcgaaatatcatattgccgaaatccgaaatgcaggattcggagtcaaccatgtgaccctaacttaggttggctacagtggctgtgcaaaaaggaggcgtctcgactggatcagccaccctgtctgactcgtaagcgccgcatcaattccagtgcttcactgtcggaaaagatgtagatagaaattaatgcttccctcaataccaatttcgacaagtgaatagcgttgcctaacctgaaccgtggcgccaagtccctgctagtagtgtacgaacgagctgtttttcactttaacgctgctatctcggctcgttctctcttcttccatccctcccctccccagtctttcatacactttccatcacgtagtccgtctctatcgataatacattaattcaaacatctctgttggccttctctactacgtccgacagcgctagcaggataacccggctcaaatcggaactcggcgccaatctcaccccttgcgcttcgcatctccgccactcccaacaactcttcaactccatctcactcgctcgaacccatccacaccactgtcgaaaatgtcctacaacaaacctgtacgtctgcgttgccgtatacagtatccaaaacgaagcccactcactaacattcttctcacactaggacggcccacctccttcctacccagctccggtccacgacccctacgcccacccgactcctccaccgggcgctggacaagactactacggtgcttctccccctccgcaacaatatggccaaggccaaccaccatacgggtacccgacgcctccgccgcagggatatccgccgcagcaacagccgatgtactatccgccgaatggcggatacccaccgcagcaaggttattatgcggaggagcagcgcgggggcggtggcgggagtgggatatgtgccgggttactggcgggtttggcgtgctgttgctgcttggatatccttttctaaaccgcggatgatggtgtgcaatggcgggggccgaactcggtgcgatactacctcctgatggtgcgaccttcgctcgactgggcctgccgcgcgaagtttttttcgttcgcccgcttgggttctttgtattcatctcttttatgtttggcgcatggctgggattgattctactgggtatacatgatgtttcgctgggtttcagtctgagaagtcagtttgcgggtcaggagccaatatcgatatctttgcatttttaaatctttctgcagctccgtccctagctcaaggtcgccctgtagctgggtgaggtcctcaattcatctcattatcattcacaatcataaatggtatcatatcgtaacatccataacaacctgggcatcgcatcgcatggcgtcgtaaatcagtcgcactttcccgtccagaaaaaaaaagcactttaccacacaattgaatcaagccaaacacaacattcaacgagatagacaatcaagacctcccactaaactcgctccctcccctcctataccgatcattccgactcctcgtctcactactacttctcgatcgactccggtatctcgaactaggtggcgggtccaccacgctctcctcttcgataacctccaccacacctccctcatcgccaaggccatgagaatgcgaatgactcgtcaaatcctcctcaacaataatctcatccgcccgtcttctccgtgaacccagacctgatctcggccccggtccgcgtcgattccgaaaccctacatccacgatttcagagggtgtggtagaggtagcggcgatcgtggacggactgaagcgtcggccagatgtgagagagaggtagagcaggtagaggagtaataagaagccggcgactgcccccagggtcccgccgactacgacgcctgggttaggtgggtaagttgtccggccgtaggtcgagggaatggagatggcgctgttgcgta

SEQ ID NO: 15830 - DNA, 1107 bp, Emericella nidulans
aaatatcttgtccttcctcacggcggaatatctaaatgtttcatcgacgagcttgacacaggcttctcagcaaccagcggataagttccttggtcccggtctagatccgacaatcgtccaaggctacgagatagtaaagtgcgtctcgcttattttcatttagtgtggcctgacctctcatactaggtttttgatctgtgtttatttacttgcttcatctgtattttttccgctttttttttgtcttcctgttttgtttgtacttctacatttgatcacggctgtttgtacttttgtggtctcgctcgccgtaatggctttcactatgtgatttagctctgcatgttgtcttttatttgtaatgttttttatttttttccatcagttttggttagtggttgtgattgatggttggtcttgtttgatactctttatcttagttcttcttttattcttgtttcttgtttctatttttgattttcttatgtttttatgtatcttttttttatttaccttcgattcttgtctgatgttacttttatatttctcttataatctttacgtcttggtttagttttattttagcttgttcttataatatttgggtttttgtatttctctatgtcttcttacgttacgttcttgtgttatagttttttgtgattatttttttgtttagattttttcttgtctcagtgtttttacctttagttgtctccttatatcgtattcttttatttcgtttttccttgattctatcttcactttctgattgttatactttcttttgaatgtttattatttctattattgtaatcatctacataaatccttttaatcctatttctgcgcttgcttcttttgtctttatttcttttcttgttattcttactttatttgtcttttattcttattttttctctatattttcttcattggacgctttattctttttccttttccatattgttatctttctttgtgcttactctatctttttttttcttttttccttttttttttcttttatctttgtttatctgctttttttgattttatgtgatatatattcgctgtttgttatttttaatatttagtctttgcttt

SEQ ID NO: 15831 - DNA, 2511 bp, Emericella nidulans
attcccatgcatattaatctcagctccttgtcggatttggaagcccttcttcccaagcacgccgcgaaggatcacctgtctttggaagtgtgcaactcggatcaccaaagcgattatggacacatgcagctgtttagcacccccacatttaccgctttgctctctcatacgactcgaagattgcagcacaccaaacgagttgtcggctgaggcggtgccaagtttaccagggggccaattgttccttagcgcaaagcccccgtctctatggagtcgctaagatgagctgccgtgcaaatcgtcattccatgttctatctaacgagcccagcagctcgcggacctgcaaattagtggcgcaaatcactgctaggttgaatgttcagctgttgcttagcctcgtccatcgtaacgatggccccaagtcagaaccgcagcctgctcctgcaggggtatgccctataagaaagctttgactcttgcaaaaacttgctagatcccctgagttatatgattatctcacatatcatactcactctttgtcctctgcggtcgcttcctatactagccttgcttgaatctcatcatggtcgttcttcttccggcgctcgcctcactgctgttcgccacagatgtagtaggcagaccagcagtaccagatcgtgaaccagtaaagcgagggatacgagctcctgcacaccggtatattcccagcaacaacatagtctcgcgggatactggtgcagtctatcatatttggaacggtggcggatggatcctccctgtgttggtcggtggccaacaagtctttttaaacattgacaccggctcctctgacctgtgagtgcctaacctcgttgttgcgcataagaatatggtactaattttgaagctagttggacagcaagcactttgatgcctgaggaccagcagaataccgttactcgaggatccgtgtataatcctaacaacagctcaacgtcacgagaggttgagggatacacttttggcctagcctatgcagacggatctggagcttctgggcctgtgtacagggataccgtcaacattggcggcgctatcgtaccggacttcgctcttggggtctgcgatgatttgcggtatggcgaaggcagcgacggcactcgcgacactgctggaccagtcggtttagggtttggcaaattgaactccattcgacccaacccgcaatgcaccttcatggaatgcttagagccgtacattcaagaacccattttcggcacagcattcaagctcaacagcactgggttcattaactttggctatgtagactcagaggcgtacactggtcccttcactgaagttcccgttgccaacactagttcgggcaacgaaggccaatggatgagcctaggtgtcagttttggatcaggaggtgatctcttcatcgccgacccgcttgacatggactttgactctggcactgcttctctatctgtttcgtcggacatagctgctgcctactgggcccttgttgagggtgctgatgactcctccggttcttgggaatatccgtgtggtactgagctgcccgatctcgactttgtcttctctaatgtcacccatggtcattccactgtgacgattcctggtaagaatctcaagaatggtgatggtaccacgggcatgtgtggcacctggatggatgtagtcgatggacgtggcaatgctggtgtcccattctacatcagcaaatacattgtctggaaccaagcgaagcctagcatgtctttcgctgatcaggccaattgatagcaggaaggcatcctccggcttgttgctctgcatacttctatatactctgctatctaacaactcacccatctcttatatatgcgcgcgaaaaaaaaaagccttgtatcattgaaagttcaaagcgtaatttgaagtccgtaaattaagtgtcccgacgtgctctgcagaggacactcgtggcctgaggtattaacactaatcctcttttgtcgggaagtggccaacgcgaccccaacgcgactcagattccgagatccatgcagattcattcattgagctcggtttgaaaaatcaagaaaattccacctcaacaaaacggctttaaaaagcctctcatatcaatttctctcatcgcactactccgaataaacaaccccccacgtcttcgttctctctgaaccgcgcggtcgtgaatcgagagctcctccaacatgtgtgcttcaccgaattcgtccgtccgcccaaaatgctgactgtgattccagggagagctttgacaacatctacctagacctctcaaatcagcctggcaagtgcaaacttgctgaaactgggctaggttggcgaccttctggcggcggcgatactttcacactcgatagcagcaacattggcgcggcacaatggagcagagcagcgaaaggatatgagctaaagatcttatcgcgttcatcgggtgttattaactcgacggctttgacaagaggtaggtttt

SEQ ID NO: 15832 - DNA, 565 bp, Emericella nidulans
atcatgcggatggtgcacggacaccgtaagattagtcaaattgcaattgccttgcacgcatatgcctttcgctactgcggccatatcgccttctggatcccgaggtcgcagatagctaatccggacacggctgcacttgcagctccaacaagccaaccggctcattggaagaccaagtacagagttcgaaacaaatgcaaccctgcaccccagagacgtcgcgaggcctatcgtcagcggtcacctaaccagcctctggcaatctccattggtggccaagcccgcgcttatccttggccttttccaagatgataatttccgcttcgtctagccgtgaaggatcgcgagcatcggcgaagtttccagctggcttgacagttcttatagtggatttgttactggcttgaacctggagaatgtcgctagatcgattgttgagcagaaggacggagatcaactcggtgcggcctttttgttcgatgcgtaaatatttgtattttggtactggatttatcccttataatttatttatcatatataataataacgatataatattatattg

SEQ ID NO: 15833 - DNA, 587 bp, Emericella nidulans
cctgcgttaggctgtcgaggcctgacctactgactacacgcggctatggatccgattctgcagccttacatctacttgcatgtcgccaaagacgaacggcaagacggagcctgaataaagtatcagtcaatgttgacccatgctgtggacgcagattaccaactcccttacttcacgcgatccctgtcatggtttgtaataatgatgtcttccatattgttatcgtcctgctcgccttgggccccacgcacactgtccgagaggccgggggagctggagcgcatcgaatccggctgcgcgctggaggtttcaggcacacgcaaggtatcacccaagccagcggagggctgccaatcacgcggcaaccaagtgagatcatcgagcttgttgagcgcatattcgtcgttcgtggggtgttattcgatgccatctatgtctatcttgtccatcacaccgggcgtaccgagattatgttgccgacacatgcctattttggttcctgacgatatactacttaatgagtgccgcacttcacttacagacgtatattaaaaaggtttaactaagtacgggaactaccggtcctt

SEQ ID NO: 15834 - DNA, 3273 bp, Emericella nidulans
gtatccacatcacccgaatgagcgaagtacttgttgctaactagtctgcttgactaactggtccgttgaattgggtatgtaatagcagaagattcggcagaaatacgatcagcttaacaactgcctagacctagctttactctgaaaagactaactacctatagcacaaagagaagctttatgagaagcattattctgctaccaatgcattatctaagcaatagattactaccgccgctgacgcgatcactcggcaatctcaacaatcaacttcgtacagcttactccctgttgcagtctatccaacccagcattgatcgcccccaagccctttcccacaacattgggctccggactaggtcgaatagttgccctagcaaggctctcccctagccatgccatccagttccggaactgttccagcctttgcgcttcctccattggtggcacgaggaatagagtctcaatccccttgacgacttccgcgtccgaggggatggggggtgctgacgcaatcatcgttgtcttttccccgccaaggaatgccctcagcacagcctgacagattcgcagatcccccgtggcaagaaagcaatgccagatggcgagcccgtcctgcctagcggccgatatgatggcgttcgcgacctgcgagtctttatagtcaaatacccggtccgcgcccagcagagacacatattcgatattcgcagccccggcagtagcatatacggctgcgatggaagtatgggaatcgtcccgcagcagccgtgccgtttgcacgcccatggtgccgacgctggaggaggcgccccaaataagaagagcttctcttttggtagcggtaacggccgtcgttcctcgcgcttgggtaatattcatagtatcccacgcgctcaatggtacctgcacggcgacgggcagtgttgccgcatgcagccaggatatgtcatttggaaggacagtagcatgctgccagggaacgagacaacgctcctggaatgcgccatagtctggactgcatcctttccacaccgatgaggcgtaggcggctatgcggatgccttgtcgaaacgggggagggacatcgtcgccgaccgcaaggaccagccctgctgtgtcgaagccggtgactgtggggtaggattggatgaagaggccttgattgcgcatgatcacgtctgctgggtttagggcgacagatttgacagcaacgaggagctcgcctggccctggggatggggtagggcgggcttggagctgaagaggctggccttcagcgcaggtgaacgcggcgaggtgggttttggtgtgcattttctttcttatcttttttgtccttctatacgagatgagaatgtctgaagatgacaggtatcataggtagacaaaatctagttctcaaatatggcgaaatgactgtgctcttatactaccaaccagcccaaccgcctcgtcgttctttcgttgcttgattccagagtagaatcaggacaggagacacaaccaatcagagacatctgcatccgagcgaaggttagcgtggaaatcctgctcctaaagaggttaaaaggtatggggcgtgaatcatagttaatgactgggtaagatacctcctggctccacctgctacatatctcagttcatcgcgcattgaacccgttcgggctctactctcatgatcacgctctcaaacccagatggctttaactttcccttgcgcaaacacaagggctaggcgaaggtcgagatatggctgccggaattgtaagctcaggaaacttaaggtgagtcagacctcccagcctggggaagtgttgaatcaacagaagggttggcagtgcgatgaacagaagccacattgcaaaagatgcatttcgctcggggtaatatgcaacttggtgtctagtgctgccgatctggaaccgattggtgcttttacgctggtggttcaccccccagtttccagtgcaatctggactgccgatgaatccatatcatatcactatcaattgaacgcaaagtgtcaggactttatcacgcggtatctcgggaagagtctcctgaatgcagttccagatgaattaaacaacatgagaagcgtcaatcgcaaactactcgacctggcattcactgtaagtgctagaagaccgatcctgacatacagacggctaaccgggtggcttctagtacccttttctgatgcacgcttctcttgccgtggcattcacatacgaccggtatctcaaccgtccctttggctgccgtcgcagcttagacgaatgctatcactggtctcgagccacgacccttcttaacagacggctagcacagccgatcagcgcgacttcaagagacaaagacgcgatctggggcactgctaccgctctggccatcctctccttcgcgtcgcccgacgcgcgcacgccagaagagtcctggcccctgagacgctctgctgaccggtcggacctggactggctatgtatgagcagtggtaaaatggcactgtgggactctgtcaacccgctaagaccggacagtctattccatgtgatggaagcaacctttgcgcagataaatgcgcccttacccgagcgtggcattgacggtataccagaccccttggctggcgtctgcagtctgaacagcgcgacgacggcccaagataatccatactttgaggccgctcacgcggtatcagccatcctggacattccggacagcatagttacgactggaaagactcagctctttacgcgctgcattcaggggccctttgaagacttgctccggtatcacaacccagtcgcgctgttgctgctgtatttgtggtatggcaaagcgagctgcgtatggtggattgagcttagggctagagtggaacgtccggctatctgcgagtacctgcgcagattccatcgaggcgatgctgcagtacaggcgttccttccatgaacaccgccgcaaaagatcagggctgggaatacgttagaatcagccatcatagatagtcaagcactgagaactcctcgcctcaacaccctagaatcattggtacagatggaacacaacattagattcagtcacagatgttcctaaccaccgtaactcacgtctacatattcagagcaaagtaagatttttcaatatgctcctgcggccagctgggcatgtacgtctcccaatccgcaggcttgacattggggtaattcggcgttgtcaagttcgggcccagtaaaggtttggccaatgacccagtagtagtagaag

SEQ ID NO: 15835 - DNA, 935 bp, Emericella nidulans
agtattgtgtcgtcatacaagatatggtaggattaagaaaggaattaagagggctggaattgggttgcttagtttcgtcccagcccccgcatgctgacatgggaggataaatcgggtgcgtgatataggttatccgacaagctgacgcatgaaaatttgatgcgaaggagtatatgagtaaataaatggaatggacatctattaacgtgctttctgtattcttattacatcttagttgaggaggacaacaaccttgacttgaatagtacacatgtcctcaagatctttctttacattttatgtctctcataatcacttatttatctcctgcactttttttttatattttatactactttcctctcaaccatctattatttccatttgccgccagatacagatgtctactgtcctttctgacaatctagtacgactgaaaagcttacccgctctataccttcatttcaagtcacctcgcacgctgaatgccattctaaccattgaggtgccctttacatcaggtattattctccctacggtgaaatgccattctagatagcgtgattttcccttgttcttatacccagaaagtttgtggctttaatcaagacagaatgggacactaacggcttagcattccatgttacgaccatggaaatatgacattgttcgatattgaaatggtaatctgggttgaggactccaagatatagcacggccactggggagggttcatcgtggcatagccgcccttttgctggtagaactttaagctataaaaacccttttatgtactgtagaggagccaacttttggcttttgggcttttttaacttagacctcttattattatctattcacacattttttttcccaccctacttgaatatcgtctccaaccctgttcattgacaattccatttggcgctgatcct

SEQ ID NO: 15836 - DNA, 3938 bp, Emericella nidulans
atcggcccatgccatcctgccagtccgggcttgtttatctcatatccgattcttttgagtatctcatttatggcaacgtccaggctgtcatctgaagccacgttggaaatatactcagtatctggactcaaagactggaagaacggtaagcttggaggggaggattgttccgtggggcacgtctttaagctgaaagctgtaacaggcattgacgtcgatgtcgagcacggcgttattgaggagaggatacggaatagtaggcagagtgggcatattgaccggtgatgtggtacgtaagattttcatgacgtagtaggtaggccttgggactatctatttattctttacagatattagtggcaagaaacttgtagacgagaggagaagcgccatactcaccttatgttctccaagaataatcctttgcatcagaagcatctccgtaagctgagactaccacaaactggtcattgaaggtggacgacggttcagcatccgacactgcttgtttaatgttatatctaaacatggaagattcccggattcaaaatatctgccttgatgacccagaagctgcttggtatgagccgagtgcgacagtgtcatcccactccaaagaacaattaatcattcttgctataagactccccagagccagtacagtgccaagtatgcattatgccattgatggatccaagcccgaagggtaaaagctgtatgggtaagtgccaatcgggtatttggctggtgaacacctcgtcgagggcgagagtcgaagttgaaggctggaggctgagtctggtcgagactcgagaatcaggggaaggcgtacacgctagaaaatgaagattttagcacgccactggataacacccctcagaaacatggacagttggttggaaatagccaactcgcataccttgggacatgtgggtaaagacccctagcaggggacaatacctgcagacagataggacagaacggacagcaattgtctgaacgctctacaaaggtgacgagtaggccctgcgtgcaaaaaatggattcaggtacaaacacagacacgccacccagaggattaggcgagtctcaccctctctttcaacaacaacgccgtgttttcttagatcccagcgtcgacatgggtagttcaggatattgggctaagcgaccactgcctagctgttctgtcacctggcttgcacctgtagtccgcgatgagtgtgccattctcgcttgtgtcttgctgtatctcagcacaggtagctgaccggtacggtggaattaggagtccgcaggttgttctcgatagacaagcggtactggtaggcgagagagcgattgtccgtgttatttggtggggtaagaagtgagggaggtgggtatattgtaaactaggcttggaagttagggaggaactctatcctgtcgactccctactccgcccttcgtcgtaggaagaatcgtcactgacagtaaagattacgcaagtcatgatcctcgatccgcgcctccacgcgataagccgggtcacagaccaccatcaggacccggtccgtgtgtatcagattgatcccactgctcatatatgttcgtttccgtcatcgccctggcggatagtcgcggggtctccggaaggggcggtcattagaatggcatttgtggttagtttcgatggcgcaatgggcactgggcctggcgacatggttatacattcaaaatgcagtaagactccctgacaggtctctgcagaaaggcgggctccctatactctaatatcatgtaaggcagtcgaatgttccaattgactagcaaaaccaagcgcagcccaacctgtactccgtagcagtggctatataccgtaacaatatatagacaaacgagatggaaaataagcggacggtgtccgaccctattcccaattcagtctccccagtcaccagtacctgtagatagacaagacagaaagcatccccagtacatgttcaacacagcataacaatcagaaagcaaaaacagattgtcattacatcgtcagattgtttcatccccgtggatggctcgagagtcgagagtcgagagtcgagagccaggtgagaagggtatcaaacagagtgatcccaaagcaattaacatataatcgccccagtgcccataaaaacggagagaattcgcaaggagaaatgcaacagaagataagcagaacttcatttagcgtctagttgtcggtgccgacgcccttcttttttggctgaatatgtttttgcccgctcccggtgacggtggtacttggatgattcagcgatacgtctgttgctgggggtggaggcatccggctggaggccgcttcgtgcttctcggtcaagaggttcttgagccatcggttctccatctcgagctgggcaactcgagcttcgaggctggcgttcttctcggttgtttctcgaacggtgcgctccagggtctgctcgcgctgtttcttcttcatgcggaatcgagcgcttgctgcagtattgcggcgtctgcggtcctcctctgcggcccggcgagagtgctcttcctggttgagggcggatgcgatgtggtcacccgagatctgggtgctgtacttgttgttgccgatctggccgttgggcggtgagatggacgaggacacatctgagggcgtcatggcgccaggtgcatggccaacctcatcaggtccatatgagattgggggatagagaggataggccgagtgtgatagcatgtggtcggagacggagtagttgatggtcttatcaccagctgttcaggagagtaagtataaggacagggacaagaactgaaaggaggaacaactcgcaaggcgacaggataagagataaggcagcgagggttatcataagggacaagccaccccagaagggaccttagtacgggaacttgggggacgcccggtaatgacaggctcctgacgatgtcatatgggtgatcgattgcgtgctcaaatcgtgtttaccaaagcgggctcacagagaagggaacatcgacaaccaaaaaaaaaagaaaaaacaattaaatcaacggtattggttggcttgcaggatttaaccaatttcccaaatgacactcagcacggggtagcgatgctcattaggggaaggccgagatcgcgggcagctggttcaggctacaacgaacacccaagcttccccagaaaggacgcatagctccggaccagcagatacaacccgagcgcaataggtcttgcaccatccgacgttgtatgagcaaagcgatgcagggaaacgaaccgaatagcacagaaatggcgcaaggtaggcaatttgcggcgtcattcaagctcagacttaccatgatacgggtatcctcgcacatcgatcgggctgtgctcgtcctcgatgctctcatacgaactgacggacaaaccgcccatgccttcagtgggatcgtagggcatgcctaagttagggacgtgagccaggctggctgcagcgtccgtgtcaaaggagtactgtcggtgttttgcgacttcagggtcgtgtcgagagagcaggaagttgaaattttcaagtttatcgaagctcgaggcggccgtctgacgagcaatttgttcatctgacatattgcctgcaggaccaggtagtgggtgcttttttaagaccgcgccgcctatccaacctctctccgcttttctatctcggcccccggctaagatttgattggatctgattgagatagagggcttggtaaagactggaaaaggttaccagctgcccacacagaatgcttgagtggcttgtcttgggggcgtgagggacggggaatccatggtgacagaagcgcggaaatgtcgccagccgatcagctggggcagggggcgcacaggaactggaatcctggagctgaaatgattcaatattgggaaggggatt

SEQ ID NO: 15837 - DNA, 599 bp, Emericella nidulans
  unsure (1)..(599): unsure at all n locations
catacgttgggttgtcgaggcatgatctactggctattcgcggcgatggctggtattttcgcaatgttcatctacttccgtgtgccagagacgaaaggcaggacgagcgtggatgaggtctgggggaggggggatcagcggaggagggattaagctccctcaccctgtattcattgtggtttgattacggcgatgcttgtctcttcgccctcgtctagctttagtagagtaatgtagatcaaactcgggaacgtggccatagcaggtggtcttgaggaacggtgcaccgcagcgctatcagaatagaaactgtatatagcacaaacagccgtagatatggcgaccaggcctagcctttgtaactgctcgtttgtcggagtcatcattgaacggtatatgaacaacacggtggatttgaattgcacaatgacatcattttgatctgcaaagccaagcatacagcgtttatcttgcgttaacatgcctgtcttggatcattgacagatactacttaaagagtgccgtaatgcagtgagagagggttagcttcaggttgggctcnaaggtggactaccgtagctaaacatgcatgactttga

SEQ ID NO: 15838 - DNA, 5164 bp, Emericella nidulans
agtgccaagctggtttgggattggcaccgtaaatatcgaagctggtgggctgatgtactccgccaaaagagataagctcacaaagtagctgcgcacagcttgcactctctctctaccttatcccaaagaaagcatgaagtcatgcttcaatgttcataaatcggccgcgtgaatcacacaagaatatctgccatactgtcatcagaagttgttggtcagttccaggaaatcagtaatcaaatagattcgtggaaaggcgccttgcgcagctcatccggtcgcccaagtgctgtcccgatgaaagatcatacaactcgcgagtttatctctggacaaggtaaaagtctccaaggtaatcgcgatgaggaatcgccatcacttgttgcaatgctctcgcgcagcgacttgatccttcatcagttaccctatctgacaaagattgttggcaaaggcacgatgtcaaaaaacctacagcaaatcaccgggttcggagctgggggctcagacttcacctcacaacatgacgaggattacgatttcgagccatccttttgtgaagccccaggccccaagtctagacttgaaaagaggattggactgtctgaaccgcagacaaccttgtcctcccaaacaaccgatgaacggcttgttctcagcgatgacgatattatagatgacttgtaataatgatattcaagaatctagtaatgacatacttttcatttcaacgcagaattcgggggccaacggtcggcgatcctgtgctcttgtgaggcttgtatactgtaccaaacaagtgcacgacgcttggcgccactcgactaatcagcctcggcgtatcgccgctaaagaatacataaacaatccacccttttcacaggtaatttcgacacctatatttcttcaaaccaagatgaccatgacaacggaaccatccgcgcgagactctttcgtcgagaatgatattcgcttaacagagaatggccacaagctgaaacttcgctctggacattccgaccctgctagatccggaggcgccacgacagacttgggcaaacgaagaagggatgcggacaaatctatccacaacatgcctggtattgcagctgttgcaattcaaacagcctttgctcactggacaagcattattctgatgatttctttaatctttgggggctgctgtgcgaatgtgggtagatagagatcacttttgcaagatacatcactaattttctaatcaaggtatttgcccttgaggcaatagtaaagtgagtctgagtagactagactgtggaattacagattcgctaatctaatgcagagatcaaccagattcaggtatataattccacttctttgaccctgaaggaggttctgattatccgtttgtcaggtccattaataacatttgctcagttcattctgactgcgctttttatgttaccaaacttcatttccccatcagcgggcttccgatcattcttcctcagccagcgctcaataccattaagatcatggttaatttacacggctttcttcgttacggttaatcttcttaacaattgggcatttgcgtaccggatttcagtgcctctgcatattatactgagatccggtggaccagtcgcttcaattgctgttggttatctttatgctggtaaaagatattcaaggggacagattctatcagtcgcgctgcttactttcggagtcgtcacttctgcattagcagatgcgcaggcgaaaggagaagcggtacaatttgggggtagtggaagctctaacatatacagcacgtttatcggctttgctattcttgcgttggcgatgctgctttctgcatttcaagggatatatgcagatcggctgtatgaaacctttgggcggagccattggaaagaagctctgttctattctcatacgctctctttaccactctttcttcctacttttcccagacttttaactcagtggcgcacattgaattcgtctccttcattgctataccatatccgagccctgttgaatccgatgggacacccaaccgaattgcccgcctctgacgagacggccggcgcaagcaactcttgtgcaatctccacaagcaacccagccgaagccttcctccaactgctggtgacttgccgtgtatatgaaggattccagcctatcttgggtatgattcccgtacaggtattctatttactagcaaatgccttgacgcaatattggtgtatacgcggagtgcatcttctctccgcgaaatcgtcgtcattaactgtgacgattgttttgaacattcgaaagcttgtttcgctcctgttgtccattcacctttttggcaatgccctttcaaaaggtgttgtcatgggggctatacttgtgtttgtgggaggaagcctgtatggcttcgagggtgcgcggctaaggagggcagctcagaagaaagattgattaggtcgatagatgatgcctagtctatttaacccagatgaacatcggacatgtagcgactcagtcttggttttatgttaatggtatataaaccgccgcacccgatatctatgtaaatagagacgtatatcacatctttctttgtagttctaccaagggtaaacacgccacttgagctagagtataattataatacagattaagacaccgcaaccacatgcaccattggtacattgttgtaaatagccagggtcccagaacatagaaaacacggacagacaggcgttatgtttacaaaacttcgccgacaattttcgctgccgctttgtatgtttctaacaacctctcacacttctctctctcggctttgatgccatcatcctcatatagaagctcagcgaagaactcttccttgtagagctcactaacaagccgattctgcacaacatctttactgtggttgacaagaagatgcataatagcttttggaacctggtcggcgattgtctccctcacaatggtgaaatatgaagagatcaaccgacgaatcaattccgtctccatgagctctcgctcagatattgccggctcagaatcgtccttcaactagacaatttcgtggtgtgtcaatagagtgcttcatatacaattgggaacagatacttacaacagaactcgcttcgttatattcgggcaccgtggtataatcatccaccggagaaagcatctcggtgcgtcgagcgtttgagctcacattgacctcatggatggactgcctagtttggttttgattgggagaggctgaggtagtaagttggggctgggcaccatctttgccaaagaagtagttcaggaaggaatcgcgggtggtattagcaccgccaaagccggttggaggattcgaatgcgtcccgttcaaagttgccgtgattccagtgtctgatatttttccaatatgaggagacatgctgcgggtccctttgctagattgagtcctgatgggaaggtttttggtttccggttgctcttcctcgtcttccggatgtgttggtgcgtttccgtttggaccaccgagttccttgattcgtctcttctctcgcttgcgtcgttcctccgcgagcgcggctttcctctcttggtcctgtttgctttggataattgacgacattgcggcggctgcaccaaggaaatttggatgattcgtgttgatgtaggccctttgaatagatatcaacgactccacgtaagaggagcagggacctagcctctcgcgcaggaggtcagacacgacttcaatgagtttggcctggagacgaggaaagcgcaacagctcttgcgagccacaagtgtggcatatctttataagttcttcgtaaaccagctcaacacaccgctggctagggggttcaagcaatttgatctgaggtttcacgagaagatcaaaagcgagctccggaacaaaaagacttggacgcggccccgttgagttacggatagcagtcctgatatctgaaattgaaagattttgagttggatcaatcgtgtcaagagagttgccgaagacagagttgaatatataatatatcctagcaccaccgcataattctttcgtggatatttccgatgaagttccgtcaattgaagatataaaggaggaagcaaacctcgtcataagctgtaatataagagatcctcgatgttctttcccgctgaactgcttgttgccgtactggcgagttcctcatgcgtttgacccatcagtgtgttaaaacgagcctttgatgtccggtagtcgatccctaatatgagacattaaggtcgaattaagggttttagcaagaaattcggtcccgcatcgattggccatatttcgataagctggatggtgtcgaaaaaaatcgagttcagcctgtaaggcctccgagagagatttgcccgattgaatatcttgctgggacctgttgaccaccccaataaagccaagtttcagtggatagacgcggccggataggatgtccatagcatttgtcccatggtccataaggtccaattttgttaggacaccgatcgttcttcgtcccatagggtcaacctggcgagcaagtttcaaagactcggaattaaccaggtcaacgtttgccggtgaaacagctaaaattatactgttcggtttcgcgatgtattcgagtattagggcacgagtttgcttttctatatccgatggctgatccccaattggcactttagttaggcctggcaaatcaaccatagtgaggttgagcacatgcggcgaaaaaattttgaggttaatcggctggcgattgatgcccttgttatttccggctattctcgctgtctcagcctcgatctcttgtttcacaagagcgaagtcgtcaaactttcggcccggttgatgatgaaattccgcccactcgttttgcccggccacactggcagctgtatgaggaacgtggacctcgtcggtctctggtttgtcatgtcgttcgctgggtatatttataggtggaaaattcacgggcttcgagtggacattccactttcctctaggagggaggtcttggccacctttttttccaaaaccagaggattttccaaccaatgggagcccaccaccacctaatgagagaggtagtatgatatatctctcaccggggggtgtgtggggagaaaatataactcacaatttgtg

SEQ ID NO: 15839 - DNA, 4384 bp, Emericella nidulans
  unsure (1)..(4384): unsure at all n locations
tgaacaaaatgcttggatcaaatactctttgaatattatcctctatacctctattatcctcttgctctatcaataatcgatctatttgtttactgctgtgcccatcatttcctggtgcagctgctctatgttttccttgcatttattaatttccgcagtgctcggattcactgcagagttgttgccgcagcgcgctgagctggtttcagcaggattgcttctcatactcagacaatgagtaatcagccatggctggacagcctttcagacgactgggtgtcgttgccagggactcccaccagccctgctccccctcgttcacctatcaacagccactcccgccgctccagcgtacagatcacacctagtcgcattccagtccccgcgcgacgctcgatcgagccctctccatcgtccgacacgaagaaaaagattccacgaccgtgccatcacatcagacgagagcccccaacccccaaaaccccgcgcaccccaaagacgccttccaaaccaagatcgccgtatcccaacatatcgaatccaaagccgaacccgaccccggggcggaagaaacagtccgttatggacgggaaatcgcccttgcggtcggtttctaacgcatcgagccaagttgggcaacagagcaccgttcagattaggccgaagaaggagactgtcgagcagggaaccccagagtggcggaagagactggtgaatggcgatatacctgcaagtgaacaacgcgatctgtttgctcctatcgggttggagagcgttttcaagcccccttcgccgggttcgccgctggcaggaagcacaccgatcccgcggatgaaacagccggaagacggttggaacttcagcaccaattcggctgcggaaaagaaaggaaagtctccagggcgcgcgttaaagagtagccgggggagtgtgcgcacgacatcgggcaagtcagtttctgggcaaggttcgcgtaccatggaacgccacggcaaacaaacaacaaaaccgcgaacgggagaatcgcaacaacagaagaaacaatccgcgcacttatcagaacacatgacggaaaaccatggggatcagacggacactgcgcagatgcgctctgccagcgggttggaggacttacgaaacgaggatatcacacccattactttttcccggacaaacacagtggatggcgagggcacggccgaaatcatcaagtccgccttgaaacaggttacaacaaaactagagaagctacagttgacgccagcgggtcgcccaaactctcgcgcgagtgacagtgttctatatgaccagcagaatgacattgctgctgaagccgccgcggaaaaagacttgctcgatgttaccagccactcacttccccaggacctctcgatgggaacattagattatcgagggcgaagcgcattcacgagtctgcaaggggattcatatgcggaggagcgctctttccacaacgaccggctttctcctacaggcttcccttctcatcgtttgactccgttcatccggcccagcacaagagtcaggagctcgccgccgttctacaacaaaactaatccgcaaactgatccgttaagtttgccgcgaccttcatccgcccacgtggcaacgtcgaataatctcggaggcatgccctcgaccggaagccccctgaagctttttgcaaatcatgacacatttacgaataataaacttcttcgacgaatgagccaatttgaggagaccctcggggagcaatcggatggggacgagccagtctcgccatcggaagaagcccgccgtaagggagagaatcgaaacttcctgcaccctggcgaacgtcatggccggaggcaggatcattcgaggtcccgtaacagtcaaactcctcgcataaatcgctttggtgaaggtcagttagataatttcgacttttccgatactagcccctacgacacgaatttcctgcataccgattccccggaacccaacgttcgtccgcctggtaacctgctagctgctgaaggaaaggtccagagaggtcgctcatacaggcagaccagtgaatactcggaagcgtctgatgggacaaacttgctagggcggcgagacattcgactgaagctcaagactacgcttagcagccctgtgaaagatcctacgccaaagaggcgaagaatgggcaggcagttccacggctctatgctgggtgatgcaacaattgaggatagtgaagcttctgacgacctgtccttgcttcaacggagcctggtgcaacacgggttgagatatgatgagaatgtggaagggccattttctgagtcaacgaaccgcccacgaactccaaccccacatcaaacaggatcttttgaacgaaaacaatcttccccgaatcgacgaacacatcaagctgagtccgacatacacggaatctcccccccaacattaactcaaaatgtgcccaacgtcattggacgttccgggaaagacgaggttcggaaaggttcaatcacaacacaggatttcctcaatgaggcgactaaggtcatgaatttaatacgctcccaaggcacggccaaaagtggtttatctagggtggatgagaccgacactgaagagcacgacggcaacgagagctacgaggaggagtcaaccctagaagaattctcgcgcccgcctagcagggagggcattgatttacgcaggctgcgcgaacccaaggagccaaacccgcgcattttgagtcatttgaagaaatttcaagaacatgatgatctggagtttggcgttacgggttctgttacgtctttgcatcttggaggtgatgacagtgggcgcggagatgctgataggcaccggaagcgcaaacttcctacgccgccagcaacccaagaagatgatctctatgactttttaaggctcaacactgagacctcgaaaaacttcagtgctcgttcggttcagaccggctcctcacaaggatcgcacgctaagggtgtcttatcttcaaatatcgtgtctcacctgatacctgaacaagtgaatggattcacgtatgatcgcctccgacatttgtgggtgaaagaggacgaaaggaagtctccttctagccaacaatacaaggatcgtgacgaagatcctttcaaagatattcccgacttgagtgtcgatgaaatggaagaggtgatgaggactgagaatgcaagctctccgcggaagacaagagactcatctcatgcccgagcaaccgctcctcatagaccaaacacaaataaggctgatggtaaaggatcagagcccgtcgaagaagacgcacccggagcaccgtcggtcaatctcagctctgctcagtcgggtaccagccagttaaccgctagcaaccctacttcgggaactagagagacgtcatggggaactgaagtgcccaagagcacagcgtcgtccgatgttgaacacgagatcaagctgcatgaaggtcgcctgtccaaacctcctcacctcctgaaaaaccaaaaccatcaaccccgagtcgtgaccataagtttctcctccccactcgtctcacaaatcgagtatagcgacgatgatagcccctctaaactccgaaggattgcacttacctcgcaagcgcatgtcgcggccgcagagaattccgcactgcagtcctttgaacacgagcagggtttctcgcggcgctctatatccaaaatcgacgagcagaacgaggacacagttgaggaccaaagtctagtcccgaggacaacagatgatcttgaacctaggtcgggtgaagcgaacttggaagagtcctttgcacttgcgcgggagaacggattggatacaagctatagtttccacctcagtccgcttcctgacttcacagtcaatcagattgaccagccgtcacagcttgacgttagttatgtcgctcagcgcacacatccaacatctttgcgtcaaatccacgggacctttgctctggcaacagaagacttggtcaggaatattacggaggctgagccgtatgagcctttctgggagcatctccgtcgcttgattctgcgccgcaaagggctcattactctgcataaacttgccgatttctgtcctcgccttgaagaattggacgtctcagagaatgatattggtcagttgggcggcgttccatcaacactgaggaacttgaaaatccagaataactgcctctctaatcttacaccatggggacacttaggaaacctgcagtatctggatatttctgggaacgaactggagaacttggatgccgntggtggtctcattcacctcaagaattgatagcggacaacaataatatccggaacggtgcaggagtcttcgggctaaaccgacttttgactctgag

SEQ ID NO: 15840 - DNA, 445 bp, Emericella nidulans
  unsure (1)..(445): unsure at all n locations
ggccggcgnggggagggtgtaagtggaagcacccggacagctgccgcccggcagaaggaaggcaacaacacagggcgagacggacggcccggccgcgcaacgacagagccanggcagcnctagcggcattcctatgccacgcttgagcagcactagattggctagcggcgagccagatcaaaagacacagatacatacctctggagaaacatgcctatcaccgcgccggggcggatacgacgcgaacgggatcagaagactgatggtacagacgagaaccagactccagccaagggataggcggcggcgcccgcaatgactgaccgacgacgctggcttcgagaccctgggcagggcggccatagaggacaggatttccccccccacgaagcagagcaggagacatgcgcactacaatgccagagacgatgccaagatctctggt

SEQ ID NO: 15841 - DNA, 853 bp, Emericella nidulans
  unsure (1)..(853): unsure at all n locations
tgaagaggataattttcttagtggagtacagacattgtgatcaagacaaggagtcattccgctcctgtcgagcttttgtttctgtttctctgactataagctcttgtaactgtatccctgactgctccctgactacggcgtattgcccgttccagggtcaatactagccctactgccttgtggtcctcggtgagtttaggatgacgctttgcaaagtaccggccatacttgaataaggcccaatagcagcttaagacgttgataaaacttatgaatatcttgtaaggcatcttcatttctcagtcagtactggcttggatagtgggagacaacaagggacggttcccgggaggggggggtgaggtgntaactctcctcttcccctcgttttcttctttttgccttaccctcttcagtccttaaaccctctttgtttagtctttgaccacctcatttcttcaaattccttcacatatttcttctttctcctctcttttaaacctttcatttatttttctggtccatctttatcctttgtacccactcttacctttattccctttcccttcaccattaaatttttttttttctcatcttaatcttatctcctcatttcatactcctactcttcatatttatcttttaatccttccctctagcatttcttccactctctctcctctcttctaactactttcaaatattcacaattctttttcactcctcttatatttatttcccctatctctattcttacctactttctcacaccttctaaccccacttctaactactcattctctctttcatcttcattctccccttttccactaattctttactttctcctcct

SEQ ID NO: 15842 - DNA, 3773 bp, Emericella nidulans
acactggaggcgatcaaagacctcgaatccaagttagctagactgcgcggccaccatgcaggcggaacacctgtctattccctccctgttgggcagagtctaacatctgcacaacttgacggattaaacttttctgcaccttcaatcccctcgagcccaccgcagttcgaccgttccgcgttctcgataccatcccgacctcgagattctcgcttagccaactcttcggaaatgcttactgttcgcaaacgccgactctccgaagatgacaccgaagatggagtgagtgtgcgatcgtcaaaacgtactacaggaaacatcgccagtcctgcttctacgcaggctgcttcgtctactccgttcagccgcaaacacccaagcgatggacttgacagcgagtttgatgttgatgatgatattctgggcatcctggggctggacggtcaagatatgcgtgcgctccaggaagaacagagaagagcagaacagtggttgaaagaacggaaggaacaagaacgccgcgatgcggaatttgctcgccatttaatgtcagcatcaccctctgcacaaaccctctcatatataagtcgcgctgagccgcctactcccacacgtgagaaccttccatcgattccgcaattcagctcttccaattcgctgtttctgggcacaagaccagcaggcttaagtgctgcgccttctctgaacgcgaaccatgcctttagcggtccgcaatctgggtcctcgaaaatccatccggatagtgatgatagcgatcttgcagaaatatcccctcaagattttcagtctcgcatcacttccaacccgagaattaccagtcgtccgtcccaatacgtgccgaaccgcggaaatgctgatctgggcatatctaatactgccaaatcagtccagaacccttacgcctatcattatcctggtcctgccgctgccaatgggtcgaatggtttcggcaactctgctatgagtaggtggccacagtctatgccatcagctatggcaatctacaaaggagctagagacatgcttagtggtactactaacatctctccttctcggatgccattgggtaatattatcactagcgggtttctggacgataactatccgacagccttggctggtcgtgatatacggtaattcttttactgacgtctcatttgtttgattgtgctaatcgccgcgtatacagagacttttatgaagacggaggtgacccgaaacaaatcaatcaagagataaagcagttgctggaaactatccgacccgatgccgacctttcagcgaaagaccgcgaaggaactccggcggcactcaagtacccattgttagatcaccagaagctgggtttagcctggatgagatccaaggaagaatgtgatcagaagggaggcatcttggccgatgacatgggtctaggcaaaactattcaagcaattgctcttatggtgtctcgtccgtcaagcgaccccgagcgaaagacgacattaatcatcgctcctgttgcattgatgcagcagtggaagcgggaaattgagaagatgctttccccgggtcatcgtcttcaagtgtacattctacatggggacaaaggccgaacgagtttcagtgacttgaagaaatatgatgtcgtgctcaccacatttggaatgttggcttcagagctcaagcgtgtaatcaaatacgaacagctactcaaagacggcgctgaggagccaacgctgaccagacaatacctgaaaacgctaccttgccttggacctacgagcaaatggtatcgggtgatcattgacgaagcccagtgcatcaaaaaccgagctacccagtctgccattgcttgctgccgactgaatacgacctaccgctggtgcatgagcggaacaccaatgatgaacaatgtcgaagaattgcattctttattgaaatttttgcgaatccgtccttacgctaacctggatcgtttcaagagagtgagtggtttagttttcccggaatttccgctacgtatcgcagactaattgaggccaattaggacttctctgcaccgttgaaaaccaacaacaagcacctccaagagaaggcgatgacgcagcttcgcattctcctcaaagcagttctactacggcgcactaaacattcaaagatagatggcaagcccattttcgacattccccctcgattctcggaaaaggtccatgccgtttttagtgaagatgaactggaattatacaaagcactggaagcgaaaactcaacttcaatttaacagatatctcgaggccggaacagtggggcgaaattattccaacatccttgtccttcttcttcgtcttcgacaagcctgctgtcatccgcacttgattactgattttagtgtcaagctcaacgaggcttctgaaggagtcgatttcatcgccaacgcagagcaatttagcaacgaggttgttgctcgcttacgggataatgagaatcttgagtgcccggtctgtattgatgcagtggacaatccaatcatttttttcccctgtggacatgggacatgcagtgaatgtttctctagaatttccgatccgtcgctttccttgcagcaaggcattgatggagctgcgcaagtgaagtgcccaaattgtcgtggagttgtcgaccccaagaaaataaccgatcatgtatcttttcggaaagttcattttcctgatgagtctgaggattcagctggtctggggggcttggggattgcgattaaggaagacggggaccgtgacgataccgatgacagcgacgagggcgcaactttgtccgattttatttcgaatgacagcgactgtgacttaacgcctcccaagagaccgaaagtaagaagcaagggcaaaggcaaaggcaagcccagaaagactcttgccgagctgaagaaagaagcctcgaaaaaccaggaatcgaaacgcaagtacttgcgtcgcctggaaaagacttggattactagcgcgaagattgagaaaaccatggagattatacgcgatattgagcgccgggacaacaatgaaaagatcatcatctttagccagtttacttctctactggatctgctcgagattccaattgcgcgtgaaggtcaccggtatcgtaggtatgatgggagcatgaagccagcggatcggaactcggccgtgctagactttactgatgaccccagctgcaaagtcatgctggtgtctttgaaggcaggcaactccggtctgaatctagtcgccgcaaaccatgtgattatttttgacccgttttggaacccttacgtcgaggagcaggcggttgaccgtgctcatcgcattgggcagttgcgagaagtccatgtccatcgaatccttgtaccagaaactgtcgaagaccgtatcatcgagctccaggataaaaagcgcgctatcattgatggtgcattggacgagaaggaatcgaagaacattgctaggttgagcacccgtgagcttggctacttattcgtgcgtctccctgcgtctcattcgcctacgagtaactaacattctgcattctagggaataaaagagtaggttagcttgcttctgctacctcattttggcgttggcgggcgtccaggatctttcatacggatttttgtttaatcattataccggggtgaaccgtcaaaagcttgttcgttacatattattcaatttcccaagactgtaactacgttgtcttaggtcctgttcccctcagcaaggagtagaactaagtgacata

SEQ ID NO: 15843 - DNA, 3635 bp, Emericella nidulans
ctcatcagaatagtctccaatgagagcagttttgcccagttttgactaggttcataatatggctctatccaagcggctggctcaatgggtctcgggaacctgatttccctttggagaatgtgctcccggacagaggtcacaaaagtcaacgcggcgttctcctccagccttggatttgattctctgacattggatgagactcttcatcgagaaggctcagcctacggtgacgccgccagacgcgccattctggcggtgtacaagcgcggctgacccaattgcaggacagaacgcatcattctgtggagagtttaaatctcttcaccgggatcggaataatcgaaacatctccatggatagcattgttacctcactaataattgggcccaaacgggttggtattgttttcggatgagtcgggatatagactcgacgagacatccttacattacaccacgatagttcattgccgaatggagaacccgaaataagaagagccttacttttcgagtatgtaatcttcgaagaataatactcatacaagacagagatcaaaattgagagaaaaaggccgtcggaccggatgacgactgatctttgtccttagttccatgaaccatgccgatcctccttggaccgactgcacaaactagtgcccaacgttgttcctaaaccttaacagtgatacaataatatctgtcatgtaattgccctacagcttgttctgcagtggacatacctcatgtgcgagcgttgtgcttagccgagcttgcgcaagaaatgcatgcagcatccaagttcaaagtccgcgcgatgcaccactctcctgcgagttacatcctatccaggcagcgacaaaagggacctcaatacacacgggagaagaccggtatgagaataaacaatgaaacttgtggccttgtggccgagaaccaagactcgtaaccaaagccgggctcagcctcgacttcagtagtaaccagaataccccaagcagcggtcaagaatcggaaattggacttcttgcctcagttctataaacaattcatgtgatatttagatgggaagtttcactggaattggaaaatgtatccatgtgggcactctccaggaagccttcgagtccataccctgttctactctatctgcattgggtataacctcctctgtgtgtagttcatatcaacttcccagcactagcaaaagggaaataatcgagaatgcaaactcccagaatcagtaaatggataacgggataaatgccaaagcccggtcatccaagtaccgacaccaactgaagggctatgattaaacaaagaaaactcgccagattaggtcctacctctgaggtcagaacaagtagtctgccaacctgatcctccttggcgcgtttcaaagcagaaacaaggagcatcgtagccaatccaaacagcaaggcgagaggaccattacaacaaattgcccccaccaacacgtggttatcctctgtatagatagagcaatgtgtagaagtacatacagagcaagtcgtggtgcccgtgtgagtcttcagttcgcgccatgctagctctctcgagcttagtatcaagtccaataatatcgttttacctttaaggactaattcacagatcgccccaaggatcagaggcaagggtgaaacgaaagagcaaagcactgtaccatgacctagataggtggcccgtaaggttactccactgctccacaagccacctggaccagtagactgcgcagtgcggacagcccagggctcaggtacaggtacagcaaagcatgtcgtcggtaacctgcattgcatggcgtagccatagcatggcaattgatgcaatgcatgaatggatgctatgtaagttagtatgaggggatgtgggtaatgatcctagtgcgaatcttggggcggacagtttctacctgatgtagcctgttagatgaaatggggacttttcatccaggttgtgactcatacttgtgggtaggctggagggtgacggatacctggggatgccccgggaaaggcgactgtgggggattgttatttggtaagataatgaacaaagggaactgaagggaagtgaaaacaaccaactccattgattttctaatctctttgtaaaataatagtctacaactatgaccatatcacaccacatcagcactgtctcaactcctcccgagccgaaaccgcgagacgatgatgtacaaattctgaataagatatccggggtatcttccatgaaacaacaaacgaaaggaaagtcgacttgtatccaagctgatgggatcatccctctaccaatcctttctgcagtcccttccgggtgccgacaaagcgatccgagattacagactgtcagttagtgattgagtacaatcaaagccggatgaaatcctgctgcttcgagacttcaccggtttccgttccttctataagttctccctcatccgagagataatcagagtcgacatcatcggagccaatttcgtcaaactcttcttcctcactggaagcgtctgattcatcgtcaccttcaccttctttaggaccagcattcttccgaatctgtcctgcacggtcaacatgtggcagccggcagtgcttcttcttgcatacacccgtgttggcgtagtcagggcactcgtgcacatgtctctcctcacatgtctcgcccttatcacagtatcccagcgtcgcgaaagcccggcacactggcgcaccaggtgtgactcggacatgagcatagcgacactctgggttagaacaacgacctcgaaggaaatgcacacaagcaggagacctatgaggtgatggttcatgggagagatcacaactgttacctgcgctacatttgccagtctgaaggaagtccttgcagatagcgactttgttcggatcgtggatataaggacacgaaggtcccttgtagcaggtacctagatgaaatgtcggttagcatgactctttggacctgcgatggcgaacagttgacaaatggaatccggagggcttgagggaagaattggtacccgtcgtagtgaatctttggcaaagctcgtcctttttcttgaccgccgagggcactctacagtcaaattagtattgtcctactcgaagcgaatcaaaacgatcaccttttagaggttactgcacccagccgatgaaggttgccattcttgctccggacgaacgtcaccccagcaactttcaccctcttgggcgtgttgtttgcagtgttcggatcatctactatctgtaagccagctctctctattagcgcggaaagaacaggggtcgcactagaaactctgatcagcttgccaccaccgcgagaaacacggaatggaatgtcgttgagagttatctgatactctccgtgagattccccagccgcagaaacctgggggttagagctcgaagaaaattgtcggccagcgccgtgagcaaattgcagcacttttgcctgctctatctgcgccttcttctgcgctttcgctttacgcgtttcttccaaagccttcaccctcttctgagcttctttatcataaacaacagagttgataagctgcatgtgtcgcgcgtgttttgtcacccaggcatttggtgtagccaagttcctcta

SEQ ID NO: 15844 - DNA, 6617 bp, Emericella nidulans
  unsure (1)..(6617): unsure at all n locations
ataagagggtattatagaagaaagataatataaaacaatataaataaatactaagtcagaagagagaacctatacatataagatatcgttccgaccaacaataattaataagtatgaaataaaataaagaaaatatatttaagaagaggtcaggaaaccttcaattccagaattagaaaatgccctctccaaaactataaagtcattttccctttcaaaaaaggcaattcccaaatttttattggaaataaacggccttgcatccggaaacaaaatgtcgtgaaaagtaagacctccgtcccacattcccaaaactctaatgtacggagcaacggtataattgtgggttgctttctgctgaacattagctatcagttcacagtccaaattgcaacttcctttccgaatacagtgtgctcaagttcgtccgtgaccatgtcttcaacggcttggagatctcaaagactatcccacaaatcccatctgcatattctgaagaaaacactgtgtttcagaaagcgggtcgttggagccatggttgtgaacatgcatcaagacattttgctgtataaaatggtcccatccgaagaggctaccggcaacaccgtatgtgttggtatgggttctcatattgggtgtaagtatctgttttgtatagcagaggaacatgactgttttcaagtttgaactccaaagtacctcgagtagcgcatcaggacctggtagaattgcatagatttgtaaggcaatcacgtgagttggtaggcaggacgagctgacgttgtttggccggagctcaaagcaagcacttactcacccaaaccccncgatttaccagcaacccaatacccctttttcttcttgtctctacctctctctaactatctgtgctcctatattctctaatttatcgtagttctccgcagactgttatcatgtcgacattggaggatctcgacgatcttgagcgcgaggagagagacaagaagaaggagcaaggcgatggcggcgatggcaagcaacctggtggtgatggagatgccgaaatgaaggatccggatgcgaagaagaaagatgaggatgacgatcttctagacgaggaaatcctgaattcaagcacagcggacattatcaagcggcggcgaatgctggagaacgagcttcgcataatgaagagcgaataccagcggctgacgcacgaacaaaatacgatgaaggagaaggtcaaggacaatcaagagaagattgagaacaataggtgagacttctagctcttctagatggcgtggcgatttggaactccaccggaaaccaggaactgggcgcagagtttcctgcgaataggggctagtagtcctcgttcatttctaacattcatatcataggcaactaccgtatctcgtcggaaatgttgttgagctgctagatttggacgtcgaagctgaagctgccgaggagggcgccaacatcgatctagacgccacccgagtaggcaaatccgctgtcatcaaaacgtcgactcgtcagaccatctaccttcctcttatcggcttagttgatcatgagaagcttaagcctggtgaccttattggtgtcaacaaggattcatacctcattctcgataccctgccggcagaatacgacaaccgggtgaaagcaatggaggtcgacgagaagcctacagagaagtacacagatattggtggtctggataagcagattgaggagatcgtcgaggctattgtatggcccatgaaggaagcagagagattcaagaagcttggcatcaaggcgccgaaaggtacttatcaaacagtatctggtgtaaacagactcacaactaatactgctcataggtgctctgatgtacgggcctcccggcacaggaaagactcttctcgcccgagcctgtgcagcagaaactaacgcaaccttcctaaaactcgccggcccccagctcgtgcaaatgttcatcggtgacggcgcgaagctcgtccgggactgcttcgcccttgctaaagagaaggctccctcgatcattttcattgatgagcttgacgctgtgggcactaagcgtttcgactctgagaaatctggtgatcgtgaagtccaacgaaccatgcttgaactccttaaccagctcgacggatttgcctcggacgaccgcatcaaggttctcgccgccaccaaccgcgtcgatgtcctcgaccccgccctcctccgttccggccgtctagaccgcaagatcgaattccctctccccaatgaggaagcccgcgccaacatcctccagattcactcgcgcaagatgactgttgaggactccgttaactgggctgagttggcacgcagcacggatgagtttggtggcgcgcagttgaaggctgtctgtgtggaggctggtatgattgcgctgcgaaaggggcacagcaagatcgggcatgagaactatgtggatgccattgctgaagtccaggcaaagaagaaggatacgaacatgggtatctatgtttgaacaaattcttgtatccttttgtaagcctagatttggtttaactctccttccgcatacaatgcgatgtgtatcaacttacgtgcagctcatattatagcactactacatgatagctaccggcttgccggttggctatacgaccagacgaaggaatcattcaccgtagcccaatgacgcatgtaggccacaggagagatcgctagttagactcaacaagaataaccacttgagactgctcagcaccttctgccttgttctgcatatcatatcgggccaactgtctcataatatgccacttccagcctcggatcatgaggagaagctctcctattgaacttgctgcaagccccacaagtaggcgcgaatacatagacctactcaggctagctttgctccctgaagggcatgtatgtgtggccgagaggtgcgcttcagacctcttaaagacctgcagtggcattgaatcatttttctggcacgaagatagtctccaagaaactgacttgtttagagctaatggagaaaagcactgtagatagccggccatggaggtgaagcgcgggttcctgctcaggtgtgcatacttcataccgaaaagttggtggtagacagtcttgctggcgtagtataatagtctgagaaacctactaaggtagcatgagctccaagccttatgtctacctacaatatgatggctagctacgcctttaaagagggcagccagcacctaatcaaatcctctcctcttgatattgctccccttcgtaaagatttgtgactagcctaatagcagcaggaccatcacttagactgtatcaggcaacaagaactcggattagataactaagattaagccagctaccagctttgcttacattacattattggacagaaaagagatccaagtcaggcagaagacatgaatattagaaaaccagcaaatgaccaaacacacctatagatagtgtcgtccgtccattcatttagcctgtcatgtccaagaccccacgccgtaccgatccaagcccttccatgacaagccaatccaattccgtcgacgcgccggtaaggaaagttatatatgagaattatacagacaagtgagaggaaatggcgtcggggaggcagcggaagagaacagaagtagatatgtgctgggtcaagatagatttgaagtgataaatggtggggtatcaagggtatatagaataaataaaggcaaagcctccccggtaataaagtgaaatatagagaaaagtacggcatcagatccagtctgagcgacaatgctggaatactcgagtcggatctcggttatgaaattatggggaactgccagtgaagatcgttcgtcgactccgtgtatccgtccgtaaacgccgaaaattgcgtgcatgagtgcagtgtgaaatgcgtatcgaaactaatctgcatgcgccacacaaaataggacgcccaacaagaaagtggaaggcagagcctaaaataggcgcttgacgtcgtaaagttcagccttaacggggcgctcccgttccatatggaaccaccagtcccggccacccttatggctgtaattccaggatcccgtgcagacgtccttttcccaaggaggtacactcatggttgacatgctcatcggcgtcggcggagtggtcggggttactggacttgtggccatcgtactagtaatgctagcgatactcccccaaccaaagcgcggcgttgatgttgacgttggcgacaatggctcctcaatagttggactcgaaactcctttgctgccgaagcagtttacaccaacaccggcggcgaaagtaaacgattggtttgcggctagaatatgtctccacgagacaagacccccgtcggcatcttgtccaacaatatcgggacgaagtatgaaacgagggatagatatatctctctcactgatcttggctccagtcctgcccatgtaagcaggcatccgaaagtcaaatactgtaattgggccttcatggtcttctggaattgggttcggtttcgggcgatcctgtgggatttcccacatgccggtctcatccaactcgttttccgcttcgtcatcagagccttccagcgcgttgtcagggacatacgaatcagaatgatctgttattagcacctgcaagccagtctccgtgtctcttgcggccatatcaatgaacgtctgagcccttattcgggctgatgtcaagttgttgcctccaggaagtgccatcggccgcgtttggacggacccgtgcgagcttcgaggaaggctatatcgatctggctgtagtagtgcttgtccacgagggattggctgacaaaccgcctgcagggcgcctgggggttcaatatctgatggagcccgcagggcatcaagtcgggggaaccccccgcatagaatgctttgtgcaagatgtgaattgggagcttttgtgtgttgaagaggtttcgcgaatggtgcaaaatcgagcctagaaagggcggtactaggattgggacatgcaacatgccagtgtaagaacctgagacttgatgaggccaaaagcggttggaaaactatgccgtctgtgttcaacgttgggcatttctccgtttgaacaatcttgaaccgttctaggctctggagggatgctaggattttcgaaatcacaagaagagagtcaatattaggttcaatcaaggtcagtgatttgagagtggaagactctggccgtgaagtatactgcgctagaccggcatcggtgactccaggaaggttttccaatcgtaaactttcaagcgatggaagacatagaagagcagtgtcggaaaaggcgtctgcgtcgaagttcgaaacgcacaggttgcgcaatgatggcaagagatcaatcgtacggaggaagacgctgggttccagggcagtgcggtctagtccgtaaagcatcaatgtctccaggtttgtccatgacgcgtgatagttgagaaactcaaacatttgcaagggaccgagactgccagggcaagaggtgctacgcggggaggcttcagaagtctccgttgcttcgcagagaatccaggtatgttccttcaatttccgccttgtagacaatgcatgcgttaggcgatcaaactcatggttgaaaggaattgtcagtcctagtaaccgttccaggttcgggcacaccatcacaaccgaggcgatgagatctcgatattcctgccattgggccgtatgtttaccagtcgtgaatagtagatctatctggggcacgcggagttcgaggacaagattggccagcaacttcctctcgcgaagcgtgcgtcttaataacttcagtctgcttcctcttttcagtcgatattttttcaattgagccggggagtcgctgccgacgatgtgaatacggttatacctgagaaatatgcatatgttagaaaaagcccatactctcgccccgagcactgcggcacaggacgccaaagatcaagcatccaaactcacagtcgacttctgactgccttctcccatgggcgacaagtaagagaaagggcatgcagatcgcgttgaaaacaggtcatgcatcctgactgatttggccctgaatgcaggaactgtagctggtcgagaatattctcatacacttcctgcgggacccgcttgaacacagattccaggatcttatccagagaggcagcagagtcgcatgtgcggtatgagcccgaaaaggtaggagagtaggaggtagggatggtcgatgcggtataattggttttgaaggaggaaactgaggaggtccgagaagggatcgatgggacagagctgccatacaccgaatccgagtagctgtggctatggggtatagcagtgtaaggcatagaagcactctccggccgattggcgacgacactcatggtgaattcggaatgtgcattggtttatcatgtacgttgaagcgagggacaaagagactgctggcagtctggcaaggggtgtcaaaagagagtcgatggaggggaaggggtaacagcgacgtttggcagtcgaaaagagatccactctgaaacagtaggattagggaatcgaagatcgaagcctgctagggattgcggaggc

SEQ ID NO: 15845 - DNA, 1749 bp, Emericella nidulans
cacgtactagtaatatcgtctgcttgagcatccaacaattcagctattctcaggagatgattttacccgaaacaaaattcgtggcacttccatattcgacacggagaggaaactgagaattatcctggcctccccgcatcttcatctcggccctgaagatcaatacttggccgtttcagactaacaaactttgtatgcgctgaagaatactcatgaagcactagccatgctctttggagacggccaccgggccggtccatgtatggaacggcatacttcgtggagactcaacgtccctggaggagtataagttgagtcaattcttctcatcctgctggctcatatccgccttcaaagacatctcaaaatggctctgttactatctctcagccttcttgccacaacaatctcagcccaacagattgggacgccagaaatccggccacgtcttactacctaccactgtacttccgccaacggctgtacagagcagaatacctctgtggtgctcgatgccgccacgcaccccatccacgatgcatccaaccccagtgtctcctgcaccacctcaaatgggctaaaccctgctctatgcccagacaagcagacttgcgcagacaactgcgtcatcgacggcataactgactatgctgcgcacggagtcgaaacccatgggtcgcggttgacactcactcaataccgaaacgtgaacggggcgctctcctctgtttcaccgagggtctatctcgttgatgagtccgaccctgatgagcaggagtatcgagccttgtccctgctcgcccaagaatttaccttcactgtcaacgtctccgcgctcccatgcgggatgaacggcgcgctatatctctccgaaatgtctccctccggcgggcgcagcgcgctcaaccccgccggagcctcctatggcacaggctactgcgatgcccaatgttatgtgaatccctggatcaacggcgagggaaacatcaacggctacggagcctgctgcaacgagatggacatctgggaggctaattcgcggagtacggggttcacgcctcatgcttgtttatatgagccggaggaaactgagggaagaggggtatacgaatgcgcctccgaagatgagtgcgatagcgcgggcgagaatgacggcatctgcgataagtggggatgcggctttaacccgtatgctctgggaaatacagagtactacggccgtggccaagggtttgaagtcgacactaaagagcccttcacggtcgtgacacagttcctgacggatgacggaacaagtacaggtgctttaaccgagattagacggctatatatccaaaacgggcaggtcatcgagaacgcagttgtctcgtctggtgcagactcgctgaccgattccctctgcgcctctaccgcgtcatggttcgactcatacggaggaatggaagggatgggaagggcgcttggccgtgggatggtcctcgccatgagtatctggaatgatgcgggtggctacatgcagtggctcgacggtggggatgcaggaccctgtaatgccaccgagggcgcaccggaatttattgaggagcatacgccgtggacaagggttgtctttgaagatttgaagtggggtgatattggcagtactttccaggcgtcttagctggttaaaccatgtcattgtagaggggtgaggttgtgcggagtaaagttctaattacacactgtctatcctatttttgtcggctcatg

SEQ ID NO: 15846 - DNA, 547 bp, Emericella nidulans
gggccaagacggcgcgggaatttttttgcgcaacggccacataagtaactgtgcgcccaaaaagagcgaaacagaggcgatgtctttcagaagacccgacaagggacctgaaccccccgtcaccgggggcgctggaaggcgacaccgacacggaaacaagccgacagacacgcctgaccacggacagcacactaggccacgagtgacgcgacttgcaaccacgagatgatcaccaccgaggtaacatgaacaggacgaacaggaactcaggaaagaacaaagactatagccaggactgcacagataacaaacaccggtgtgataagcgcgacacacactcgacacacagccgggggaagctacgacaggacagctaacgacggaagaggctatcactgactacagacagggagtcctgacacaggaaagcgagagcgcggagacacatgaggggcagctgcggaatggagatgacaggacgaactacagctaccaacagacaccaaggacaggatgcccgttcccacagcaggcaaggcgagaggcc

SEQ ID NO: 15847 - DNA, 1242 bp, Emericella nidulans
taaggcacggagagtgaaagcaagtacctgacccccagagttcaggtgcagtcggttttcatcgctagggttgccagtccatcccgttgtgggaccaacgtcttcttccggtactgacaggtagtaaacggtgaagggtcgtcatgaaatatacagagaaaaataatgcttcatcagtacaaatatagcggtattctagacctgcctgaatcatgtacgaaaaagtttgggctatcattgctgccacaacacgacagcaaataacttctggcgatccgtctttctgcaagcgaaccacctcgtcgagatccatgtctcgaagtccagccctgatatgagaaagagagatcttatggagtgcctttaacttgatgatatatgccggaaccttcccttcctggcccttgttatagacacagaactgatctgctcgaggcctgggccaggctgactttccttcttccttctcttcggtagttgggctgaagagttgacgttggccgattccgcggccaaacggctggagcgtcgcagatgcatctggcttaggcttcgagagctcgtacccccctatatgttcgaatcgtccgtcagggtattggtgtggtgttcggaagagacatctccattcagtctaaatgtgcgttgaagatgaggatttgaatatagctgccggataatggaagagatacgggattctatggcctgttgttggaagtaacctaggtctagcctggagcttagcatcttggcccgcacctcttttccatattccttcaatactaccaagggattgaaatggcgttcggacacgaaatcagtgctcgttaggtcggcccatatcgacatctgttcatcgggaaagctggtccactctcaaatcttagggcggagtgtgcggtgggcgttcgcaggatcgcccttggcagacgagcctgtctctctggatggtcagatcaagaaataagtgcaaatggcaggcgtcaagaaattcaggaagtgtggtgttttgaagctggatcggctggaccgtcagttcctcggcttgcaatcgtagttgccgaacttcagctgacagtcgttgttcttctgctcgctgtcgctgtattccctccaggcgccggcgcagctcctgtatctcctcttgttgagacattctgtatgccgtcgaataagtggccgatagtagaagacggtagattccctagagaagatatagtaactcgaacgggaagacagtta

SEQ ID NO: 15848 - DNA, 591 bp, Emericella nidulans
ttcttgaatacaaccctcgttcagatgagtgtgtcgatcatttctccccacgctccagaggaagagcgtgctaaacagtcaaactcaatcaaacggcctggccgaaggcatcggcaattgagagtccgcttcttataagctgacaccccattcgtagaacatacaggactctcgatctggctgaaggctctaccctgggcaggggttgagtgcggcaccaatactatttcgaaacctgccccaacagttccccgcagcaagatctggagtagaagacgcagacagagactaacgacgtggcaatctgggtctcggtagatgctctgcagcttctgtgcagctgctgacgtgttgataagacttaccagggctcccggagttgtcgccgggtcgagactccgggaggcatggtaatcttatatggccacataatgaccagttttttataaggcttatagtcaaacatctgtaaaagacaaaagaaataattgcgaattttccatacttcaaaaccgtccgaggaggtctggatgtcattgcacggttctcatggatgatttccccaccggccctcgagcgaggcttggaacg

SEQ ID NO: 15849 - DNA, 526 bp, Emericella nidulans
cgtcctgtcgacacgaccgacgtgaagctgggcattacgttcttccagcggggggcccgtttcttccaccactaagctccgcggccgtacaggccacctagctcgactggaggggcatggcaaatctcctacctataaggggtacccacggcttgaaatacctagccttacctacatacgacatgattgactcaattggattgttacgaccaccttcaggatcacaatctggcgatctatggtgagacgccttatgccacgctatcaaaatgtggtctaccattgcgagagggcaattcccctgcatcagactgggatctgaaactggtcactccggtgagctacgatcccgatatgctaatcagggactgtcactacctgctaccaagaatctagcgcgaggttgatcgaactgcgcgagtggatcttgtactacggaggccgctacgctacaactgactatggtgtcgcagaggcggacagctggatgctgtaagctccctggtgaagccactgacaaaagttc

SEQ ID NO: 15850 - DNA, 4008 bp, Emericella nidulans
  unsure (1)..(4008): unsure at all n locations
ccgcgccattatttgtaattattctaccttcccatatcttggtgatttataggcgagaattttggcaacggttacttttttcgctgcctgtgcatagccttgtttgttctggataattggctccactcactgttgatagatatttttagttaagagatgataatgagactcagacagctatgtattgacgtctagatagctacctgttcgacatcgcatcgtcacgtcgttcatgagctgcatcccttaaccgatctaacacagtgagcacgttcctatccccccctgtaagcgcagcttccagaactttgtctcttcccttgtccccaataacaaccgcccgctcaaccttcccggagtcggaaatcttgaaccgtcctacccggccatcctcccattctaccctgacgtatgccgcctccaacgccgtcggcgaaaacgacgcaatcccgaattcattcttcttcagcctcgtctccccaacaccagaatcaaatcccacatcaataaggacatcccgatcccacggcccatcctcgtcatctggataagagtcaacaccccgctggataatacctatctgtccacgaataaagtagatggcatccagccgcatatgccacgccacaagttgccgtctcacttcacggacgaataactggagattctgtttgcgcactggcgaagtcggtttcttctttagctgttctatactgtcatcgccgttctcgtcgccgtcacccggtccacgcgggtgaccagatagtaatatccgttctagccgctcgactggtatgaatgcaggtattgtatgtcgatgaaccttgagccttatatccgctggatccttctccgcgtcttcagcgggcacgcgcaccttgcgcaggaggatgtaatatggtttcgtgaagcgaccattccgcacgcagatatcaatgcgaacacctagtaaatttttcgcgtcttttgcgctctcgccatcaactaccggtgacgggtctttgaatgggaatgtagttgtggagaaagcgatgcggtggtggtttgattgggcgtgagagcctgcagcgcggacgagcccccccctatcttcgttcaaagtagaaagtataagagaggaggcttgttgtggcttcaggcgcttctggagcgcttcggaggagagcacgctgaatgcgaggaaacgacgngcgtctctggagcttgcggactgcggttgaggtcagggttagtttgtgttcttgcgttcatgctcggcaagacaacactgactttcgcggcgaatggaggatatctcggagtccagctcctcttccaattgtgttgttgggtcgttcagatccattgtgatgtttatcttatggagtttgttgatgtttgggttcaacacatcgcggcgcgagtatctgtgattcggtcacgtgatacgtcatatagtatgcgattgcgtccttcatatttcagatattgaaccaaaactctggatatcgaggtgaattatggcactagctgcggtcctcgagtaataatggcttttggactaagttctgttaagaccattggaagccctcagttgggctcaccactgtctgggttcagcgaaatgcccaatgagtgattggagaatcagaactggaagagaactggagttcaaggcgcgattctgtatctagaggttacatgatgttcctgcaagtattgcgacttgaagggtgaaacctgaacagtgctgccgatccaagggtccagccgggtccctgaggatttcagagaggccagcttgccagatccgccactccatatccatccatttttccattatttttcccctcgcatgcaccgctccagtcagggcgatcccgaaacccagtcaattcttccgtcttcctcttctccgtcttcttttcctctatccatgtccaggatctttaccgtcgcggctctcccactacccacccgaacgccgacgaggtcgagcttcagaatctagcatgcaggatcagagataaatcacaaacacagagattcaacagactgatcagcatctggagaccaatttcgcgcctgtccagccgatccaacattgacgcgtactccccctgcaagacatcctggcacgcgatcttcgcaaccgtgggcgtgacacactaatgaagcgcaagaataacactgtttccaaacgtcggtccaagcccaacctcagcgttgcgaccggccagaacggcaacgctcacggaaaaatgaattccaacatcgagatgcgcaagcgcgatacctctaccgggtcgtcctcgtccgcgcgagcagatcgcttcatgtctcgatcgagcttcacccttgaccaggacccgccgacgccccaaacacctggaatgacgacgacgagcttctcagatctcccgtctagtgataaaaggaactttatgctgctgtgtttgctatattttcttcagggggttccaatgggattggccacggggtcggttccgttcctactcaagccgtacctttcatacggacagatcggtgtcttttcgctagcatcctacccctactcgctcaaattactctggagtcctatcgtggatgctgtatggagtcgcaggtttggtcgccggaagagctggatcactcctgtccaggtcattgccggactggccatgatttatctcggagggcatatcgaagacatgatgaagcaggctggcgccaacggtggggctggtgtctggaagtttacatactggtggttcttgctggtgtttttctgcgcaactcaggacattgctgtggatggatgggcgatcactctcatgtcgccgccaaacatctcctacgcttccaccgcacagactgttggcttgaccgctggtcatttcctgtcttacacggtcttcctcgcgttcaattcgaaggactttgcgaaccgatggttccggacgactcccgctgaaggaggccttctctcacttggcacgtacctgacgatctggggctgggcgtacctcgtcgtgaccacctgcctagctcttatgaagaaagaagatcatgtctcagagcgtgacagcatttctgccgtctaccgcagcatgtggagcgttctaaagctcaagaacgtccagaccatcatcatagtccatctgatcgccaaaatcggcttccaggctaacgacggagtgaccagtctaaagcttctagacaaaggcttcggtcaggacaacatggctctggttgttctcatcgactttccctttgaaatcggcctaggctactatgccgggaaatggtcgacggagtacactccaatgcgcctctggtgctgggcctttgtcggacgactcgctgctgccatcctagcccagttcaccgtcatgatctacccctctgccccagaagtgcccacctggtacatgttgaccgtaatcttcgaacatgtcgcctcaacattcatgaatactgtcatgttcgttgcagtgtccgctttccatgctcgcgtttctgatcccgccatcggtggtacctacatgactatgctagcaacgtatgttctctcagttcctttaacccacctttactgattatcctatagagtctcaaacctcggcggtacattcccgcgctacttcatcctgaaactcgtcgacatgttcactgaggccacctgcgtcccaccaaccaccaacccttcaccaggttctctgaaaggcgacctcgtcacgtctccgttctcatgtgccgtggaaccagatcgtacccgctgcattgacggcggtggcacttgcgatatcacaagagacggctactatatgacgaatattctttgcgtgctggttgggacggtaacatttatcatgttcatcaagcctgctgttttgaagttgcaaagtttgccgttacgggcttggagattggcgcctgggcgggaatgattttttttggacgttggtaacggtgatacagtgcaaatatacatatacatacaaggtctttgtatgtgggtagactaga

SEQ ID NO: 15851 - DNA, 2578 bp, Emericella nidulans
ctttagagcggcacccctcgagaaaggagagccgctgctcggcttgagtagccgccctagcactgctggaaagacgctgcaggctggggatactggcggacaactcatagaatatatcctggtcggagttcaccgcgccttgctctccgggaagctggcgtactgttgggaggatagaggcttcaacttccttcggccgaatgcccgtcatatgtgccatctgatgagaaaagaggtattgaaaattcaattcgaacggcctgtgaggaaaatggaaggggatggccaggctgctcgactgttatcaacggtcatggccagcctcagcgccgacaaactctttccccgtggcgaacggacagcctccgcattttgagtccaatcgcggggaaaggctccaatgggctggctttatgaaccatgttttctaactgcccttgtcgccaaaggttcttctgatattcgggacagagaactagccgattggtgagaacaagcgacgaacgaaaatccccaaccagaagtcacataaccaatcataaaacggcttcggtgcgtagaaaaccgcgttctggaccgatccattatcgtgatgacgtcgacccactgggctagagtacatccctacttagtcactgtacccatcggggtcccttattgtcgattgctcgatgactctctgcgtcgagccctaaggtaaatgatctactagcatgccgacatcacagtttaagcattaatgctggatggctaggtcaaagggaaacagtcgccctgttttggtacgctgcctactcacaaggaaaggagtagaagtgggcgagtaagctgaggttttagcagagggctacatcactgtacgctttaccttgagagccaataactgcagaattgtattacgttcctcttcagtctgtttgagactggatcagccggtgcgttcgcatctcctctcatcttgaaccgagtggatgggatagaaggtggtcattccagtgctcacactaaacatctcagagtacacctgggcaattgtttgcgtcccgtcactggaaagcatcacccctttgtacatgaattagggctcaacgtacagaaacaaggttaaatggacggtcgccggtaccatacttcgctagctgcgcgccatcacggatcagtagtcttggaggcggagaaattcccggcaaagtcccaactcagtggccaccgtatttgacgacaacatgactgacagagtaaaatggaaagcttactgtatttgccacggtctcgacctgaacaagctttaccgagctattcgttggtcagaccgagactgagactcgggaagagatgaatcccgcactcgcccacagatgtcgctgctcaatgcttcaatatgcagactagaaccgtgcagagagaagagattatgttaccaaattggtcatgtcaaattgattgagatccctgggcaataaggattctctctgccatgtatctggtctgagagcaccgctcttcagggcttatggtatcaaccccctctctctgttgcccaggtatcctgtccgcagacgggggcaaagacctcacaaggaaagcttacaatcgaatgttcaagtgcgttgattaaactcaaggatcttctgggtccggatgtagggcgtccattcggaccaaaggccctaactcttccatgggaaagatgggacaagcctcagtgaatctaccccttgggaaatgggactggattgtatggtatagaggtagtaggcttgctgaaagtcaggtttacttcatacaaagtatagtgcatactcatatgttcccaccttaaatagagattactgctaaaaaccaacccttaggtctcccatgactccgataaccttcctgtccgaaaaacacggcgaaacctatcccatccacaaaggagataacaccaaagacgctaatcgaaaacatccatcacatatcgcacattcctctgctcatcgaaccacttctccgcctttccattgtccgaaccgtcgccggtcgtttccatctcgtcccgcaggaccgtaaccatagcgcttcgaaccgactgagccagcgcccccgaaccacaaacatacaccctcgcaccgtctctccacaacttcaccacatcctctcgatcagccaggattcgatcgtccacgtgtcgacaccctttcgtgtcatcagattgccggctgaacgcccatcgggcatccacgaccccgcgggcctgccattcctccaactgctcccgataaagatcatctatcccgggagcccggcatccaaagaaaagcaatgccggagccagtttgcggtccttgtcttgttccatcatcaccgccctctcctgcaaaaatgcacggaaaggggcgatccctgatcccgccgcgatacagatcatcggcgtggtttccggctcgctgggcaatctgaatcccgacgaagggttcttccgcactgtcacttggagatggtcgcctacactgagagaatcaaggtatgaagttgcgacgccgagatgacgggatccattggatcgagagcgtgatggggcatcaagaacggaaat

SEQ ID NO: 15852 - DNA, 372 bp, Emericella nidulans
  unsure (1)..(372): unsure at all n locations
gccgcaaagccaccggacgatagatacccagacagcacagtagtatctgcagactcancgccannggagacggtagcaggctcaccagagaagagggcgccagccccaaccagggagcggaaaacaaggaagaagcggcccgagaaagaagcaagcgcgacgccacccgccgaagaacagccacactcagngcccagagcggccgccaccccggcgaggangaacgagaaagggaggagagaagacanganggcgggcctgatcgccgagaagacaccggcggccagcccggcgcctacagaaccacagccgcaaggctacaaagcggcaggaaccagaaggggcccaatgagccagggaccaagaaggcgg

SEQ ID NO: 15853 - DNA, 3894 bp, Emericella nidulans
  unsure (1)..(3894): unsure at all n locations
gctccactcagtctatctgaaaacgtcgggtcccaagaaatcaaaatccgatttcctaaaacataaaaaaaaataaaaaaaaaatccagtcacaaaaacagccagatacaagctgtgggtcccttgatatcctcgactgtttgctcctgcaacctgggctttgtacagctgtaaccagaatgggctccattgctggtgagactcaacggcttcatccatttaatagcttccctccttcccgcccttgtttgatctgcctttcccatactctcaagtttctcctccacattgccttttcttaaatacctcggcctgctttgcaactcgcgctcaattcacctaacccatctactaccaccactgctactaccactgctactaccactaccacaaccataaccactaccactaccactaccacagtcccactgccgtttcactgaccaattaactcgcccaacgctgctctcaaacatagctggtcaattcatctactgctcactcggagtgtttcccgtcagctatcattaaggttttgcgctgttggcttccttgcagtcgtcacacagcctagcagttcctgcgcaaacagcatcagagcaaattagagcacaaaaagcaacttcacggtttaagaggtcgactcagagcagaggaagacatgccgaaagccgcttgacaattgaaccagttcgaatcagtgatacccgcctgcagttcttgcctctgccgagtgcattccatacaagccggcctgaccacgcttgctctcttcagcaaggaagagacgcaatccagctatcccttcttgaatcaagcgagatctccagagttccagccacaccaacacaatgttcaaacgaccagcgtttctgcagagtcggcgacatgaagagcgcagcggtgattggtcggcgtttcctatacgtcaacttttcgtgctgggtgagtagattcctatcaaatatggacaaaattccagctgcccctggcctccagcttgattgagaaccacccccctttttttgcctcgcaattggaatgaaaattttttggttgttgttcgggtagcgactgcgactgaccgttacacagcgctttgccgcatctgcgagccaatcgccttcatgtcgattttcccgtacgtctatcacatggtggagtcgttccatgttacaagcaatgatcgaaagattgccctctacgctggtctgatcacctcgtcctttacgttcgcggaattctccgccggtatgttttggggtcgcatgagcgacaagattggtagaaagccggtcctgatcatgggcctggttggaacagccattagtatggtcgtgtttgggttcgctcctaatttagcgactgccatgattgcccgagcgttaggcggtctcctcaacgggaacattggggttctccagacaactgttgcagagattgtcaccgtcaaggaacatcagccacgcgcctactcgatcatgccgttcgtctggtgcttggggtctatcattgggcctgcaatgggcggggcgttgtcacagccatgcgacaactatccctggttattctcgggcgaatccatattcaaaaagttcccgtttctgctgcccaacttggtctgtgttgtcgttctgatgactgggatcgtggttgggttgctgttcctggaggagactcatccggagaagaagtatcgtcgtgaccgtgggctggagctgggcaattggctgattggcagatgctggggttctcgcgtgcaggctgtggaggagcaggatgtcaaagcggattcagccgatgcaggctattttgacgactacgacgaggttcctccgccagcttatcggagcacggaaacttccccccgtttgggcccagtaagggaagtcgatgacctggctgtggatgacgacattgaaaagcagatgagcggtgggaaacccaaggcctttacaaagcaagttatcttcaacatcgttggatatgggatccttgcatagtaagtctgaccttcggatgcaacttgaggagtagcgccggggggtgcaccgaagtttgcgttcactgtatgctgactcggacaatagccatagtgtttccttcgaccaactcatgcccgtcttcctgagcacgcccaagtccaaggaagatgccgtcttacccttcaagtttacgggcggcttaggattgtcgaccaagactatcggcctgatgctggcagtgcagggcgtatactccatgatcgcgcagctctggctgttccccttcgtcgttcgccactttgggaccctgcgcacctttcgcttcgtcctcctcgtttggccgccgctttatttactagtcccatacctgatcctcctacccgagaagcttcaaatgaccgccgcatatgtcgccctgatctgcaagattaccttccatgtcatcgccttcccctccactgcaatcctgcttgccaacgcagcaccctcctcgaaagtcctcggctctatcaacggcgccgccgcttcgacagccagtctcagccgcgcctttggcccgagtgtaaccgggtttcttcactccaaaggtcttgacagcggttactctgtcatatcatggtgggcttgcggtattgtctgtctgatcggtgccatccaaagtttctggatggaggagtccgagccccagcggttcatggatgagaagaagcctgagcccgacacgtctcacaccaggaatgtcttgcggggttcattcgctgcagacagggaagacggtactgcggatgaagtccggcgactgctttcctcagcacggaccagtgttgacgaactggaggttcccagcatagccgccgacttgaggcctgtacggggttaattcgcttgcaggtctgcgcgtcaccaacgtgcttgctatttttgttttaccttgatgagcattttatcattccatctccgtcttatacccggcgaccacgnttgttagcttgttttcttgttcgcttcactgtcgttatttttcagcttcgcttgttctatctgtttgataattctcgccttacttcccctcttctcttccctttcttttcattttattttattttatttttgtttttagattatgactcaagactgggcggcgcttacatagatggatttggatacatgcatgtaccgggaatcaaaagcatgagtgaggtgtctctgttgcgttcatttcattctgggaggaattattctatcggggcatttgtggccggatctcgtcggttttcatgattgttccatgcatccgggcggctgtttgtctttccagctatcatcctactactaccatgtttgagagcacaatttcatagatgcgaggagccgtcttgtggactctcttccattttccccgatacacctgtttgcccaaagtatctcctagaccagcgtagtagccaaagcacatctgcacctccgctctcatagccgagcgcagccatcatcgaaagtgcggggttgatccgataacactcgatactaaggcaggtactttcattcaagcattctggatattggaacccaacgtgtgaataggaggatctcaatagtcagtatatggaatagatatgatatcgagacttcaacgactggttggctttgactcgatcgcatcttcaaataaactggaaatgcgttctgcactgcttatcagtagccaatcaagcgctcttcataaaatccacgtgataaattgtgcttcgacatacatcgctcgttcacctctgatggcatcagtcattcgctccggatcagggcagctctcagccgctttctatcacagtctgcatttattgctacacaagtatacgtactaccaccattggacccgcgatctatcagggagcccggtcgatcttgc

SEQ ID NO: 15854 - DNA, 4205 bp, Emericella nidulans
ccgggtcgatccggctcaataatgcggagattccgccgccaggcgatgtcgtcgaacgcagacccctcaaggcgcgacgatggaaaagccatggagatatagcagtgggaaccctttcggattaccatactcggcgtatccgagggtgcgacggtcctggagggtgaggaccttgtcaacgcggtttgctggcgtatgtctccggcttgcggtagcagcgatgttattgcaggtcggcggaacaactcgtatcctggaccagtgtttcattttattttcttgatgcgagaatattattctcattgcgaaaatgacatatttttaaaggtattttcaatgctgacgccgctgagatgttgaaaagcaaatcaaaaagagcagcgctgactgttgggcgatgattcgaggctagagtagggcgccacatcacgccagatagagcttcaccaactggaatgttatgagggcgatgcaaatcgcagactgcttcagttgtatttattcttttctatggagatgggctccactgtctatggttgccgtgcccggttagtttgagggtaatgaggtcataagtatgtatttgggattctcaactgagacctcgaacctcagcccagccttttcccagcggaaggatgcaggtgaaaggatgaatcaagccagctctcatgatgaaacttctgttcaggactcttccgcagcttcctcgacagagatggcacagtgttcgaaccctctccacagacgtccttgaaaagcctcgcgatgacaaggagcgtgtcgtcatcctggggtcaggatggggaggatacacaatgtcaagaaagctctcgccaaaacgcttcgctccggtggtagtatccccccgatcgtactttgtcttcactccgctcctaacggacacggctggtggtgacttggacttctcccacattgttgagccggtccgggatcctaagatcagggtggactttatccaggccgctgctcgtgctattgatttgcatcgcaagacggtgctgtgtgagccgacgattgtcaagagtggtgtcacattgacccataccgaggaggacgaagtgggctccgagcccgccaatatatgggagaaaagcgaaacgtttgagatcccgtacgacaagttagttatttcagtcggcgccattagcaggactttcaagacccctggcgtaaaggacaacgccatcttcttcaaggatattggcgactcccgccgggtccgccgccgggtccgcgaatgctttgagctggccaccttgccatctaccagccctgagatgcgcaagcacctactgcattttgccattgtcggtgccggccccactggaactgagctggcggcggcattgcgagattttatcacttcagacctcatcactttgtatccgaccctagaagggttgccgcggatctcgctctatgatgtggctccgaaggtcctttctatgtttgacgagtcgttatcacgctatgcccaagagacaatgaagaaagagggcatcgaggtacaaacttctcatcatatccaggacctccgttggggcgctccaggcgtggagccgccttaccagaaggaccctcgcggctgcctcactctcaccacgaaggaggaagggcagattggcgttggaatgtgtgtatgggtgacgggaaattccatgaacgagctcttgcgcgattcgcttcgcgatgttgaggtatttccgttcaattcagctgtgatgaaggatggaaccgaagtatcgaaagacgcgtctcagggctcttgggcgtacaaaaaggctcctcggtccggtgcactccttgtggacggccatctacgcgtacagttagagaacgacaccggcgccacagccgttctccaggatgtgttcgctattggtgacaacgcaatgctggagggcgcctcgccccctgctaccgcgcaggtgactgctcaggaagccaaatggctggcaactcatcttaatcagcgcgacctgcaaagttcgcctccattttctttccgcaatatgggcacgctcgcgtacattggaaacgagaaagcgctgatgcaactgccaaacgaggagcgcggatatcttccacagaagctcacagggaggacggcatggctggtctggaattcagcgtatttgacaatgaccattacgtggcgcaataagttgcgagtagcgtttcgttggatgctgaatcggctgtttggacgcgatatatcgcgatattaagaatggcgacaatcgcctacgagggtgtggtgaagaaatatattagacacttgtgaaggattgtcagtaataccaccatacccctcagaacagaggggtaacttggaagtagcaaagttagtcttgaatactactccctggcgatatactccaatagatctagattcatctacgtgttcgagcttcaatacttcgtactgtttttctttgagccaatgtgctttatgcgcataattatgctagcggttagtcagcatccccgcattgaagcgattgggtggagctgtttggaattgggagcttggatttgaacggacaatctcaatccactccccgcgccctccacttttccggcatcgacgagcaagctcttctaatgcatcgcaagcttgttggcgtcgctaggacgctcctaatgttatgtcaggcgacctgaggaggccgagagcaggggcctgtgtgacttgtcggtaagtggttgtttgcatcgttgcaaggctggaataacactgaagattcacgtcttgacaggtcccgcaagcgccgctgcattccgacgcccaacggagacggctgtcagctttgccatgaaacagcaaagccctgcagtctcaagatcgtatcacgcttcgagagggcgagaaatggtggacggtaccagtcgatcggcggaaacgcgccgctgaatctgccgtccaacggttgcgaggctcccgaggctcctcttggagggctggcatcgcgagatatctgggtcgagcttgttcagctctactttcgctttatacatgacattgcccatacaatattccataagcccagcttcctctgtcgcctctataatggcacagcgcccatgatccaggtctatgcaatgtgtgcattggctgcgaggtattcttgaatgcgtgcaagttgtgaatacctcttccttagtaacctcgcactgcagattttccagcaacccgacctttgaaggatcagctccgtgcgatcgaggaaaggcgttcgtcgcggaagcagttcgcctttgccagccgtatatgatatccccgagtctggagacggcccaagcttttttgttgatcgggtattatttcagcggggagagcaatgtggatggtaaacatatatacgttgggttggctcgtttgcatgccgagagactatcgctcagcgacaatctgagtgctgtttatcaggaggagtaccggcggacttggctgtcaattcacattacgagccattggtcggcgtgggatatggcaatggagcccctcaatttgcctaacggatcggacttcttacctagaattgacgatgcaactttccgcaccaccaacgccgcgctcctcaatgccaaccatatccaggatgaatttcgctgtgacatgtgggcgcaaatggcacgaacgattgggatatttgctaaggtgaataatgtattacgacgtctgagccgcaatatgatctcctttgatgactattgtgtggaagcagcggaactggaagcttccttggaccgatgggccgaaagcctgtccccgatgttgacgtggagttttgaaaacctcatgttgctggcgggaaggcggctcggtcagttatatctggctatgcatgttggcttcttccacttcaagcaaatgctctttttcccattcctggatgccagagcctcgaagaatccaaaacccagcggagctgacaagtgcaaggacagcgcgtctgtagtctcgtctatcctgcaatattccaaaaacatcaaggactgcgaactggagaacttcatatatggtcacattggtgtcgtcagttcgtgtgttcatctccatacgcttttattcagcgatgattaccgagaactctctatcacaagacagcgtctagtatccaactttcagtatctgatggcgctcaagtcatattggccgattgtggagcattttgtat

SEQ ID NO: 15855 - DNA, 554 bp, Emericella nidulans
agactgaccggagttcatcctcggtgacgtatccagagagaccgccaacgaagacagtcgtgttgttggggtcggtaaactgattcattggctggggggcgccataaaagcccattgggggagcacccatgggaggatacatgccagcaggaccgggcatgcccataccgccaggaacaacgccgggacccttgttcttcggggtagcagtggagatgcgcattgaactgttgccgaagaaaaccccttgcatctcgcttagcgcacgctggtgatcggtcttatcagagaaacgaacgaatccataaccccccaaaagcccgtttattgggtaaacataaattttggcggacttcacagaaggaaaaccggtttggaaaaaaaaaaaccggggcctttttcgtaaacctctggggccccaggcaccccccaaaaagggggtttctaagggcctaggggttatcagggttttcgggttaaataaaacaccccctaagggtccctatttatttttaaaaaagtcgttttttcaatttttttggggcgtttataaa

SEQ ID NO: 15856 - DNA, 400 bp, Emericella nidulans
  unsure (1)..(400): unsure at all n locations
gggcggattnatgcccgaggaaacaaagtactatatatcagatngaaacggannaaangcagtgcacgagcaaacgagcacgaaccgacacagccaccaccagggcgcggacataaagcagaaaaagccgagagaagaaaaggagcccggagacacccacgcaagaacaggcaccaccagagcacagagcggcggccccccccagccgcacacccgaacaagaaccccacgacaacaaaaacaacctcctcgacgccaactgcgcccccagggaacccccctgcgcctccagcagtacacgctgccccgccccaagcaacactaaccagatcctcgctaaccctcaggcggacccgctctagaacgcggacccacgccctctcgcgctccctgagagctt

SEQ ID NO: 15857 - DNA, 2513 bp, Emericella nidulans
taagccgcacggggaagcgtggtgccttccatcctccgggttataccggctccgtcctcgggttcaagtcactgtgcgaagatatctggggctggacggaggaggagtacgtcgacatctatgagagctgcgttgagatcatcaacgctatcaagccgtctctatgcgcgatcgatttcttcttcctccaaggccgcgatgccgcctataatgcgggacagacgacagtcctgctcaacactacgtccctgagccatatcgtgctgggtctgcagaaaaatgccaagtgggcatggaaatatcctatgtaagcgccccggctcgatgctcagagagggtgactggtgtctaaccaggtcgcaggcccggaacagggttcccgtaccccctgccgccacatcttatccccctcaacacgatggccgtcctgaagacggcgaagatgtaccatggcagcggccgtcgccgcgaaattcgcgactggcgcatcaagcacaagatccatggacggttccccttcgctgactcttggatgccaaaccggctgcatctctcacccgccctgaaagagctggactggccgtttgacgtgcccgacaatgttgttccctgcggcccaatcctgctccccgtggcgcctgtcaagacgcaggatcccgagatgttcgcctggctgcaccggggcccgactgtcttgatcaatctcggaaccctctacgcaccgaaccccagcgtcgtcctggagatcgccactggcgtcaaaacgttcctggcttcttgctctgatcggaagatccaagtgctctggaaactgcccaagcacccccatgaccaggaggagatctacacgcagtcggtcaccccgctacagaaagagatggaggccgaccaagtacggatccgctcctggttcgaggtcgagccgctcgccatgctccagacaggccagattgtctgttcggtgcaccatgggggggcgaattcgtggtatgaagctatacagtatgtccccattgcatccaccacttctccaaacccatcccctcgcttgtatctaagacaacaaactgacagaaacagaaatggcgtcccccacgtcgtccttcccgcttggcaagactgctacgagaacgccgcgcgcgcggagtggcttgggattggcgcctacgggaacaagagtcgtgcccctgatatcggcggcaaagagctcagcaaggccttgatcaaggtcctagggaataaatcgtacctggagaaagcgtcgaagctgcagaagctgtgtcagaagaaggagggccgtctagaggcagcggaccgtattgccgaccttgctgcacggcccgataagagcatgattgccgtccctgaagtcgatgaaaacgatccccgagttgtgacggtgacaaatggcaagggagagacgctgcagactgtcaattcagtggacgaaggcgcagtcaacaagtgagccaccgtgtcccataccctaaactgatccacccatgggagaggaaattgctgacaagacccaggtctatactacgacgcctcctcgaaattataaccgttgctttcatttcaaacacttggttcctccttccgctcctgggctactctctgctgctcgtcccccacaacgggttccgcattctcgtcctctcttacatcctgcacatcaagttcttctccaacgcgcacaaaaccagcgcccccaagccgagcaagtggcttcgctcctccctgatgtggaaactgcatgcatcgtacttccccataagactctaccgaagtgcctccctttccccgcgtcgcaaatacgtgatcggcgcgcacccgcacgggatcgcctgccacgggatcgcaggcgcattcacggcggatgcaacaaggttcgagacactttttcctggaatcgtcaaccggttcctggtgaaggatgggatgttcaccgcgcctcttctgcgggagtacctctttgcgcgggggcagagcggtgtctcgaaggattcctgcatccagcatctcacgcgcggaggttatgatcttcgggggatgggcaaggcaatcactatcagcgtgggcgggagtcgcgagtacaatatcgcacgcccggggacgatgggcattgtggtcaagctgaggaagggattcatccgccttgctgtcgagacgggggcggatctcgtcccggtgcttgtgttcggggagaacgacctctttgcgcccattcagttctctcggtattcgatcaagggcctcatcgcttgggcgtgggagaaagctgctggtcacaaggttgccttctcgctgggacggttctgcatgttcatccctttccgacggccgctgcatgtagtcgtcggcagacccatcagtgtcaagcagcagcggtttgatgtcagcgagaagtatgtcgaggagttgcagggccagtatattgatgagctgaatcggatctgggcggactggaggaatgtgtttgaggaggatgcgagcgtgaagttcgagattct

SEQ ID NO: 15858 - DNA, 477 bp, Emericella nidulans
tgtttgctgcccctgacggccccgttgccgttggtttcttgagaatactcttggcggagcatgtgttgacgtatctgggtgttgaggttgggacttgcagtgttgagaaccgctttgagggtgcagggctggacggatgcgggcttcgaggcgaatggacttgttgcaaaggcccaggggacttgatagacagcgagagtgagggcctctgggtggcagcgatggagacagaaagcttaggcttggtgcggtacattttggctgcttgttttgatattgagtactggatcttttgtggaaagtagtaggtgattgattgcagcaagccaagtgggtttgaagctcagttgagatgtattggcgacgaaaatattgacgatttattgggactcgacaaggcagactttgatcaacaaagtcttgaggctcaaggtaagagtatagtatgtaagaataacccggcgtttaaaagaagac

SEQ ID NO: 15859 - DNA, 1073 bp, Emericella nidulans
ttacacgaacgttccgacaattgccaaatcggctcttctcctggccactgcgtcctacgctgccaactacacggaatggctggcgcagtctttcttcagcaagggtgtcacactctcgcggaattacgcctacgccgttctctacacaggcgctgaatatgcccacaacaaaaccggcgatccggtctactttgactacatcaaggcccagatcgatggagtcggtaatcaccctccattcaccgctttaatctatacaacactccatcttctttttcctaacactgtctaaactctctttgacctcttcctcaacatcttatccgtgctctccttatctctcccacactcccctcctaccagcactccaaatagcttgtaactcttacatgcataccttacactctctaatgaattttaactcccactctttttctagccccctttatcttacctactcattcctccgtcttctctttcagactcactcctattccctatcattctccttctataccctttcttttcctccgtctaccctcattccattacctccctttcttcatccttctctctccatcttattactctactaatcacccctacttcttcttatcccaacaccacccttctcccatcctactctcccaacaccattctattatactcacctctctttttttctctttccaccttttcactcacttacctcacatcctaacatcttcccttatctttctattcctcacttcttacctacatcctctatcgttatcctctctatccttctcttaccactctatctacacattactaccacttctctatacctactagttcaaatccatacactaatcctattcctacacccatctcattacatctctttcttcacccatccactttctacatcatctcttatactccacacctaccatcatactctcttcgctctcatcctcacttcgctctcctctcgtttacactactccagcttacgttaacacatatttagtcatcaagtaacatatcctctcactcatccacctcctctctcttatctacactctaac

SEQ ID NO: 15860 - DNA, 605 bp, Emericella nidulans
ggtgacgccatgatttgaacattcttgcctaccgcccgtcccaccgtctttattcaatatttgtcctcgacaatattctgaatagcttggctgtgtttacgattgtcgctgcttatcatactagaagatgccattgtcaaaacttgattgaaataagcaaatgtcaagatggtatcaatattctagactgatggactagcatttttgtgtaatcctgctcggtccgtggtcttaaatgtgcgttatgtaattgggttcgacctgcttatatatattctttgttgtctttttttaattttaccttttcctaaatacttccataaatttatcatttgatatagtttaatcatttttatactctatatttttatattcatttcttttattctcattatattcatttttataattgttatattttcgcttctattttcacttaattctcaatcatttttattattatctttatgtttcatatattattttcttttatttaatataatactattcattcttataatagatatataaatctttacatttttaaccttataataatttttaatattctattagtttatttttatttttattattgattctct

SEQ ID NO: 15861 - DNA, 553 bp, Emericella nidulans
tgcaaaccctagctactactatcatgtgaaacaatgctatcgttacatgcgagcttctgctcgaccgccgaacatagcctctgaccgagtgctccctcgacacgggtcattttgcgaccttgagcacctgctgtacagcttcatcatctatcgtcagggaggcacggctatgcactcgctcaagatacgcgagaaccaacatgttcaacgtgcttatatgctatggagcactcgatgagcttaagaataccgttccaagactggctctgccagcatgacctgtgcatgtgctcgcttcccaccaaaggactcaacaactgcctgtggagagactggccgcacgccactgtcttttcaggtaaacctgggcgagcgacagacccaaatgcttaccaagccggactccgttataggtctcgctcatcataatcctacccttggatagcggcataccatgaatctccagctgattcttcacacccaaccatccgaatgcgactattgctgacagacgaaaggcctggttcgcatcaggtgcagatacacgtaccta

SEQ ID NO: 15862 - DNA, 592 bp, Emericella nidulans
ttcctgttcgaatacggttgcgacttggagagtatataatggatttttggttgcatatccatttggcagttttaggctactcttgctgatactccgtagtctagtgtgcgtcaatcggcttgcgtcaggcaggtgtacctccgcagtgtggcgatccctgcccatgcaaagcggacaagattcctacatatctgaattcgttatgatatgtattgcccagtccagtgcatgtcccagtgtcagaatacagcaagttgacagcttctatctagggcttgagaaatgccgccggagaccattacccagccagcccttccaccttgcttgctggcaacaaaattcgtacataagagcgcaaaccctctaaatccttgtgatgctacataaattataacattttctgctaacggaacctttgaacaccaatggaatcagacatattacccgcgcagccaatcataatcatcctttaagccacttgcctattatactattccccaaacatccccctcaagcggccctttgattttaagcccttggaagaaggcgattaccggcaaccttttttcctttccctaccgttaaaaccgtt

SEQ ID NO: 15863 - DNA, 4047 bp, Emericella nidulans
ggttgactgtacgttctcgtgatttcttcctccatgcaagcgccgagggctgtaggagcacgtgattgaattcacttttgacaatggctgatttgttaaatttctagtactgggttgtttacgctttctttactgtcgttgagagcgcaatcagtgccccttactggttccgtgagtatcctttgccagcagttggcgttcgatgttggatttgtgctaacttaactccacagccttctactacatcttcaagtttgcacttgtcctctggctcgctcttcctcagaccaagtaagctgaacacgccatatgcattggagaaaaccagctaatactagtgcctcagtggcgctcaaatcgtcttcaaatctctcgtgcagcctcttgttggccgctacttcaccggtggttccacctcggccaacctcagggcccaggctgatgccgctaccaagtcgcagtaatgagactgactgcaaacttgatatctgtggtcgaacgaacgaagctgcagatcaggtctattgtttgcgcatttggtgagaataacgaaatggggcaacgacgggatgcggaattgtcgctgtttgacgtggagaggagcttgtatggcgatggcggctgtgaggttgtacaggcgccaaagcgggccgtgtccgtttatttttttatccttttttggcatgggttttctgttgtagaaacgtctgcgatcgttggtgattaggggcgggagcttatctcgttcaataggagcgataggtactttgatgatatatttatcctcttgggtaaactcgagcaatgtttcccttgtgagccatcgtggttgttctttatccttgcgcgacgtatgaacgacggagtctataatgaaaagcaataggccgatgtaatgttcactgagttcaatactgctgcaagctgtgggtgtcggctgcagaaggagaatcccagaatccggagacctgattatgatgatattcctaagtggcgctgagtaccgtagcccagcaaaaagtcgtcttgtggcaagtttttcataaatccatgatactcaatataagccgaaccggttctgccatccatcggtgcgtgggttcaggatgatgcgataaggaaacggattcgattcggtcgtggtgatgggggggatatgatctttatcgcggttgacgacggctagaatcttgagcgcagccttttgcagcatgttctccattgctttgcggacctttgcgcgttctagtttcgggaacggattagccaggtgattcatattattgatcccttcgacataccagattccgtccgtggagtagcaactgttacatctaaattccatacctcccagcaaacttcgtcttccccctttcctgctaacgctgggaaccacatattcgagcgcctgcgcttcttttcgtagaactcgacggcaatgcgcccgcgcacgccgtttgaatcatgcgcacccgcggccgacgaggagtgctgccgaactagggcgctgatacgcgagtcaatcagggtgtctaaatctacatcgttgattgctgggagtgtaaaatcaaggacgtcaaatgtagttgggcggattgatgggaagtatcgatggaaaaagattaggttgaggacgcctaaaacgagaaactcagtcagaaagaagatcgtaactttaacatagcaagactcctgtcaaatgtgacatcgccgaccttttaacacgtctctgactgtagtcgtgtctgcgaagatctctaggaagtattccggaggggttttgcggggctccattctaactgagcgggtgggcagggaggaaagaggggagcaaggagagcgacgaggtagatttaaggagaaatatgtgagagactgaggcagtttgactgcctgagtctctgatatttgtgctgaagggaaagaatgagagagtgggagggggtgttggtcactagtgacgacccagctatgagtatgacggagtgctggccagagagctggtcccgcaacgtgggggcagataagccaggtccggtgctggaggcgacggggaagctggtttggaggttcgtgaaggcggcagtgtactaagaggttgagtttggaataagatcatatggataagtataggtagttaagatgcatggtggtatcgtatagaacagtagtagtgaaggggtcttgtccatggcagggaattcagctgccatgtccaactctggggagaaccagagtctggaaccgatactgatgaaaatgacagcgccccctctatgctctgtaatcactgggtataatgagttgaaatttacatggagcgggtcccgtgatttcggcatcctgataaagactctgaaactccaaattggagggttgtatacaagggcacaagtaggcaaggtcatgctagagtcaggaaactaataggccttgggagagaggtgttttatctccatgtcaggtccaagactgattttagcacactcgtcgtccacgtccacatcccgttatcataaggcagtcagtttagccgaggccgctggaactggccattctccgaccgtccttctcggttgctgtgatcgccatcaatgacttgtcacgtccgcctctctcttgctctatctttcttaccgtctcacactttgctcaatttatcacctgaccgagttatatgatgaactgcattgatcggatacttgcctgaagctaacaccgattccctcttcgctccaccatgatcagtgctacgaggcgctggttcaggcgcaatcgcaagaccctcgcaatcggcacaggcgtcatcggtgtgggctacctcgcaggtcaatatgtactaggcaagatatcagaagcacgagaacggatgagcagtgatcgtatcgcccgtgagaagtgcgtagattatcttctatctccctctagtcgcgtgctcaaagaatgcaagctgactctcttgccttaccatgcagcttacggcgacgatttgaacagaaccagactgattgcacatacacagtgttggcgttattgccaactgcggcggaggatatattggaggctctgcccgtggaggaattgacaaaggagttgcagaagaaacgcgctgagcggctggctcgtctcaatgccggggaagggacggcgacagggtcggatatgagctctgtggcacccagccttctagaggatgaccgaaaaagcgtatcgagtgaatcgtttctgcggacaagccaacttggggactcggcagttgacgaggatgcgtcccagccgaaacggaacaagacacagctgtggaacgaggttaagattacctgtacgttcttcacccctctctgttgcggcaccagtggtgatgatgatgatgatgatgatgatgatgatggcatttttgtctcagagacacagcggcagtcaatggatatcttgtgatactgacttcgtttagccattactcgggcgtttaccctgatatacactctatccctattgacaatcttcacgcgcgtccaactaaacctcctcggccgccggaattatctctcgagcgtgatttctttagccacgcctgcggactcctcgagaatcactttagaggatcatgatgatgatttgacgcaaacgctggggaacgacttcgagaccaaccgacggtatcttgcctttagctggtggctgcttcatcgtggttggaagcaattaatggaggaggttaaggccgcggtagtggaagtgttcggcccactgaacccaagggatgatatttcctttgacaagctatcggaattgacccttcaggtgcggaaaaagatcgaaggtgctacggaggaagagaggaagtgcgtcacctttagaccctatcacttgagcgaaagaagacgttttgctgacagtatttaaagacgtcgaaagtggctgccctacttgcttccgccgagagaagacgaggatcacctgctggaggagtccggcgtcctcggggtcacagaaccctcaaccccccaaacagcagcgacattgcgccatcttctcgacgagact

SEQ ID NO: 15864 - DNA, 3202 bp, Emericella nidulans
agagccttttgagggttatctgtgttgggctttcaatcaactccattttataccaattccattttttctgcgccatcgatacaatatatggaccatacatggcccaatcctgtctccgacggtccaagaatgccataaccgtctcgcagttcaccgataccctgcaacgaacatggcttgaatcgcgtcgttaccggcaggggaggatacctgccctgccaagtagattgggttagtaaaaagccgttctattcgaacatatccaaaccaaagtctcatcaggataatgcacaggtctagctataagtggaggcgccgactgccatggccttggcatacctctgtaggcaatgggaggttcgaaggcaaaagcaaaaatggcatcagcaacaacaccacattcccgggttaacgaacagtaatactagtagcaaagacgagccaagcgtaatcgctttcgttgtcgatcataaagcccggcctgaaagtacagatgaagcaaacacggttgctacctggcttcgagaactaggtacgctggctaatcctatcttgtttcattctccctcccaactatactcctagagttttttcgctaaaggacttaaggaataacaacggagatcctccccctggactggacaggtatcgatcactccgccttcgaaacccaagcccggcgtctacggtttcaagcattggggaaagcatgtcgagaccgcggcattgatgcgctcctcttgggccaccaccaagacgacaacgtggaaacgacactctggcggctttcagctggcgctagaggcgcgggtctaaccggaatttcgccagttgcgaggatcccggagtgtcatgggctttatggagtggcggcaagtgggagtgccgtttttgctagggactattggcaagaccagaagcacgagatcgaacagacaagaaggggagaattgccagtatctacaggcggaattataatccaccgtcctctcctctccttcccaaaatcaagactcctgacaacatgccatgaaaatgggatcccatatgttacggatccaacaaactttgacccaacccttacgccgcgtaatgcgatccgttcgttgctggcaagcaattctcttccccgtgcgttgagaaatgaatctattctctcgttgataggaaagtgtcagggtttggttcgggactcgcatgatctctccgacaagattcttgcttcaagaactacattgcttgggcttcaactcaagtcggggtctcttactgttcgattcaaacctggaccatgtacctggtcttctcatgacgaagaggaaggtatatccccatcgcgcctccaggaactgcaatctcttacactccgacggataacggatctcgtctccccatacgaagataaccacttcccgctgagaagttatgtggatttcacgggtcgagtttttcatcctaagcttgatcctcctacatcatcagtcaacatagactcaggtccaaacccagaattacaagagcgggcaagtcaagcagaagggttgaaggcttttacggtaggcggggtcttcttccaacccttagcgtccagcccccccaaccagggtcaggacagtgacaacaatcacaacacctggctcctgactcggcaaccatacatgcgccgtcgcgagccagtcctccgtttcaacgtcaaccggcctcctgcgcaatcaaaaccaacggattgtagtctggaacaacatgttgagtccatatttaaggccgaatgcgatattccttggacgctgtgggacaatcgcttctggatccgcgcctcaatgaaacctatctcgaaatcggaacccatctcccagaaagagagagatggagagaaaccgagtcagctcgtcatccgcccactccggcaatcagatcttacgcctcttaaacgactatataacaagaccaagacgaagaactctcaagcccaaaccaggaagtggtctgataagcctatccacgaattcgatgaaaaaggcggagagcggttatcattcgacgcggcatttttcttctcagttatcgacagagaagcacccggtccatctcggtttactgttcctgtcctcactttggaggaggaaggggctgtcgacgtgcccctggcgctgcctacaatggacctaactttccccgtgatggattctgcgccctgcgttttgaagtgggaatggagatataagatgattgaccttgagactttgaaactcatgggtccggcataaactattcacgctaatctacaattgacaatattgagctacgtaaataatgaaagaaataaccagacaggcagtgtagaatcaccgattagaaggaccaacctcggaccatttgcatatatcaaaatgacatccttcgaagagagatcttgattgcccgtctcctaagcgtatccaaatccagacgccatgatgacccattttccagagagaaaatacaaggagcaacgctcactcgccatatgctaatatcgaatacgaagagattcccgacgcagaagtagtcgaccaaaatcagccataacatggctcagtcagtgcttgcccggagcaaagccaccgcagcttgttgggctcgaagcccgccgacttcacgcttgagtctgaagttttctttcttcaacctcccaatctcgtccatagcggaagacagctgatttttcagtgcatcttccccgtcaccggttcggacttctctcgcaagtttgctgagctccaaattgaaacggtcatacagggcttcattctcggcgctagcttggcgatacaactcatcgagtttcttggcccgcttctcgctaacaactaaagaagactctaggtccttttccagcgcagaggttcggttgttgagctcctccgacaatgcttcgaatgccaactcaagatttcgcatgcgggtcattacggccgcagtggtgacaccatcgtcctcgagagggccatggattgcagccgtgtctgtctgtaaacgcattggtgacggtctcaattctcgaagctcctgacctattagctcgagctcgtccctcaagccggattgctcgacatattgcgtcttcttttctgtttgaaggcgatcgcggagcttcatacccacattagtcgcataaaaaaagcggatcaggaagacttaccttctgggggctttgcaaccg

SEQ ID NO: 15865 - DNA, 3146 bp, Emericella nidulans
acgtgacactcatgagcttagagaagtaagacctggactatatttcttattttgatgcttattttagacctagtgcggtattcacggaagctttagttgcggtctggcccgccgggagatgaggatatagccgattcgatctaccatagtggctcgcagacattagtttactcagttgattcacatgttgcaatgagcattagcaacaacagcgtcaggcgtcacccccgcttcgcttgtatgcgaagctgcttaccagtgataaggaaataggacaaattcagtaagtgtgctgtccaagcccgtggtagggtcttgtatcgaataatcactgccatcgctacggagtctccaaagccagccctaaaaactccccgcccatcggaagtttaccgaatccagcttgatgcttgatcgatcgacttccaccaatcaagactatatgtatctactcaaaatgaagcaattcccagcccatcgttgagcagctggacttggggtttccctagagtcaaactctgcttaagtcgtattccagtaggagaacggcaccatgaaccctaagctctaccagttcttcgttgctctcttcgcctctttcggctctttcctgtatggctacgacctgggcgtgatcgcctcggtcgtggcctcagactccttcattgacaaatttgtccgcggcagcagcaccgtctctggcaccgtggtagccctcttcacggcgggcgccttcttcggtgcattcggcgcagggttcactgacccgctcgggcgtcgaatgacactggtactgggctccgtcctctttatcattgggggaatcatccagacagcttccgtaaatctagggatgctgtacttctcacgtattttttcaggattcggtattgggatcctcgtcgagatggtcccgatgtttcaggcagagatcgcccatgccagaatcaggggtatcctgggctcgctgcagcagaccatgctgggtattggaagccttgccgcaagttggattgggtacgggtgtgagcatcactggtcgaacacgggaaacagtgtgcagtggaggttgccgtaggttgcctgccgttctattccatctcagtgcatcacaacgggcggtgctgatgagactagcctggccttacaggtcgtccccgccatcggactggcctcgtgcatcttctttttccctgagtcgccgcggtggctgatcgatcatgaccggcacgaagaagggctgcggaacctcgccactctgcacgccaacggcaacgagaacgacgcatatgtcctggccgagtttgaactgatcaagcagcaggtagaggaggagcatcggcacggggccaagtcgtataaggagctgttctccaatcgatccaatacccggcggattattctggcttgcgcgtgtcaggcgtcgacgcagatgtatgaccctcctttgtttacaagactggtgttactattacgcacttagagtggcagtcacgagaccaacaccaatactgaccttttacaggactggcgtctctgccatccaatacttctcgcccgccatcttcgcccagatcggcatctctacgtcccaaaccctgctctaccaaggcatcaactccatcatcggcgaactcgcccagtttatcttcttcttcctcatcgaccgcgtcggtcgccgccccctccagattggtggcaacattgcctgcggcctcgcgttcaccatcggtgcagcgctgatggccgtatacccgccctcgtccacaaacacctctgcacattgggcattcatcgtcaccagcacgtggtttttcaatttctgcttctgcgcctccggcacaatgtcctggatcatccccgcggaagtctttaacaccgcgacccgcgccaagggcatctcgctagccacgatggtctcgttcgcgtttaacacaatgatcgccgaggtaacgccggttgcgttggagaatatcggctggcggtactatattctttttattgtgtgtgactttggaaatgctctcttcttttatctgttcttgccggagaccaagggaattacactggaggttatggacgatctctttacaaactcgccgctgcttgtccctggaagtcggtggcagccacgcccggagttggatgttgacaaggtcatggagaggaaggatatcatgcttcgctcagtggttgcggctccctgaggacaacacctgtaggtatcaggtacgcgcaggcgcaggatactgcctcttccaagtttttgattgcctaaccctttttttttttgggacggtccgggacttgtaagtacaggaatgtctgtagaggagatcagtggcacggaaagcaaatatacgtattcaatttgtgccctacttttattggcttctgtgccctgttacgtctaaagcttgggcaaaagtagctagcgaagtcgaaatattttgaggtatacttatgaggctctcaagaagtgccatgccctaattatgcctgataataaaacctaagccgcaaggccgtaaggccgtaaggccacaaagcagcatgccccacaagataagcgcactgatacgggctgcaaatgttgcaaacagaacttttcacgattcagagccaaactacagttggaagcttcgttgagctctacacgatcgcctgcctcccatttagataatcggagattcaactccaaatcctccaaaatggcacctccaaagcaaagccaaagacagtctcaagaaagccaacccaaattggcagacctccaatttgaacgcaggaaccaaaacatggtcaaactcccgaaatgtacggttccctcgtctcatctcaccacataaccgcatgagtccccaattactgattcaaattccttcctgtctagatgcccgcgtcaccaaacgccccatcccacacgctcccatctcgtctccctacgctggcgcctctatcccaaaaacaatatacgtttcctcgtcaacaccgtacatgtccgctgtgaaacgcgttcaaaagctcctcctgcaagcggagaagcgcgcgacaacgtccctcgcaaacaataataacacgaacaagtatggtgggcaaagtggcccgcaaaagaaactaggcgagcagacacagacacagcagga

SEQ ID NO: 15866 - DNA, 278 bp, Emericella nidulans
cacgattagttatagccgcctcgattgctctagcggaaaagaccagcccgattgtggagccgggtgttttgcggcggaagaattgaccggacgatctgaacctgaccgggtccctagttgcttcctgagaaccggccacagggctgcagtcgtggttctcgcacaacagcgcgcaggggtcaatccatacagttcgccactggtcgagattaggcatgggctacagcaggaacgaggaacagcattgcatcccgcgtaggagtgcacgtacggtggca

SEQ ID NO: 15867 - DNA, 4207 bp, Emericella nidulans
  unsure (1)..(4207): unsure at all n locations
aataatgtttataaggagaagaagaatattatttaatatatataagacgtgttaagagaagctaaaagagaagttgaaaaattaaaggtaaattggaatatataatttaaaaatttggaaataaactagaaaggtattaaagggataagtttaaaagatcatatttttagcaggatttcatgaataagcaaaaataagtcctgtaggaaagatcttcatactatgaattattcaattagtagggggggttcgccaagaaaagaattaaaaagttttggttgtagtagataagaacgtcctataaactgttattagaaggaaaaatagtaggtacggcactccgtcagaagttctttgagcactcttatcaaaataaacaaggctggctaaatcttctataggcgcctgctggtattactctttcaaggcattcatcattaggctggtgctacccgaaaaataccagcttgcagtcatgattaggctaccctcacatcctgcgccatatctaatctccttcctttcctaatacctcattcctactacttgtgatcgcccacttcgtgtccacacaatggagaatcagaaaatatccgattttcttgccgaccagctacaacaagctcccgaacagtgccaggcgtcattcttgagcttcgaagagtactgggagcgaaaattatggcaccagctgaccaatgccttgatcgacttcttccgactaccagagagcgcgccccaacggttaccgttattcaagacctttgtcctaagcttcgcagacaagatcaaccagttgaactttgtctcgttggggttgatggcatctacagaatgcgcgggtatgttcatctctctctataagaacatcgagggtgtaactaacgttttgagtgtgctagatgaccaagaacggctttccttcctcacatcactcgccgacaaagtgaacaagccagactcacaagacgcttacatctacgcccttgcggaggttgccaatgtcaaacaacggcttcataacctggacggagcgcagaaggatctagagacatgccagaaagtgttggactcatttgacgcggttgagaacgtcgtacatgcttcattttacaaggtcaacgccgactattatcacgtatgttcatcccctcacacaaacaagcaaacagaactaagaacccagtaggccaaacaagaattcgcctccttctacaaaaacgccctcctctacctcgcttgcatcgacctagaggacctctcggagtccgagcgtgtatcgcgtgcctacaacctcagtgttgctgccctcgtctcagactcaatctacaacttcggtgaactactcttgcatccgatcttggattcgctcaccgagacgccacacagctggcttcgagacctgctttttgccttcaaccgcggcgatttgactgcatatgacgtcctcgcagggaacatctctaagaaccagctcctccaggcgcaccgcttctttctataccagaagatctccctttctgcactcacggagatggtctttcgccgtcctccgcacgatcgcaacttgacttttgcgtctatctccgcggagacaaaggtgaagcctgaggagatcgaacatctagttatgaaggcgctttcgctgggtttgctgaagggcgccattgaccaggtcggccagattgctcagatcaactgggtacagcctaaagtgctggatatgaaacagatcgagggtatgcggaatagactgaaggactgggacgccggtgttaaccagctgggtcactggatcgagggcgtgggtaaggatgtatgggctgcatagatcatttatttctcaatctttccgacctgcatgtacctatgtaccctgtactagactaccacgattgaatcggaacgctggagatgacaatgtgagatttgacttactatatacgaaagtatgccctttctactaccattggtgatcacgtatacatatacaaagtacggtaaccttcaacaggcctattatcaacccgagaatagcagagaggagaggagaaccacccagctcaactagctaaacagcccacctcccaacacaacacccccgacaacccaagccggccaccaaacacaccaaacaacaacctgcgtccacattccccaaacatcccacccgaacgccgcctctgtaaggactgtctccagactaacaccaaaatacttacagcccacaagtaacaccacaggcggggatataacattcaggaatgccattccaaacgctgataatgtgtatcggacgaatggctttgtcttcgcgtcgaagatgtgcatgaatgataacggggtgcagaggaggcctgtcatgaaagataaggagaagttgagagttgccagggttgagagtaacaggcctaagggaaggacagagagggatttgataagatggagttggtgcaaaatctgagttggagtggtgatgcgggagaggatgaaggaagagacatatgggtaggatagcgtttatggcgatggacgtgtatgtagcgagggtgtatttctgtacttgcggtcagtagctatttctggggtgcagagaagttcaaggcactgacatcgtgggagatgttgttgaagatatacagagggataaggcctattaggtgcagaccgataatgagggtaagcgggagggcgagttgacgttctgcagctttagtcgccggattgcctgtcgttggagctgtttcgtttcgatccttgcttgcgagttgtgccttttcactttcacttgtagttatattctcgtcccgaaccaaacgcgctgacacagtggcggcttgagttgagtccttgtaatatccagtccgcagccacaacgcaatggccatgatagtaaagttcccagcaatgagcatcgcactcgggagataagtgccgatactgacaaatcgatgagtttgcataagcagataaaagaagaaactctggtgcagatgttccagcaggttattgagactgcgacagagactttccacggtccgaccgagcgccatctcatcctgccagccattaccctgagtctggagcgtgattgcatcgatatggtaaggcataaagctgctatgcgcacctgcagcgtatcccaggccctgcttaaccattcccctcaacatagtttgcagtcgcttttcgtagctgccgttatggtcccacatctcttgcagacgggtcccaatgcccatttgcccgccagcgatcgagacggccgtgttaaagagatccagattgggaagttggccgttcacaccgtcgtatataatgtgtaggttctcgaagcggtggtcgaaggggtactcgattgccaggccaccttgtaaggcgccactctttagaggcaaaggctggacggtaggcggttgcatatcgtggtatgcatcgacccatgcctgtgttccagatttgctatccggggggaatacgaaaatgatatccttggaccagagagaccatcctgcagcatacgtcagtgaggttagaattacctcgcttggggtactcacgcttaaagtatctagcaagagtcaacgcaaggctgacgccattgagattcaactgcccgtcgatagtcttccaagctgcgacaagcacaatcgcctctgtcgcatctcccctcggtgcttgaataatagcatagatgttctccccctggtgcgtgattcccgaagacttatactcgtagccctgcgtagcaaccttcagaccactagccatcagaatcgattgtattttctccgagatcctttaataacaactgcattagcaccaatctcctctcatcgacaattcggccacgtcaggtccaacatacacctgcgtccgctcctcactcttcttcttctccccatcgctaccatgtccatcaagcagcccctctaactccttcttatacccacgaaaaacgttctgctcgctccctgcaaaatatgcatggaccttgcccgcaggagcgcgttctagagatgtatgntttgcgcgaatgccgtcagggaccagagaaagcagatgaccccggacgatgcaaggaagatggagaacgtaggcgacgaaagaagtaagatatttccgattgagacgaagtgcaatgtgttgtacgtgtaaatgggaatagagcgagctgactgccttggaaaaatcggtgacggccgta

SEQ ID NO: 15868 - DNA, 450 bp, Emericella nidulans
aggaccgtgtttcaaggccgtcaacgttgctatggatgccctttaagtgttttggccgcagacacgtcatttgatgtcagcagattggtccatggcgggatatatgggccagaaccaaccgactgagccatagacatcaatggtcgacgggcatggataacgggcctgtcctattctactgactgagctgacattaaagacacagaccctgtgacagaaagaaggcatcatctctgctgccaggactgcaatctggtcagtgagcaccagcttaatccaccgatttagtcgtgaaacacgctctaatttgaatcggggttggcgggtcaggggcatgcacggccccattataggctgcttcctgaccggagcatagggccacatcacgtgggggtgcctgaatgagcaaacagtatggctttgacacgttcttggcgacatacccgcgat

SEQ ID NO: 15869 - DNA, 581 bp, Emericella nidulans
ccgcttggtagtcttggtacgggctagctgagcatacaaaaccaaaaccgatagctcgcgccgaggcgctgattttcaagctccaagctcatctacatgcaaacggctttctccattggctaaggggtaggtgacttgataccctacgcggacttctaattctgcttgatgactgactccttgatctcagactcacgagtggcagaggcaacaggagcggaggcgtacatgacatcggcggacgtaatactaccgaatggaccgaatagctactatagctctgaatgatcaccatcttcaataagaaattcggacgagagtgtgacacgcagactcttggagggcggctgaatgcggacccactactgcagcatgaatagcaccgactcactctggggcctggtcagggaccgatcacagtttatttatttgctgcagacagtcttttttggaactatgcttcaagttggcatcacgcacatgggtgagatgaaagggatttggcctagcctttggacatgcctctgaagaatgctattttttcatgtaagaatgctaattttatcttgacatattttatc

SEQ ID NO: 15870 - DNA, 4594 bp, Emericella nidulans
atgacttggtgagatggaagaggtggcgggggagcgaaaagggagggagagctcgcgattattattattatcgaccttaagacctttcgactaccctagtctacaggaggctggaccgaacggcagacaagcgagcaaaacggagtaattggggattgagatggggcgagccacttgtcagaaacactgacgctgctgcgcgttgttctagcgatcatcgatccatggatgtgcttgtgctgttttgtttttatcgccctgaacggatgacggaaactctcattgctttctgcaccttctgcaactatcgcgctgctagcctgaggacaggacggtcgcgcttcagagagttcgagtcttcgccaatccgtcgtacttttgaagctctacgtcattggtgccgtccgtttcatcacgtcgagccaggagaccaattctggacacatcgagaaccccaagatgatcctttgcattctctgctgagatcgaggtttcgagtttctctgaaaaaagggcctgagaggctctaaaatgtcacaaagagctactctatgtaataccaatccttaattttgatggaaaatcgatattttgatataggtaaaacactggcatgaagtttcgtctccaacgggctcagttcccgtgaatgacggagtatactagtcccagtttaggaaggcggggcttccagaagcccagcccaacgtccacaagcgccgttcttccattgtccgttttaactgggaccaaaattttctaggagctgcttttgagctttccatggatgggaggagtcagaacagggcggtcgcagggcggtcgggatcttgctaagcttatttgcgtctacgtttacggaggactggctcaccgtgcccattgatcgcttcagcagcgatgtcacaaacgaaatcaacgacgtgtcccaatgaacgacactacatatattagtagcaaagcatttgtgtgattctgcaggaacagctctgatcctcatcaactaacccaatgggtgcatcttggtttcctcgtaagaggcaacttgcagattcacgcttctcaggatcaaaccaatggtgccccggtgacactgcttggatgcttggatgcttcgtctgttggtgtagtatttgagtagtatttgtgtagtaattgagaagtcagatctgacttgtccacacttgtccgcacttgtctacattctttttagtcagctagtcagtgtctagcgttaagcttccactataactagctaccccagaaaagcagtgaatcagtgggcgagatcagcatcaagaagccgaaaattatcttaagtctataatagcacatatactagcagtacacttaaagcaagcgcagacgcccgatacatagtccagtttgaatctcgtggagaaacccacttcaaatggatatgcgggccaataacattgaagttggccaaagaatgtatacatgttctgcgtgctggccaactttgattgtaagtccacatacgcttgaggtttatacagacgagctatggcctcagaccggttaccatatactcagacaattaacccatgttcgcgaacttcttgagcaataatcactattgggcattctcactcagaaattccatcgctaaggcccagactgcctgtccaggcagtctgggaaaggcgtctcgatgcgaatcatcacgcgaccagagctgatgcctgaattaggtaagctttccaaggttggttttactaggacttcaaggtacatcaaagaggcggttcttgcgctatttctacaatggagtgccgttaccacctggtagaaacagaggcatgtcgttctggcctcttacaattttctggctggtatttatgtaagtggttggacaatatggacgaagttggtactaaaacttcgtatataaactgccatatggatgggagtcagtagtatatgccgcaggcggcgacccgttcagtcccaagtctgaatacaggcaaccttgaaacgacaaaggtaaccacaaagttccctctataatgggtttttggtgaactctaaggattataattgttgaaaagcgaaattcttccaggtctattggaatagccttcagatgacatgttagccaatccagtcgacccgttcgcagacggtcaagtatagtgaacgaggatccgaagagcgtttggtagactacttaggcgtcgagtcgggaaatcctctcgagtcggactcttaatcggcatcattgacgacatgacatcgttgcttttcttgtataccgttcgcttaatgattagccagcaaagacaatgggattcatgcatcaatggtatcgagttgatgttgcagcggctgtcgggtcgccgcagaacgtcgagacaaagaccgatggggaacatcacaaataaacaatccgctctggatcactacggccgcgaagcagcccatctaagagatatcatttcagagacaaatcgaccttcactcagagctggttaagaaagaccgtccacttgtcaatatcaaagccctccagcttgaggctccatcacaccgtgcgtctcggctccggtctcctccaatgggtgaatccccagtcccggctcccactccaagccgccaaccattcaggctttctgtccttctcctccccatcccattcccatccactgcatcatcatcgcccccccagctgtcaattccttcttgacgccctcttctcacctcttctctccctttactctcttctctccgtcctcttcctcgtctcagcttctcttctcctttcattcatcccctgcgtgctctttcaaagcattgcccttttttttcctttagccggtgcaattagcaattcatatttccagttcctgtcgtttttaacaggagatattccgcattgaattctcaacgttcccggattatattttaatccagcgggacggtttcctctgtttactaggccgtcgttccgactaggctacgtttacttttaccggtacttttgcccccaatttctgataggaacccccgcctgatatcctgacttctgagtgtccagcgtacacgcaacgtcggctctcgtgcgtctcacataattccgctgaacgtctccgaaaaatctagtctcgtgccatcaccatgtccgccgaagccgtcaatggggcccccaaatcccgggcagctatgctggaagaacaacatgctctcgatgaggcacacaaggccactgtggaggatgtcgtggacgaagaagacttattgcaccctcctccctcagtccaggcggttagcgaacaggcttccagcgcaccctcgcaagcatccacaccacccgtagccaaggcatcagtcagctcgaagaatgcgtccggaaagccccctgctctggatgtgcaatcggaggaactgttccctgcactgggaagcggtcccaagcccaaggcgcctgctgcatccgcctgggccgcaaaaggcccctccgccgccgccgccctcgctaatggcgcccccagcggtgtgtcgtcaggtatgtcggtcttaaccatatattatggcactggcgatagaaacgtattactgactttttttagcggatgtccctaggattatgacattgcccggaaagcacatagagcagcttcgacttgcgccgtctcagatgcttcagaggggccaattgaagaaaccactgcgggatatcctgcgcgatatctctaagcgatcaaaagccaatgtagatatgcgcggtgggcctggagggtctatcatcttcgagggtaggggatcggtggatgcagtgcgccaagcgcttaagcaggtggcgcagcaagtcggttctaaggtatgcgtctttttcgctattctcatagtcgaccctaattaaatctggtctagcaatcggttcgtgtcccaattcccacctcagctcgtcctcacattatcggtaaacaaggagctgtcgttcaggaactccagcagcgcactggtgcgcgcgtgcaggttcctcgcgcggaagagccaactggcgatgaggacgaggacaatgacaccattgatgtgttgattgaaggtgatgctgttgccgctgaaatggctcgccgagaaatcgaggctattgtgaaggagcgagcgtctaacatgaacctacgccttcggtcaatcccaccggaattcttcccctttattgccggtcctcataatgcgaacttgagagagattgaggagcgcaccaaagctcagatccatgttcctcgatacgatacgtggcaaagccaacctccaccgcaagaagctgagcccggccacgttcagttcacgccggtctcggacaggcatatacttatttccggagagcgctccgcgactcaggatgctcgtgctgaaatcgaaaagcttgctgctgatcttcagcgtcagttgacaattcgacagctcgccatcaatcggggtcaacatcaatttattctcggtgacaatgccaacgcactgcatgacttccttgctgagactggttgcgctgtagtactgccgcctccgtccgatgaaactgaattcctgaccgttactggtgcacttcagcgataaagaagatggt

SEQ ID NO: 15871 - DNA, 499 bp, Emericella nidulans
gccgcttcttgcaaacctcctgtggatgacttcctagtggctttgttccgtctgaaatatcatgtttttcataagcgcggacagagcgtattcgagtagatgttcccgcatgtcggtgcagaccgcattccaaataaggatcctctcgccttgcaagctcttaaatcatcaacccgataggagagtgcatgagctccactacaaagaggctgggcatacctgtccctgcattgtacacaaacatggctacacaacttcagacgatcccacaaagggacccagtccactctaactgagactcatacccacgttgactacatacgcgaacccccgtttcgaacccaagcccacgctactgaaggcctcctcgatgacacccaggcacactgagagccggcgccaataataaccagccgccggcggcttatcctttaaaaaaaaccgtacccagccctaggcttctgaaccggagcggtaactgcctccgagaacccgcgtt

SEQ ID NO: 15872 - DNA, 4368 bp, Emericella nidulans
tgtgctggtcatctgctcgacgccacagattgcgcaaaagctgtccagcaccgcgagtcagcggcgttcccctgctgtatacgaattcatcagccagccctgcgggccatgtagaacagccgatgcgctcagggggtgtgtcaatcgtcgggagactgagagtccgcgtccgagtccgccattaactagtgagactatagatagctatggccatgtcactgtcattgagactgcaaacagcggcgcaagtggcatgccatatacaggatgcgctacgaatggctatcgcgctgccaatggcatcccacaggacactccccaagttcatacaaaccagcgtgcgaacggcctgacaggactcaaaatcgagactctgaaatcccccgcctctccgatcgctctctcccccaaaacactagcgctgcaaaacggcaagacggtttccacaggcgtcgaggtccagctcagcccgacctcagcagtgacgaccatcaccacctctgccgtcgaggagggcgatggcgccgtgaccgaaatctcagcgacccttgaagcgtctcacattgttccctcggtgctactcgtcgatgacaattcggtcaacctgcaactcctcgttgcggtcatgaaaaaggccaagttctcctactttacagcgtgcaacggcctcaaagcgctggaagtgtacaaggcgcatgcaaagaaaattcacgtgattctgatgggtacgtcaccgattctctttaagactcttacgtatatcaactaacaggtccctggtaacagatatctccatgccggtcatggacggcctcgaatccacgcgggagatccggctctttgaaaaaacgcagcgcgaaagtccagcgtttaagccagcgacaattatcgcactctcgggattgggcagcgcgtctgtgcgccaggaggcgtttaattcagggcttgacctgtttctttcgaaaccggtgcggtttcaggagcttaccacgcagttgggggagttgatgcgatgaccaaactcttatggatggttcgagtggggtgatgccatggggtttaaaaatttttttagggtatatattctttctaccttcctgatatattggattaggtgaggctggcgttcggggtagggtagctttggtctggtcttgtttgcatagtgataccgagggagatcatgggcatgcttctgcatgattctggaagataatataactatactccacatctaatcaaaccttcttctggctcaatttccgatctcgtataggaatttcttccacctcgtatcttcttggcgatcggatcctgcaatctcattctatggtgcaactggctgtggctgaaacacgaatctgcacgtcatttcccacgcgctcgtgtcaccagccagatctacggtaagtcactacttggacagaatggaagatggcattgcttatcctggcatcaattcgtcatagacagcagactagctacactgtcaaatggtggaaatcgttaagcgagagtgaaaaagaagagaaaaaaatcgctcttttgatatgtacaatcatcatcaaatgaaatggcacagcctgtcaaaagaagcgacggcattccaagcaagctggagtcaagaagagaagttttgaatactgcaagcaaacaaatgcaagactgtctaagccttgatgcagtactggtagcccagccagagattcgtgcagtcttccttcagcccggagttcaactcgcggagctggctgagggaaacgccaatagcctcctcgaccttcaggcagtagtcgccgtccatgacggtgtagtactgcgtgcaggaggagttggcgtacgggtagattggcgcagaggatgaaccggacgaagcggtgggggcggcgggacagtgctggcactgctcgtcgccgcggagtgtcagtggggctgccattgagggtgtaagtcacggtgttagtgctcgtgctggtcgaggtagtagtgcttgtgctggtgacggtgctgggggcttcggtcgtagcaggagcctccgttgtcgtcggggcttcagtggtagatgtcggagcctctgtagcggttggcgcagcagtggtggtagatgtagaagactcggtcgagccagaatccgaatcgtccgaatcgctcgagtcagagtctgaaccgccaaccaagctggaggtgaaccggaaaatgctggtgacggccttgtcgagagacccgatcacattgtcctcgcaggtgctagggccagtagaccagccggtcagacggttggcaacatccgacgagtagcagtgagtcgcgataccctggccaaggttacccgaggcagggatcgagcccgagttgtagatacgagcggcggcgtagaagttggcggcatcgccaacaccgcccgcctgctcgaggcactgcttgagcccgtcaccatcgctggtaccctcggtgccgtccttgatcatttgcttgatctgctcggcagggcatggggtcaagacctcgccattgttgcatgagccctggccgttgtgcgactgcatcaagcccgggttggtgacgccgtagttggtggtaggggcgcgcacacagccgttgctttcctggatgacgatagccaggatgaagcgggggtcgacgccggaggattcagagacctctttgatggcggacgagatgttatcgatttcgtcgtccgaattgttagggacattccattgggtgcaggattgacgcatcgtatcgcggttggcttcgaacctacacgatcggtcagtaacacaacaccattggcggcgggacgccgcctcaagaggggacgtacatctcatcaaagtcaggccaccagttatcatgatcaggccaaccggcggcgaccttgccatttcctccaaggacgttgtaggcacgtttgtcaagggaacgcgcgtgcgagagagcgtgcgagtgtcgttctgcgtgtctgtggccgctcaagggattggacgggacgggggccccagcaatgagggtggaaaggctgccagcagccaggatcaaaggaagggacagcatgatgcttggaggagaacaagagcgccgacacagacggacaaaggagggacagaagacttgcttgcaaaagaaagagaaaaaagagagaaaagaaggaagagacgagcggctgcagtgttataaagagcgttggacgatccatcaccacctaattcaccatcactgagactaaagcgtaaagttccttgcgcctcgctaagctcatagaacgcgggccaatcagcggcccgcatgcgctcatttggccacatttgggctcatttggcctcattctgaaacaaacaggggccgaacacgagtcttggaggatcgcctcattggagaaattccgcagtggacactcagatctacctgtgaaggtggaggccgagcggcgttggctgttcagttggctgttcagttggttgttcatttagctgatgagcggagggcttgaggtgttctttcacttgggctctgagtcagaaacgatcaacaggagacagctcactgccgggagtcaggcaccaggcacaacccagagctacgttacatgtcaaacaggcacacccgcctcatcaaatggacgggttagacggcaagacggcagaccagcgggcgcgcacagaggatagacgacagcgacgcagggactcgggtgtaacgcgccaatgccgagcgtggccaaagagacactactgcaccatctcgttcatcaaaatgggtctattagtctactctattaccattattctatcgtaatctatcgactctatcgactctatcgactctatcgattcgatcgattcgtttactcattatgcgcaatatgtctcgtcagatccaaaagtcggctggaatacccccattcgttgtcataccaggccatgatcttgaaaaaggtcgggttcagctcgctacacgcagcggcgtctacgatcgcactatgcgagtcgcccagatagtcgctgctcaccagcacctcgtcgcttacgctcagcacgccagccagctcgttcttggccgcgcgccgaaacgccgctagtatctcggctagcgaggtgggcgtctcggtgctgacggtcaaatcaatcaacgagacattggggctgaaaattcaaaagtcagcggcgattcggcccctcacatcagaccagatcagatttgaatcaaattgaatgacttacgttggcacgcggatcgaggctcccgttaccttgcctgtcagttcaggcagcactgatgcgatcgccttggcagcacccgttgttgtcgggatgatattgtcgaaaacgctgcggcctgtacttcttagcggggtttttctctggt

SEQ ID NO: 15873 - DNA, 3870 bp, Emericella nidulans
aggtatcttcttgcacggttgctctgaactatgggtgcttgaaggctcaactctgcccaatatgttctagcgtggcagcacatctcccgacaaggcaactgtgtctgggcatacaaagccagtattgacatttggtctataacggcaatctgtgcctggatggtcagctgctccgtgccttcaaaaaacgcatcacaatccaggcctaatcccatagaacccgcaaacaacatcaaaattggtcaccaaccggggtatatccacatcttgagaccataaacctcacgttacgtacaggacgtatattcgaaacgaacaaatcatttctgaacccgcaaaagagacgttgccgactctgggatgcacgaaaatctgtgttgaatgagaagtacgccatacccaaccacttcttctacttttgcttctcgctaagaagtagcaccgaagcgtcgactttactctgttgcatcactgaccagagtatatactgtgaagcggacttgcttatagtgcgcgaaacggtcctttgagccctaaagtgtgggtcttgataagcttttcataagctcagcatttaagctcaaggtttaaagcaagggcacccatgcatggtttcgtcagaaataagggagctattatactacacctgcataattagccctgacttgtgttcaagagctatggtctatgactggctatgtggggaccggccctgaaggtctttacgcttcctggagaagccaatttcggcaaaacggatttttatacagttatggagccgatccattcatggggccctaccagaagcattatggtctcggactggttagcacagcagtgaagcggcccatctagttatgacctggatttgcctttttgccatcagtcatccgggcttattttctttaccgttaccatgcttacatctgtagtttgtcaggtccccagccccagctttccactggcgttccgcggctcacttcatatagccactatctgcacctccccagtcctttcgttctcatcaccggcgcaaaccagggcattgggcaagccactgccaagaatcttgcatcacagtacaactaccacgttctaatcggctgtcgcagaatcgaagctggcgagaaagtcgcctctgagttgcgtgccgccggccacaaagctacctctctccagctcgacctcgactccgaagagtctatcaaagccgccgtcgatatcatcgagaaagactatgggtacctggatatcctgatgaacaatgccgctgtcctgctggatcatgacaacaccctctcgccctgggcgctatacagcaggacattcacgccgaatgtcatcggcactgcaacattgacacacttgctgctgcccttgattcggaaggcaaaggcaacgccgccaacgatcattttcgtgtccagcgggatgggaagtctcacatatggattcgacaagagcgtcccatttcatcaagcggataaccgcgcgtacaactcgagcaaagcagcggtcaatttgctcgttgcaaactacaagcgcattctcgaacctaaggggggtaaggttaatgcggtttctccagggcttgtggccacgaatatgacggcgcatatgaatgcgcgggcgactgccgaggttggtgctgcaagtatcgtgcaattgtctgctgctgggaaggatggggagtctgggacatttacgaatagggacggtgttgtgctgtggtgatggcagcgtgctgattgaggtattacggtgggaaatttcttgcacttggactggatagaaagaacgttaggttaggagctttggaaaactgtacataaaggaatatagtagactcaggcaggagcaatatacaaaagtgcacaacaaggcagtctttgcagcagctggggaagcagggctaggttagtggcctcggcagcgccggggtaccagggagcaccatcgttgtgccctggctaggggtagggagcgaggcaggcatcctactacaatgaagagttgattcatggaaatcttgaggcttgttctaggctaaatatgatgtgatattgaagaacgtgacctcattaatggccaacagtatggctggttgctgttcgctgctcgccagttcatggactctagtagcagaagatgtgtatacgtgggtagtcaggagactgggtcatgcagtgtgaccagactggacgcacgcgcaactagatgcgaggcagtgggacattgagagaaggataacacctactgtgacgacttctgaccctgcctgccctacagcacacgtccgtcgaatcccaggcgggatactagggcgttcagcgggctgtgggttaaccatgatgttagataagtgcactctggcagccggttcggtgaatttatctccctccaattctcataccacaaccaagtgcgcataggagccccgaggagtgttcagttcgtgaaggcagatgaacagttcagctcgaatgcccggccgcagccaactgctccggcgtaacatcccccacagccaacgacgcggccagctggatcctctcctcaacagttaggtcactctgcgcctttccgacgcgaatgaacaccagcagcaaaatcgcaacgcccgagcaagcgactccaaaccaaaacgcagctttgtagctcccagcagctcctaaatccttcgtctccgcgacgaccagatccgccaagccgaggaagaagctgatcccggcgaatacgatcgtgttgattatggcgcccgctacgccctgccggttttgaggcaagttggttgtaatgaagatgttcgagacactgtacccgatatccacgccaactgttgcggccaccatggccgggaacacgtatgcccagtagttgggattgtctggaatgatggcaaacagcagcattgaaacgaggtagccggcgccggagatcaggagaagaagttttccgggcagatggtgcagggtgaaaccgccaaccgtggcgaggattacgcccccggcggccatgggggcgaaccaggcggcggaaatcaaagagttatggccaaggatgtcttggatgctggccctattagctgccatcgcggagcgatcaggattgacttactagaaactggcgtagaacaggtagatcccgaatacaccgtacgagaatgacagcgcaacgaagagcgggctcatcgacttgaccttgaagacatcaaaagggagcagcggctcggacgcaacccagccctcgatgtaaaatgctgcggcaagtagcgctattccgaggagaaacgtcacgagaacgtacggggtcctccaaccatccggtgcatgcgatccatcggtaaccgcgaagacgagcaggatcagcccgggcacgatggtgcagcacccccaccaatccatcttgaggtctgatgtatgccgcggtagccgaataagcggcatacttaccagggagacgaccaggacgacgaccactatcagacagcctatataaaagtaccatttccagctcagataatggcccgccaaccccgtgacgcagatccccccatagaatcctacgggcgaaaacgccccgtagaggctgaacaccaggttcttgcgcgggccgggtcggtagatgcttcctatcaacatgataccagccggcaagaatgcagccggacccagtccttgcagtgcacggcacacgacgagcatcttataattaacgctccaacccgcgatgaacgaccagacgatgtaccagatgaggccggcgttgaagacaagacgcgggccgtaaatatctgccagccgggcgatcgggagcaggcacgcgcccgtcacgagggagaagacgcttgctggccatgtctgcgagccg

SEQ ID NO: 15874 - DNA, 3525 bp, Emericella nidulans
aggcttccttggtttggttatccaactatactacctaggtacttcaggcttatctatactgttgtcgccatcctgcacaattcctacgcaattgagcccaattcagcgcctcatcctttctctcttctcctatttcgctttttttctgtttctttgtccgcaaatattactctatcagtagtgtcatggcaaaaacgatcatccacgcgtgcaagccgctacccagatttgaacccagccagcacagccacggcggctctcgcttcttaactcatcaagataactgcctagaactcgctaggtcgccgcagcgcagccagtcgacaccgatagatgtacgactggagatcaagcgctaggtgaagcgtgccggacgaagggtaacctggggaacatgttggaaaatatgggttgaaggcggctgatggattgtcatgcaaattatggtatcattagacatgtcccgtgcatatgatgtgctatgtacatgtaccgatgctcatatattaaatacacagagagaaaaagaaaaccttgaagacttcagaatccattagatcaacaaagcgaacatcacccccagaacaacggccaacttccggcccccaaacacctccagcacagaagcagcgctcgtatccctctcggcaaagcgcatctctgagttgccaaagtcaaacacggccacgacccccttgaggaatcccgcgcccaggatgtacagttccgtggtatcagtctcgttgatctgctgctccagtccgcgcgtaacggcagagacacaaatctcctcgccgccaaactcgacgcccgaccgcaggaccaggtccgtcgggttgagcttgaaggtggttccgcccagctgtacggcaaagtcgggggcgttggcgtcgcagtcgacgcggtaggcaccctgtgtgtcatcccactgggcggacgagctgaacgcctggttgaacccgtcggcgacctcggttgggacatagttcatgggagcgcccgagtcgacgatcgtctggtaagacgcggtgtactcgccgtcgccgccgtagctaatcctctgcacggtcgtcgcccagtacgagcgcagtctggtgccgttgtcgcttcggaactcggccgcctcgtagtactcggccgcaacggtggtgaagttgttggcgagcttgacgtccggtagcccacccagaactagcacgccgccgtcgccagtctcagagtcgccgtcaagtcgctccagcgcgagcgagaagtacggctcgacgaggccgcgccgcgccatattcacgaacagcgggctgtacggttcctgttcgatggacgtgtccacatcatcatcatcgaggtcctctgcgagatcgtcgacgtagtcttccagggtgccgttgacttcatatgccgacgtgatcaccgggtacgcaagacccaggatcccactggcgcccagccccatgggcgaggacctgttcaccaacccgaaacgctggtcagtgaccgtcaccccgccgagagtgatatcctcataggccattgagccggtcgcgacgccggcgccgtacccggcgatgaacgtctcgttgttgatcggctcgaaggtatcgctttcgctggggttataggtctcagaggcataggcgcactgcgactgctcggccgtgacgatatcgccagtgtacacggactggccgaaacattcgtagccggtttcaatgacgaaggtgtcgctgctgccggtatcgacgagcaggtcgaattcggtgttgccgatcgtgacgggcgcattgtagcgtgagccgtagagcgtcgccgtcagcgggatcgtatgcgcggttcgggtggtgttggaggattggcggatctgaagatggtgtcgcgggaggttgaccgctgctgcgctggccagcagagagctggcaacgagatggcgcattgttagagttggacaggagaaagagtctgaacaatcaaaaggaagagaaggagaggaagaaaaaggagataacaccggggatggcggagttcaagtagtgcggctcatagctcacagcctacaggaacaatagacgaaaagcgcctaggcagaagccgagaaggaaattaagagtcacagggctcggcggagtccccgagtgggggccaaacgcccgatcggggcaaattgaggctgtacagggtacaaacctggggtcgccatataatcccgatcaagagccagcaagctccctaatacactcttttgaagcctataagtaaccagctggggtcctgtcgagcagtagcatacaaaatcagcaacatttctgtcaatccgcaaatccgtacccaaattagtggccacctcagggtcgcactggttctggtttgttagcgcccaggctattaagagagagtccactcacagccacgctctaaccctcacagcccacttggctctcggcttgggcaatcgggcaatcttagccggccagtctagtgaccatctcagtcccccattctcagccgcccagcacccgcccgtcccatacatgtagcggcgtcgtcgatccaaatttcacggttttctcgctttgaatctaccattaaaggaccgtaaacgacctttttacactttatcggatgtctgctatcttcaaggctctaatgactcggcaaacgatggggttaggagccgaaggtgtagcaagctcgcctaaggggtcaatatatatatttttgcaccgcccgttcgcgccaagcgctctttaagcgacgtcttgacaacgacccgagtcttcagagtagcagcgctagaacgatcaacactagagagtgacatccaggataaatgactggacaattgactaaatccccaacgtttttttcaggtggtacagcaaagtcccgtcgggggccgacttaccgcagatcgcccgacatctgatatacagtcgctacccgcctccaaggccaccgagccctgattccgtcttcagattcctgtctgatctgcaggtcaagctcatattagccgttgtgcagccgagttctcaggtctggcaacggcaatggtggagctgctcgctcatccccaggctgcagacgtccaccgtttacctagtcgagttggtccgcttcgatatgcacgaatacccaccggtgagtgatcatggccgagctaatgtacttggatgtagctatccatcacgcgtgtcttgaaacgggcgggcgaggtttctagcctcactatgctggctggctggctggccgctgatcgtcaaccacgtcccaagattttccgcggcgaatagtctgagtacgcgcatggaaagaccgtaacacccgtctccaggtcacggtccaggagaatcgaacgtcatgggccgcgaagtcgcagttgtaacggggcaaggccgtgaaaatcagccgcaggatctgatcgtcaaggatgctcaactctgccatctctccgcacggccctccctggattgcatgggcaaacctttgctcagaaggtacggccagtggtggcaatggggaacgacagca

SEQ ID NO: 15875 - DNA, 3362 bp, Emericella nidulans
atcgactaataacactgacactggtgtcagtgttgggcgacccttgactgcacgcgacaaacaaaggcggcgctgaggatcggtgacgggcccgcctttgctttctttcttctgccctccacttgtttctacacgtcaacttctcttctttctctctgtttgctgcattttgtgtctccaggctgttgtctgaatttcgaattttctatccgttctatactactctaattatctaccataacttcacattcgagcttcatctgctacattctccaccacctacataatggctgcagctgctgttgacactgcccctgcgcagtctccctctccttcagacgtcaagcccaacagtgttaccaattctgtaccttcagagcttgtcgaatttccacactacagagaacttcagaggtatgctcaattcgaagctctgcgcgcgcctcgcttcatattcttcgtttgcggtggactaacacaatgctaactaatccataggaacttgcgcaacaatgtgaagaagctggttagtagcttcggctgcgctaccttgcattttcatactaactcaacctagaacgctacctccaaagtggacgccgtcatcgccaacaaccccgacaagacgctcgacgagctcgttgcggagaagaagatcaacgaggatcaaaaggcacaggcactgaagaaacctgttcttcaggccaccattgcgcacgtggaggagcagattgcgcactacaaggagtttgcgacattctacgaacagcgtctggccagccagaaggcggacgtcgagaaggcgcacaaggaggtggaggctctgcgggagaaggctgccactgcaacaccggcacccgcagagcaaacacctgaagtaaagaaggaggatgccgctcagcaattgctgagcgtgacgaggttcctgagcactgctgccatcagaagacatcgtggtgaggacgagactacggctgagagtcgtgccttcgaaggtgtcctcgcccaggtctacggaggccacctcgatgcagttgcctcgatgcagaaactcattgatggagccgatgagaaggttgtcagtgttgacggcgagaagcttgaagtcacctgtaagttcttataccctcacttaatgtacttgagattgagactcatcaaaacgcagtcgctcgtgttaagcagctctccgaacaggagacagtcgcgtcaggccgttcgcagcccgctccagaggccgcgaccgatcccactacagccaacgccgcttccaccgaacttcaggacccggtatatgtcactgaagctgctatagacaacgccgccaccgcctccacaaatgaggctgagagcgttgtccgccgccgcagacacttgttggggaaggtgcaaacgcggtcgctgaatccgcatgggagccgaacagcgaccctcttgcctcttccacgaacactgagggctttgtagagatccctcgtgacccggctgagacggaaactggcctccaggcgactccggccaacataaccgccgacgttgcctccgaggacgcagaaaaaactgaaaacgactttgagcaggtgggcagccgccaccaaaggcagtctagcttccgaggtcggggccgcggtcgtggtcgtggaggcgataatttccggggtcgtggccgtggtgacttccgtggtcgtgcgcggcggccgcggcggccgtggacgtggaggacctaacggagcacccgctgccaccccggctgctcagtaacagaaccgactatgcgacatgaagggaatatgcttgagcacgattattttctctacacctcatctattccctctcgaccacctgctcatcaggccgactgtctttccaattcctataatatatcatatctcttcatggataatggtggtgttatggttcacgaaagcaatgaattttcgaaatgatacaacaagactttgcaccaattccttggttccgggaggtcctgcaaaacttttctgttggcatttgtgttgtggttattgagcgtgcatctggttgttcttcgatcgatatctctttctatattctcttgatatagttgttgcgttgcctttggtaacgcgctctattatcttcccttcacctgtattctagtttggcctatttgccgacatatctataaatcttggaaaaggattgggcagttgtttgctaacggcgggaatctaggtgggctgatagatggtgttcatagtcatgaagcagttgtctctgttatacacttactagaaatgatcttgtaggactatgacagacactacaggattgaggtgctggcgaaatatgacaagtgacgtttttgcgccgttgatgccaatcccaaatatgctcgtgggcattaatgcctctcaatatatatgtatttagctgtaggctatccactcgcttggattcctcgtaaacctcgtatgcgaatagcgtatacgaagtaataagctgtagtatagcataagcctggccgatggtgggcctactccataatatatattcaatatgattcgtggggctgggttgagcgaatgacataatttgtttgtctggaacttgaatgatttggaatgaatcagatggacagcttgcattaattattctgaacacaccatataaatgctgttctctcttcctttcctggacgctgaccagtgaaccccttcctgcttgctagcacaccatggccgtgcccgcagaacagcgcaagaagatcctcaaggttttgatgacttccttgttactagacctggtatgcttgccatctggaacatccaatataactcctaacgtgcaaaaatggcagatatcgttcacgttcatcctccccctcttcccttccctactatcgttctaccgcgagcgtgatccctccccatcctcccctctaaacacagtcttccactacctgaacgcctacaagaatgctttcgccaaacccatcgattctcgttacgacatcgtccttctaggcggcgcccttggctccctgttttcacttctgcaagccattgccgcccccgtgatcggccggctctctgacaagcatggccgccgcaaggcattgctagcatcaatgctcggaaacacactcagcgttgcgctgtgggttgctgcaaccgatttccgaacgttccttgcgagtcgcatcgtgggagggctgagtgaaggcaatgtgcaacttgcgcatggcgatcgcgacggatatcagtgagccaagtcaacgcgggtcgacgatggcgctggtcgggcgtgcttcagtatcgcgttcacgtttggacctgccctaggcgcgtacctgtccgggattatgactgttaaggcgaatc

SEQ ID NO: 15876 - DNA, 3503 bp, Emericella nidulans
gagcccgctcccagtttgcggtcgcaaacagctagatgtcaaaagcatccttcgggccttttcagcgattgggccttgctaccctgtcacggggccggcatttcaaaggaccgggggtctttcaggaatccaatcacaaggttagggcaaggaaatttctggacccctttccacaaggcgttacctctccccccatcgatagcgccgatttttaccttaatgaatcggatgaaaacttggattttgggcatgaggagcctttaatctttccacgacttacactagaagaagtggtgcaagaggttgctcacatcgtgcggactcgatcaaaacccgctagcgaaggctttacctacgttttcgccgatcccaccgggcacattagattctacaagattggcagtgcaaagaatgtttccacccgggcgaatgatcatcgcaagatctgcaatatctcttacttcagagcccagaagaaacctgccactcctctctggcaatacaagcggctcgagaagctggcccaggccgaactaatcaatatgagctacgatcccaactgcatttgcgggattcaacagcgccagtatttctggggaagggcggaaactgctttcgagacaatcgagttttggtccaaatggctactgaagcactctccgtacgataagagcggccgcttgctaccattctgggaatatcgactgagggtttttgaagcgaaaattcagaagaactttgactgccagggcgccaaatgcatgaagcatagcgcggatgtcatcgcctgtcctatttgccttcgtgcaggatggaaagcatggactgagccatcggggcttgataagatcgaattcgtttctcgaacacaaatcggtagtccttgggttcacaagatcctgctctacttatacaaatacattccaatacaggatagtgtatgggttacctctattgacggcctagcgagggcggtatccttgtgcgacaggtttaagagccctgcaatattactcaacctcttgtatgcccggcttctcatacctatgctttggtcgacaatcttcacaacagccgaatatttctcgttctttgctattatggagattctagtattctctgcgatctatcaactggtcaggttagagcttgctcagctcggcgtacacaggcgtggcacggagagactgagcaaggacagccgccaaattcgtcgaaaggctctcccgccctcctcagatagagcagtcgatgaagcaagctgtcgaaaacattcaaaggaaccgagaattctggagatcccagatgatgaagatggagatatcctgcaccaagcaccgtccagcggcggcggcggccaaaaaattcgacaagcaccagtgtttcttcctcctagcgaggcggctacgcgcctgaaacggttccaacctggtaggcggaggagcgactttgtataaggtttagtgagacacgcagcatcatttttggctcttctcttgcaagctcatgtttactcctttgttattgggctggctgatgctcgtctgttggtcaagtttgcaagcccttgtatatggttatgctttgccgcatttcccatttccgattcacgattcacgacgcaaatgctactcctatatacccgcgatgtctgttgccttttttaacgattgccaattgcaatgtactgggcatgggcgagacttttatgaccacttaccaatatatgaaactacccaacttatcatatagttctaaaggctcaaggatatctaatcggaggaaaatgcttatgcttacacctccgcttactaatgagcttattctgtggccacgagggctttgtcagcggcaggtcccggagtctgaccggcaccttcctgctttcttcatcatcttttacatcatgttttctcgtgcgatattgctcaggttcactcctctagtagacatatttctattggctcatgatctctcaggagtagcctgatgtacctttctccaaactccggcgggcgctcggatgaagagccgccacaacagagtaagcggaccgccagagcttgtgatgcttgttataagcgaaaggtatgagtcgattctatacggataaaggttgatactaacatggtcgcagataaaatgcgatgctgcagtgccccggtgtaattggtgtagccaccatgactcgccatgtacgttcgaacgcaaagttcgaagaacgcgcaagcgggcagttgttgggaaagagtatgcaaacttcagactattttcagtgcgttgtcctgacctgtccgcagatctgctgctgtcccaggctctgagctttctgagcgcatcgctagaattgagagacttctttccgagaagcttcctcaagagcctggtgagtctcgccccatcctgatgcccggggggtcagtaacttattgctgtagcatacaccccaccgcagcaactgccgtctatttctcctggtctgaaccttccctttacttccagtctggcatccatgccacaatcgtctgcttcatcctcagtcccactgcattttgctggaagagagctgggcgcaatcagcttgttcacagggatcccatttattctccccgagggccaggagtgggtgcagtcacgtactggccaaaagctcgctttcgatcagttcacgtcgaatcgagccccatgggaaaggcagcgagtgcagaactccaatgccatgctaatgcacctacaggcaccaaatgcccttgatctgccgaaccggcaccatatcgaattcagtttcaacgtttaccgcacgtctctaatgcaacgagtctttccggtcgttgacccggttcttttctggactacaatcgacgcggcttacaaggaaccgttttccggctctgatggcgcccatgttagttctaaagcaagcatcttcgcttttgcgacgtttgtctcggggctttgcaaaccctgctttttagaccaaggcacaaatttgccgcgcttcgatgaggaggcttgtgttctgaaagcacgatacctactatgtcaggttctgcaggaacctccaacactagatggactacaggctgtggcaatgttggtaagtccacaacaatctaaatttttcgtaacttctgccttccatagcttacttggcctctctttgcagggaatgttggaactattcgcaggcaacctgcaatctgcgaattactatggttctatctcagctcgcatgattttcatgcttggcgcccacatcttcactgaccagcgctcttggtatccggaatcatttacagatacagaggcgcgcatcaagggacagctccgtaacttattctggctatgctataccctagaacaagacgtctcccttaggacaggacaagcccaattgttctcagaagacaactgcgatctcactctgcctccagattacgtcaatgaaatggaagccagtctggaattccaccacacctcgacagacttccccaaaaccaatt

SEQ ID NO: 15877 - DNA, 4007 bp, Emericella nidulans
  unsure (1)..(4007): unsure at all n locations
ctgtccggtacggccgaaaataaacaagcgaggtttggatacgccggcaggtaagtagttgtcggcctatttaactggcgtcgggtcggggactacgcttccagctgcggcgccgggcatttgggggctgcgtgctagccctaattcctcatcctggagtctacatctctaatagaacgacgcaatcgtttctcaccctagattttgcgtccttagaacgacctaatcaattcctcgccgtagactctacctcatataacgactgcaacagatactctgctgacgaacggcttgagcccatcctctgacctcaattgtatatctgtcaaagctgcaatatgcacgatccaagcaaagtgcaattccctccccctccccgtgaagggctcagtgaatcttgtccaagttaatatgacggagtggaaggtgaccattattcacgcagatttgaccagcgcatccctaactccggcgaacggcgacgtccaatgccagttcagccgtaagttcggtaaatggtctgcgcctttgtttattgaagacccgttcctgcgcgttcacggccttgcaccagtgttcaactacggtacggttctatcactacacaaaaccgaggcgcgtaagctgaccctgtacaggacaggaggtctacgagggattgaaaggtatacctggcacagaaagccaatggcctaccccacatgtcagtttcaatccagacaaaaaatactgaccgggatgatggaatggcaacctttcgttcgccaaccggcagcatcaacatctttcgcccatccttccactctgcccgcctgaaccactccgctagcctcctctccattcccccggttcccgaacacctcttcctcgatctgttaatctcgccgtcgcccagaatgcggagttcgtcccctcgcacgaaagccaagggatgctctatatccggccgatcctcttcggctcctccgcctgcattcagctgacgcctcctgacaagtacacattctgcgtctacgttacgcccgtggccgcatacaatgggatcaaccccctagacgcgctgattttggaggggttcgaccgcgctgcgccgcgcggcacaggaagcgggaaagtcggcgggaactatgcccctgttatgaaatggagcgatcaggctagacgcgagggctatgcaataacgctgcatctggatagcgcaacacgcagcgaggtggaggagttctcgacggcggggtttgtaggcgtcaaggagaaggcagacggagacggtgtggccgtcgttgtgccagatagtgggaacgttgtcgatagtgtgactgtcaggtgcattctagcggttgcagcgaggatgggctgggcagttgaaagacgggtggtaagtagtatctcccaaatattatacaggacaagcaagccagactgaaatggtactaacgggtcacttggggcagatcaaatacgaggaactggcgtcattctctgaaatccttgcgtgcggcactgcagtgacggtcatcccaatcaagtcaattacatgcaagagccgcgggaatcggttcacctacctcgaagccagtgtcagcaagccaggcccgtatgcggcgaagctggcagccacacttggggatatccaaaggggcaaggtggaaacttgagtgattggttgaagtaaaaaagccggctctttagggcttcaagttaacaaatacgggcgaggagagtaaggcaaccgcaagcaatgataaatctagatgctgtctatcattacttctatatgaactactagccggtaaatccttggcctttaaacggctggaatgatatttaagtgaagccagcgcatttttgtcaatactattatactacataaattgagcataacagtataaaccatatcgtaacactgccatagaatcccttcactatgggttcctaaaattccatcgaacacaccaatgccctggccgatggttatctgcgacatcggcgaccggaaccatggcccgatcgtgcgggtgggtctgtcaaacccgatctcaaaccttaaaatgtgctcgagggctgcgaatgggtggccatttttcggaaaatctttaaagacagcggtcgccaagaataccgagttgctgattgactactaggccgctaatacatgccaaaaccggctaaactcggccagcgtatccgttttgaggctccttgccggtgccgatgcgatcttgattcatggtctgagatctcaatagttgactagaacccatgggagctcatggtagaaggtttaaaaaggatcaaagcagtactagccatgacctgagtcagtcagtagtccatctaccggtatttttgaatcgcaaatccccaaatttagtccagcatgtatgctccttatgcttcgggcccacgtaattatctgggcccagccatgacgcgtttcgaacagccgagccccagaccccaattcctttgaaaaccctgtctatacgacgcccatgactcgacccttatagtatttaatatggtatgccccactgcgtggcgtcttgtttccagaaggagcatctcaacgcgtctaccctggccgttgtcacgagatggttaaaggggaggtgccgaccacttcgccctgagtgctcgtttcgagtcagctttctgccgacacttcgatatcgcgctggctcttccagaatggttcacgctgtcgaagcatgggtctgggtagccgtcgtgctggccgtcggttcgttataacgaaatctcttgtgtgcatgtgaaagagttgacgctgacgggatcatgttgacagctatactgcgctatgtctctcgaatcctacagacaggcgcgcttcagaacctccagcttgaggacgtcgccatggctgtcacggtgatcttctacatcttactcaccgttttcctcgtccaaatcgacaagcgcggcacgaacggaatccccccgagcgagctcgacacgatcgatccggcgacgataccagaccgcatcactgggagcaagatggtcgtagcggctgaacaattctggatggttgtcgtctggggttgcaaatgctgtttactcttgctctattcaaccatgacgtgggcgcctcctggtcccctttcacctatcctggccatagttataagctaaaccgtcctatagatctggtctctggcaaaaccgcgccgtcaaaatcatagggctcgtctgcgcttcttctttcgtcctcatcgagatcctctttttcgccgcatggtgccgtccgttcaacgcttactggtcgtaccctccaaagtcccagcaatgctccgtatacacaaaccacgtcatcatcacgctagcgtttaacgtttcgaccgacgttatgattatggccatccctctgcccctgctcatcaaagcgaaactgagcctgtcaaaaaagctcaccctgtgcgcgctcttctctctcggcgcctttgtcatcctctgctcgatcctttccaaatactactccatatcgtcgccctacgggatgaaatgggtcgactggtacgtccgcgaagcggcgacggctgtgattgtagccaatatcccgcagacctggaccctgttccgacgattattcaacttcaagtccttcctgcagcattcgtcgtacaaccgcagccggagcaagagcggtactaaatacgggacgcgcttcgacagctcgacgatccatctttcccggttcaggggcgataagtcgcaagtgcagtcgaccattgaccgcaccgagtcaggggagcatataaaccgcgagccgctagagatctgggcccaccgtcagttccacgttacgaatgagctagatgaagggcgctccagtacgagcagcggcagtgtgagccagggcagagagacgccagagttcgatcccaccaaggccgcgactgtagtgaccgtagggagaaatgaataatggaccaagaacactctacatgactgtcaattacagcggtctccttttatnaatagac

SEQ ID NO: 15878 - DNA, 644 bp, Emericella nidulans
  unsure (1)..(644): unsure at all n locations
agagcacgactagactctttctgactcccacctgctcctggtcgtttgctgagaaatgctggatgactgacagcactccttcaccgtggactccacacaagacaggcttgtccagtctctcaccctactctacatctaccgccaaatcaacacaccctgtcaactctagcggctgccagtgcttacccattgttaatatccagctgcatttacgcgccattagcctgtggaagtttgctcgatgattacaaccgggatgcgaaatgcacagccctgggccctatgggaaagggccccccctggccccccaaaaaatcccggttggttgagggggccgcctaaaaatgtggggagaaaacacaaagtggttcctcctctttttttttcaccaaaaaaaaaaaaaggggggggttttaacccctttttttttaaaaaaataatttcagcgggggagatataaaaaaaaaaaagagtgggaatctttttggcccccctctttnttttttttttttttttattactatacccccgtccgcgattatttttttagaaaaataataaaaataaccncccggnggtttttttttttttgtttttacttactcccctctcctaccagttggtgagtttgttgttcttatttt

SEQ ID NO: 15879 - DNA, 537 bp, Emericella nidulans
gagaacatccgtttgtttggctgccgtacttcgcctagatggttaactataaccacccaaccacgcgtgaagctgtatatttttctaagagctacgcaacatgcctccgttacccacccggaactcatgcgtagagatctccttattccttaagagatgatgaccctcaatggcatgaggccggtgctgatgctctacggcccgcagaccccttgctcttaactggcggctggacacaccctgcggccatagaactgtcgccgcagggaatcactgtatgtcccacccgtgcgaatgcccgttgcgcttgtgccaggataacagcctctattctaggaaacaatgtagatacaggcagtcggcaaaacggatcctctacttgcggataatagatcgcctctgttggttagggctcgctgcgccttgtggaggaaccccttttacacctgggggccctcatttggcatgcgcagctgtcgactttgtacgaaaagggggtactccttgacagatttcgggccaccagtctttctttta

SEQ ID NO: 15880 - DNA, 2108 bp, Emericella nidulans
atataatgcagtcatgacttttcgtcaatgtcgagagatagaaacaaatatcgccgtggatgcggaaactcaaacagagcacagccaaacatgatggggaataatacaactcctaaaacaagcctagctcaggtcacgcctcgttgctaggataagcaaccttgtaggtaggaacaaactcctccttaatcgaccgcaggctcacaaacctgctcagcaggttcccactaccagccttatcattggtaccggacgccctcgccccgccaaacggctgctgacccacaactgcgccggtactcttgcagttgatatagaagttaccggccgcattgcggaggacgtcgttggctaccgccagtgcctcgcggtcctgagcgaacaccgagcccgtgaggccgtattcgcctgttgcgtcgatcttctgcgcaatacgggcaaagtcggcctccgtcgcgtcagggtaggcatacaccacgagaataggaccaaaaagttcacgtgtcagcagcgggtgatcagggttagtggtgcggtaaacggtgggctggatgtaccagcccttggaggagtcgtaggagccgccagcgaggagttcgagctcggggtcgttctttgcctcgtcaatgaccttggcgagcttggtgaaggaggcttcatggataaccggcccgcagaagttggtaaagtccgaaggggggccgacctttaggctcttcgcttccgaggcgacctgttcgaggaaggaatcggcgatggaggacgcgacatagacacgagaggttgcgctgcacttctggccctggtactcaaaagcaccgcggacggtctgcacagcagcgttgcggatgtcggcagatttatgaatgaggtggaagttcttgccgccagtttcgccgacaatacgtgggtagctgcggtatttgccggctgcgacacgagtggagatctgaccgtacagattacggaagacattggtgctgccagtgaaatgaagggctgcgaagtcggggtggtcgagaacggtcttggtcacttcttcggcttcgccggggacgaactgaatgacgttcttagggaggccggcttcgagcaggatctgatgaacgagccagttggatgcgatggccgaaggggaaggcttccagacaacaacattgcccatcagtgcaggagctccagcgagattacctccaatggcagtgaaattgaacggactgatcgcgtaaacaaatccttcaagcggacggtattcgacgcggctgtcttgttagcctagccctaaccttgccgtgaggggtgacctacttccaaacacccggcgcatggtgcacaggctgctgcgcatacagatcctccgcatacttaacgccaaatcggaagaagtcacaaagctcagcggcagagtcaatctccgcctgccaggcattcttgccttggccgtgcatggtcagagccatcacatcatagcggtactttgtcgagatcaggtctgcagccttaagaaaaacactggcacgatcggcgaacggcgtggaggcccatgatttgcgagcttccagggcggactcgatcgccgcctggacgtctttggcggttgcattggagtaggtggccaccgggccgtgcgacgcggggttcgattgtgttagtgatgaagaggatttgacctgagcacatcagttgagctctacgaggggaattggacgctgcccacctccttgcctgcaatgactagaggaacgctcagaggagcatttcgttgcgttcgcgccaaagcctcttgtagagcctttcggtccggcgagcctgcggcgtagtgtttctgcaaaatcagcagagcccttgacaaccaagaacaaaggcatgacgataactcacgtttggttcattgtcaatgcgaggaaccttgtatgtggcgtatgtcgccgtctttgtacgggagagaaccgacgctgttttggggagagccctcacccgaagcagcatcgatgattgcatattggtattgcacttcgcagttcaaagtggagcgaacgaagagaggagagaagaagaggaagaagatgaggaggggaaatgaggaggaagggagagcaaacacggtg

SEQ ID NO: 15881 - DNA, 460 bp, Emericella nidulans
cggaagtgctctaggtgctcgcggcgggctgcgtctagatccgcgatgtgcgagctaccatgtgcgccgctattcaagcgatatgagctctactagacggcgatcgttggcgcagagggagtgccccacctggaccccgaccatgggacgtggacaagagcatttggggatcgcgcgcgacctattcgcgcccaaaatgatgcggttggagactctccgtcatgcgttggccaactttgtttaaacctttcacccttggggtggtggctttctgcgtacgaccaacatgacaagagcctcaaaatggggtctggaatggtccgggcgaatcaagggtattggcgactgttaggccccatacaattgcgatgaaagtgccaaacagcacaagcggtccggggaagatgagccccatttggttaaacgttacttttgccgatttttcaaaaaggtcttaaaa

SEQ ID NO: 15882 - DNA, 519 bp, Emericella nidulans
gtgggaacacgggatcttcatgaggacgtgggctttgtgagtttaaggaagacggggcctgagaaccggattcggaaggcttgagataggaatcgtgggaggggtaagaagcccgggaggaagattgatccgctgaagacgttcaatcggggaaggaagtgattacttttctatggattatgtgcatggaagtttgtataatgggttcggtccgtgatagagtgcttcctagaagcagaaaatctgcacatgatatcattacgtatatagcaatcatatttgaaactgacttggctcgtcacaattagtttatcgtaaaaattatatctgatgaatctattttgagtaccgaagccttgagggcgctatatttgaatcctgtcgcatctgaatcgaggcgagtatgtcagccatctataagaacttattccttaactcctcgcccagtagcctgtcccgaacgtcgctcgttaattcttccaacccaaaagagaaatgcacccattttccacgcccgtc

SEQ ID NO: 15883 - DNA, 2183 bp, Emericella nidulans
taggattaatttgatagaaaatggaataaaaataatgagaggaaaaagaagagatagagtagaaagcaataagcaatgagtgggagaggtatctagatgagaaaagatggtgtgaaacgaaatgaggagatagagaaaataaagaataggacaataataacgtaggagtgtcaatagtgcatgaagaataaacagagctgaccaatatactggtaagaagaaacaaaggtttccacgagaaaagttacataaatacccaaaaatcgggccaaaagccacaatagagaataaccagatgagtatggttacactgcaaaaggaatgtactggtgcgcgctccaaacggacgcaggtagcacttttacgccactcgtgggaaggcttccccattgcagcaatttgaggtgtgcgtggccgctcaagttatcgccaacctcgctgcagaacatcacggaactgcctaaagacgatgaagcaagggcgacattgtggcccactccaccaaggctctgcttgatgacggcaggattagatgtccgtgagacgggagttgtttgaccggctgcaggaacgtaatcgcaagcgagatctatcgcgagtgatcccgcaactagaatttccgtcttttctactggttcagctctaataggcggttccgatttaatttctgaagtagcctggtcagccctaccgatcgggagaatggctggcatatgcctacgcagggacaatcgatattaggacatcccaccccttcgaaggttacagacaactcactgttcgctagggatcatggactgttccaattttgaaagttccactgcgacccgcgctgcacgtttgacgtttgcttcaacaagggcccggtttgcagccactgtcttcccaccgctgagctccttaatctttgccaagatgaacggtgtgttgtcactgccatgatagccctcaacttccgctagatgaaccgctttgttgatggcggcgtctatctccgcctgagggattgaatgctccaccggaactgggttagcgaacaacattcctgacgagacaggcaacttcgactgcgcatctgcaagtcgttagccatgatatcttcacgtaggaatgctcacttacagataatagcggccgcctctgcctcattctcaatgattttggggcttttgatgccgctgtcccggctgaagaacgccggaatatcaacggggccctgacgaccgtctgcaaaagtcgcgacgcagacgccctccgtctcaaggtattcaagggtccgtgggatgtctaggaagcttttgcagcctgagctaattacggccacgggagtccgaccaagttcagtcaaatcagctagaacatgtcagctcatgctatcgcctaacattggaggcatcataccggagatatccatagacgactctgcaccacgatgtacaccacctactgatgttagttgtgtaatatcgtgtatacagtgggggctttaccaagaccgcctgtaccaaagaccctaattcccgccagatgcgcaagaaccattgtaccagacactgttgtaccgccgtgaaacggtttaccggtcatgccctgtcatcattattaggagcccagacaaactcgacagtatacctaccagaccgcatatatagccaagatcccgacgagacactttcagcgcgtctttcttctccgctctcgatgccagctcgataagctcattgggaagtaggccgacgcgagccacgccgttcaagatgccaatcgtagcaggcacggcgccatttgcacggacaacggtttcgagcagtgatgcaagcgctacgctttctggatacgggaaacctgcaactgttacataggtctcttgattgaagagttgagagcgtacataccatgggtgtagattgttgattctagagcaaccactggcttccccgtagctactgcatcccgaacctcctctgaaacctggaagaacttgctctgggcgaagctatggctctgtcgcgccaagcgagcgatgccagttgcttttcaattggggtgtcctgcaaaagtgccggctatatggagctctgagcgcgagcatcatgacagagtttaagcacattgccagttgaaaccagagcagacagcaagagacgccaagctggaacaaaactggatgaggggaaagaaaa

SEQ ID NO: 15884 - DNA, 3288 bp, Emericella nidulans
  unsure (1)..(3288): unsure at all n locations
atacttccataacacgctgtatcgtgatttcgaggtcttctgcgctacggcaatcgatctcgatgcacgagtattccaggccctcgctcgtggtggcatcggccgtgcgcccgaactctgtttctgacctggtcagtttcaccccctcgcagcggtatcctaatccctgccactcaatatcgctgtttcgggggagttcgtgcacctggacagcgaaaaaagccggcacttggctcttgagatcgctagtctctaccagttcgaaattgggaagactggggcgcagggttgttttcgagtactcgtgccctcgtcgcccgtatttaatatcccagacatctagtgttgacccttcatcttcctcttcctcggactctgtggcagttgcttcgtgcattttctgccaaagttcccatgcaagccgagccctagtcttgatgtgatgttgccctgtaaagtaagcaaccgtacccagccaccagccaacttccatagttgctcctatccgccacatatgttggagcgataggacagctcgtaaacagaacatttctgcccatacaggtcctccaaccgttgaagggctctcaacctcgaccaaatccatagaggccggctccagagggatttgcccggcaatgtatatgacccgttccgtcccctgcaaaggcacggaaattgcttgtgaataagggccaatattggctggagcccagtatgatcgcgactggacatggagaccgtctcgttgaacccttggacccaggtcgacaaccatcgagaccatcacgtttactccgtcggggagcctatcaccacaggccactgtagctcgcgctggagggtttggtttctcgaataaagagacgtatatgccgttcattgacggaaaatcggtcatagagcggagaaggactgtagtgaaggcgatgtcggctgtcgtccggggtgcagcgttagcaactgatgtatcaaggattgcctggatcttcttcacaatcgctgccacctgttcagcagccccagggccagcttcgggtgctataagattagacaccatccatataccaccattgacagactgtatgggctgatcagacgaccaggaccctccgccatctcccccaacaaccacagctctgtcttcttctccctcgccttcattatacaaggcatccaaagccgcagcaaacctcccatccaacaatgccggccttctcacatctcccggcgtaatcccatcactttcatcctcactcttccttataaccttcgcaccttttaaccttaaatacccaacacccccctccccagatctaacctccctcccctcttccccaatctcgattctccctcgccacaaaaactcggggccatcaacagcgagcgtctcatattctcctccctcccccaacactgcgccccgaatatcctcacccccacccattccaaacctcttaacacccttgacaatcctcctccgtaagccacccccagcatccgaaacatcaccccacagaaactcttcatccagtgcgccagacgcaactttcacaatccgcgctgagcaccccacagccgccatatccgtcagcaagcctgcctcatcttcttcacccccgagctgcctccgtgcctcgggagctgggaggaacgggtattgccacaaccaagcgagcgggacgagaccaagtcgactagcaatatcttcaatcctcgtgcgctggtacgtagacaagatagctcccgcgcagacggcgttcgcttcaggatgcgcggccatgactttgcgtagcaggggaatgagggactctgtttcgtcttcttcttcatattcatcctttccagcactctcaagttttgtagtaggagaagcagcatcgttcgtgttgcgataaacccttcccgcatcaaccgctcctcctataatcggggcgcgataaagcggaatccccaatgcttcttcatacagtggaatcacagaccacccgattgtctggtacatgaagctgtcgatgtcgtctgctgtttctggctgtatcgaatcattgtcgctattgctactaatggcaggaattggcggtggatggagattcgctaacgcaacgactttatggccgttgcggatgcaatgcaggattgagtagagggaatcctttccacctgatataagggcgattacgttgaggcctgaagattttggtggttgtagcattcttgttcgttttgcggttgtttgtaggttaaagaggtggcttcgtcgatgagtcgggatttttttcaggctacccctcaaatctgtccgataagattagatagggcgaatgagggggagttgacaacccgcggattcaaagagggtattcaatcttatcctacccgtggaaagattcaggcctttcaagaagtgacaagatgaataataggttccataaaagtaggcgggttttgagcgttggtgttggttgatggcgccagagagtggctcagtgcgaaataaaccgctgaagttcgaagtcctcacccgcaatatcttacaatcttagaatatatcactctaattggctacaggtatcagagatctgcttcagcaaaatctagattatgactacctaacccgccagacgaccgtcaacgtacagcaaacacatattatgcacacgggtaaatgcaaccaaactggcaaaagttacttgtgatataagacagtatgcatgtgggggtatgagtattgacggggaggagatcaaaattaaaatatacatgtggccagcacagtgaagtacaaagagcatattacaacaaaatagacagagaagagcaatgtcaacgagatgaaacgaagcgaaacgaagcgagaaggtatgtgaagagcaagaatgataaaccaaatacaagaaaggttagggattaaagagagaaaaaagaaaatgatacagcccgtggctgaagaaataacccagccatgcgatgcgctctatgattttgtgtccaaccgagtgttgcgccccttctatagccctgaaatgaaatgggcatcccaaaataccgcttgttccttgtttctttctcttgttaccggagaagtgtgatgcaaaccgtacccaaaaatgattaacgccataaccaagtcaaaccgatgagaccagtgtggatgtcgaagctggacaaaatgcaggatagtgtataaatgtataggaaaaagctcctggtcgcatagcgttcgtgatagctcccggtgattccngatcacgcggtgctctcctcgcgcttggctttcttgagcga

SEQ ID NO: 15885 - DNA, 513 bp, Emericella nidulans
cccatttggaatcccatactcgtgttgtagcagggcactccgaattgagggagatcagagctgctcatataccacttcaaccccctaacatattacggcaattcggataaatgattcaatctgaggtctgtatccggcccggagccatcctccgtggttctgcacgggagggtctcgcatctcttggaatgacaagggacaagcacattgctaggggaatcacaacattagcttaaaagatacaagttggaactaaaactgctagaccagaagaaaggacttatttacttttagcctaaactctcggccttcaactaatataaaagctagtcatttatttctttggcgtgtccaatatattttcttcgctagaatttacctcttctctaaacatgtgctggtttccccgcgctctggagattggcgggatattgaaaggtgcggggtctagaaggggcctctctgtccgtggccaaaggagtttccgtgcctggctttgcattcttcaagtgt

SEQ ID NO: 15886 - DNA, 4480 bp, Emericella nidulans
gtcttgatcttttggttttggaggcgttggatttcattcaaagcctcttgaaagcgccgccggtcaaagcagtgttgcaacagcagttgcagaatgccgggcaatctgggctttccgctagttggttggcagaaatgctgaagttggctagctcttattctcaaattacatccgaagaagagggtctctgggatattgatgtcaatcttttcctttcagaggaaacctccgtcacagcaaactacacccctcgcacctgcagcggggatctggtcattaagctaggagagtggctcaaagatgctaccactcaaagtctcctcgcttgtctgaacgatgtcttctccgatgcttcgtctacatggaagagccgtgaatcgtccctgttcatccttaatgcgctccttagagatttccacgaggtctcacgcgatattgcgccggagttagccagcggttttggcaactttatccaattcgcgatacagcaggaacaggaacttctacgagcccgaggctaccttgtggcgggaagcttggccaaggtgtccaatgttggcgaagcttaccttgagccaactctaaaagcagtctccgaggacccgtcagaagttgtgaaggtggcttgcatccgcgcactgcaggacctgctgccttcgctttctaccaacacaactatcccgcttcagcagactgtaatttccgctgtgtccgatttcgtttccgctcacgatcttcgcgattcttccgacactgatgacctcaaagttactctggccgaaactctccgtgatacggtcatggtcgacccaagcgtcgtgcttacatccactgcacttgacgtactgttcaatattgccagcaacggtgctacaaacttccagttgaccatgactgtgacggaggcctttgaggatatagtcgaacatatttcagagcaaggggctgatgcctttgtccgcctctgcgaaaaggtgcttccttcaataatgggtgcggtcgacgtcggcaacttgactcaggatatctcgctaaccatttttgccgcggatctactgcgtgctctgacggagcgagcccttgagccactgcctgcaggctttgtcgagactgtcatgccgaaagtgaaccggctccttctcgattcgcaagacgcagagctcattcgacctgccacggaggcagtgagacatatccttgctcacgattttaatcagttcgtcgcctggcgtgaccccgaaagcggcaaagaagcaactgaagttgtcctggtgattatcgaccgtcttctgggtcccacagttgatgaccatgctgcaaccgaagtcggccaacttgctgccgagctggttgagagagcgggatcggaacggcttggcccgtatctaccgcagcttctgcaggctgtagcccggcgccttgccactgccgaaaaggctcaatttatccagagtctgattctcgtgttcgctcggctgacgctaattagtgcgcgggaggtcgttgacttcctcgcgcaggtcgacatcggcggacagagcggcttacccatcgtgatgagcaagtggctggaaaactcggtcaactttgccggatacgatgagatcaagcaaaatatcatcgcgctggcgacgctgtacaaccttgaagaccctcgactggcgcaggtgcaggtcaagggagaccttattgtgcaggacaccggacgaattaagacgcgatctcaggctcgtaataatcctgaccgctacacgaccgtgacagcgcctttgaagattatcaaggttcttgtagaggagttggcggcggcgtctggcaacaaagagatcgacgcagccacggcagccgcgctggaggaagaaggcagcgatgatgacgacgaatgggaggacgtgcccgacaacaccctcgatctcagcctcggagtcaccaaacaagagctgatggcgttcggcgagggcggcaccgaaggagtgtttggcgtgcgcaagcgggatgacgagacgcaggcatttttgctggatttcttccgcaacgcttctacgaaaggcgaattccagcagctctttgcagctttaacgccggacgagcaggagaagctgcggagtctgggttgaatcgcgtgacttgtggaccgaatgaccctttattctgatgtgattaaaccctacggtcagctatactgatttgagtacattcgcatattcgcatataatattacgttacgacctacttttcaacagatttcaccagaggattataagagttcaccttgaagaagattaggattagggaggaggcctcagcgtgatttattgggcgagccagcctatcggggagggcacggcagggtctggctttggctggactctggccgaatctgcatctgcacccgacgaagcggctgcggggttccagtagagccgtcaacggaaaataaggatagtcgagcactggatgtgtcataagtactaaggggtgacagagtttgtcatgttgtgtatcatttatttgctagagtttgacctaaggcggagagactggtaaaaggatgaatggggacttgcggcatctgcaacagagcaatcccgccgcagcggtcaaatatccccagtgcctctgtgttggggtcgccaaccctgcgcttcttttcttcctttttcctgtaaactagctgcaggctgccagccatgattgattttggtttttgattccctccccccaatagtatccacattatcccaccctcttatgacggcccggctccttttatcccccttctgccgctccctccttctgctcccacccgcatcccgacagcttgggtccctttccttcgccctccttcctgctggatccctcttagaagcttccaactgctcggagcatgccgccgccaaatttccatgagcagattcaggtcgatgtaagttcactccaggttacctcttcacggggtcaggccactatccagaggatttgtttgagtccgaaggccgcaggcgatctgccgtacccctccccgacctcgtggcgctcgtgaattaacagttctccagacaagtgacgaggactcactctacgatgccgattccgtagctgactcgagtctctcgtttgcatccactgttcgagactactattatgaaaatggccgtcggtaccatgcataccgctacggccaataccccattcccaacgatgaagaggagcaggatcgcttgaacatcacccaccacctcttcaagcttctgactgggggcgatctgtaccgcaccccgcttgcccaacagcccgccccaaagcggattctcgacatcggcacggggacgggcgcctgggcgctggaaatggccgagcagtttcctgaggccgagattattggcactgatttgagtcctattcagccgagcttttcgccgcccaactgcacatttatcatcgatgacgcagagagcgattgggcattctccaaggatgaaccgtttgattacatccacgctcgatctatgggcggtggtattgccgactgggataggctatttcggcaggcctacaaccatctgaaacctggtggctggcttgaggtccaggaattcgaggccgctatacactccgatgacggcacggaagaaaaggcgccgatgctggtagacctttctaagaagctagacgaggcgagcaagaagttcggcaagcgggtgagcgttgctccttcgcttgctgggtggatggatagggctgggtttaccaacattaccgaagaaatctacaaggtagatcataatctgtgtttccgtcagtgaagctgcttacactctgtagtgtccggtaggctcgtggcctaaaagtccgcgtctcaaagagatcggtcgcgtcggcaaggtggcggtaattgaagccatcgagccatattcattagctctcttcacgcgagtacttggctggagctacgaacgtgcccaagactatgtcaacaaatgccgccgcgaagcaatgaactgctcaggccatatccacatcctatactactttgtatacgcacaacgacctctatgactttcggacggacgaataatgaatgatgcattaatttttcttgactttgctttcctacatctgggcgacatcttagattcatacagtcttgcaggaagtcgggcgaatattacattcccattgcatttcgagtatatacatcgaggcttgcttaagatgtacatacatacaatattgaaccgctatgcatgcaataaaaagcacactcatccctgcaaagaatacccaacgccctccccggttcccatggccactaaattcgctctcatcttctctgccctttccccgatgccgaacaccgcatcctccctctgcacccaggctccaacgccatgctgcaacaccgcggtcgccctcaccttcttactgccatcacctccccggtcctcagtctccttgatccccacacttccatgcaacg

SEQ ID NO: 15887 - DNA, 830 bp, Emericella nidulans
aggaagtgtgcaaaagactgcgttctctaggcggaagggtggatgggacgatgatgatgactagcttgacttgcgaaggaaaggcaaagactgcgggtacacttacgggctacctatgattaatgatgcatccgatctcctgcttgagctacatatatggttataggcgataataaaatgaacttgcctgtatgaaagacagctgtaaagccaataaggctgaaataatggttacggcataccacgacctagtgaggggtactatacatctttgtgtctcgcgaaaagtacatgaatttacggctaacgagccgcaagggcatcaagagcttttcccttgttgttgttctcgctccctcttctgctggagccttatcatccgccgaatatccctcatatctggcggcttctcaatccctagctctgcccgcaactcgtcaacatccttctccagtattttctcccatagacggtgatcaattccttgctattcagcccactgcgcactgcccagggcaaaataagagaaaagcctttcttgttttgaagcttaagcccacagacgcagtcatattagccccggatttgaataatgttttaggaattgacgctttagcgtaattaccttcaaaagggggggcccgccgggcgttaaatcggacctacggaccttatgacacccaccttggcccattcttccataaccggattggggacccccctttaaccgggggaggggctcccgggttattctaccgtgccgcgcataaaggggccatccccttctctttttggggggaataattaattgacctcaccttttttttgtc

SEQ ID NO: 15888 - DNA, 3247 bp, Emericella nidulans
gaatctgtacaatactcacgatatgactttagaagctaccatcatttcatacgcatacctattcatgctcgcatattctttcaattgacgataactcttgaggcgacaactcctcaagacattgtaggctgtaggcacagtaattatggaggtagctttacctctggatttcactcacaacccccagctctgctatctccaatttacaaatcgagatgaataatgcggaaacattcttgattctgaagtaagccgaccacattcatttgtcatcatttacactgacaaccatatataactagacgttgacaggaacgtcgaaaccaacatttcatcagcgtcgacaccaataattatcatcatgtctcattctcaatcccacaacattcttctgaccggcgtctcgggctaccttggcggcacgcttctcgcccatctgcacactcaagccaactcctccccttataaaagtctttacgcccttgtgcgctccgaacaacaggcatcagccgtgagagaatacggagctaaacccatcattctgaacttgaacgatcctttgtccatctcaaaaacgctgatcgaaaaggaaatcagcgtcgtcttcttcctcatcgatgcattcaacgttcatgtccaaaagacgatgattgaggccctgggacacgtgagacagaggacagggagggatgtgcatttcctgcacacgactggtgcaaaggcattcagctcacatgtcggtattgactctgttcttgcccccgaggggaaattgctcgataccgatccgcggctgtatgaaattcagcaaaccacaactgcgccggaggagtatggctggtttactcaggtactcattactgcctagccgtgctttttttctcgtgctaaagatgatagatcgcacggacgaataccgtaatcatagacactgccgaggcgcacggtgtgaagagctacatctttgtcccctgcattgtctacggcgagggcaagggatttgggaataaaatctcaatccaggatgttgccattgtgaaggctgcacgggcagcggggagggtctacaaggttgacgacgggaaaccggtacgcatttaacccttccgcttaggggtatagtgatggaaccaatgtttacgagttaatcaggtctggcccgtctcgcatatttacgatacaacgaccctatattgtcagattcttcagcagatcctctcgggtcacgagattggacatggcaaggagggcttctatctggctgcgtcggggtgcgtacatgggatgatatttacagcgcctttgccgttgcgttgcataagcgaggcctcattcaagacgcaacgattgaaatggcgaatgaggaggcggtggagaagatggcgaagggcttggacccgggtaatgggaacgtgcggattcaactgggcggggagtatgttctgcttcttttcacttttccctttactatttctaaggatgctgacggggatggaaacaggtgcaactttacggctgtccacggtgagaagattggttggaaggctgtatatccgccacaatatatcctggagattgcggatgaggaggtcgacttgattctaaagacactggatagttaggtatctcggcaaggtatactgcaaggttaaaagataagtgagattgtgtagagccctggacagttttgcatacagaccatgtccagtccaagcgtagaggaaatatatcatcaagccaggacgttgcggcaggccaaacagtgcagactttagattgtccttcattctacaatgaggaatgcttatctctatagtagaaatgtgtgaaactacctggtttcttttttaagtccacatcagtttatagcaagcagtttgctgtccaccctggaacctgaaactcagaatgaacctccacacatagtcactatgaatagatgcgctgtgcatacatactattgcctgacagcatctgatcggctgaggcgggtgcattgccgagaacgatctacaagtgtttgggttaatacgagctttttgcagtcaatgtgatgcaacccgcatcaagaactgtcgatctatactacaatatatcacagcccccatctatacgggccaatgctgaactaccgccggctgggctagtagcattccaaccccatagcggcccgtttccccagctgcaccacgtacctcgtatctcaaccgaagttcgaggatacgaacgatctgcaccactcaaaatagaagacgccatgcgcgagctaaatcccagtcagcgaacacatgcagccacaattaatcccaccgtaatggcgttgatctgtccggggatgcggtataggtatacgagggatctgcgcaggggaagcctaccaaaaaccagcagcacctttacacgcgtgtatagcaaagtacaatatcatacgttgcagggtatgagatgtaacgtctcggccagagttcatatctccatagagtaggcattacgtacacgctcttgtgtccttcctctcttcttttagatatacgttgccatggaaggcttctggactgggctggacaaggtataaaaccccaaacgctgcccgggctcatcccggcaccatcatcaatcctcactgtctctgactatcaaggctagcctgcaactaccagaatttttttgtgtctacagctccagaaagccacctgcacattccgctatcaacgacaatatgaagtctatccttcctgttattcttgctgttattgggtatgtcctgtttgctgaaaccgtcctacatagtaaggaaacgtagctaacaattatctcttagcttcgcggctcacggttcgtaattccgcttccccaagatttttgtcttctgctgcccttttatctaaccctaccatgaaacaggctacgccgtctcttgccagaaccaaggcggatcctgccacgatggagaccgtgactgccccgccggtactgagagcgtcttctgggacaccggctgtgcgagcgcattctggccgtgggaggaagatgacaagtgctgtgtttagaacgtccatcctcattcacgcgattgtggaaggagtagaggaacgagtctaaagatagcacgttgagtaaactgatatgatatgggggaggtgctgcccagttgttctttgtttcttgactgcaatttgggcatacttataagccaatcatattgtcaatgagccccgacatagccgtcgaattgaaggatatcttt

SEQ ID NO: 15889 - DNA, 700 bp, Emericella nidulans
cttgtcgacgaattcagatatggaagaagtttttttagatttgtacgaaaatcgcaattggggaccatggtaaagtgattgcagaaggtacgaaagaacagttaaaagcgattattacagatacgaaagatatttggattgaagtgaagtcagtagaaaatttagatgtagaaaagttaaaagagataaacggtgtgaaagctgttcaaattgaagagaacgtaatcaaggtaaactcggatgcaggattaaataatttaaatcaaattattcagcatttcattaatcatgacattgaaattcgttcgttagaggagcaggctccaaacttagaaacagtatttcttacgttaaccggaagaaacttacgagataaataaaaggttaatgaagaaaaggttaagggaggttcatcaaatgaacatcttcaatatttgaattatgcatatttaaagagattttagagacgtagaactttagtttttaatgtagcatttccattggacttatgcttgtggtaggaaccgcgttacccacgcatttaatagtgattgccatttgattaaagaatcaagggtttttaaagatgaagcgagtgcccgttttttattatttgcagatttccaaagagtggtaaataggttttttttaaaaagcttcggcgtttgatgggaagagaaggaaaaataaatttgttttt

SEQ ID NO: 15890 - DNA, 498 bp, Emericella nidulans
ttggcctgcacgcagtctaaggtttccttgctgacaggcgctgctcgctgctggtgcaaacgtggccgtatgaggggcttacctgtaacgcggggcaccacacgcagacaggatgagacatggactactcctgcctgcagcaataccctgcgggtgcctgaccataggcctctccttgagctactgttgccacttatccatcatggagcaccatgtagattacttcctagccgtaaccagcttatcatgagtgtcctgacgaagcagctgtggattctcagcctggccaagctgccgaacatcagacaccagggtagtggcaccctgtgctcaccgaggatatcacagctgagtcacaatacgcaccttgtcaaagctgactacgcggcagaacaacaactccgatcgcaggttcccgcgcggtaccgaacaggcgctcgtgagaatgcgaggcagcctggcccatctgacaatattccggccaggatcactgtactg

SEQ ID NO: 15891 - DNA, 4913 bp, Emericella nidulans
caagacaacaaaataagaggaggaaactaagaataaatagaggtaaggagtaatagaagaaaaaaaagtgagtaaaaacatagataagagtaaaagatattgagagaaagggggaggaagtgaggataaaaaagaaagaaaaataaagaaataagggaacacaatggaacccaaactctaatttaagaaaggaaccgtgaaggtgaccagcccaccacaagccaagaataagacgtttacgccaaaaaaggctcataatgcctaggacagcaagcattctaaaaaagcggacaccttacagaattcaaggagtgcgtcgtgcaagtgtggcccggtcctacgaagctttccgcacccggtcccaacggtgtcccaaatgaggaaatggctaggagcactccaggccggccattcgagtttccagacgggtataatcaagtattcggcgttgatcgctacagggttgtcgagtcgctgttcgacgccaaagccaccattctggaccctgactcccaattcccagcaccaacaccagcgcagactattcctgagctcatcaaggctgctttgaatggtgttgatgttgaccttcgtccgcatttgctagccaacgtcgttgttacaggtgcttcaagcttgctctatggatttacggaccgccttaatcaggagctcatgcagctgtaccctgggccccgagtcaggatctctgcgcccgggaacacgtccgagcgcagattcagctcctggatcggtggaagcatcctcgctagtctgggcaccttccaccaaatgtggatttcaaagaaggagtttgacgagcacggcccgatcatcgttgagaagcgctgcaaataaattttgcacatgtcttttgcgcttcgttttctttccttatgtcctcttttctttcacttcacactaaatctgcttcgtttatttttttttccccctctcttccgtttgaaacaatgattgaagcttatggtagcctgtagggaacatgtggttatatctttggcgtttttctgcgctgttatggaaggctggaaagggacatgttggactttatttgcctagaatcgaactcagactatgctcgattttgagcattagaaaatttgtacgagtaatgtcattgggattgagtgcttttgttgatgcgtatatgtcggtttccgccaatcgtggactaactacgtcttttaggtcttttgagtgggcgagtacaccgcgtcttcacacaaagcaaggcattgtataggtagttgctgattgtcagagtcacgaatccgtcgtacccagcgttgtttttctaaacgatctctggacaaaagaatagcaattaaagctgaaaacttagctatatctgggtatagaacagaaaatcatggcagagacgctgtagaattatcatgtagccttttcatcaccgtcagccactcgcagccttttggaatctccttcagatgcttcttcctgcaccggccgcttcggagccgagcttgctcgctgagatgacttgctgctggctggcttgcgtttcacaaacgcggtaaggtctgtggcattctgtgtggcgacatcgagtagagactgcttgttgctatctgattcacccataatttgtcccagaattcctttaatcatgttttcgccctggttatcaagtaccttctcgacagatactgggggacgtcggaggtcgagcagctagagatgaaaaagaatcaattagcaaaacactagcaaaaacactcgggtcacgagaccatgactgggccagaaactcactctctgctccatgtctgatatgatttccttcacattggctatttttcgttttagtgctgcccgcttgtcctcatctagagaaccatccgttttcaatttctcctgctcttgagatatcctgacccggcaactctcaatggccatttccatttgtgttactgcttcttttcgcatttcctcgtctaccttggcaggtttggtttctccttctggattatcaccatgctgtacagccccaaactctagggcgagggaaagtttataatgacattcagcaactgacgggtcctccatcgggaatagtgactgtcggagttcaagcgccatctttaggtctgtgacagcatctgaaaaattctccccttcatagtaaaatctcggcttggaggtcatatgtgtcggccaagcgctcctttatctccttgagctcggggagaggatctgtagatttgcctttaccggactcttccagagcactgagtttcttgtgatagaggacccgcgccaaatcaaggatctcgaaagcattggcaaaatcgtcgtcgtcgtcgtcgtcgttgtcgtcctcatctccttcagccgcattgtcttcattttcttcctctgaatcggtgtcaaagttctcatcgccagtaaactggaaaaaaggcttgctctgattatcctctgagctcctttcctggatctttgccactgaagagctcgaagccacggcattttttatgagattatcagcaactgggagtgactcggacgaagcgctcttgtcttttggtgctgactggggttgcgcctttcccgcaactttcgaaccaagaacatcactcttgcttaccgcgacgttgtacagagctttcccgtaggcaaacaataaactggcattttcgagcgacagctcgccgtttaacttcgcttggatttcggtagcttctgagtaaagttctgcggcagcattataatccttcatggcatcctttgcagcagcacgctttatcaaggcctccagtcgctgccgttcatcttgagcagccaaatcgggggattctgttagacttcgcgcatccatgattcacgaggtggctatgggctgcccggcaattggaaagacctatagaaaaatcgcaataacaaagacgatttttgagaactaggtgcttgagcgacaataaagaaggaaagaaaaaaaaacgaatcaagagagagtaaacaagaccagttgagggaagagatgggaagacaatggaagtgaggcaatcaaaaaaggttaaatcgctcggtcgcgatacgcgtggcgcggcaccacgcgtccctggctgccccaaagattatggtacaatgaaacatgggatgctcagcacccacctcttatggtctttatgcaataaatcgtgtgagaactcaatcatctttttaaacacacatatattctgtgagttaggcatagcattgttttccttcgcgcaaacgcccgtttcccgcaagctaatgagttctaagtgaacaacttctacggccaagtccctcgatatgaacccgtccatcatttccatgccattatgaatccagattctgtgccatcctcatcaccagggtttgggactcctgttcatcccttgcggtcaaacaaactcactcctattccgacaagaacgtctgtactgcccatcttactcccccccgccacactccgacctatcgcatttcgtacctttactaggaaacataatttgacgctatcttcttctgctctccaatctttagctggttttgtgggtaagcactgcggctcaggatggcgcgaagaaggtctcgcggagcgcgtgctcgatgaagtcgcgaagagttggaagaaggccggaggtggcgttatcatcgaggagggcagaggagcttctctgaaagctattcttgagacattggagggaaacatgagcggtggcaggttgattgattcgaaatctgcgtcaaaagaaggatctacgcgaactacaagcgctggcgggatgctcagcttacagccttccatgtcgatgatgacgacgattgatgaccaagaatcgaacaagtcagatgatacagtaatacaccctaggcattggattaaagtgattggggcatttgacactccgagactggcctacaatgcggagaaaaagaactttgaagtcacgaaaatcaaaccctctctatttccagaaccttcgcacaagaccgcgttatttagagatcgatataaccttgttcatcagcgtctgctgcgaaatgagttattccaagtgcctttagcgtctgcttctatgcctactttgcagcgatcttcatctacatttgcaagatcccagtgctacaagcttacgcctgttgcgaacctacttggaagaagtggtacatctcatttgttactcggtctactttctatatcccctacgggcgagctatctcttaccgatttgacgggaagtattgtcttagacctgagtcacgctcgtctcatccctaagggtggcgcctggcttacgccgggcatgtttgtactcgtcgatggcatttacgaggaggaggagaatgtcaggggctccacgctaggcggcaacagcgggattggaggtgcgataggaggtaagttcgttggagtgacaatttgtggtcctccttgtgaacgccgagaaacttcgcttggaatgagtatccacggtaaaaacgaggatatcagctctagtggcggctttggctgggtggacttcactggagtagggagtgagcgtgctcaaggttctcgaatgagacgaattcagacaaggtgtctgcacgaggctcacgatggtaatcagttgaatcgccgtttcaagattgtcatcatgggtgaagttaatcttgacaatatgaagacgatggacgctctgaggaaagtctttagtctatacaacgattcggctgtgcaggagcgtcctttgttgttcgtcttggttgggaattttgttcagaaagcaataattaatggcggtggtcagggcgggagcatcgagtacaaggaatgtttcgacatgcttgcattggtgttgtccgatttcccttcgttgctacagcggtatacgttcatctttgtcactggagacaat

SEQ ID NO: 15892 - DNA, 2557 bp, Emericella nidulans
catgtacaccatttgtgttgtgacgagccacttgtacatgcgcaccagggtttctggggtctttaaaagcgcgacaaggtgccggccagatccgtagcggaggatctgcgagcagagggccattgttgcccagctgactactatcgccgcattaccattagcaagaagatgcagcatgagatgaggtcccgagaatatggttcaggcgtacctgcgcaagcacgataaaaaggtcatcccagcccagcccgcgaaccaggactcgtcgtgcataaagccgaacgataacgactaccgctgacagggccgtgacgaccacgattccgatcagggcgggctggctgcggtcttctgccaggtaggcagcagagggctctgaagccatggcatgagttgggacgaacttgaaagacttgtcggttcattaaagagatgctcggcataaggtaataagtttcaccgccagaataataatagcagttgaggatccgccaaatggcggcccaacaatctggaggcaagcagtgacctgtcaaacaatgcttgccgtgttctcttgtggatagcgcggctagccaatgcaggttgaccattgccatgccctcccgagttagtagcgccgggcaagataccaacctcgggctttacaatggtctacggagtacgtcagttgtgtatggagtatcggctctagcttgcaaagcgcactggcagcgggcagtgccgcaaaggtacgttagactaatgaatttgaggccgacagagataaaggatatagggttccccaactggctagtagttccgcggaaccttaccggactcagcgtctgcttttgtgggtaagcaatctcattccttgctgacgaatgtctctgcagtttccgctcacgcggaagaatgggtggggtagggagcagtgaagtccacgagcttgctaggattggagacagaaaggggtaccgggggcatctatcttctaaaaatgcatgccgcttcaggaaagtggcctatcaaagatccttgtcctaagtccgcagaagttaggaatggcgcccgttccaggcgcggtcttggccaatactatccacggtttagtcgtttttagcgggcgtcgagtaactgctgtttcttcttatccagagcgctgttaagctgagcaggatcaatgggcaaaggcttggctggaagctgagatctagtaagaagaatgcaatgaatgatatccaattgacggtaacatgttgtcgtgctatctgatatctcttaacctaaaaatatatggatttcatcccatccagtagctactaagtggctactagcttggcccctttcggggaagctagggctaacgccgtttcctgtcaccgcgcgggcccccactcagcgtgcacaagtctggcccgattaagaggcggcccgtttcaatttgatacatccaagagctagcatgcacggttctgcaatccggctggctttacaccggctactggttggaggcagcttgcagaaagtacgcaggatggaccggcgctccacgcgggaagggccgctgtcatattgtgtccgtggtggctggagcgagatatgtctctcctcgttatctaccccgttgactcgtcacttaatgtgtctgttacactgttcttcaaacagactctagagcagaacagactgaaagtcccgactcgtcacgatgagttctccatggaaagtgatggatcccaatctggctgatatgcatcagatcgcctcatttttgggtctacaccgcgttgcactgtttctgattgctgctgtcatcgtgcgtgtgctctaccgccggtactggtcgcctattcgagacgtccctgggcccttttgggcttcgttttcgagtctttggagagtgtatcacgtcgtcaaagggcatacggaacagcaaatcctcaagctacacaaggaacatggtattgcccatccattattgttgcgatggaggctagaagagaagataacgtctggcacaataggcgactttgtccgcatcgccgagaatgaaatcagtgttgcccaccccgacgctgtcaagcagctcctccacgccaacctggccaaggtaagtacagcagcgtgacggaaaaactcccattgcaatctaaaagcgacagtctgatacgccaggatcaacagggcacgttctactccgtcttctctctccccgattaccgctatgtcaatcatatgtccgagttggacccggcccgacatatccagaaaacacgcaatctctccgccggcttctccttgtcaaacatcacagagacagaaccatacatcgacagatgcctgaaggttcttagtagacagctagatgggcttgcagcctctgacgccccagtgcacttccaagactggttcagtttcttcgcgttcgatgtcctcggcgaggtaaccttcagcaagtcctttggattcctccaagaagggctagatatccgcaatgcgattgcgaataccggttctcttgtttactatatctctatcatggggaactatgtcaggattcataacctgacct

SEQ ID NO: 15893 - DNA, 880 bp, Emericella nidulans
ccacgctcagaagcttgtcgacgaattcagattcgattatctcttttggaagtcaacagggccattgctggtggtgcgtatgaatgtaatccactataagacatcatttccttccaagaaacggatttcccattatgaatgattccttcagcgctaggatagatgagctcatatggcctttttctcacagacttttcccatcctaaaggcatttggacaaaagggtgtagttctttagctgcagactttaaaggtgccttggcagttgcctcaataatcggcgaacttgtccatctcgccaaatgtaatcccaccaaaattttcaccttccttcttagacctacgaaaaagcaccggtatcccccccaaacgatcttttttctcactccaccggcttccaccacttcaaacatcgccctctccacataaacatacccttctcccactattaaaagttaagaacttaacacaaaattggaaagcttctcactaaaaacaggaaaaaaggggtcgccctatcggccatttctgtacttcgccctaacaaaaatgggcggtccccattattcaaaagagagcggcggtcaataaacaatctggggggggcggacaactcgccaaaattgcaccaactcgatactcccttataaaaaaagaaacaataccctctatgctccttctcctcctcaccccacgaaagcagccacgattctcttgcacagagcacgccctactcgcacacaaattctctgccctcattcgcgatcatttctgaatatatgtacgcaacgacatacgcctcttccaaacctctctaatctgcatcagggaactccggccctctttagcgttctatctggcgcctctatatccccctcct

SEQ ID NO: 15894 - DNA, 5717 bp, Emericella nidulans
gagattggcacggaactgataacccgagacagccgcgacatccaggacaaccgtaaatgctgacataaaagggtctccgtctcagtcttgttgacaacaatagaattggagagtccagtccaaaaagcatgaacttgcggtgtcactccagcgccggcgtgggtacttccacacgtggcggtatctgatttagaaacgccctagtcggcgttcgagggtagttagacactgacgatcgtacagggtacagatacgtggaggtacattgaccgaacgtttcttggacgggttgagattgatttcgtgcaccgcaatgtacactattgggccgaagtcgagcaacgcttccggagtctgtttggttctcgttcgagaacacgatatcgcctcccgcttagtcgacggcttaagagcctctttattgaccagggctcgcgattgtcggcgtgcttttctgtcccattggggtaatgtctttgattatgagagtcaacataaatatcggcttggtccgcctcggatcgcagggctatcagcgagtctgcacccatcgtctagaatgaaattcaagcaagtaaggagttagcctggggcctggatcgctagtggcttgagagatgccagggttctaattccgagcccgaggcgtttattttctgattcaacacgggcggaagttggaggtcaggacaaagaattccggcagtagtcgacagactcgatacggaggttggtggagagaatgagggccagggccgagaccgagcggggtttttcgatatggatggcttgcgtgtattgctactccgtcggacccaggatgaggcaagattctaacgagacttggtagcggctccgtgagatccggccctggagtaacctctagtcggttggtatcgcgatgttggtatagcataaaattaccccaggaaatcgagtgagatccgagttcatccgcatcctcaatatggaggactgtcaactaacaacatcacgtgtaatcgaactcatgaagctttgtaaggacttttagacttgatgacaagcgagaaaagtcaaaattaaacagatagaaacatagcctaagcattctagaattcacggcgacacctatctgataaagccgttgggtctatcttacagatacaccgctggatggttaagctgagacaagtctaaccttccacctctgggcctgaacgagcccgacttcccccgccaaaatctgatttgaagccggaattcgccgcatgctaaaagtcttattagttgatagacttcaataatgtaagtcaatgggccaggcccggtgatcattcgggttgccactcagcaagcccaacgggagcatttctgtaactggcgcgtgacaacattttgatcctaaggtccccaagaataagcgccacggtcattgggctgaagaggcttgcacgagatctttatccaaagtcgtataggtccgaagactcagtggtttatgttcgtcggtcagactccatttgactccgtttcttcctggtagaagaagcccgtgcatgcagggaggttaatagtacacttttcttttatggatttcgacataccaagattcttgtctgctccctgactaaaggaaaccaggcccgtacccgcgggtgattcgtctgttgggcctgtactaataccttcgcctccatgcccttataatgcccaatcctccccgcttggtcgttaagcgtatacactgctcttctgctccgtacggttgacatcaccgtaaagcatcccatcgatcatcatatatacatacatacatatatattgcataaaccgaccacggttaaaaatggcagccctctggatcttcgtcgcatttggctacctcctcctctatgcatttgcttcaatgcaggcgcaactactagatgctcagactatgcttctcaagcaacttgcgaattgacatttgggaattgataccggaacgaatgagacgagaaacgccaaggaaaacaatgaatatgatgatgttctcggattaggaatccgcgaagccggtaaccctcggaaagctgtcttgtgatcggtggccagctgtgtcgctattctctgaagaccgaatgttttccggttatgttcggcctcgagagctggatctcatcacgaatgaaagtaatcatgcaaagggttctacgatgtttacgattaacgactgcaagcggttgcttggatacgactggcctgaataagacaaaatatttgcgaatagatctggtgcgatgagcagacatatacggcatgtaaatgagaatggttcagtcacgagctcattacgatgtcctgcagctttggatgatctctagggttatgcgatttttgattttcataaattgttccctatatggtttgtccaggcgggatatgttctcaatgtataatttgtagctcatacattgtggaatgctgacgctcgccattcaccaagaagcctcgtacggcggttgttggtggcttcgaagtgcggggacaggccatatgtgcccgagaaagtctcagctgatacagtgcaggacgaccttcggcagagcgtgacgatgctgagctactttacatgtcgactgagaacattcgacaggaagtaggcgagctgctttgggccggtccgtgcgaaaagcctgagatgggataggatacactgtagcccggaatatcggtaggttgtataccatctaatcagcgcccgcaacagcctatactatcgatatgtgcatccagggacttagaaccatatcttgatcaattcttcactgacagcgcttggtgttaggacgccgctgtccgtgatcaatgcagaaattaaatggggtggtgtgaaatccacagatccggcatcgaattctgtgttcagaccagaggatttcgacgcgtctgcaggctctcgttgttgcttagcgttgtcaacttcttcttgcgtcttgaagtcgataacgtgctgttcgatgggcaggtcatattgcccaagcgggtaaacacggacgaacttgtggctctccgccacaacgtagaatggcttccccatggcttttgcaaggagtccaatttggtaagtgcccattcgcgatactatgccgccattttccacaacaccctccgcaccaacaataaccacatctgccttgccgagtgaatatgccacagcagactccgggatcgtagcaacagggacgccctttgcccgaagcgcacgtaccgtctccattccctctggctcagccgtggggttcttaatgtctccctttggcgaccaaaggccgtatatcacgttgaatcgcactgcagaagggccccccttttcatctgcggcttgctgtaacagcgaggcgacgactctagaccctccgtttgtcaatacggtgcttccatcgcggacaaagcccctcccaaaaccagcaatcttatctcggctctccttggcacgtcgaatgaacaaccgactgttggaaaggaggtgtgctcgaatcgcattgaaatctcctgcaggccccagctggcctggcctttgaagagttgtgattaagtagcgttggaaaagatcggttccggcggaaagaccgatggggttagggatggacttcttcaaatgtgtggtagacttctctaggaggtcaagtgtttctgatatcgtcgatgaaggagaatgtgtgaggaggagaactaaggcttcgatagcagcgattggcatcgtcaggtcgggatcagaccgaagcaagtcattgtatgtagcgacaatactaacaacatcagcatcagagggcagagtatgaaccaaagcacttactcgaagggctcggagggtttggttatctgggagtctgtcgctgtcattgtgcttaacgggagcttattagcttaaccgatcaagatagtctttttccggctcggttagaatcgacactgtcttgtggaagatactgtaacttgaggcttggaagagtcatcaaaaaagggcatcgcggagaatttgcaatgtttgcaacgcagcccctccagaaagttgctagtccgctttggtcagttgccgtgcaagcatcacctgtgtaaacaaacctgcagtttcttcgcagcgtaaccactttccctttatcccctcttctcgtattggggctaagaatcgatacggggaactacatgacacgatggcttacaatcatcgcataagccaacaattccatagctcccagcagcatggccggggtagtcgcaagaaggaagatgagaatgacgccctgatgcgcctggtacgtacataagattccatcatggcttccctcggctctatggactaaccgataaatagcccgacaaagagatcgcaggctgtatcaatgacatcggcataccattcactgccgccgacctaatcaagcccaaccctcagcaggttcaaatggtgctggagtggtttgcggagctcctcatgaataccactcgagaaaccgttgagcctgcaatgcgcgcagccgctgacgatatatgcggggactttccggatattgtccctacagatacgcgaaacctgatgggattctttgtcaatatgagaagactaatggcggaggtatgcgtgcttattatccatgcgacgcgagtatcaacaacgaacaatatgctaaaggctgtttttacagtgcggtgtgaatgactttacgtttaccgacctgacgaaacctacgcacgatcgccttgtaaagatattttcttacctcattaactttgttagatttcgcgagtctcaaacagctgttattgacgaacatttcaacaaaactgaaaagacgaagcaacgaattgaaacactgtacaccgagaatcaggagatggagcaacgacttgaggaaatgcgccgggtcctcaaagcaaacgaggctgaggttaaggaaaaagtgaggaggaatgatgaactcaagtctcgccttcgagagttaggtcgaactcaggagaaagtggcggagactctggaacgagtcaaagccgaaaaggcgcgacaacagaacctactgaaggaaaagatggagagaacagtaagaactcgtcaagaggttgagaagttgcggccatacgtgatggaaagtccggcaagcctccagtcaagcctcacagaattgtcggaaagtcttctacgggagaagaaccagatcgatgccatggaaaaacgcgcccgagcgttgcaaacctcctcggacacgttcactgttgtcagcaacgatgtccaagcatgcatcaaattgctcgaggatatcgctgttgagctgcaaaaagaagaggacgaagagtctcgagcttcgagaaacaaggaggccatctctgagagaggtaacaatgtaagggaagtcgaacaaacagagaagttactgcagcggcagttagcccggtggaacgagagaatcgaagctctacgtaacaccgctcatgagaaggcgcaagtggctcaaaagcggatggaagagcttcgtgaggtgcagataaaactccgagaagagcgaacagaaaagcaacgcgacatggagcgaaggagaatcaggattgagcaaactgagaaaaaggtaataccagtgtgttcttgttgggtttccattcaatagtaacttattggtgcacaaatagccgacttgaaagagagcatcgaaaccgaaatacagagcgcgcacgacgaataccacaagctagaggccgat

SEQ ID NO: 15895 - DNA, 541 bp, Emericella nidulans
  unsure (1)..(541): unsure at all n locations
agaatgttaatacgccntgccgtattttaccaccacttttaggcttaacaccgagcctgtacgcctttttctcacatctggttgaactcccctggctgaagtactcctcatactgattaaggactcttggaaaggaatacactcctgctgccgaggctggtgcatacatagatatcgactcatataatcgcagccctttgcgcgagccactgaacccactcgagactgttaatgatacatgaaacctctactacaaccagcggacacctagcgaggagatccaatctgcatatctgatggaacgcacatgcgctttgcttgacacctgcactattgagtctcgcacaacggcgcacattgttggaacatgcagtatgatacatgtttctaatagcgtgattctagcctaaagaagcattgatccgttcttgcatcgtgatggcccacccatgcgccatccaatagtatgtctattatatacatgctattcaccgaggtatgtctttgtgaggatatagttataaccgtcctactagcacca

SEQ ID NO: 15896 - DNA, 3576 bp, Emericella nidulans
ctatgttatacacacatacgatttaggtgacatctatagaatactaggatcatcgttagctgtggctggctgcaccaatggcttgctgatactcgcagtcgacgagacatcccagctggaaagccgccgggccttgtggagctatagcgaacggaccaggagacgtgggaaccatgtgctgtccgtctccaaatagaatttagctgcgccagaccaacagactaggagcagcggcctgggcacctggatagtgggacgaacctaagcagctgtggctagtgagtggatggtgcatttgaatggacaccgatattatgaatcaatgaaaatgccacacggctcgggttgatgtcactggagaaccaccaagaagcatggttctgctgcagggggagtccaaaaagaatcatattatttcgtagaaatgcagtaacgcatgcgataggccaaattttgagaaatgtccagggcttattcgctgtgacggcgtggctagatctcggaatagttcacaacaagagcttaaactgaggctagacgataggccagctggggtcgtcggttgtttcgtatcgttcgccacaggctgtcaagaagtggaaagcataaccagcagatggatcgaaacgacggtcaagtattggtcggtcgggccaaagcagttctggaagggtagtcgaagcgaacgcacgaacggggagcaagcccacaggcggagctcagccacagtcaacagagtcaatgccagctgaacagggaccagatgcagccttaggctcgcttctctgattgatcccttggttcataagcccactctcgtctcgtcttgatacttagtcgatgcgttatccggtggcgacttttacaaatcgtcagcatgccgacatagtccggagtccgttgtgctatcgtgagaccggtgagactgagacctgagacctgagagacctggaaccgcattactgagttggctgcgccccgtccaagttaacagctcggcttcaggtccgttcgacttgcagatgccctgggcctgtagaatcgtatatccagtctttccaaatcaatcctcaatatcaatccttattgacaggatgtcctgccctttgaactcctattgccaccagcttcaacagtgattccggctacgagaagaaaaagtaagagagatttacgtatcgaatgagcccgagttcagaacgcgatcaatgtatcgtcttgacagtcgtttacgtctaccgctaataccgagccggctcgcggcttagtccttctcggcgatggcttgcagccgttcgtcaatctcctcctccgtcagtgcccggaaatgaggatctgtgccttcttttccgtctgttcgaggaccgccggcgatgccaatttccaattcgtgcttcttaaaatccacgctcagcacactgctcagtgccgtaatccccagctcgactacctcctcccagctgccctctgcataatccttgttcttcagcttcttctccaggtgattgagcgcctcctgctgcttcgggcccgaggcagtggccttgtatccagcgtagtatccggcggggtcacatttgtacagttgtggccctttctctgagtccacagagcacagggtgatcgcaactccgagtgggcgcatgtatgcctatatgctattaggttttgcctgtaacttggactaacaacgcactctctgtgtgtaaacctggttgatattggccaaacgtttggcaagaacatcgcatggcatctcgtaaccgtatttgtatcgaaactcagcagcctcaccacgagcacggtcgacggaagctctggcatcggcgattgacccggtcatcacacatccaactgaaggagagagcctgaaaatatgcgtgacggacgaggggtcgatcaatttatcctagacttcgttcagaacggcctatatcggagtgacttgggcgacatacggcaactttcttctgcgacaacacaacggcacagtcctttcccctcacgcctatcgaggtaatgttcgcggcagtgatagctttgaatgcatactctagtttgggaacacctgttagcgggatcaagatgggctggaagtcatgcttgagagcagatcgggataatgaaggcgctgtctaggtcctgaatgcgtaccgacttggtaaagacgaccctggtccgagaagatggtgatgtgcctatcgtaacctgcgcttcctgttcagcgtcagccgcggatgaagtcatggtggtctgcccaagaagctttgggaatataccagacatgactgtggtattctgaacagtacttaacgaaaatgattagaggtatggagaaagaagagagcgaggtttagatcggatgcagggagaagcttgagattggaaaacggctgtagctgaggacgcgtgctaaaggatgcctggcagaagctcaagcttctggcctcacaagctctcgtcaccgccttccctcacctttttgcatcaacgctcagcatcaattagatcaagtacttctcggtttagatatatgcttcaagtgatatatactatcgtctatctcaagcaactagaaaaaaaatatgctccgaagttgtcatgctgaaacgccataatgccatcaggatattagaacttttgacactccaagaatccaaacgagtagctatctatcagtgaatatgttggttgatacatgaaaaacagagcgggttggtaccgtcatggcagaaacgaaggcgaaagctaagagtcgctgtcgccacttgagctctcgctgctgctagaaaactctatgacagcagtccgggtcttcttcttcttcctcttaacgggttgtttcttcacagattctggtttcttggagctcttcttttcgtcatcgctgtcgctgtcgctgctgctcgagatttcgataacggcggttctgttcttcttcttttttatcacctgctggttctgagcgtcatttttgcccttctggggtggtgctttcagattcgacatggtgaagacctttccctcaacagcaaaatagacagtttcagcacgtcgcctctttcggaacctctgcagcatttcctcactcaatctctcaaaggcttcgccgaggtcgtccgttgattcacctgcagtgagtttcgtccggaaagcgtatacggcttttttatagctctgcataggtgacggctcctggtcgtcaactgatctctcagaaaggtccacatagacttcttttaactcctcaacatccgctttgatagcagcttgagacaaatcccgtaatcgctgctaggcaggctggccctcagccctttagtatgaaaggatgcggcatcattgtagcagggcctgcttctcgaatgatttgccgcaggctaaatctccggttttcggacctccagaggaccgtcgtggtgaccgctaagaggcagccaggccctccccaatttgcttgtcccctagggcctccccttcatccgcccttccttggtccctccttctttttctttatccttttctttttcctttttctcttttttggggtcccatttgaaacgtttgtctaccccc

SEQ ID NO: 15897 - DNA, 762 bp, Emericella nidulans
  unsure (1)..(762): unsure at all n locations
aacctctttnctttgatacgcgttaggatttttgtaagtcttgccttcttcgttggcatcttcggccataccttttgttttgccctgttgctgataagctccctgtctacaaaggtcctcgactgcccgggtacggcctaggtaccatcttctcggcacttttacgtttcaaccatttcattggaaatctatctccgtttgcgttctatcatacgccatcaacatgagagttcttccagctacactgctggttggtgcggccactgccgctacaccagcccagcaggtgctcggcggtctccaggacttcgggaatgccgtacaagacgctatgcatgagaatttgccgaagataaacaagccgcttgaagctttccaggagcagctcaagtccctttatgaggctcgtgaattctgggaggaggttgccaatgctttcccccaaaaccttgaccacaaccctgtcttttctctgccgaaaaagcacacacgccgtactgactcgcactgggaccatattgaccgtggtgctgatgtccanagtgtctcggtgacaggagagaatggtgagaatgatagggagattgagggtaagctagaggcctatgatcttagcatcaagaagacagacccctcttcctgggtatcgacccgatgacagcaatacacgcgtatctgatgacatgaaatgataaacattgttactgaaagtgtattatgcgtgttggagagatttctactagctgaggtcttggaacaacg

SEQ ID NO: 15898 - DNA, 943 bp, Emericella nidulans
  unsure (1)..(943): unsure at all n locations
gagatacttctgcctgagtatgcgactatgatagcactacaagtatcagcaaccagtgcaacggatagacagggtcatggaagagaactacgcaaggctagggtccagaacaacatgtctcgcaacaacggaccaaatgtactggtacctacaggcagtggctggggcgcggggctccataaagacaactaacgcaacagaggcgggggcacataaaaacggaaggggactacagacacacaaaaccacaaaggaaagcgatgacacaagccagacaaaggagatagcgaagagagatgatggcctctacatggaccaggttccaccaccgacgatcaaaaactcgaacgctagccaacaaaaagagcaaccgggggcatgtccagagcggcgaaacagcggcagtagagaaatcagcatatgtggaggttaaaaggactacacccagaccgacgaccgtgaagatatcagggccgtcaaaagaggagacagcacgagtgttgactccagcactataattaggcggacatatgagccgacagccagattgaaagcacactacagacaacatgcacgggatcaaataaggagatcatattctaacaaacagcctgtgaccggaatggcccctgccgtggatgggcgggtccgaaaatagctagggccgggggcgtgagaatccaagctgcccacgcgaagtattccttgccttgcgacggttgtatctataagaactggcaaattggcggcgaatccaaaaattttgagggtagccttaccgggggacaatgggttgaaaaccgggccacaggctttagaactctgaaaagttggatgaagattacctggtggagggaggggcctctctaaaaatataccaacggtgctataatcacaatattccattcaatatctcctnttctccatttccatcatttaacaa

SEQ ID NO: 15899 - DNA, 482 bp, Emericella nidulans
ggctctgggtgttggggctaccccccggggccgacagtctggcgctgcttgccatggaattcccagctcgtttttataccttatgacgggctgaacagatgccggaatctgaagggaatctgtggcctcctaagggaacacctagctgggtacgccatctccactcttgggacgcagcaacggcgactccatgacgctgagcaagcggaggatgccagtgatgacgcagcagatggattgtcctactcggggagatagggcggagtatgggccactagctcacccttgttctcggtgggctgatctacaggggattccgtgaccacttgtgcaagctggtcaaggatactagtgctgttgccgagaaacttgtcggctatatctgcctcgatcacagccactctgtcgttgaccgcaccaaggaatgtgcgaactctagtgatggcccggcgaccacggatgttggcagacggtggggcttc

SEQ ID NO: 15900 - DNA, 666 bp, Emericella nidulans
tcggtgcgggagatcatgcgggcgagtttctggcggattacaggctgctcgatcaggcgcttcccgaagacgatacgctgtttgcaccatttcaggcactcctcaacaactgtcatggagaaacgcacaaccgcgcagaccatcatgtaacgctcgtggttgaagttcgacatcacgacaataaaacccttgtgctcttcaccaagaaggtggtcaacggggactttgacgttgttgaactcgacgaaggcggttgcggcggttgtagagtatgaggtctagatctggggtggtcctactgtagatttctcgttggataacggatgtcggaaaaatttatcttgcgtttattttatgcatatggcaattattgatggttttagttgtgctattagttattttgtatctgtattcttacattatgtttaattagggatgactatcaatgaattctctgggtctattatcataatatgatcgcttgacattcaattaaataaccttcttttttgatttattggtctctatatagtatatttaccacataatgggccttcattttgtggatcgttaataactattgtcatacttgttagacttatatggtatataatattgttaaactgattgaaccttacattgctttgctaaatcagcatgtatttt

SEQ ID NO: 15901 - DNA, 746 bp, Emericella nidulans
cttgtcgtcgaattaatatagcataaggagttagtctaccaagaaaagaccgctacggaggggggggaagaaacatacatccgtatcgcggttgttgaaaataacgtacaagcttttcttacattagatgaataacatgcacgctcttaatcgaaagaattagatagcaacaccggcgctgacgataatggtttattaatcagtctgccattaggggtaaacgataacattgcgactaacgggtttcggacaacttgtgcgagcataaagatatgcatacttcaatccaatttatgcagactacaagttgggcattagcttaaatttttataccccatttcagtcagggaattaaacattggtcccagttgtcaatgggttcttcaaatgaaaacccaagggttttacgcttcgaaaaaaaccaaagaatctggatttcccctttcggaggaaccaagtggaaggttttttcacagcctgttgcgctctgtggaaggcctattctacttgggtattaccacgggggggtttattctaaatccagtttaaatgggggggtttaggttaaaaccaccttttggccgccgttttggttcaaaaataattatgggctcttccttgaccaattgcccagttccctttcgtggaaaatgctatcttttacagttttaaggtagcccttggatcaactcttaaatcttgaggcgtaattttatttgttactgggatctaacttttacttttta

SEQ ID NO: 15902 - DNA, 3524 bp, Emericella nidulans
ccggattatgtagcggagggcttgtctatagcaaccagattattttttttcttccatggtataaagatgaacagtctaggaggtaaggatattgaaaagatgcaagtcaaggatgccgtaccgttcaggctcatattgttcgaaaaccttacgcttagtgtgatcacggataacacggatgttgatgaagcctccaatgtcgagcttcttggcgcggaactgtgacatgttgggcggtttggcgataatgttgagattgttcgttttgaatttgctatcgtacggtgactttggagaagcgcgagacccgattccccgaagtcacgggattatatacccaaaccgggcctagcgcaatatccacgactattccgtataccaagcaaattttatgtccaaccagtctcgaagtagatggtcttcgtcaactgaagcatgcattaagactgtgcttgacgggcactcgaaatatctataaggctggatttgggataaacaggggattgttgcggcaagtgcattgtcccaaattatgcacgagtttgatttgatatacaggcagtccttaaggttgcattacgtgatcatgagagagactgtcgcacatgtatcctcgagatacaccgcccaactaggcgaaacaccttggtagcctggaaagcggcatctgattatgggtacctttggcaagtctacaacggcgcgggatatcagtaagaaaagaagggtacaccgcgtataaagacctgccacacgaggtttatggacagcggatggaatggtagtagaacttgtcaattcattatattgcatgacaagtagagtctatgtctgtacagggaactgctcgcaacatcacggcaatggtgatataacgaagtcgatcaactggccatcacattggcattccaatcaaactccagtatcggaaatctagtgcttagcggcctggcgattggggttgcgagggtcgttcttgtactcggcggctggaaagcgcggatgttagcaatggttcgccagcaaaactcgccgttaagaaaaaaataaaaatccaagatctcgacaggtgcatatattagaaagtaagcgactcacagttggccatggcattggaggccgagttgatgccgtagaggatgaccagacctagccgcggagttagcacccgagtaactgcagtcctttcccgccatctttatcaaagatagttcgccccgcaaaagacatcgtccacctgtttgatgcaatcgaggatattatagtacgtaccggcagcgaagaagggcccgaggggcttggctgtgtgaagggttagtcaagctcatgtatccgcagactgcgcaacgtccggaaagaaacgggacataccgatgggcgtaggaaacttcttagggaggagagaggccattgtagcggtatgtacagcgagttgtgatgctgttgtgaagagctgatgcggttgatgaaccgggaaagggtgcgacaagcaagaacggaagcaacgaggtttgtccggagacccgaggactagccccttttggtagtgagcccacgccgcttttacatattgccgataacgtcgggacttcccctcatgtaaacaatcagagttgcggaacaaaaatcagcatattcttttcttcgcttcgttttgctacgactgacgtcactccagaaagttctcgctgagaagatggcaatgtcactcgcaaactcagtcagttccctccactcctcactcggtctagtcgacgattccatcgctatcctcgactctggcgtcagcgacttcccacgcatttccaaagtcctgcaaacaacaagggtaagaatataccgcagtcacgaataagagcttccatgctgacgtttgttaataagcacttcgagcttctccccgaaccaaccatccgtgaagcccaaaaggccctcttagacgaaatcaccccaagcatcgcacacttgctctccctcgcctcaaaccacgttgaaaagctttctcgtcgcgaacaaggtctccgtgcgaaatgtgaactgcaggagggaagacttaactccgagagccgcaaaacctcgacacgcggacagagacatacagccagtggagaggctggttccgcagcgaaagcgctcgagttgagaagattggttcagaagaaagagcggcttaagtatgccgttgaacgtctggagctgcaaagtacgcagagagaacggcagttgaggaagagtatggctttttattaattgaatcgatgcgattcatgcaagttgagaaaactggcatgattctctcacaactctgcacagccctggaaacctaaatgggtaaggtctgaaaggtgaagtctagccgacctttctaatcctaccgctacttagagtggccaatatttggtgaactcggctcgtctgctctcatttgcagatattgccatgtcaagactttggatctgacagcagctgagcatatttgaccagctgccgatctcgaagagcaaagtggaccgcaaaggacatcattctatgggtattacttgcttatccaagttataccggtacttccgtaaagtcgtagccgtggcgggtttgtcccggcagacaatcatgcgcggaggaaataaaatcaggcttgtcaaagcggctaccatgacaaggagttgatgtgctgtagcaattagcgctcactcgcatatagtaacttccatgacacagttatggagatttcatgcctattatacagttttttgccttgcgcctattttacaatgtaacacaaaaccgtgctgtacagctcgaatagatagatagcgccaacgacgcccacaattcccactccgtcaaacccagagtttcccaaagatgcatatcatgatccggcactaaagactctcccgagcgatcttcctactcgcgtgcctcagcctcttattttccgcatgtttcttccaactagggatcttcttctcccctttctcccgcatcagattagctatatcgagatgtgaatgtgagggacgaccctcaacatactcatccaaatcgtccaagtttccttctccttcctggaaatcactcctttcggcggcacgtctcgccaaccgctccttcttcccttcgcccctcttatcgccgagtttcaagttcctgggaatcctagtctttgctccgagagcccaaaggtctccccacctggctttgcgagcatccttaaaggctcggcgactgaatgaccggggaacggtccagcgttcgattttcccggccggcgtgcacatgtcgaagatgacgtgacctcgtcgtttcatgggtgggtagaggactcgcggaagggagagggcatggaattttgtctcaggggcaggggagagaggctcaggtgtttcgacttcggtgcgcgccacctcttcagcttcagctacttcgcctgcttcgtttaggtgttcgtaaccctcgaatgcggcgtctgtggctggggaagcctgcacaatatgctctgtctggcgaagatcaacgccacg

SEQ ID NO: 15903 - DNA, 4625 bp, Emericella nidulans
gttactgttcaactggacggcaggatcattggatactgctcacccaagcaagcccgcgtcattgccagcactctccgacactggaaggtctctggcacaaacaacgttcctttaggactggaaattggctacgttcctaactccaacggcggtcagtaccctggtatctacatgttctcccaagctgcccggatgtaccgacccgtcaagtacctacccctcgacatgctcgactacgtcggtccctttgaacagccctttatggagattgcctgcttgccttcggacctggtcaaaggcctgtcaacccatatcgaattcacccctacaaacatcctctccatcgtcgccaacatgactcccttctccgactataaccaatccccccgcaacatgtaccagtgccaaatgagcaagcagactatgggaacgccaggtacagcaatcgactaccgaacagataacaagctttaccgactacaaaccggtcaaacgcctatcgtgcgaccaccgctctacaacgcttacggacttgacaatttccccaacggcacgaacgccgtcgtagccatcatctcatacactggttacgacatggacgacgccatgatcattaacaagtcctcgcacgagcgcggcttcggatacggaacagtctacaagacaaaggtccactccctcgacgaaaaggactcaagacgcacaaagtccaaacaagccgtccagaaacttttcggcttcgccccgggcagtgaaatccgcgctgaatggcgcgctacccttgacgaagacgggttcccccacatcggtgccgaaatcaaggaaggatccatcgtagccgcgtatcacaccgtccgatacgacgcgacgtccgactcctatataaacgttgacggcatcacgcactttgtcaaatacaaggacagtgaaagggcatacatcgacagcatccgcattatgggctcagaaaccggtaccgagcccgcgcaggctatcagcgtcaagtaccgtattcctcgaaaaccaatcattggtgataagttctcttctcgtcacggtcagaagggtgtctgctcgcagctctggcctgctgtcgacatgcccttctccgagagcggcatccagcctgatctcattattaaccctcacgctttcccttctcgtaagtctctgttccaaacatgttttctccttcccccctcttgtagaagtatctaataagaaaaggaatgacgattgcccaaatgatcgagtcgatggccggaaaagctggtgctctgcacggccacccacaagactgcacccccttccaattctctgaagaatatacagcgacagactacttcggcgaacagctgcggcgcgcgggttacaactactacggcaatgagccgctgtactcaggtattaccggcaaagagttcgccgccgatatcttcatcggcgtcgtgcactaccagcgtctgcgtcacatggtgaacgacaagttccaagtccgtaccaccggccctgtcaacaatctcactggtcaacccgtcaagggccgtgcgaagggaggtggtatccgtgtcggagagatggagcgcgattctctgattgcgcacggagcagcgtacatcttacaggatcggttgatgaactgttctgattcccagcgggcgtggatctgccgcgattgtggtagctttttgagtacacaggttgctgtttcctccgctgggtcaagtaaggcgcggatggcggcgaagaattcgtcgggttctgctgcgttaggtggaaatgcagggattgtaaggtgtaggaggtgcgcgagggaggcagtttttgatgattcgcgcgctgtagtttgggaggatggagaggggaggaggttcgttgggggtgacaatgtgactgttgttgcagtgccgggtgtgctgaggtatctggatgtggagcttgcggcgatggggattcggatgaaattccgggtcgataactgatcttctaccattcagatcacttgtcctgcgtgtggagcgggaaggatcacaaaagcatgttgatgttatacatagacggggagcgatttgcttgtcttggtatgctagcaatgcttggtcaagtttatgatatcttttgtatttaatcatcccttcagggtttgtttatattgtggcaatggcattatctctctcttgtcattacatcaaagttagcatgccagtggagcgtagaagcctctgttgtccctgcattatcctatagtgcaagggagatgcaaatgtgtgttggattcatggcgtgcctagaaaaagaaaatgacatcggataatacctatttactgaacacctctacaacgccgacgtaacattcgagaactcgcctttctccaacttcgtcttccagaatatggggttcatatcgtcgaagccgtgatggacccatccctcctccttaacgtgataaagattgatgaaaccaccagagtaagcgtcacggtgcatggcagcgagaatacttctccgtccgagctcgagagcctcctcctccgtcaggtcgtaccggtagttggcgtcgagcacaccgtaggcgaaggtttgaccggaaccaacacagaacagatttccggggaggcgggtgccgtcggagtcaatgtagtacagcgcaggtccttcttgcggtgttacctatcgcagaaagtcagctggggcttcaaaacagggtcactctccgcgggtccgcatacgcctgccaacatcgttcccatgctcagaccgtaccccttataggcgtacgtaagattagccagaatcttcgaagcggcagccactgtgatacggcgtttgtgacgaatctctgtaccaagttagcatcactcaaagactgcagaaacgacgcaacacaccatgtagtgtgcattgttgactcagatatctaagccaatattgacagtcctagacataaacttcagcacaatcatgactgtaggcacgataaagatagacacgtactgctgcaccaccagccatggtccccagaagaccaggaacaggcgcactgcctggcttatcctctccacggctcaaccgggagaccggaatgaccttcttcaccgtctgactggcaatccagtttccagccgtagctcgggaatctgtgcagacaatctgtttcgaatatcagcggggccggatatatgagcgtttgacagggatgttgcgacgtacaattccaccctgaaatcggaaggcgagtgttgttgttccgtgggcaagtttgatggggcagtttgggtttgagtggtcatcagtcatcgcacgaaggaaggcagattgctggtaaagacgcaaagcgttagttaatactctcagtagacgggtagctggcttgagaggtcaatccgcgagctggggctcgcgaagaacgtcaaaaacacagatcccggcgacgattcaggccgaaatagttaaataacgacgatagagcttacgtttgcaactggaggaagggcgaatttcagggagagcggagggagactctctgttaggtcatgctgctcttgctccgagtagaactcgttctggtgcggcgaccgggtgtattggcggactaattgatccatggtgtaaaactgactgaagaggcgatgtttctcgtggcaggattatggtacagaaagtaaacgataaggaggaggatgaacagatgcggactgaagatggagctaaagctgagcttctgacgctggagcttcagatgggcggcccgcgtcgtcaccttggagcctgggtcacgtgctgcagcctcaattaccaggcacgtaacatttgatcctctactactatacactttgcatccttacgataaaagagtattggattcgaatgcagggaaatataaatattggatctggaatacatatgtatattgattacacaaagcactaatcacccctcccaaaaagttttcgcttcgctcaaatgggcactgcaactcgctgcacctgagagtctagcgggcttcctagctctgactgctttgtgcggataggaaagtcgacgtcggaacccggcgacatgataccttgggtatcatggggggcgagagtcttcagtttcacttccccaccaatccgttcgttctccttcctcacactctcacgattcactactggagcagtctcaaaggcaccggcatacattcttggggctgagatgctatgaatcctggttggagaagccgcatcgttagcggagatgcgagagtatgtgtcagaaaccgaagtcgcatctgcttgggtgtactcctcctgctgctcctcaagagactcagttgcctgggattgggaagcacgttgtccgcgctcttcgtgagaagaggggagcgatgtgctcataggtacagctgccgctccgtgctctgcttttgtctctacatgctcgtaatcggtctcccaggactgcaattctcgttcggcatcttcgacgatttgcttggcgtcgttgcctcgctcatagggtttcggctcgtctccaggaatcaccgaagtatcgtcgaggcaattgagcaagcgacgcgcatggcgggcaaggagagcctgcttctctccccgctcaattacagcagcaagatggacactgta

SEQ ID NO: 15904 - DNA, 909 bp, Emericella nidulans
  unsure (1)..(909): unsure at all n locations
tgcccacctgaggtgacgctttctcctcttgcattcctgaaacgcggcgagaattccagatacgcttctgacgaaagattccttccatggtagatgtgatgggggagaggttttgatcccttccaccttcttcccttttctcctcccttgttcaccttcaccttctcctctcccccctcttcccttccccaccaactctactcctcctctttcccctctttcctcctccttcccgccctcctttccctcccctcccctcctcatctccttccttctcttcttctccccccccctccatttcccttctctcccacttctcctcttccctccttctcttcctgccctctctcccctttcttctcctatcctttctaccctcctctttcatttcctacctcccttcctgccttttcctttctctctcccttccagtctacccctctccctctccgctccccttttcctccccttcttctcccttcctctcctaacctctctcctccccctccttttccctcctatcctcctctcctcctcctttccctttctttctctctccctccttcctcctttacctccttcccccctactccttcctctccctcccctctcccctttcccccctcctttttccttttcccccctctcctctccctccttgccccctttctactctcactcttatctttcctctacctcctctctttccctcttcccttccctctcatcattcccctttatctttcctacctcctccctttttccatcctaccccctccctcttcccctccttctctccttgtccctcatatctcactcttttccctttttctccacatttctcctctttcttcctctcancttctctcactctcatacttccctcctctctcctctctcttctctctc

SEQ ID NO: 15905 - DNA, 655 bp, Emericella nidulans
  unsure (1)..(655): unsure at all n locations
cctggtcgttaatctgggcgagactctagacgaaggtgcaatcgtanggtccacctccgaagactgtctctcgctagccgtctggacgccctcatatgcggataaaacatcgaagcttcccgtcgccttgttcgtgaccggcggccatggactcaccggtgggatcgatatcccttcccaggcaccggagcagtgggtttcgagatcgcaggagcacatcgttgtgacgatcaattaccgggcgaacatctttgggagcaagctgttgtatagataacaggggtagcttagccggctaaccgtgggcgcacatgctagatgcctagggctgccggctttcatgacgacaaggctcttcttacttcatgtgcgcccccccggttaaggggttccctaggccctgcgggcattttttccacgatccagttaaacctttgggcttatcaggttctctccctacgcaggtaaatcattttggaccccttcctacgatctggccccggactaaggcccggtttttgcccacatgtacctccctggcatgcctgtagacctcttgttctgccactcggcgtctgggggcctctccttcgggaactggccccacaaccgggaacccctctttaccgtttccattgccttgggtctaaacctt

SEQ ID NO: 15906 - DNA, 601 bp, Emericella nidulans
gaaatatccgccgaatcgctgcgggaagcatggacaaggcctcgagcttgaatccatgtccgtgaccgtcaatgtcctcaaactcgttgacagccgcggtcaaacaagccccctcccatgggcgaatctcctcgtcgaagacggcatgcgcaacggcaactatgaatgttagcaaaagccacaataaccaaatatatgaacataccagggtgcagatacaggttacgaccaatattcgagttcttgatgccactccgtatgagcaagagcgggctatgcagtgatccaccagagacaatgactttcttcgctctgacaataatcttgcgcttgacggcgccaagaccagagacaccaaagtgtgcatcgcgggaaacccatgtaccgagaacaccagtagcgactttcccggccttcttcttggaaaagaggactcgctcgacatcgaatccttcaatgaatgtcgcccccgcgttcgcagcatctactagaatagtttcgattgggccctttcttgcacccgtatggcaagccaatgtgcagtgtccacagagtgcgtagtgcacccgtgttctgcgcacccgtttgctgataactagct

SEQ ID NO: 15907 - DNA, 698 bp, Emericella nidulans
cgtcgaacatatgctccatggccacccagttgtttgacaatatccgtagagcttgtagccactgcctcgtgcttcggcgttttctgtctttcatctgcaacagatggattggcgccagcctgtagcaagacctccaccgtcgcggcgtggccctctctaacggcgagatggagcgcggtgcgaccgcgctgatcgacgacgtcgaccggggaagccgagcagagcagggcagtcctcttgacgagtcccagccgggctgcggagtgcagggctgtcatacggacagtgccagcaggtgggctaggatcagcacctcgttgaaggaggaattcaagcatcgatcccgtgtcctcccgtgcggtggtgacgaaatctacgacattgaaacccctgtcgtctctgcgtcggatgtctgctccggcatccaagaggcattgaaccaccagcatatgtcccccggcggcggccttacataagggggtgatgccgcctctggatggaagctctggatccatgcccacagctaggaaggtcttgacgagtgcgaggtggccgcgcgctacggcgactaaaaacgccgtctcgcccctgctatcgacgactgttgggtcgatcccgagcgcagtgcccattgcgccgcttcagccgacgttatgggcgaggtgtgcagcagagtggcagtccccccggggcgttgc

SEQ ID NO: 15908 - DNA, 3910 bp, Emericella nidulans
aggaaaaccccaatgttagctgccgtcacttgcaaccaagaccaaggacctgactatatacaggagcttcatcctaattttgccgggggcccaacatatcccatcatcctccgtaagcccgaccaaccaagctgcccaattgagcaggtccagtaactaacagcaacagcattcaaactcaccgaccaagaagtaacagacttctacgcccgctcaaaaagctcgcccatcccaggcgtacccagcttcgaccccaaacgagtcgtcgacgggcagcgcaaaatcactgtctacaagcaattgcctacgacgagcgcaggacggaaatttgagctccgtaacaaggtcgttggggtctacgacaaggggaaggcctctgtcgtggagacagagcagacaattgtcgataaggagagcggagaggtctatgccagtgttgttggcagcgccttttatgttggacaagggggctggggcgggccgaagggtgagcacccactccaccaggtgaaagtttccatttagagagaaggtgactgacgattattgccatttgtgtcgcaggacctgcaacccccaactatccccctcccaaggaccgcagaccagatgctgtgcgcgagatccagacaaccactgaaacagcccagctgtaccggtaagtcacacctgccttctcaccctggaccatcaaccgatcactaaccatgttcatctagtctgaatggcgactacaacccgctccacgcaacccctgagcccggccagaagatgggcttcggcggcatcattatccacggcctgtacagctggaacgccgctgcgcatattgtactcgaggcgtttggtaacagcgatccagccaactttagagagttccaggcgcggtttgcgtcaccggttaagcccggatgataagctcattactgaactgtggcgaactgggaaggtgatccaggactttgaggagattaggttcgtcaccaagaatcagagagggcaagttgtgcttagcaatggacgggccttgatcaaggtggggggccagggagcgaagctataagcgcctagctactattaatgtagaggaatgaaagtttcgtatacacttgggactgctcctggtctcggactgtctgctggtgatcatccacactactgcgttaaacctgccatcctcttacaaccaacaaagggctagaggaataagtcatcctggttggtcagatcaggcgtcaaaccagaaccccagacctggatccacctgtcagatcttgcgttgcggactaagccgcttactctggggctgagctgcctggtctcactacccataacaataggcaacaatgtttttggcgggatctcataattagatctcatctgcttcgagtaccaaagaacacaaaactattaaggtgatctttctacaaacagactatatcatactcataagcacaatgcttggactctcctccaaatcccccgaggccgcacctgcctatgaagagcttgataccatccgcgagccaaacagttctaacggggtatgcagtgccactctacttactctaccttgaacaacggagaggaagtagacaaagaagtactaaccactcggaacacagtacttcgccgtcccaaatgacgacacggaacgagcccagggtccaattgacgaggaacaaccgcatgaccatgcccacagcatctcgctgaggaaacctagatgcggcgactgctcgctccctccgccgaggacgttccagccccatgtgcactgcgacatctgcgatgcgttcttgacgcgccaccagcgggtgcgcaatgagcggttctactgcgggatggttgcggcgacgatcatgtttgcgctactttgtgggttgatgctgggcattgtaatttcttgtacaaaaaggagacactaggactttggtttaatgggaggctaagttgggtatgccatggtacagcgtatcagcttagggttgaactcgccatgctgggtagctttcaatatccaaggcgtatatgtatgtacataaaatgcaaacatcccatgctcaatcaagcaagcatgaacaaaatttgactatgcagactctgcctgatacggcggtaccttatccccagccctccacttgtacttactccctggatgatcctccggtaaccggacctggccaacccccagatacgtctctctcgccgtggccccctccttagcaactgtctccctgaagagccctcgagtgcgcagctccggcaagagaaactcgatgatatcctcaaagctgcccgggttcgtgatatgcgccaggttgaacccgtccactccggaaatttccacccatcgttccaactcgtctgcaacggtcttgccgctgccgataatctttgtctggatgccacccacgctgaggaattcgacgatccggcgcttcgtccagggcagattatcggtgccgggatccgttgacgcccaccgcttcacgatacttgcgactttggtctcgtctgcaaaccggaagtccgcgtcatcctcgtacttggacaggtctatccccgtccacccgccaaatagggcaaggacgccctcgtgatcggcatacttgaggtactcgtcgcgcttcgcatatgcctcctcgtccgtggcagcaactatcaacgtgatgcctacgatgaccttgatatgatttggatcccgcccctcgctcgccgcaacccggcggatactctcgaccgtgcttcgcacaccctcgggcgtctggcccgcgacgaagatcgcctccccgtgcttgccaccaaacccgttcccggcctcgctcacacccgcctggaacagaaacggtgtgcgctgtggtgagggctcgcaaaagtgcggtccgggtactttgaagtacttgcccacgtggtggatctgtcgcactgcgtcgggggcaatgtacacgcccgactcgcgatccttcaccacggcatcatcccggaaactcccctcccacagtttatataggacatccatgtactcgtgtgcgcggttataccgctcgtcgtgcgggatctgttcgtcaagcccgtgatttcgcgcagcactgtcaagatagctcgtgacgatgttccacgcgactcggccgccggatagatgatcgaccgtgctaagtcggcgagcgagcgagtacggctgctcgtatgtaagactcgccgtcactccgaagattaagttctttgttgtgctggccatcgcggggacgaggtacatggggtcattgactgggtactgggcgcctgaggcgagtgcgggcaccacgttcgccggacctttgtacacgtcgtacggtcccagagtgtccgcaatgaacatggcatggaagcccgcatcgtcaagaagctgggcgaggtcggtccaaaaggagagcttcgtgtagtctgctgtcttgttgcgggggtgtcgccattggcctggagccatgtgcgcgggcgtgttcatgacaaaggcattgaggatgatttgtttctttcccttggtttctgccattttttctttcttgaatctataaatagatttctatctgcacagcaagagcagagaatatgccgttgtgaggggctagaggggagagctgtttttatggtgctcgaagctcggtatttatctgggcagcgtcattggagtctgcgagcacgccatattctccaaccctttgcacctggatcttctgataggaggtcccaactcgactcctctctttctttctctctcggctgccgaagcaatgatgctgtgttatgggtggttaatctgctgcctccgtcttcaaggctgcatgtctctcggccggcagagggacagccctagccctccgctgcacgcaatatcgccccgctacggcgtgatgggctaggactcaaa

SEQ ID NO: 15909 - DNA, 4759 bp, Emericella nidulans
gttatacactgaagccacggagccagcttcgaaaccaaaactaacagagccaacagagccgattctcaaggtctcttcgttaccaataccaaagccaatttcagggtcaatattcacgcccatctcagtcatcgccgcatctatcaacgccattaccgactccctctcatcgtcactcaaagaggtcattccccgctccctcaccaaaccaagctcaatattttcgtcactgcgtacggagcctgtaatagagactatcccccggccagccacagaaacacctccaaagcccgctttatcgttcgtctctgtatccatatccgaatgcatcgactccgagcttgtatcagaagagacctcgacgtccgtgggggaaacgatcccagactcggcttctgagtctatctctgaaggatcagactcggtgtccgttaggacatccgagtacatctcatcgccggtttctgcgtcggttccaggaaacgtttctgaatcggtgattgaattcgaatccatagtccaatctgggtcatcgggcgaatcagtcggtatgtgtataatccatgggtcttccattgtaagcacgaagagcgagaggggataatgtgttaatagagagaaagggagcctggaaggtgaagagtataggttgtgtttaatgtaggtagtggggtctggctttggttagcgcggaagggcattctaaataagttttgtatttcccttgataaaagatctatattcttcatatctcatatcactaagtgccttcccattactggacagcttggagctcttgaactttggttgtcatctactgtcactgctcttgcgctatacttgcagactagtgcttataccttcgatggaaaagacggcaaggtttagtattgcatagtgccctatatgtctcactttgtatacagacagtagaacattatttgtgcgagaattgacattgcaatccaagaatccagcggatactatagcctggtggaagattatagcagttggcttaactagtagttagggttggcataacgcagcagagaagaatatagatatcctgcgcatacaactcctcaagtgagaaacacaaatagacagttctcctatatactgagactccaaagccacttggactatatcgactccaaaatcgtctcttcctccgcttgccagtcggagattatgggcataatagctggactctcagcagaataagacttacgaggtaagataccccaagagattgacctggatattatcatctctgacaaagttttcaagttcaatctgtccagaatttgctgtgaaaattactcggtttcgctagatgcggactgttatctcatccttctcatctttatcctagatggaggtggtcatattgaatagataagcacagacttcagttgcaagagctagcgagccagattaatccctggaagtttttcgtattgctggtgtggaggttgatcaaaaataggtgaaaattgagatactgcctggtttgagtgttcgttggtttaaccccaatctaggcatgttttaagtgccataagagttcaaaagaatttcagtaagacttctaactttttgacagcccggctaaatctcagagcagctagacgggttaccaaaaggtcgtcttaaatacatacttgcagtaacaaggtgcaattcccatttcgatccaaccatgtaccgatattatattgagtggcaaagcggtagatattttctttgcacatcgcgagtgtgtacaaacatcaaacccaatctggtacggaagtaggtgcgtttgtaatatttcatctactcaaaggccatctaacgtacgcggtttgcctaaaagatgtcccaaggtcccgtacggcgacgattgctctcaacaggagcgtggctcgccggattgatgcacttcaccgggtccaagagctcgatatggtagaggtcaccgatgttatggtcggggttggtgttgcaatggaggcgcataacctggggtattggtggcagctcctgggcttcgtcccaggtatcaagcacgtcgtttctgtacatgaggggctttttattcttctcgcgctgaatgaatcagcatcaaatgacacgggtgtagagtagaaatgatagggcgtacctccatgtacgcctccttgagctcccagaccttattcccgttcgcacctttcttggtctgatcggacagacgcagacaccagtaccaatacgctttccagctgaaccaggggccccaatcgctcagagtttccagcatctccggggtcccgtgcttgcaggtgtgcccgaatacgatgatcttcgcagtctcgtccgcagctagatagtcacgcatgccgatatccaacagaactttcatcatctccattgtgtttgtacttactgcgataaggacagcacgcaatccgtacttgccgagggcctcgcggttagggaggaagacgcgtacgatatccgcatcctccagcctgactgccatgtcgatgcatagccaccgaatccggtatttgtcattgcagttgctccttcttcaattagttcttcaacgccctctgtattctgaatgaatatggcaagccaaagcctctcaggaatggtctcctcgtcatagaagtttaccttcagattaccgggtgagagagggttgaagatggtgctgatgctggagcaggtgctggagctggggctggcggtattacgggagttgtcgatatttaatgcagcgagatcaatggagccatcatcggagccagtatcagagtagttgtcagtggtgtctccagtgtcaccaatatcgctggagtccaagtgaagatcccaggcttcaatggcgcggctagagtcggtgtaaggaggagcaaggccaccgacaccggtactggggctcttaatgagaagggcgggatcgatcgaatctagcaaggggacttctttgcgctcggtgtagggtttttgcttaatgtagtcttccccgttgaggtaaggcttgtcgagtttgatgcgcttgctcgggggcaggaatgacatccttcaagcagtatgtgttagtgctcagccactacaaataacaaataatcatatcgaggcaaaagacgagacttatacttattccactgaactgagtcttcgcagctggataggctgcctgatagagccaatcaaggaggaacactgaggatatatgccaaaagaggtgtcagttcctctcatgggcatattgtcagagagatggaaaggataccttatctctgttgcagacaaaactggtaatgcaagcactgacaactgaatcttatcacttgtagaatctttaacgtggcaagcagcgccatacccaaaagccattcagacagctttgggtctgtttcgaagcaggtatgaatgaagcattatgcgtgatttatggcgtggatggaatcgacgtctcttcccatcgtttcaaacagagcctctgccttgtgagtctggggtggaacggctcgcgcctagagatctatcttgagtgttgccgtcgttcgacggagcgtatgtgatgttgcggtgctagtcaactagttcgcaagcatgattggcaatcaggatcgttcttctttacttccagggtaaacgaagccagagacctgcccgtaattcatttgggagtcgacaagggggccgggtaaggttcaagagtgtttggagatgggtatcacatctcgagagcagtcattctcagctatgtactcccagattgggcagcctgtctatcattcagagaaacactatagacatctgatacaaatcggcttgttcacagatagagatgctacgaggcgtcatgcacgattccgctatatacttctggaatttattttttttttttatttttttcttttcttactgctgcgagcggaattatggcattgcctaaacacgcattagggctgaaagtacactcagcgaccgcctatagagagtgagtaagtcgagaagacttcttgagcacactgacgactatagaaggcatttcacgtacaggaatggatagggaatgggtaaggagtcggttacgagcgttgggcgtagggggcagcagaagaggggttgtcaatatccccctcgtattcagcaacgcagtacaatacggcccaagccagcaaacacgaaatagatcgtaaaaatattctgattaagaggttcaccctgttaagcatccatataatagagcttaatacctattctgatcagatgctgctcagtctcaggtaactgaccgcaaagtcgaatccacagaccacccccccaagctgggccccaagcactccaccccctccgccctgctccgtcttttctgcactgctcttcctcaattttctcagtcgactatccaccagcacggcctatcttcctctattctacctggaatcttgaatttcgcctacctccaggcgtccgcactgcctccttccgcagcggggaccccccttggttcctttcatgagctgcaggccaggaaaacttcttatccctcgactcgcccttgaaaacttctacacgactcgtccgctgttgactgcacgtccagtccatcctttcatcgctgcctcgtttctgaccaacgccgaatctcccgcctccgcctccccgcacagaatggacgaacccgccccttctccgacgccggctgccgccaaaccttcccagtcgccgcccccgactgcaggcaccaaacgcaagagaggttctgctggaa

SEQ ID NO: 15910 - DNA, 2586 bp, Emericella nidulans
tgcagtcaacctccaaatgagggctcttccccaccaagtcaaccaaatgtatcctggaggtgacttgaccaaactgcagcatattagacggcctttctgactcagggacgagagtgcagtggctgcaggcctgcagtcagcggtgtgaggtcttggacatacgagagtccgatttctgtgtcagatgcttttagttctggctggttttggctgatccaagcaatgtggctgcgatagcgtctggatcggtcaatcattgtcatcaatatccctccacctaacagtgggggtaaaagccaagtcctgatatgctcgtcatggcagagatgaaagccctcggctagcacttgtgttcgcccttgttggtctacatgccaatatgcggcctgagctagggatggggcttccaacttcccctccgacccctccaatgttccaatcatgggctaggattcgaacaatgcatgctgaagtattggggcataagctgccgaactccgcggcaggcttgttgcatgcttttcttctagactcttttaaatacccacctcaggcgcagtctcgcggtcctgcacagtctggcacagcctgcacagcgcgaagacgcaaggacaacctggaaaatgttgagacctctagctgtgttgactgcgctttctgctctagtttctgctagagatgtggttgtagaccttggttatgcgcggtatcgaggcgaggcgctctcaaacggcgtcgcacagtggctagggatacgctacgctgcacctcctgtaggatcgttgcgtttcgcggcgccgcaggaccctgaggatgaatatgagatccaggatgccactcaggtacgtatttcgctctgagcggattcgacgctgacaatgaaactatagcatggccccgtttgtatccgggcatctagatatccgatcccagagggctcttccgaggactgtctgtttcttgacgtttacgctcctgcaaggcccagacgagactcgtcaaggctcttacccgtatacgtttttatccaaggtggcggcttcagcagcaatgggaatccctactacaatggatcaggcttaatccaagcttctgatatgaacattgtcgtggtcaacttcaattatcgagtcggtccgtatggttttctggccggctcggagattcttgagggcggaagcttgaacaatggtctgagggaccaaattcaggtactcaaatgggttcagaagcatatcagtaaggtaaagtctcccctctcctcccatctcatgaactctgtaagctgacccatccaagttcggtggcaacccggatcatgtagtcataggaggtgacagcgcgggcggggcctcagtgaccctgctcctctccgcgtacgaaggccgtgacgacgggcttttccatgctgctgctgccgaatcccagagctttgccaccatgttgactgtggatgagtctcagttcgcgtacgacaatctagtaaaccgcacaggctgcagcgacacgggggatacactcaactgcctccgtagtctggacgttgaagaccttcagcgcgaaaacatcgtcacgccgtttcctggcgcccaacaaccccctctctacatgtacgggcctaccattgacggtgacctcatcccagactacacataccgcctcttccaacaaggcaaatttattcacgttcctgtcatcttcggcgatgtcaccaacgagggcaccaaatttgttcctgaagacctcgtgtccgacaccgcaacatatgtctggcttcagtctcaatggcccgcccttacacccaagcatttctcccgtatacatgagtactatctgcaagatgttaactccacacggccgtttcctaatgcaacccgctattggcgcccagtaagcgacgcatatggtgaaatccgctacgtctgccccggcattgcgctgaacgctgcgtatgccaaggccggcattcccaattggaactaccactacgcagtccaggacccggaggatgaagcttcaggtttaggcgtctatcatgtcgtggaactcaatgcaatttggggcccagacaatatttggtggtcggatactatctcgcagccgcctccagagtcttatttcacattcaatgcgcccatcgttcctgttatgcagggctactggacaagcttcattaggagttttgatcccaataagcatcggtatagggggagcccgaggtgggagacttggggtaagcaagagcggttattcgttcgaaccggtgagacgaggatggaacgagtcccggcagaccagagagaaaggtgtgaatattttatttccatcggcattgatttgaggcagtgattattcataactttgacgcatgtttccaaatccaacttttttcttccgtcccaatgctagcgaattatgtacatacggcgatatgacggaatgcgtggtaattcggcaatgtatcgaaggatagcccacgcaacagatccacaggcataaacataagtaaacaaatacaacctacctcttcccctgccgcatcctcttctccctctcataagcagttgcctctctcacctcctcatt

SEQ ID NO: 15911 - DNA, 623 bp, Emericella nidulans
  unsure (1)..(623): unsure at all n locations
atccgntcaatttcctccttgacctggcggctttgctcagaggttttccattcttcgttccagtcgactgtcttaccgtcgcgcttgatgggcttcgcggcggtctccaggatgaactcggccacgttctttgccggtggacaaacagcgccgcggtcagcgaagtacttgatcacatccttgccatcttttcctaccgggccgaagtagaaagtgttgccaccgggattgagggcgagaatcatgtcaaattgctgaatcagcatggaggagggctggtggatggtgcagacaatggcctgcccagcttgagacagtttcttcaaaaagcgaacaatcgagaacgcagcctggctgtccagaccactggtagggttcgtcacggaagagcaaaaggctaggcttcgccgccaattcgacaccaatggtgacgcgcttcttttgctcgacattgagtgagccgatgatggggtctttgattttttctagttccaaaagtcgatgatctgtttacgacgcaacttttctacgggatgtttgcggccctgcaaacaaacccagatttagagcttgcgatcgacaattgctttgcagtcattggtacaaaaccaggcccgttaaat

SEQ ID NO: 15912 - DNA, 529 bp, Emericella nidulans
gtccggactgggtaccatatctgttgcacttacatccagccgagtattttcggtcacgggggacttgcaatctgcgaccgattcttgaaacgtccgaggctgtacttcctgcgtgcgcgtgcgagggcgcggctggaacaacgccaccgccaatatctggcgcggcaagaatagatggtggcagatgagagacactgtcagagcccggcctcttaagcaaagctacgatcctctcagcaggcgtcagcatgcaacaggcccagagcggaaattgctttatgatagtactgctcgcgcgcgttgaaaggcaacggatggctgaggacgccggtgccgttcatggcgatggccctcttgcaaagcgggctctcggaatccaagtggtgagttactgatgctgcaggaatggtagctctttgtttggcagactaaagagtattataccttcgactgaacttaatcctgccacatttatattatgaggatccccacccaaactcgggggtttgcttgccgacccatttgatgg

SEQ ID NO: 15913 - DNA, 679 bp, Emericella nidulans
  unsure (1)..(679): unsure at all n locations
ccccacatgttggggaaacctcgcctaggctcaagaagcttgtcgactatataataagatatgatttttttaatggaaaaatcgatgatatatttttttacaattatgagtgtgtttcctttaatatttcttgtacatatggatcatgtaatatttgctctataattggtaacatgttttgttcaaatggaatgtcgataggaaatggcttttgagagcctggttttattccatattgcacaattttgtaatgtgtattgttttcagacttgagcacaattaacttatagcgtttatcatcgccagcgagtgaaaaatcaatagaagtagcgttatatgtcacttcatctttatatatgtacggntttggcgtaccaatccagtctacttttgcttgtacattcatgggcatagcctccttatatgtattataaataaatacaagccagctcttcataaagagaaccggcttgcaatttagcagttattgggtattttaaaattttcactttaacagttttgcgtccccattttgagcagcgctatctgatccaagtaagatatcgatacggttaccttaattgcaccacccgtttctcagggatagctttccgtaacctttaccatactttaaatctaaaggaataccttcgggtaacaggaacctttaatgttggat

SEQ ID NO: 15914 - DNA, 2223 bp, Emericella nidulans
gaccaacagcacatctctgagttggctcagtcactggacgccttacggccaactcagaagtatctgattggctaggttcaatgtgatctgctcggagtttgatatgtacactgtcgtatctgcatggggcgcgcagcctggtctgtcccaccctaccttgtgaggcgatccctaaacaattatcagtgcatgcatggatgagctgacatagcccaacaaaacggacaatttacgcaattttactgctttacgtgcacaattaccacgccttactatgacgaatagcatgccattctatattgcgtcaggactgcaagaaatgaaagccctcaatcttccccaagctcaccaagaaagcgctgctcccgcaatccatgaccatgatagatcttaacccggacttgtccttcacagctaaaagtgtggcccttttgcttttcatcgcactgggtctcctttataccaccatccaggtcgtctaccgtctctatctaagcccgctatcgagatttcctggcccgcgccttgccgccgcaacaggctggtacgaggcgtactttgagctcgtccacaagggtggcggacagttcctgtttgagattcgacggatgcacgaggtttatggttgagtacgcggaatcagatagcttgactcttgtactcaccagcacctcacaggccccatcgtccgcatcaatcctttcgaactgcacatcgccgacccggcctactacagcaccctctacacctccacactaaatcttgacaaagcaagtcacatccagcaccgcttcaacgcgccaaccgccgccttctcaacgcccgaacatgcgctccacagacgccgccgcgccgcaatatccccgttcttcgcgaagcgccgcatcgacgagcaggcgcccatgatccagtcacacgtgaacgtgatatgccatcgtctaagtgaggagtacgcaggcacgggcaaagtgctctgcgtcaacgagctatacggcagctacgtgacgggtgtgataatgacgtacgcgttcaaccggtgcccgcggttcctggaagaagaggacttcgtgtccgcgtttgggaagagcatccaggggctcaaggagtttgtgcactgggcgcagcagttcccttgcctgccgcggatcctgcagaacgtgtcgccggtgctcatgggcgcgctgttcccagctatgcaggcgagtctggtgtttcaggaggtaagctttacactctctccattcaaatattctgctgctggcggactgacaccgggaaggaaatgcgcatgcaagcacacgccgtcctttcaggccacggccaaaagggcaccatctttcacgacctgctcgcctcagacctcccccgctccgaactcaccctcccgcgactaaaagacgaggccatgagcatcgttggcgcaggtattgaaacgaccaagatggccagcgtcgttacgacattccacatcctgcagaacccgcgcatcctccaaaaactgcaggacgagctcgacagcgcgatccccgaccccaccgctccgccgtctctgagcgtgctggaaaacttgccttttctcgccgcttgtatcaaggaggggattcggctgggctacggcgcaacggggcggtctccccggatctcccgtacggaatcgctacgctatggcgcctggagcatccccgtgggcgtcatggtcagcatggatagctaccacatgcaccatgacgagagtgtgtttccggatagttacgcgtttgtaccggagcggtggctggacggggcaagggggccagatgggacggggagcctaaataagtatctggcctcgtttagtcgcggcacgcgcatgtgcgtgggcattaacctggcgtacgcggaaatcacaattgtgctggcgaggctgtttcgcgggttcgtgatggagctgtatcagactactaggaaagatgtggactgttatcgggatttggtggggatggaggttgtgagggggagtcggggggttagggttaaggttgtggggaggagagagtgagttctttggcttgttctgatatggctgcgttccactattgactatgtatgagttatattagcctacctaggtaggtattcaacgagtctcatccccggatacctccacccttccctccaaaatatcctgcacaaaccgcatcttcacttccatcaacccctccaaatgtgccccctgcacgatat

SEQ ID NO: 15915 - DNA, 3900 bp, Emericella nidulans
acggtatgtggaagtcactggccacagcaatgccggggccagctcggccaaaagctgcatggttgatcttattgcggccgagaacgattcttgacagccatcattcgatgaagccaccaggcaccgtctgatctcgtcactgcaacaatcggccgaggaactggagaccccttacgacacagtgctgcgctatgtcaatgcggtaagtcaaataaactagaagatgcggcatacttggtttgttccgttgaaagcatgctaacggcgctgtcgaaacagggtcgacagacggcgctggtctgcatagggggggacctcggaattttcaagtcactcgcggagagcaaagcacccttatcatccaaacagcttgcagaggctaccatggcggacccgctgctcgtcagccgcatcatgcgatacctggttgcgagtcgtctggtcggggagacagcaccggaccagtacgtggccaccaagaagacgtacgtctttgccgacccgcgctttgaggagcctatccgattctttcacgccgtcagcaaccgtgctttccaggctctgccagagttcctcaaagagacgggctatcagaatgaaacccagcgcagtgcgttccaaaaggggcttggcacagagcttcagctctatccctggcttaagcagcatccggatgtgctgaaaaactttcaagctgctatgcggcttaccaaagacgccaatggtgtgggtgtgatgccgttagacagctctgtgagcagtggccatgagggtgtcatgtttgtggacattggtggcaatactggccatcaggctgctgaggtgctgtcccagcatccagagcttgccggccgagtgactgttcaggaccgtggtgaagtcatcaaaagcgcacccgagatgaaaggcattcagtggatggagcacgacttctttgatgttcagcctgtgaaaggtaagctttatcggatgagaaatcaagcatgattcaatcttactaagacttgtcttgcaggggccaaatattactatctgcgagccattctccacaactgggatgatgaccacgccgtgcagatcctggccaacattgtgcctgccatgtctgccgactcgctggtggcgattgatgaagtggtcgtgccggatcgagacgcccacttgtggccggccgggctcgatctccaaatgtacactatctttggaaccagggagcgcacagcagcacagtgggatgcgatcctcgacagagccggactgcgtgctgtggcagtcaagaggtatgcgcctgtcatgcaaagctcggtcatttttgcggctgccaagtagggcaagtgaattggatgaatattgggtgtgagaattctcatttgtcattaccaagtctacgcacaatacaacctttgcatttagtctagcgttgtttaggacatcggccatttctaggcagggtagaacaatggctttctggatcgttgccctgttgtgctttttcaaggatacttccgcactagaaggcaatggcagatttgatggaggcattcctcgcttgttctatgagagcataagtacgagagtatccattgaccgctgagcaatggagtatccagatatactatctcaacatgtcttaacagctcggatcgaatgggttaacgtgatggtattatacagttactcactccctcttacagttatctggtagttatctgatagttatctgattatagatttttgactggattgaaaagggggttctttcataacttaccaggatagactgtagaaagtgcttgaaatatggatctatatattcatgtgctagtggctagaaggccaattaccaggagccctactggcagtggtctctttttttcgaaacaactacccccgtcttcattccatcaaaaagaagttatgatcccgatgatgttctctggtgccttcattgtgttggaagcgaagcataggttcttcaagaaactggcaccttgtgccggccttctaaaggtcctctaatcctccgcagcatctttcagcttgttccagtaaaacaacgtcaatatttggccgcagttcaacgacttttccttctctacgctctctttctttccattcctgctgttacctacaccttgcgaagcatgaaaaggtagattatcaatgatatagtatgtcaatatatgtgacagtgtgggagtagagttcatattattgtatctctgtgtacaccttaattgtcttacctgcactcgccctccagcaggcccaagctgtgattgctgatatcagtaacgaaagccctacgattgcttcaatagggtccttgaatcaatttctgtaaaatcatcaagctagaattgttcggttgatggatcacccgcttttactacaacagaacggccggaaattccattggtcgacgcacttttgtgagagaatgggcccaaaaacaaatgttgaactgtaggtttatctgaaaggtacttggtcaaatcataccgcatatgagaagttgcgaaaactaccgtgcggtcagaagtaggaacgccgctgcttccagaccagttgagcttactctatgaatcacaattttgagttaccagatctcctttgcgagctgaaatatcgcctctcctgatattcgttgtgttgcgttcaaagaatctaggagttcctgatttctggccggttttataacgttgtaagatccgagccaaagctaggcaagaggtcctcatggcatttcccagagactagatgattgtagcagtcgagaatgtaaaagagctgtcttgcctcgcttgttcctacattctctgacgtacatcgttgcaatatcaaaccagtgcatatcaactgtcactcaatacccgactgcacaggttcacatcgagatcaatttttcgaaggatctgacgaatatctttagctccacaagtctactctttgccaaatcattgagattagtggaagtagtttgctcttattatttatttggactcctttttgcaagatcggagaatacaagtaatcatattacggagagtcttcgtctcctgtacaacttgcaaacaatgaactaaggattaccgatctctgactatatggttcagcaaaggatgagacccaacagcctttgagagctaccctggtaagaatcctgcttagcagtcatatgccattcatgctatctcataataaccatctatcatcataaaccatcataaccttacaccgttcataccattagtcaacccatttaccttcttctcagtcagctctctagacctccctggccagattccctgtttgccagggactcaagattccatttggatcgagggcatctttaatcctctcattcacgtgccgcaggctacacccgttgaaatcatactggtctgccaccaagtccatgtagtcaatatgtgcccggtactcactgtatccatgccgccgcgctagatgcacaagctcgacgaacagtttattagcgttggtgcgctccagttctgacgtgcggtcgaagtagatcatgttgatcatggccaagtgtcgcgggtacagatgaaggccgccgaagtagtcaaagccatactgcgccaaagcggcttgacatcgcggtagaatgccattgcggagctgccctcaggtggcaggacgggggagaaggagatgtggccactaagatggggattagttccgttcagatattgaataggcagtcaatagggtttgccaggggtgtgggaggtggaggagatactgcatacccatctttaccgcgatattcgacggccttgagagccataagactgggggtgccagtttccaccgttctgtccgcaggggggatatcttctgggctgagcttggtcttgccctctggtggataga

SEQ ID NO: 15916 - DNA, 806 bp, Emericella nidulans
cacacttggggagactcgcctggctcagacgcttggcacgaattcagatagccaatgtagtcaagaaaacagagtatcataaaactggtggatttaataagagatgttagttatcaaaagaacatacatcgacgagagctatgaactcttcataataaacaagggcgcgaatcatactacttctgaacacagagacagataaggaacaccggttggatcacttactgaaaatatggcatcagaaaatgggactgacgaacaactaccattattaggaattgaaacaggaactatcgctgagattacttttgcaagcgggattcatgtaaaaggaacagtaacacagattgcgaaaaatgaaaagaaaagtgctcttatttttctttatcggttgcacaattacttataaccgcccgcgttttatttggaagcttcctggggcgcacctggttttggctggaggctcacagatcacctcagtatttccaggggcccgtaacagcagaatcatttttcccatgggagaacaaattcaagaaattcctgctcccctagaaccggaagtactcaaccgattgcattaaacacatcgagatattcgagtgaggggaatttccccacccgcctatccaccaattagcgctatcacggagtttaaatacattcatgccaaggatggtgcttcccctgaagtatccgaccctttcgggcaccacacggaataactccgaagatactacataacttcactttccactgacaagctgaactcctcttacatggccgtctattacaaaggcgtaaaa

SEQ ID NO: 15917 - DNA, 2923 bp, Emericella nidulans
atcatatcgtttgtatctagtgctacgtagctagggagtacaactaaggaagcgaagtacggtgcacaaatatactgccctggtttctagttcaaagaaagccgaagaaggatgtctgataatgggtagcccgtcatggtagaccatcctcacactacccaggacgtaacttatccgtctgtgtcagggcttgcggctggatatgctgtggctccatgagcacaagagggctttatcatagagacagaagctgagagttaaagtgacaataccacgggcattattatgactgagatgcactacgcacacccagctggtacattgtacaaaacgtcggcgttctcagcgaataggtagcacacgaccagagttctggagcccggtgcagtaagccagccacctggtcgtgaaagcttgctaggcatcctcacaagaatcaaggtccaggcgcattcctaccgagtgcgaggtcgggtacaacgtcggggagagtggttgtgcaaccccagattcgacgctgggacggggctgaatggaaggtagaatctgagagtacggagtacgactgcgaggccatagcgcgaactctcgcgatccagtcccagttccgtaaatggcgaataggaagagaagcctgagtctaagtaatgaagagacgatctgcggatcgacgttgatttccgatacatgcatgaaatggaggtggagacgagatgaattatagagcgtctgcggttcggttctaggactttttcgggtttggtaggtatgtgatttatacagaggaggtcaggagcatggaagtgcttattgaaggctaatttgttagggttcatattggcaagagttacctaaaacaattagtttttatattttatcttttaacttcgttacaccctcgcatgtgctcatacctttttgactctgaggacgaataagacactagttactagtagccatgcatgtatgcacgagtcccgttgcatcgggttgggtttttgcattctgtgcattccggtccgaatcaagtatgaggagttcaggtgctggaaaagcttggactaggttcaatgatgtgtacctggtttggcttatcctgcaggtcctgggttagtgttagctctgcattgcatcgtcgataccgctaagaaaggcagagagctgagggccaagttaggcataggcgcatcggcgaaaatgcatgcatatcattgtcgatcgctgtggactacgtcttcagagccagaaggcaatcgaagccaataaatgacgtcgctgggaatgtgaggagcgcaaggagacacatacagatccacgccccgcaacgcatattgaaaagtgactaggataattggggatacgctctttgcgcttgagcccgtaggaactagaaaccggttggtgttattggatactcatatcaggggaagcacgggtatggttttcctataaaccgttggacaagtcaccccaaataccggctgtcatgcaatgcaacttgatcaaaagcgttgactgatgagacggttgcaattcgcagaaagggtcctgggccacagttctggttccaggttcaattcactaatagaccttatggaaaacagggtaagaaaataggaatagcgggacgcaagggggtcagaccagggctggaactcttttgtcgacttcacgatcaacgaatgcaaaacaatgcaaacaatattattgatcgtgctcagcctcttagtggcatagttggaggcgcaactcgtcatagaagcttgacgcagttgaaactttcgctgttttacttttgcgaaccatgaaaataagaagagaggggtttgcctcctttctctgcttgactgttctggggaagaggtgagaaacctctgtagcgaaatatacgatttggatcgaaccaatgcacaagggaattcagaagatccggtagcctcggacggttaccgcgctttggtcttcgaatataaatggcttgcaggaacagagacagagtcccaaagtgaagaaggcttggtccaccagctgcaataaccccgaataggcaagaatctctaagctcaccagagcgaggttgtcgtccagggtaccatcctgatcgacagattctgattcgacgaggcaagtatattgagagtgaacctcacgccccgatcttgtccgtattgagccatatataggaggcgctatgttaattaattggtaagctcaggacccagaggtctcccagatgattggggctggaaagtctccttgctcttggggatgcagtggctaggccctggcctgaaacatgctctcaaatattggctttcacattaaatcaagcagtcgaagaacaagaatgaggcgagtcaggctaggtgttatcgcgagtcatgaaatgggagataaaatggaggagaaaggaagcataggaggtacctaaacaatcaacggcaggtttcattctcctatccacgttgagcatgcctagcttcaaagagccaatcaaaatctcaagacaggatccaatcgaagggttttcaagagggtcttcaaatgcttttcttgcttaagcattaataaatcctcgaggtaaccgttgtcgctgtttactcgtctgcagggaaccgctttggagacggttgtggataaggctgttggattcaatatatcgatggaggccgaaattggcaaagcacagttagtagaagctttattccaagcgtaacgatgtcatgaggggaaagagtgtgagcctcgcgcagttacggcatggccgggcctgtggcaatatgggtatgacccaggactgcccggtagacccttgcggtgtgctccgcgtgctgcaggggtctggccaggagaacactcgaaaaggatcctggaaaatctgctgctaatcagtgaccattgtttgctggtgttaaccaaactt

SEQ ID NO: 15918 - DNA, 3144 bp, Emericella nidulans
cacagcgacttaatgatgaggaggccatatctcgcctcgttatgttctaccaaggctccaccaatcctgtttcttgcaatccaggcacaggcacactattgcagtttggccacagtccaggctaatccaggctagtccaggcaagcaccagcggcagcctaatttatctccacccacgacctctacaaaaagtctccactaccctgaatccctggattcgccttcgtcaaaaatcccttaaactacagcctgtcatgtttagcttcttggatatgtttggcggtccacccctggagccctccaatccggaacctaaaagcgccctccaagtgtcgtgtgagttcggcgatcttgatgccgtcagggccgcagcctccaccgcggacaaagacgatctcaatgcggctctgtgccgagcctgcaggaaaggccacatcgccatcatcttagagcttcttgaaatccctggcgtcgacgtgaacgccacattccaaggcgacactgcactcttcttggcgaccttgaacggcgaacctgatgtcattcaacttctactcgaaaagggagccgatccagcaatcaagtcgaggaacaacccagtcgcagattgtcaaccagattcgactccgctttttgccctgatgaagcaggctcgcaagccagacgaggatgatacggaccacatcgaaagactcaagtgctgtgcctgcttgctacttgaagccgggtgcgacatcaaacgctgctaaccagcagggatggacggtactacacttctgctcccgcgacagtcttagacttgcaggcttccttgtggaccaaggggccgatccgaacgcgcaggcgcacgacggatcaacgcctatgcatctcttttggggccttcccaaacaaccggacaccctaaacgctctcatcggccatggtgcgcgcttggacattgtccggccgagcgacggaatgacccctctgcatctgtatgcaaagcacaacatgcttggcgatctttctctgcttcgcccctacgtctcagactgggggattgacagactctaatgggaataccttacttcatgcccgcagtccagagctcccgtgccaaggaaaccacccaggagctgctgaatttaggcctcgatccgaaccacagaaataacgacgggtgtacgccgcttcacttgcttgacatgccggccgattgtttgagggacgtcctcgacgttctatgcgcagccggcgctgacctcgaggctaaagactacaagggccgtactccgctggctcgagttatgtcgccacagccgagatacaattatgccgaagtgcttgcaacatatattgcgcaaggtgcaaacctgaacacacaagactataatggaaatggcgttttacactacacagtccgaccatatactttcagctttgaccactttcaaaccttgctttccctcggcgcagaccctgggttggccaattacaaaggcgatacaattttgcaccatctggccgctaaccttgccacgttctcagatgggaaggcagtccttgcaatccttgatcttcttaatcggggcatgtcaccaacattacgaaaccacaaaggacggaccccgctgcatttgctgtgtggccaggtatcgcagcactattttatgccctcgacggtctcgcagtcctcggccattgacgtactgctcgacgccggtctagagctggggatcaatagtgtggacaatgatggtgccgcccctatccattttgcagccactgtctcagaggcactggtggctaatctgatatcgaggggggctgtccctacgtccacaacgaaagaggggctaaacctgctacatatagcgtcgatagcgcggcagggcaatacagttgggctcttactggagcattatacgtggactggccagatagccctcgtcaacgcccgctgcaagattggacgggctccgttgcatgatgcgtgtcgctccggtcgcttggagactgtcgcaatgctgctgcaagccggagcggatgtcaatgcggaggacgcgaacgagaaacgggttctggatgcgtgcgcggagtttacagctgaagaaaagctctgggaactgacggaagacagcatgaatttgttccacactttacagaccggcggtgtcttacgcgaactggagaccagaccgcatcagccgagtacatcaaaaacgaggaagaggcgtgttggactgaacgaggtacgctctgagcacgacacagttagcattggccctattgtgcgcctgctggctgcgcatggagcaaaacttgatcctgagcggcgattcagtaacaacataatgagcgctgcagtctggagcgagtctgcagagatggccgtggaattggaacggctggcagagcagggagtctgggacttgcatcatcgcaagtctattgagtttaagtacttgaccatgaaatggaaggaagtgcctgcacttcttgatgaggagctccgcagctctggttacatcctccactacgacctggtgaagcttatcctgcgtggtcttcatgaggaggttgctcaggcgctggagagaaacagagaccatgtacgggacaccgatcagaaagagctatccgagttgttggttctgttggctagacacggttaccatgatctattcgcacgcattggaagcctcatgtcagagcagggctggatcaacgggggagaacgaacacttggcggaaggctcattccctatctctttgctgccgcacagcgagagctgcccaatcttgatgtgataaaggtcatcgtggagaagttccacgctgatgtgaaccttttgttcacaaacggtctccagatggagccggaggttcatttttcgtcaaaagttgacgctgaccgacaatttaagccagctgatacgatcctccactacctcgcacagggtggccattggtggcatcaaggcgccatcaagtatctgctggaacacggcgccgatccaaacgctcggaacaagcagggcaagacgcccttgtgtcttgcagtcacattaggggatctgggaggatacggccaactggaaatcgctcgaattctgttggaaggtggagctgatcctacattccagcgtactgtggctggag

SEQ ID NO: 15919 - DNA, 852 bp, Emericella nidulans
acgttgtgtaagcactcaggctcggaagcttgtcgacgaattcagattaagttatgattttttcaatcgaaaaatcgttgatatattggtggacataataggaagggttgccattaataaaagtgcaaagaatagactatgcacttaatttttgcgtaaagggctgactatgacttgtttttaagcgtgaggtgaaaacggttcttaagctcgatgtggaaagatgaaacagtagttaagatcagagtgtcaagtcgaagggaggcaagccacaagaagaaacaatttctagggttgaccgcacacgatatattggctttaattgctcttggaagcctcgctggtatcgtaagatgcgcaagcggagcacgcaatgaatgttggagctataaatcactcgtgcgagctaaactccgtttgtttggaatgattgcttggggcatagtcgctcttaatccaacgaatccctgcgcctttttcagtccgccccccggtcattcataacccttttttaatagcccttcctccacgccaaccgcgagtcgtctctcactaaacccaccctatactccatctcgcccccttagatccacccccctcctccccttccaagccttcccccccccctttccccctcctaacatcctccccacttccttccggctcccaccctccctttcacatttggataccctcaaaacccacacctccagcaactccctctccaactacccccacatacctcgggacactatctcccccacacgtatcctccttccccacccgtctaccaactactctacgcgcctaacctctttctcccccggtcttcccacttcctcttttcatgcc

SEQ ID NO: 15920 - DNA, 5192 bp, Emericella nidulans
agaaggtgttagtatgaaggagaagagacaatggggaagaggagagagagggaatgtgaatgtaaagattataaagtaaatgaaaaaagcagagatatatctagaggaataagagggtgaaaaaggtggagatcatggcaagactctataagaacggggtgtgggagcaccaggaaggtgtgatcatgaaagaaaaaaaaaacgatgataaggggcaaggcctacaccaaaaaaacaaagagtggatggagggagagagcaccctagagggcctttaagagaagtacaaatgggatgtcttaagaaatcgaaatgtaaagagggtaacgaaatctgatttctggataaggggtgaacattaagtagaggataatggccatgacaattacggtggggagtgtattcacaatagaaaagtcggccgcaggccgccatagaacgacaaaaaatacaaacgcacagggggatccaaaagagcacccgcgtaaccgttacatcccggtcagggttgtgacgaccggcattgcctccaagcaacagatggctcgcaacgaaaggtattggtcataagggcaaaaaatgggaacacaagatgcgtcgcttgcccgtagcgatgataaacaatctcaaggaatgtatggcagtacggggcgttttgcttgaccttgcaagctaagacggagaacatgaagatctgtacagttgaaccggcggcgtctggacatcctcagtataaattatcagtagtctggagcagtatgcactcacactgctacaagtcagtatatggacattatcatcaggaaaagcgatcacctacccagaacggaccagagattccatactcataagcaactgtgctactttgcaacagagtcgctgcccatgtccatgcggacaccactccattagcgattaggccaggcttgacgctgcggctggccgtattgaactcctcgctagttttcgttgaatactgcgtgtatcggttctggtcatgtcagaaacgcccttacttgtgttttgttatagcatacttgtaggtatgacacacatgccataagcagtgcgaagaagaggccaatgccaacgacaacgccgtacccggcgccttgaggtaggacaggtgcgacagtagagctcatggcgaattgtcttttcacagtgcagagctcttccgatagactggaagtcgaaatcattatattgctgtctcccaagcggacctatggtcaaccggcagaagtttgttgacttatcgcggcgaccaggaactgatatcactcaatctaccttcccgatgaggtcaagtacctcaaactggaggcctgacggcaaagagcaaagaccctaatctagaagcgatgaagggtatctgatagggcagctgagtggaaggacggcggagccgtccagtcgacgccgtgactgttatcacacgcggcccaccgtcgatccctcgatgcttggttggttaggtattgatagccttagacctgctatcctgcatcagtataagagtcgggacgatctatctgcaaaatgaaatactgagacatattccaagtttctagataataccccaaactgataagcccatctccaactgaccctagctgggacaaaaggttgtagattctcggcaattgcattctgtttaattcgtatctcatccatcctctccaactcgaagatcacatctccattgaactggtgctgcaagcggccagattcggcggtgcggtcgttatcccgccctgcttctccaatttcccctcatttcccttatcgtagtctccactagaaatataatggaggcgtgatggctatggtcttgaagccagatagtccgtaggataattacagcaccatgtttagaaacgccattcgagcgcgagtctctctgctacccggccgcctacccgctgccctagcctgccggtggaactcgtctgtgccagctgcgcaaaatctcaggatcaacggcgaccgtctatggtatgtaggcaactgtagattagtcaagtcatggctgacgccgcgcaggaatgatattcacttcactgcccaatacagcgctccatccccgggaggggtgacccgattatgtgcagacgagaatgacaagtttgcccgggactggttccgagaccaagtgctgcagctgggtgcagagtacaaggtcaatgcgacgggcagtcaattcgcagtattcggcggcgaggactataccgtgccaccgattgccatggggagccatcttgacacagtagccacaggcgggaagttcgatgggccactcggggtatgttactaagtgaatactgtacggcatgacaaggctgaacgtctgaacaggttctatcgggtctggaagttatacgcagcttcaaagaacagggcatcaagacacgtgcccccctcgccctgattaactggaccaatgaagaaggtgcacgcttcttccccccactgggctcgtcgaccgtttacgcagggcagacgggtgtagagcaggcgcatgcgtccctctccaatgatggttctggcatcaccatgggagacgggttaaggaagatcggctacgtcggcgacggtccaaacacattcgaggaatttcccatttcggcccattttgaagtccacgttgagcaggcaacggacttggaaaaggccggcaagccggtcggctgggttgaagggtggcatgggataacctactatgaggtgaccttttccggcgaggacggccatgccaatacctacccaatgtacggacggcgcgatgcattgactggcgcagcaaaactcattacgcagctcgaaacactggcatatacaaaaaacggatataccacggtaaccaacatccaaagcgggccttggggtgcatgcaacatccagtcgaagacgaaggttgtcttctgtcttatgcacagagaaggagaaggactggaggacatgggcgctgatattgtccggtcaatcaagggcattgcctctctacatggactggagtataagttaagtcgaccagtccatcttttgccgggcaacttctggccagaggccgttgactgtgttcgtcgagcttgcggtgataggggtatcggatcacgcacgggcactggccacgattcgactatgacccggctcaaatgtccaacagcgatgatcttcgtgcgaggaaaggatggaatcagccattgcgcgaaagaatggagtgacaaggaggattgtgaagaaggcgctctggtcctcggcaaggcagtgctcaactttgatgcatatctagaggaccacgcagcaaagctataagattagcaccgtaaatcaaaaatggagccacagcctgagcatccgtgggacagtttggccaattagagatagaagcgttgccctgcatgcgctgccgtaatcatgctttttctccttgcttgcgggattgactcgattttacccttcgactccctcaatccctctgggctctgcacacttttcaagagtcagagacctgatggaaggacacgtatttgagactcaccctagagcaaaccctggcgcggtagttcaaggggcgcagtaccggttcactctcctgagcgagcgcctcatccgctttgagtgggcagaagatggccaattcgaggacagggcgtcgaccttcgcaatcgatcgcgaatttcctgtgcctagatttcgaatcgtggatggtgacgagcttgaaattatcacggagtatttccacgtgagctacacgaaacagaaattcagcccggagagtctcgtctttcacttcagcggcaagagtgtcaagtatggcacgccctggcggtttggtacccctacggaattcaaccttggaggcaccgctaggacactggatggggttgacggtcgttgcgatatggggcagggcgtgctttcgaaagcgggatatgctgtgcttgacgactcgaaaagtatgctgtttgacggcaagggcttcgttgcgcccagacaggctggagatagggctgactggtacctcttctgctatggtcgcgactataaggctgcgatcaaagcattctatgccgtgtctgggaagcagcctgtcgtaccacgcttcgtcctcggcaattggtggagtcgatactatgcgtaccaccaggacgaatatgtcgcactggtggacaagttcctggagcatagcattccattgtccgttgctgtcctcgatatggactggcattacgtatcggatgagcgagtgccccatgccggatggactggctatacctggaacgagaagcttttccccaatccgaagaaatttagacgcgatattcatcaaaggcagcttcgtatcacgatgaatgatcatccgcatggtgggatccacgcacacgaagctgcatacgaacggatgggacttttttctcgaccatgatacagtggacagaaacccttttttgttcgaccctgcaagcccaaagttcatggaggcgtacttaagtattctgcaccacaggctagaattggatgcgtgcgatttttggtggattgactggcagcaggggccgtactccaagattcccggcttcgatcctctatggttattgaaccactttcagtatcttgaaagtaaacattatggcagcgtgcctcttatattctcccggtatggtggcccgggaagtcatcggtatcctatcggcttctctggcgacaccgtcgtaacctgggagtctctcgctttccagccagaattcaccgcgacggcttctaacattggttatgggtggtggagtcacgatatcggtggccacatccgtggtatccgagatgatgagcttcttatccggtggacccagctgggtgttttctctccggtcatgcgactgcactcgaccagttcgcgctggaactccaaggaaccatggctctacggggacgagtgtttcagagtcatggccaggtttttgagattcaggcatcgcctcgtgccgtacctttacacgcagaatgtgtcaggatctttcaatgacgagccattggtgcagcccatgtactggtcctggccaaacgaacccaatgcgtatgaagtgccgaaccaatacttcctcggttccgagttactagtcgcacctattgtacaaccgcgagataagcggaccaacctggcgtccgtcaaggcgtggctcccgctg

SEQ ID NO: 15921 - DNA, 810 bp, Emericella nidulans
  unsure (1)..(810): unsure at all n locations
ccgctgatgaccattgcttctgcacagacgggcatctccaaccctgtcgaaacgctcccctgcgtttgtatttactggtgagtttgtatggtgcagaaactggagggcaaggagggagacggctgcgcttgcttgcactgcggacagctcgcaaagacatgccggccttggaatgacgaagtccttgaggaaaatccaaaacggcggcaaggcatcctgcagaatgttggctctgcctattgtcacgacggccctttagaacaggaacaggctcacgagcaagatagatctgctgatgctggatgataccacagtcttatctagctgcattagaaacacatactctaacgctgtggatatccacctattccatgtatatataccaaatagcaacatcacctataccgcctggccttatggaacatcatgaacacaatcattacaacaggatggttcctttccaccacgatagttttgagctcatactaccacactatgcgcaagtggtaactctacctggactttaggcccacatgaaacagggcattcacccacactagtgcttcttttttacaccaccaacaccgggcctaaaaggaaaccaaacctttttctctttaaaaaaaaattgtacaggggggcccccccccccaccaactttttttcctngatatttgtttgtggggcgcccctttctcaaaaaaaatatgggcaaaccctttgtcctcaaccacgttatcaattttttttggcccccccaaatctaaaattcttcctcggaatcaacgacccgggtaacccaggcaggaa

SEQ ID NO: 15922 - DNA, 526 bp, Emericella nidulans
ccacccttaggtggaagaggggaccctcgaatgtggaacagctgcatgggtctgaccgtacctgccgtgttgactgacatggcacggcccgttgcgacggaccctgtcccttgtccgtggggctagtgtacctaccaaacgcatatacagggtatagcgattttccaactactgatgcaggctcgactaactcatgtaacagttcataaactggcattttgctacgcagatgggactctggagttgaaaggcaccgcatcgggtgaggaatacaggatactgagactggggggtctgacagagcggagacttagggtcctgctgacgcatccatggactggattaccgcgagattcaagatggtcttatggactgctggctgaatctgactctcatgcacaacccgtgacctacgcgagacactgagcgctactactagagagagatcccttgacatgcgaactgctgattgctgctcatctacggcaaatgatgcctctgacttggattgatgcactgaaccggc

SEQ ID NO: 15923 - DNA, 1159 bp, Emericella nidulans
  unsure (1)..(1159): unsure at all n locations
aggcctgctatactctcgcgacaggcagcctcgaaagaaaaccccattcctttctctctaggtcgtatatactcccatctgcacccgtatctgcacccaagctcctgccttccaccttaggataaaccgtgaaagcccgcggcgcggatgctgcaatcccctctaccgtgatataaccgtgccatccttagacctcgtatgctatatatcggatctgtaggagtaatgatcatcaggtcgtatacatagtgtacaacccccaggcaaatgggtgatctcttctctcacccaagactgtaatacttctccttctctttcaacgtaccttcctgccacatgatatatatctttgttccatcagtactataatctagaattcacgaactaacctatctaaatatatatcctcatatggtcgtacccacttatcaacgtgtctatcgatcaatttcctgcgtgctctcacgtctgtaactaaagcgtactttcacttactacatatctacatttcttagctatgatatcctacgtaatataatttacatgttatgctccctcactatcttttcacgtgtccacttcttgtcgtagatctaactcagatcgctaacgtgccatcctaacattcgagattttatactctattactatcgttctatgtcttattatcgaatacatcagtattagtatcatatacgcctctcttccccaacgatgtctaccaccatatgctgctctaccatgttgtcctcagcagcctctcctcccatcctacatcattacgacacactcacactttatgtagctagtatatacagattccgagcatataactctttcaccttaactgttcattactactgctttcctctataatatctcagcttacctatcagtacgtactatactactatcctcgttactattcattaaaaccatctcgtctctacacaacatgttcaacatcctacacatcagattctaacgctcaacttgattcttcaagaacctctccatctctcttgcctattacttacacatattcatcatataacttcctcatcctatcatcactacatctctttacatccagcactcacctatcacacatctattcactcctctcatccatctacttattatcttagtatnntattaa

SEQ ID NO: 15924 - DNA, 365 bp, Emericella nidulans
tggaaagcccaaagagatgtgcgcagaaaacgccgccggaggcagtgcaaagagcggacgggaagacccgggaggaatattctccccgccggggacacactacggactgggctaaccgcacgataggggaccaccggggccggggagcaaaacggacggagaggacacgcggttgccgctcaggggagaaacgaacgtgcgtaccgcatcagccaagaccacagagagaacgtgctgcacatagaggaatccccgagagaagtcgagggacatgcggaggaacaggaggaggcatggcggcggccgaccgcaaagaactatgccgggccattgcaccctgaaaagacgaatgcacacggaagaca

SEQ ID NO: 15925 - DNA, 569 bp, Emericella nidulans
  unsure (1)..(569): unsure at all n locations
gcaaaacccgcatttgaaccggtttttcggcaatacgcgctatcttggtgtaggaaacactaacgcccgcatttatcgatgccatgcggaccgcgtcaagcgcatcgtgacggagtcgtctccatatctcttcctgacttgctctgaggacggggaagttcgccagtgggatctgcgtctgccttcctctgcgtaccccaaaccccgtggcggccttctgtacatgacgcagcgcgtaggagaagggcacgatgactcgaatgttcccccgccactgatctcgtacaagcggcacaggatcgatctgaacaccatatcatgctctccgagccagccgcattacattgctttgggcggggcccacctgcattgcttccttcatgacagacgtatgttaggtcgagacatgaccgctgaacggngtgatcccggtacatcccctggcataggaagcggctatgatgaggaggctatgggccaggcgacgcggtgtgtcagaaggtttgcgcccgacggcagacacggacccaggtaccgttttaaagccacatcacagcggggaaaaacag

SEQ ID NO: 15926 - DNA, 586 bp, Emericella nidulans
cccttctcccattctcccccattacttttcactcccctcgtatacgttattcctgttttctttttctcatggcaagcacttcggtctcagcctttttgttgatcagttcctggctgatgtacgttccatccttctccttttccgcggcctcgggtgcaacatgcagactcgtaaactccctaatcgccttctgcagtcgtcgatggctctcgttgtagtaaggggacttgaagccaggacgcagccagagcggctcggcgtagggaactgggctgagaccgtccggcgtgggatcaatgacttcgggcttctcatccgcgatcgttccaatgcaaagcgagtcacggtacttcgtcaagacttcatgccgatggaggttgtagaagttcggttgttcgtttattgtcctctattttggacaaggcttctctttccgcgggttgtgcgttaagattgtttgataggtcacttacctgtttgcgattatctccctacgtattttttgtgatgggtttgcttcttgactcaccttttcttcctcttatattatcttctttttctttttaatttctttcattaatacttt

SEQ ID NO: 15927 - DNA, 817 bp, Emericella nidulans
gaccggttggcacatatccacctggtatatggaatgcatcttgcccctacgcacatgggcgaggttatttgacgactgccaacctacgtccaccacgcggtatcctctgttacttacgataatgtacagtaggctggcctatatagccagggacctatgggagtgctgcagtaagtaagcgcaaacacggaatgagctgcctggtgcctatacttttgatctgtgtctctatatagcgtgtcgtacaagcttacattagggaaggcagccacgacatcacctgttactttggtttgatttgttcgcatagcgtctggggttcttctcattggtttcattcactttatttgaatcgagttctcaacattcttatttgccaccaaacacttatgaactgacggttgacgccgatctggttaaaaaaaatttgttttaactactttgttctctttctagggtgacatacccgggaccgggaggttttttgatggtagctaccgaggaggctgtatgaaagtagactggatcactattacggtaatatctctttcaagtcctggtgcttttatttacattttgtggagtggtggcgccatacccccggtagtgaacagatgcacctgcaagccggggggagcgtcaatgtaaagaaaagccccaatggctgtcccggccttcattttttgctggcctattgcccaggaattggggcctgagaaagctgggcttgcaatttacctaattagcggaggtggttactaataggtttccagccgccctggaccccgcctactaaaaaataggtcctagcagttga

SEQ ID NO: 15928 - DNA, 226 bp, Emericella nidulans
ctgaggggccagtccgcgctggaacgtcacggcttgctgatcatggagggcctcctttttttttacgccttctgcggcgaacaagccgactcggcaaacgaggtatacttcgcagtgcaccgaactctgcgtatcagacaaaaccatgctacccattcttactacatacgcaaatgagtatagcaactccgattcagggtgaatagtgacgcgatcgacctcacag

SEQ ID NO: 15929 - DNA, 971 bp, Emericella nidulans
  unsure (1)..(971): unsure at all n locations
tagccatgtatctcccatcagcgtctgacaatggattcagatgagcnctcgtcaggattcccaatctcggcagcttggctggcctggaaacctggtagcctgccaggcttggcctgtgtaaatgaagggtcattgccggctcgccctcccatcaccttcctctctccacatcttccctcatcgtctccccctcacctccgataattcccctccatatcccaacccttacctttcacaaacctctacattcatcccccactataccctcatttccccctgcgtcaaccactttactctcccaaccccacaaccgcctcaaccctttcctctctctcccacccaccccactccccttaatggaccacccccccctctccctgtaccacctccttaagaggcaccaccctagttctccacccttatccccactctatcatctctctgtaccaccctctaccattctccatcaagctctctccaacaatgccccaccccgccttaccctatccacaagctttttccttgctctcacgccacaatctcccttcttctactactccccctccccaccccctacaacacccaacatcactcccctcctctcccctctcttttttacccccctcccctcctatccatattccaccctcccccacactaccatcttccaatctattctctcctgagtgctcaccagcctcattaccctctttctcctatactcctcctcccacacctctatatacatctcactcatccctcacacacttctctcccatacttattccctaatcccacctcaccttctttattaccttctcctacaaccactatctcccatctaccacctccattatcaccaccataccctcatcttcacctctaacctcatctctctaccactcacaccactcttctctccccctcttttctcgacatctcaatcaactcccccactagtcacttcctcc

SEQ ID NO: 15930 - DNA, 3543 bp, Emericella nidulans
  unsure (1)..(3543): unsure at all n locations
gaaacctcagctctttgtgcaaatgtaattcatctggtccagtacaagtgacacaaactcctgctgacaataggacctatcatccgggacatacatggcaatcatggcgagataggtatttcaagaggcttcggggccgtccacgtccaggcggaatgtcaaaatcaaatgacgctacggctgtccgtgaagaagaccgcaaaagccagcctatccctgcgcctacatctacagctcatccagtagtaccggctactcagagagacgagacttcagtgcaaccacgagagagaaagcggaaacgaagtccagaacccacagtgtctggttcccgcacatctaacggcacgttgagcacacagcaaagaacaacaaatcggcatccaacaccatcagctccgcaagttgccacaatatctccagcatcagcgagccagcagagaaagttacctcaacttgatacgctccccagccccaaaagagtaaagaccacaacaactcgaatttcagggataatcctacctcaagaaaatggacccactgaagaagccatggacaaagaccctgctgatgaatctaacacaagtattgacagcgtttttctggagctaccattcctcccgtcaagcccggtggctgaggaggcacctgagcaagacattgattcgtggatagatagccgggttcgcgcgggaaagggcagcgaggatcaagttatcgaggctttgcaatgtaccagcatggacccggatttggcggagaaggtgctggagtctttgtctgcggggaagggcataccgaccaacatgcgtggagtatggacggcacaagatgatagagatctggaggcgcaaaacacacgtgatattcagcgggtcatagagaagcatggcgacttgttgaattaccggtgggattatctaaacatgacaagagccgcagctagataggaaaggatgggcccaggataaaaagcgctggatgacccaagaaatgtgattgtagaaagccaatggtatatggaaagaacataacaagcacacaattgagacatattgatgacacccatatgatagacgtggttagttatcccttaatcctgaagatgtgcgtccgaggcaatttcaacgccagtaagatatgcccacacaccttaaccgaagaccctattatacattcccaataataataaaagcgagattgatgaactccagacacacgccgacggtgcatattgtgtagactgtaactggacagacagataatagatggaattgaggctcagacccagcacctcatgaagttggcataaagacagatcaggaaaatgtatatttacgcatccgagtctttaaaaactctggttggtgttaggtttgcgggaattccgagggtatgtatgaaacttacaagtgttgttcgtaaaatttgagcattttgcgtgggcatttgtcataacatgtttcgatggacacctttgacttcttgccgttattccagtgaagatacgcaaccagtccgccatcctcgcgcacaatagtatcgactgtcttgacttcgttctcccaatttttggacttcggcacccaatcgggcgctacgctttcctttatcttcgccttttcctcactagtgtttgtttcttcagtatctgctgctcgtgaccttctgcgtcgcttcggttctggcttatttgccgacgctgcttttggtggccgtcccacagacttgcgctttttggaaggcttctcgggtcgtcctcctataagcttgaagtactcctccagaagttcttgtgcaccttcgctgcgagagtgtcagtgagaatttagaagacagtcacagttacaagaaccttacaggttctcctctggttcgagagtctcgtctctaggatcatcgtagccttgccacttcacttggaacaacaatgtgcccttctcgcaacgtcagccagcatcgtcggatgtgaagacagagcagaatatgcgcgcacatcacccttgaatctgtgtcctaatatcttctcgacgacgtagctagtctggtcagcattgctgttgcaagctagaaacatcccactcacacgtnctcatcctcatcctcatcctcatcctcatctgcatgattagcatcgtcgaccccattccttttatcctcggcttcctcgtaagggatagattcttcagtggattcgtcgtctgacaaaacggccacggatgctatgtttgcgcgattagctcagtaaaggtcgcagaaaaagccaattgatagacccacgcggcattgttcgcgacgaagtgaagctgaacagacgcgaaaacagtttgacggtgcttaagtaatgctcacagtaaagctaagcagctgaaatgaattgcgcaaatccaagcgtcaaaacgaacgggcgaacgtcgtggtggagattatattcctcagaattcaagttatggcgagtcgcgcaaagtaacgcgtaggggagatgcgctaatcctaatcaggagagctgctcactagcccgaactgggaatctccagaatttctgaacagagccccgtgagtgcggaacaacattgaggttctattgtcgctgccacctcgcttctcaggtcgttctggaggattttgttttctccattcatctcgcctctttctcgattttccttgtaaacctgataataactcctcaccaggaggcagaccgtcaaaatggcgatgcgtaagtttccgatgcccctcattctaccttgtactaactttctgtctatatagagcttgatctgtctcaaggtttgaatagataatccaacacgagccttcgatataccgatactgactccgtaatagcttctgtgatgaaggatgagcagggccgaccatttattatcgttcgagagtacgccgccgacatcaaacccttttactttccgaacaattcaactgatatacacctccgaatagccagggaaagaagaagagacagcatggcacggatgccgtcaaatcacacattgtcgcagcgaagactgttgctagcatcgtgaaaacgtctctggtaaggaccgtcaccgctggtcaacggcaatttctaagtggccatctagggtccccgcggtcttgataaaatcttgatttcccctgacggcgatattactgttacgaacgatggtgctactatcctgtcccaggttcgttcagcacatatccattccgcttacgagttctaatcggcgtgctatagatggaaatcacgaacaacgtcgccaaactcctcgtcgaactctccaagtcccaggatgaagaaattggtgatggaacaaccggtgttgtcgtcctggccgcggcaatgttggaacaggcttccgacctcattgacaagggcatccaccctatccgaattgcggacggttacgatgcagcctgcgaaatcgccgtggcgcaacttgacaaaatcagcgacgaaatcaaattcacaaaaaaagacactgcgaacctgctcaaggtcgcaaagacgagcttaggtagcaagatgtaaggcgctcc

SEQ ID NO: 15931 - DNA, 654 bp, Emericella nidulans
tcgagaggcttgtcgacgaattcagattgaaagtatacttatccatgaacgctatgttccacaacgatgaagtagaagaattaacagattacgtttcatttttaaacgaagtaaatgtagatgcaattgttttcggagatccagcggtattaatggctgttcgtgaagtagcaccaaatatgcagttgcactggaatacagaaacgacagcaacaaactggttcacttgtaattactggggacaaagaggatcaaagcgtgctgtattagctcgtgagcttagcttagatgaaattgttgatttaaaagaaaatgctgaagtggaactggaagtacaaattcacggtatgacttgtatgtttcaatcgaagcgttcattagtaggaaactactttgagtatcaaggaccgaatcttgacattggaaaggaaaaatattgaagagaatatggttttatatgaaccagagccgttacataaagtttcaatttatggagatgaaatggaactcacatattgggcccgacgacatttggtcatcgatggattaaaggacttatcgatgcttgagtgttgcttaaaatcgaggtggactaaaaagtttgattcattattgagtaacgagaaatttggcaagcgttggttatgcgtagag

SEQ ID NO: 15932 - DNA, 1760 bp, Emericella nidulans
gaaaggtcgtctcataataagacgaagtccggagacgcaacggcataccgcattgtcggcttcacctccttctccaatgtgaactccgagccgcctatgcagcgcgataatatggaaagcttctggatggctgagacgctgaagtatttctatctgctcttttcggaccgcgacttcatctcgcttgaggagaacgtatttaataccgaggctcatccaatgcccagattcaagcctacaggggagttgagtacgggctgggtcaggagtgcgagggtgcctaagtctgtacctgtataagtttagtttcttttttttttcttctttcttgttttctatgtacgggtgtggccgctgccgtcgttttcgtagactggaatgtattttgggattgagattcgcttgcttccaaaatatgtcctagactggctgtataaacataaatttgaatgcctgaacggtgcaacagtcaggtttgacgtaaacataactcggcgcgtcaatatgtatatatgtcataagggatcaaggaacattcagtaaatccgctccaatgcagctgtgatcaactttttgtatcccttaacagcctcctccaactgcgcaaccgtaatcgattcatgatctccatgggcaacatgaatactccctggtccgtagagatatctcttcacatcattctcctcatagaccttcagattaggcacatcagtgccgtaattcacagtggtaatctcgaacccaggcacgtccgtatcgagatcctgaggcgcatacccaccaacaccaccattcggcccctctgcaaatttcacaacaacatgggggttgtcccccgttgcgttagcaacagccgcgagcacaatatccatcgcctcctctggagtccctgcagcaagacgaacagtgacatccgcgtccgctgccgcggggacaacgtttcccgctacaccggcttcgacccggccgatgttcaccgttgtgcggccgtatttctcgcttgaaggaagcccgcccttttcaacgggaatatcgccgagtttatcgatgaccgaaagcgcagggaggatagtgctcaaagcgctttcccccagccacgggtatcccgagtgcgaggacttgccagtgacgtgcacgtggaatgatagcatgcctttatgcccagagacaagggcaaggtctgttggttcgccgaaaatgatcgtcttgtagccatcaacgagggatgagggcgagtccggggatgggttgagggttgtgttaaaggagaaggcgcgcattcctgcgccaccgacctcctcatcaacaacgaacaggagagctaagggcgcagagggattctcagcgagcgtttcaagagctgcgacgacctgcgcagaacgctgccttttgcgtcgtcacaaccccggccactgatgacaatatctctttcattatcactgtattgtacagagtatgggatgaacgggggaacagtatcgatgtggcttgtcagaaggatggatggtttggatggagcagacgacgggtaagcgaagacgttgaaccgagaggtgcgcccttcgactggctgctttattacattgaaattgtgagattcgaggaaggacgctaggaattcgccaacagcggactcgttaccggaaacagaggggattgagacgaggtctcggtggagggagaggaagggtgaggcgtcaatgatggattttggtgagcggtctgcatgcgagaagagcggggattgttgctctgtggat

SEQ ID NO: 15933 - DNA, 898 bp, Emericella nidulans
cctcacgcccctgttctggtccagggctttggcttgttcttcgctggtcagtactaccgcctgggtatctgcgacatcatgggggggctgtcatgagctcaaaatctgcatcgcccatctctgtgaactgtggcagaggttcgactgtctaaccttcctactgtttcgaggcattaccgattaaaacttgcaaccaccgccattgctcaaggacatcgactagtttcctaaactactgcaaaccgccgtgcttccccaacgaaatcaaacccacctcactcatcctttacttctaaaatacggttctaccccacctcgtaaaaacccactactgcattctacgcacaaatagaattcatctagactagcccatccccatccctgcgcttttcatagaaaccccattatacatggtgagcacgcttcatccccatacccaaaacgaaaccaataaattacactccacataatttctttgccagggctcgggttaccccccaaacccatatttattcccttaacttcccaaaggttttcaaacctgtgccccgtcacccttggaaacagaccctccaaaaggacctcatttggccgcgcctacgggttccgccataaacgaaatcccctagttgaaaaaactccaaatggaaaaacaaatcccctggcttaatgaatggcccaaaaaaaatttccaaaacacttttagaaccccccaccaccaaatcaaatcaaatgacaccccgatgggcaaaacaccttataattcccaccccatcttttggccgaactctttaaacaaccacagttttaaacaatcaaattcttcccccacaaaatatctttcatatttataaccccaacccccccaaaccttttactggcccaaacattttaaacc

SEQ ID NO: 15934 - DNA, 728 bp, Emericella nidulans
cgtgctaagaagcttgtcacgaattcagatcggaattttttaaactagctggttctgatattttatggggtgtattttccgctttcggcatcgcacttattaaaactattctcgttcaatggggagggctataaatgttacaaggacaccgaacgtgggtatttgaaaacaaaccagccattatttcaacaggggttgtcggtggaccatttgaagcaaaggggaacatcccagaagacttcgatatccttcatgaagatttatggctcggacaagattcctatgaaaaagcacataaaattttattcgaagaggcttgtagtcgcgctactgaaaaagcagaacttcggaaagatgatattcagttcgtactcgcaggagatttaattaatcaaattacccctacaagctttgcttggcgcacactgggcactccttatcttggattattccgggcttggtctacctctatgggaggtttagcacttggggcaagtttcgttaatgcaaaagggccaaatatttataaactggaggttaaaggcataaaacaggtgtgaaaaacagttcccgtccctaccaatacgggacaaaaccgcttctgacaggggccgtaacccggcgggcccgttattagcgaactggcaacgccaaagaactttgaaaatggccgtggtgtatggataacgacctaaatggaggcatggtcagtcgtgaaaatgaacctt

SEQ ID NO: 15935 - DNA, 564 bp, Emericella nidulans
  unsure (1)..(564): unsure at all n locations
gacaccacacatagcttttactacgctgcacctgactgaattggagctgtacaaaactgcatcatgatggacaacctgtaccttaccccctggcacactaagacactgaagtcactacaactgccggtctacaggcggcaacgaaagccatacgatgcgactactgtatggagtccagggctatcataaccatgatggccgataggccaatcagtacgcaaaggactctattactgtattactgcagtcgcagcctccgtacgcaggaaaagatcatgaggagcaggactcacatgtatccgtatgaagatcgattattagttcatgtgacttgcatatcgaatgagcaatctaccgatctgctgggacaaagccacccgcggcgaggaacagaccaacaaacaccgactgtcaggacatacgcagaagtctctaatcgcagctcctgcaagactattataaagactacatncctcgttgcagacactacagctgtaggcccactcacatgcagcgagaagttcttctttctaaacacgactgaatggtatcagtacatataca

SEQ ID NO: 15936 - DNA, 1039 bp, Emericella nidulans
aagcctggcgcattcgccccgcacttcacgtttttgggcacgtccatgctgcatatggccgggagcctgtttactgggatgaggctcagaaagcgtgggagcgaatctgcagttctcgtcggcctcgtgcgcggaaatcgcgcttcagctcgctttttgggcttctgcgcgatttgcttgacgttcccggctgggttgacgccgcccaagtgcttgcgtacggcgtactaggggtgatatgggccaaagtctggggcggcgagaaccgggggggatggatggtcattgcatccatctattaatcgtgtttctcggcgcttcgctgatttgcctccaagctactctttttgctcctttttgatatactaatttttcactctcttaatttacccattcattttcgtatctacctatcttctgcatacctttttttctcatctagtgtacttcctactaccgacctatctttccctttattatctataaatacctctttcatttctctaattaccactgctacgccattctttcctttccatctctacacgcaccactttagactctctcttccgatttatctcatctctttcacattttatctgttagtcattctccctctctatctcttcgcccatcattccttatcccaatcaatctcctacctctcccctgttcccttttactcgtctatcctactcatctactttttctatttatcccctttctactttactcacatctctataacaaatctcccttctttgacatttcttttccatcccctattatttcaccttgctctcatatcattcctcgtcttactacttctcctcttcatattgttctactaataacctatctcataataaagactatcatctccactacttttctctaccactagctatattataccctttcaagtcgtttcctttctgaatctgcttgtttctacttttactctcctcatctccttcttttatcttcctcgttctcccgcttccttcaatttgcccgtgttatcacatttttcttttac

SEQ ID NO: 15937 - DNA, 621 bp, Emericella nidulans
tactgcttcgtgatctgtaccgggagcaggttctgctgcgcattggtgctgtgagccacgttacccagtttcaagcgctctgtattccatggaggaacagtaggaggggtagacctttgggcatgaataaaggggacggaccctgtccttgtagcgcgtacccttgatcatgaacaaatagcgtacccgcgctagtaacattacgcctgtgacaaacgaaactgctgtctctcaaggatggagtatgttaacctgggagaacatatgctgctctttcaggggggggagcccggtctgaataaagcgcaaagctcatactaccctagttgaaagacgctgaatcaaccggcgccagtggtcagactgacgctgcctatgtgatccgtctggaagacctggacgagacatgcgctatgtcaccggatgatgaacttgacaacatactactgactgtcgatggacatattaagagcgatgattatcgtctctgggaggagtacatgttgtaggggactactacacgcagcttgtgcggctctacatacactatgggtcctgaaggatgctcacgtcacttaatctgcattctgagatgataatgacttgctgattgtattcgac

SEQ ID NO: 15938 - DNA, 558 bp, Emericella nidulans
cctagtcattttcagactaaccttacaaactgatacgcatgagaactatttcatcgtgctgcctcctcagcacctagattgggcactggccgctaataacccaaaggtgaaggctattacccaggcagggaccattcttgcaacaaagtacattatcacataatgagcactcatgagcagatactgtgcagggaataaacatatcacggactcagaccaaagctacactgtgcctccgatccgaaccagtctataccctcttactctactattatatccatgcccacacacaagacacgattgctataacaattttggcacaaaaacatgccaggacattgtcaccaactcaatttacacaggagaatgcgcattgaggtcccgatggtggatacacatgggcatcctgaactgaacatgtcatgttcagagcctacaccctcctaataattgcatgatacggcgccagacataccaaggatccatctgcgactcaaactggtgccattatccaaccttgcgaatacttgattgcacgcccacatacatgtggtccaa

SEQ ID NO: 15939 - DNA, 793 bp, Emericella nidulans
  unsure (1)..(793): unsure at all n locations
ctcganaagcttgtcgactaattcagataagagcggtttttattgtacaataaaaataactgtgcacctaatagtccgaaaataccacctgatgcacctgcgtgaatatattcaagcggcataataatataagaagaaatatttccagaaattccagagagaaaaaatagaataaaaaaagaaaagtgtccgagttgcttttcgatagaagaaccaagagcaaacaaaaaaatactattagaaagaaaatgttgtaagtctacgtgtacgagaagagaagttatgacacgccaccattctcctttagcgatatattcattagaggctgccagtggtaagagaaaaaagtcgcctaatatcatcatgactaaatgaataagaagtaaggtaagaatagtcggttgtaaagaaatatgagtggatcttattagcatacgggtactttcaccccttttgcatcagaaagattctttggtatttctatcaatatgaaagaagaaagttaaatagaagatggggatttcgaaatgattatagggattggtatcggtattattgaattaaatcgttttgaaaaatgctagatggaaagcttaaattatggaacgtttttaaccgaaaatgaacgtattgtgctaggagctgaaggagtcccctacgagtttgagctgaagtttgcacaaagagctttcaaagtgggggctggattgaaaaagggttttgatttgaagaaaggagaagggggcattttgtcagccaggtttgcatttatcgcctgaggatgcgtgtagtg

SEQ ID NO: 15940 - DNA, 905 bp, Emericella nidulans
  unsure (1)..(905): unsure at all n locations
aaaaaaaaaaagataaaaagaacaagtaacaaaaaaagcaatataaaaataacgagtacaataataaaaaaaaaatcacagaaataaaataaataaaattcaataaataaaagaagaaaaccctagaagcacnaaaaaattttaagaaaaccacaaaaaaaaaaaaaacaccaaaaacaacaaaaacagagaaaagattttttttacaaaaagaagaaaaacaaaacccgcaaaaaaggaagataaaacaaaaaaagacaaaccaaacaaaaaaacaaagaaaaaaacaataagagaaagaaaaaaaaaataaaaacaaaccgcaaagaagacaccacaccaaaaaaaaaacaaaaaaacattgaacaaccaaaaaaaacaagagaccaaaccctaaacaaaataaaaaaaaacaaaaccaagacaaaaaaagcacaaaaaaaaaaagacacaaaaaacacaataataaagtataacaacaataaaaaaaagagaactacagaacgaataagcacccataaacaaaaagaacagaagaaaacacataaaataaaaacaatactaaacaagaaaaaaagatatgaggaaaaaaacataaaaaaagagtaaaaaaaaagagaaaataaataaaacagagaaaaaaataagagaataaagagaccaaaaaaaaaaaagcaaaaaaaaaaaaacaaacaaaaatacacaaaaaaacgagaaaggaaaaaaacaagaacaaaacaaaaaacaaaaatctacactaagaaaaataacagagaagataacaaacgaaacgaaaaaagagaaaataaaacaccataacaaagtaaaaacaacaaaaaaaacagaaaccaaataaaaaaaagataacaaaaaaaaaaaatagaaaaaagaggaacaaaaaaaaa

SEQ ID NO: 15941 - DNA, 183 bp, Emericella nidulans
acgggttcgtcggaggacaaacacatacactgataggtgaagcagggtgtgaatattctgtcaggcacaacgttttgtcgagccacctctcataccatacccttgacagagcagacgctcgacagccaacacatgacacaccatgacccagacactgacgcggatgcacacggccacgactgc

SEQ ID NO: 15942 - DNA, 440 bp, Emericella nidulans
cgcgcggttctatggcgagtccgctgggggaagatgagggcccgggcctgcttcgcggggggaacgggtttcagaggggccgcatggatgcgagctgggaacaaccgatcggcacgcacgatgttgacctgcgggtgacctacagttatataccagatgacaacaggctacaatcagctctggcatataaggtataatagcgccagttacagacaccctgcacactgctgaaggagggactgctgtgtgaaaccagaggtggagggcgggtgcactacttacgtaaggactaggacggcaagggcggcagaacagatcagcggcgtcctgtacaaagtcacaagctaggcccagaccaagctcgccatttttaagagcatcgggatggcaggacgctcatgtgaggaaactgtgatggaatgctatcacgacacgtaaaa

SEQ ID NO: 15943 - DNA, 702 bp, Emericella nidulans
ctgagaagcttgttcgcgaattcagatgcaatagctgattgctctccgctgacggttatgctatatagcgtggcaggacgatctattgcccaaatatcccgcgatacagctgtttgtttatcagaaatagaaaacattgttgctattaaagatgccgagcgcgatgtgtctaacaatgacagaaaccatggaaaaaacagcggacgactttgcggaatacagcggagacgacggattaacgttaccaggtatggctgatggagcgaaaggtatcgctccggttgactgttggggaattagacacccaatgcatgaaatgattactgcatttcaaataggagaatttaaaaaggcccaataattacatcaagtacttgtaagaggtcctgactcagtatttatggcgcccagatccaacttcagtgaaaacaacgtttcacatggggtggattagatgcaggtactgtacgtttaccccgttttcccttaacagcagaagaaagagctaccggtcaaacttgcagcatttatcgctcgtataataatgacttacggtgaactggcattttttatttagaaaactttttccgtttccaccttaggggttttttagaaattaccgcttttgtttaggcaaagaaaaaacgcccctttaccggcaaaaagtacatttttggataacctaaactccgggttgttaag

SEQ ID NO: 15944 - DNA, 3064 bp, Emericella nidulans
  unsure (1)..(3064): unsure at all n locations
caccatcaagtttaataaagttcaggccgtgctatactggttagagagtttcttgaacagattgaatgaacatactcagcggccttgacctcgtcagcgtcctcctgcgtggtgtccctccatgagaaaatttccttctgacggaattcggcgttgtcgtcgaagcccaacttggcgtccatggccaaaacctggtggtctgaagtctcagacagagggttgatttcaatctgagtagcatcggtctccataaaggccttgtaaaggttctgaatggtcttcttggcgtcatcaacgcattgctcggagaaaccgagctcattggcaatcttggtggcgatggcatccgtcacgccgacattgatatcaataggagtcgtgataatggcatcggggttttccttggcgacagcctcgatgtccataccaccctgcgacgaagcaacgatgacaggaccttgagtcttgcggtccatgaggacagcaaggtagaattcgcgacgagcgaacttgcgctcgacaatgaaaacggcgttgcaaagacgaccgccggcgccagtctgcttggtgatgagcttgtgtccaatcatttgaccagcaaacatcttggcctcggtgggactgaatagacacaaaccaagttagtcaagcagaaaagctggagttaggagctcagactcacgagtagatcacgcgcacacctcccttgaggccgttatcaaagtgacccttgccacgaccaccggcaaggacctgagccttgataaccatgtcatcgttacctgcgagacgcgcatcttagtacagattaccagatgggggaaggacagatatataccgagtgacttggcgaccttctcagcctcctctgccgaccgagcgacttcacccttgggcacacccacaccatactgaatgaagatcagttgagtatctaaagcgcgctcgactgtgcacgtactgatttcagcaggttggcggaaaggtattcatggatggagaggtttctttgctgctgagcaatgcgcgaagatgagccctacagaatgccagcaagcatgtcaatagattgtgtcattaggccagggagagtaaaggatcataccgtggcagctctgagcgccgcaactggccggctgcggagaactgtgaacatgacggaagaagtaaacgcgtaaaacaagagaggagaggcttgttgaaattaggggagggggagtgggaaagagagaaaagaatggtcttcgattatcaaatttggccgaggtttgggaaaaacagcttgtctctagcggacgcgcttggagatgatcctgtctttttcgatgactaaaaaggttgctacagtccaccgtagcccgacgcggaatatatcgcggaacgtcagctaatattgctagtattgggataaaacaacttccagcttccagatgacaaagagccgtgggaaactcaagagtgcttgggtttacttctaattcaatgtagtcaatcttcgtgaacacaaatggtgtattcaaggacatgccggcaaccgccaaaagtcaaccccgaggatgttcgtctaggtaaataacggcaaatactttatacggagtggcctcggatctgttcgaccgttttctaggtgctttattcgctaggagctgaaagtttataagcacttaatagatcaaagaagcccagcggagcccttatccacagatgcgaggctagaaacgtggtcagtcctggtaattatggattgtttctcaatgtcttatatcgtgaaatacactttcagaacataaatataccagaactagagtcaagctacgccagagaagaggaagtcatatgcggcagatggcaatgtttatcccagagagctcttgacttaaccagtttaccactagagtctgacgaaatatcctaatcgtgcagatcagttaaaagctcttggctgtgctcagttcagagcgcaatgtgttttgttgtgtaaatagttcgaaatcaccaaactgtacgaaaagtgagctggatgccatgtgcagccaaacctggtgagtattgtctaattacacgacaattgtatcccaaccctcggggctaagctaagcgtgacccggggtcatctagaaatagattgatgtctgctcattagtccaaggacacagcgttagtataggcggaggtataggaagcaccatgaccggcttcatattttacttttctgtgatgataggatttatggagccttcatgaaaatctcttaaatgaggcggttaggaatggttctgtacagactacaagagtgagtttgaaaccgttcgtgtatttgagcttggactctgtaatctatacagagtagagacccaggaagaaggtaagattagtgcttcgagcgggtggctatcattcccactccagttagtataggatattgttaactgaccacgccaatgtaccatcttccagtgtccgctttctaaactatgtacaattctaaaaatctattgttcatatacaattgacaggtatgtatcctgacagcataacagcatcgagccgagggaagctccaagcggggctcaagcatcgtccgcattgcgatgaagttgtttcaacctcttttctgtcttcatgaactctcgtataccaacaggaatatctgcaaaaagatcatcaccagaccctggcaacgaccagttcgtctcactgccgcccccatcgtcatccatgctcgtactagccgccacatcaaccggtgtctttggtatggcggtcgggactaccttgggcgactttgatgtgccgcccttggcctttgcctgtgctagtaatgcagcccattcttccatttcatcttcggtaatcatcccacacacagtgtacacagccgctcatacagcagttatctggttcttcgggtctcggcggtatgggcacgccattgacagtcttccagcagaattcgacccccgatatagcgtgaggatcgcccngccccactaaccattccaaagacaatgccatccgttctcggccaatggcgagttgttctttgggaaccgcgtttaagttt

SEQ ID NO: 15945 - DNA, 2164 bp, Emericella nidulans
cgacgcctgagatcgcttggggggatgcgttcttctcatggaggagctcagttatcatgcagggtatcaaggctcgatatgcgttgagacaggctagtagtgcgcgggcggcagagtacggtcagaagacggtgccttttgctctgaaggcgtgggagcgggtgcagagggtacagaacgggctgcgccagaagggcaaattgtagtgcgctccttcaatctcgaacattcgacctcgccgtccactgtccgccaggatccttacccaacttagatttacatacaaagaaaccttgtggagtgcccagaccacctaggctctggagagcgattgcacggcacactagtggtgcagccacggatggggtggtttgcgaacgcagctcaagccatgggcataagcccggcaccacatccatggaagcgacggtctacgagctgggagggtgcacggtgtcttcatttttccattttgtatatataactcggagtagtctagcatacatctcagcgttcgactcagacctcgtcatatgatatgagcaccccatcgtaaggcgttccaagttcatgtcgagtcttaccactcatctctcgctcactccttacctaccccgcccttcacctgccgaaggtaggactccatattcgaacggaacgcgatggatctcttctttgtttgtaagccagccgctgccatctggctcagcactactgtccaatgtccaccctgcagcggggttcagacaccgaacttccgaagcgatgcatgccgtcgactcgagtctaggaaagtttagatactggaggaatctgccgtactaattctacgtcggcttacagaggctagtttgcatgcagtagaagagaccaaagaacaaggatggaggagtgggggatacgggtacgcccgactcccgagcgatctcggatcaaaccgtcattgggggtcaatgacgagtgaggtgaggtgaggttgtggtgacgggcggcgccggagacaagggctgcctgccttgccttacctaccctgtctggaggatatcatggcgagtgtgagtgtgatgatagctgcagccatcaaatatcgatcagtgatcctaagctggactgggcttgaactggactgggcttcgtatgagaagcgccaagaggggaacaaccgggccagtgaggcgtaaccagcgcatcttgcactactgtaactgtatatgggtctgcgagttgtcagcaagcatgggattgacatgggtgagtcgtgaggcgcggcgggttctagcaattaccgttgaacgaggctacgaccgaaacagaactaattgggtgcggctcattcggtgctttttttgccgttctttcttttctttttcgttttctttctttttctttttctttctttttttttttttattttctttttcctaattttcgttccatagcttgtgttgcgttgcgttgcgtcgtgttgcgcagacgattgctgatccgcccgtcttgacccgccttttgagtatactccggaagtaatataccttctgactgacagggagcctctgtgtatcggccaatgagttggacgataatcgaaacacttacaggcccgtctagcttagagactttagagaccgccagaaggagggtaccgatatatccacgcacagaatgccgcctcctaactgctaactgcatggttcggcttggggaagatcggttggaattgcgatgcaggagtgatgtgaattgctgacatttggagcacccgacaacgaggaccagcccagcagcccaagtgagacaatgttagcgttgaacgagcaatgaccgacgtgatgcgatgacaatcaaatgcatgatttgtctgagactgaggcactgcggacgggctcgttaatcggaggagctagcgacgtagctagggtggtttttcacggctccagacggaccagttccagaaggcagggaaaaatgtgctttggctggtacacgtgctgcttgtggttagttctggctcgaaggaggcgctagaaacaactcgtttccctgtcagacaagacggctcagcttgatcctcgtagtcagcggcatttttgtgacgtttacgttccggtgacttttttgattgtgtgcttgttgcgcttgttgttcttgttgtgcttgtgcttgt

SEQ ID NO: 15946 - DNA, 499 bp, Emericella nidulans
cggagcggtttatgacgtatccttatctcaatggagcggccgtggccgtgggactgcagacggatggaactctcacagcacctagctcagctaacagctgcatgcgggagcacctgataggagcgctagaaagactgcatcgttggcggattattagctgtgtaccggatcagcacgttaggctacgctgatacgcgccatccctatagacgggggcgcccagactcatctccctaaactattcacagacttggcggcatccctctttacgcagggcgctgcgtgaacccttgagcttggcactgcatccattatctacactatctttgaggagtatgtgcatagagctatattagccgccgaggccggacagatcttccctgggatcaacagaggcgtgacctctggtggactaatagtctgcattggcatcaactgaatcgatactagggtagcttgctggactggagatctattcatgacaattaaaggctgctga

SEQ ID NO: 15947 - DNA, 3278 bp, Emericella nidulans
agaaggaatatcttgaacggcgggccaggagaaggctgaacggggagtctcaatggattcagttgaggaactgttgaaaggtttgtcttccattctgtgttccatattacttcagagtgttttttgtactaacatgtgaatagaccccgaaatcaccgtaattgaagcgcccctcaacgcgaacgtttggaaagttgaagtgaaagaaggcgacaaactagacaaagaccaggtggtcgtgatcctggaagcaatgaagctcgagattgcagtgcgggcggagtctgctgcggccggcgctgttgttgagaagatcctggcccagccaggcgattctattgaggctggaaagcctctgatgctggtccggaggggctaggcttaggacttgcaataccatgtccttggagattatgggatgtatcattattacgaatttttttttttttggctagattagttggtttataataaccttcctgctgtagactgtacgtgcagtgatgcaggcagtagtcgaattaccaccagaaactaacgcttatgcccgccttcaatcccctcacataatgccaccatcccaccgggatataaagtgactctccttctctcaagatcgtttcaaaatactccgcctgctgaaatcccggccacatggcctcccactgctccgactccgccggggagagctcaatagcggcgacatcgacctgtgacgtattcgacatatcaatcatgcgtgctgtagaagtatcatcgccatctgagccaacacggcctgcaccgtttcctggagaggaatgactatttctcctttctttgtcagaggcaacagcttccatgccccgggggtgaatctgcgaagctggggtatgaggcgagtagagccgaatatacttggcaccagtgacttggacgagaatgttgtggtagggatcgtggtgcagaggggagattgtccaagatgggccgatccacgtgtttataattgggtcgctgggtggtgtaagaatgtcgtcggtgacaaagtcacccgttgcattgtcgtgtgcttcgtcagtgttcgacccgacggttgtcgcctttctcttccgttcctcttcctgttcctggcacttcttcaagtatactggtgtgcccggatctggtgctggcgggtcaatatagcagaagtctggaacggagatatccttgcgcaaggcggggatctgactgagaagatcatgctgcgctaaatacccggttttattggcgtcttcccgttcatcaaggtcctgaccctcgacttggtcgccaacctcagccgcgggtgaccgcagtctcgccgtcgatgtcgacggatttctccaaatgtatttatcaacaaactccttaaattccataatccgctgtccccatccctcgtccgtatacgacctcccaatctccacaggtaccagcctgcgtccaccgaatgtcctctcaagccaataatcgcgcgacgcccatgacctattcgacatggcgggccagtgctccaccgcatccgtaatcacaagcggtgtcttgacattctgtatatgctcttccatgtaatcgaagcttgggtttgaaacgcgcgtaaccgggtacttgaggctcggcgggggaacagcgtcgggtgggaacagtggaggggagagcttccgtcgcttagaagcacgggatggactgtcacctgattctgaactattcaaaacgttacccttgtctagagtacggggtcgtgtagcgttttgtaaagccgaaaggagagactcgatgaggtcttcgcggagaggcgcgccggtcatgatcaatgctttgtcgacaagatggatgactggtgaaagccagggagccgcggggtcgactcgcaagccatcaccggcgtagctgttaagaagctgaatcaactgagaaacaagtagctgtccggaagtctgagtgttgtctgtgtcctggtcaatgagcccgagatgattgcagatgctcaggctagctttgaggatactcgcgtcggtatagagtctccgccagcagggttggacgtccttgaaggggaaaacgcgtaacttcgcgtcagaaagccgaagggtttcgtctgtattgttcagaagattttcgtgaagggcttgatggtcattgtcgaagcactggaggatcgggtcgtcagaggctggacttgttattgcggagagcgtggcagtcagaactttatggagagccatctttctggcagggtgggggtgaatggagtaaaagagaaaggtgaaatctcaaggaggggagaaggtcaagaaagttataaagacgtgttttgccattttcgctgctggtggattaagcagttgtcagtcacatttgggattctgtcagagaagattaattatcaagttgtgccatacgccaaggcttgtagtcaaggcttgtacgcaggccaagcgcttgttctaatgcacaataatattgcgagaactacatactgtcgatagcacagttatttacaagtgagcaagggcgctgaccgtcttaggagagtttatttcacattgaatatacagaaagatgctccttaaagcctctacagaagctgcatcaccagcttgggaatctgctggacattctcagcattaatggcactcacagggattgcagatatcccttctttccaacctttagcatatcctgagggatgctcatgcttgcccctgctcgactccgcaaaggtattcctgaagcgctttgaagcgctctctcgttttggggagatcgcacttcgtagccacaacaaaccagggcttcgtatgattagcgggaaagtcaagctcgggaagtctgtccttgggttgagatattgccttatcactgtcgccttgtagttctggaaggctacgcattggcaagtcccaggtcggatcgtcgccgctctcattggaagttccgcccatgtcacgcagctcttcgtatttcccgagctcattccacagttcctgtagctcttggacgggatctccagcgctaagatcgactacgaaggccaggatccctgcccgctcaatgtgccgcagaaatcccaagcccaagccacgatccaaatgggcgcctttgatcaaacccgggatatcagcgatcgtgaaccgtttccgagggggcttgtttttgagttcaacgagtggccgccctttgtcgttgtcaatgaccacggtcccaatattgggctcgagcgtagtgaacgcccaattgccaatgcgagtccggctgttcgtcagtgaccgtag

SEQ ID NO: 15948 - DNA, 556 bp, Emericella nidulans
aatccacgcacttccgtatcatgaaaaaaattcgagcgagcagagaatcactcatgcttggatgtggcccatggttgggcaatggctgaaggagaatgacattgtcattaccgagactggaacggcaaattttggaatctgggacactcgcttcccatctggagttacagccatcagccaggtcctttggggcagtattggttattcggttggcgcctgtcagggtgctgctctagctgcaaaggaacagggcaatcgccgaacggtgttgtgggtgggcgacggcagcctgcaacttactctgcaggaaatcagcaccatgatcaggaataatctcaacccaattatgtaagtttcgttgtcaagaactgtttattccaagagaagcgacttggagaaagcttctttatctttaacaaggggttttccctctagcgggtcattcacggagggatgaatggttcaaggactttcaaacctggatattaaagggctccctttgcgtttgtcgtccatggcctattcctgggttcatatttctgacttggacagcttc

SEQ ID NO: 15949 - DNA, 412 bp, Emericella nidulans
acgcccccatgagtgtctgcactgcgctgactgtgcttgatctgactcagctgttgtgaaccacctatcaagactctcatgggcgtgccaactagggagacgaacacgatactttcccagcctccgtgagaggacttgacgcatgaaggcagaactagggttctgcacgttggacacgattgaacgccctacacccatgcatgggagagccgcataaagagtctggcattgatacaagctcctacccatgggcaagccaaagcgcggtcccgagcatgatatagcacacgctctaaacctttgtaatgaagcctttgagcgccaactaaatcatgcagagcgcccacccgacccatagacgcttagagatggacacgaacgctggaggtaattggattgcaccccatctgct

SEQ ID NO: 15950 - DNA, 773 bp, Emericella nidulans
cttgtcgacgaattcagatgttcgtggatgtactgacgcgtctaaatgtatgtgatgttgggattagtccaggctcacggtcaacgccgattgctctactaatggaacaacacgaaggaatgaacacatatttacatgtagatgaaagatctgcaggattttttgcgctcggtatcgcaaaagcgaaaaaacgttcggttgcattattatgtacgtcaggaacggcagcagtgaactactatccagctgtatgtgaagctttccattcacgagtgccgcttatgggcttaacagcagatagaccgcatgaattaagagatgtcggggcaccacaagcgatgaatcaatttaatttattcggcacgtttgtgaagcaatttacagagatggcactttcccgaagcgaggtgaagcgaaggaccactacctcttgcatgacaacgcagcgcatgataacaaggtggttgtttaagcgcccaaggggccgtgcaaatttaatatttacacgtgggaacccgcttaacccggatttttattttaagggtatgggataaaggccccgggaatatacaaaattggttaaaaagggaacgggggtccccgtgaatatttaaatttttggtgggggcctttaaaattggaaaggggctattatttgtgggataatgcaattgtaaattccaccttgggacgcacctgtttaaaaacgggtcccacatttcggacccctttttatttccagggcaccccaaaaacggggtacgggggtaaaa

SEQ ID NO: 15951 - DNA, 2439 bp, Emericella nidulans
gccctttgcgtctttggcgccgagcagattgccaaccctagccgatgtcgcaacgccgacgccgaatgggatcgtgttgaggacctggtccgcggtcatgatgacgctctgtgcagcgagcgggatagttcccaatcttccggcggcgagcgcgacgatctcaaaggcccaccattccgtgccgacgtggacgacgcctaggatcgccaggcgggagaaggtgcccaagttggtgagtgcttctctgctccagccgccccagcattcagagccgcggacgagtatcgcgtagagtacgagcagcgcaaaggaaagccagtatgagatcccaagggcgagcggggcccccaggaggtcgaggccgagcttgtagcagaaggtataggtaagggcggcattaagcggggatgtgagtaggaggacataggtgccaggccgcattattcctgatactggtcagcaagtcttcgacaacttcgataaaagaaagtggctggagttaccctgcgcctgtagatatttcttcatcagctcgaaatagacatatcccagccccccgggaatcagggcagtcaagaactgcgcgctatccttggagagatccgcatcctgtcctagaagcagaaacaccttctcggagaagatccagagaaccgccacgggaaggtagaacaatcccagaacgaagaaccccctctgcagcaggatccccagattccgtttgtcggacccggtaaaggacgagctggccagtgtatccagcgctgtcgtccctcccagcgcgatcatccacgccgtgatcatggcgaacattaaactgaatgcgctggtggccagatgctccggagagatacgcccaacgatcaggacggagactgtctgcaaagagttctggagagcgtaggcgaggatgacggggactgaggattttaggagtagcaggaactcggcgaggatcgctttcctgctgtcatggtcggttacctcggcgtctctggaggaaagagaatcgggaaacaggtcgtctgtcggcttgggcaggagagaggtgtattccgttggcgttgggctatcatactctggccctggtgcggtggtgtggatggaagagtacatcttgctatacgcgaaggtgaggtgagacgaagaaggggaaactgaaagagagcgtgggggtaaatagtattctctaccccaaggttactcattcgtcgtacatgcatgttttcataattccaagccggtcatccactcttcatacattggtacatcccaagaccttccgattagggcactaagaccacaagcccttggagtcccagagtggacccgcgccacgcagtgcagtagtctgcagtagatcgaccccgggacaaaagttactccaaaacccaaatatgtcatcatttatgcacgcttatcagtctgatgttatccttatcaactctcaatctattggccgaatcaggctagattccggttcggcgaggcgtgaatgtgcacatctgatatcgaggggtttccgaggatcactctcgtcgtgtttgtcatgaaggatcgagatcatttcgtggattgtggcgactgatatggccagagctgtgaagagcagctttgtcgaggaggccttgagcagggcaaggaggaggaggagggctgggagcattgtatatttccacagttttatatagggctgataagtgttgtagtggacattaatagggggctttacttgacttatagctgactatatagatctctttacaagggttctataccggtagggcaatccctttgatacgttatatttgtcaagatatgaataatcttatcgttaacggctatagttgcgtttcccgatgaacatgtaaaccccgtacgtatcccctgtacctataccttgtaccgatcctggaactgagccgtcccatcctgatccttgcatttaacggccgataagagatatccctctgcaacatcattcgatccctatgctctatctccatctggccatcttgatttcctcagcttgaaatcgtataatatggcgcatccatatatagtctgccgcgcaccgccaacttcgcctacagcaggtctaaggccatgcatccccccaaggaacccgcaatggctgatatgcatgaaaaacatcccggcatcgaagcagccccagcggagaataacgagcctctccctgtggagcaaaacggtatccgcgtccacccgcaaccgacatgcgaccctcttgacccattgaactggtcgtggttgcagaagcacactattctagcgattgtcatgctcaagtactttcccaactgtccccactgtcccggtacataccgtgttcagaaaactaaaaaaagccaagctgggtcaagccagactgacgcgcgagtaggtacttcctcttcacctaccaaacaacaacaacgg

SEQ ID NO: 15952 - DNA, 3662 bp, Emericella nidulans
ggaaattggccatcacttgctgacaggcataaccgatactaccgcatctaccctgatcaactgggtcgcggcgatgtgtctgcatcctgaagcacatagaaaagctcaggaaggtaggtctttttccgctactcataattacgccacagactgaccattcagaaatcgtctgtgttattgggtgaatcggctactccaccgacgcggatatggtgattcacaatgactccgatatgtgaatccaagagtgagtttaaacgtccagttgtcatttccacatattccctagatctgattcccactagggcccagcgttggatcactgcagttccactatcgctcccccgcgctgccaacgcacccgtacattggggaaagtacaccattcccgaagaaactggactgataatgaactcgcacgccctccacaacgaccctgacatttttccagaaccagacaagtttaaaccggagcgatgggagggaaagcccaatgccagctccaacggagatgcacagcttcttttcactttcggagccggtcgtcgagtctgtcccgggcagcaccttgcagaaaggagtttgtttcttgtcatctcgcattggctctgggggtttgacacactacaagcgacagatgatgataaaaataaaatccccattgacaaggacgatttgagaccgggattcatcgtgtgtctcaacccatttccagcgaagataacgcctcgcacggctcagcatcgcgaattgattgaaagaatttggaaggaagaattggaagtctcacttgacgagagtcagcagtggaaggcgactccggagggtattgcgagacttctggagagagttgggaagtgatcatggtatcaagcaaacaattgcgaccgctgcactgaacacggcaatacagcatgaacttaaggccattgagaggtgaatctagagctgactgaatgagcaactgctacccaatggcgtccccggatgaactgaaagtaatccgaacatcgcttcctttgatagtctgagacgtatttagaaactgttccaaatgagaaaagataagacatttgatggttagcaatggctgaacccaagtcaatatgcagagtttatatattccgagcagggatatcacactataagcttcaatcaggggaatccggtcataacctcataagttcagagcataaaatcgctacatctcactcccataactgacactggccacgaagataatccagtcgttgaatcgaatccgccagcaccaattccgcagcgcggtatatgcaatcgccaggacgggtggtagctgtccgtcgcacttcctgcaccttaactgcgagtttctttagtcgaagcaaaatgaaattcttaagaaaatactgtttggcgtcctcatccaattcagtattacccacgcgaagtgaaacgtggcagacgttcctccgcataccattaaggccatgaggtggtaaccggggagggcgaccccatgaactaaacgttcgtcggttgtaacgcatattctcggtatccaaaagagtcttctcctcgatgatccagtctaacatctggactatgcgctctgttatcgctgatatgagcaggatagacgaccgattgccaaggcatgcgttgcagcctaatacccgatcaagtaaagcacgcacatggccctcagcctgcattatcacgtctattgatggcctggtggactcggggagcgtctggcggaggaacaaaaggtgctgtaatagtgagctgtagcacttcgcaccgcagtcgccgcactcgctgcttgtatttgaggctccggtgcttagtacgggtagctgatcaattggaggaacatgcgatgagagcgcggcgataggcaagttgtggtccgttatgagaaacggaaaggcgccgaatggatcagagatggagggcgaattcatcgagaagccgttgggtgtggttggattgctatgagatcctggcaggagtccacctttaggagacaatgaggctgcgaggaaggattcaaaggatgtttggaagatatcgtcgacaggatctatgccagtacttgcggcgaagtcgccggttagcacccggggatcgactgccccggcgtcagtcatggcagagtcattggcatttagattcgttcgctgtatggtgttttcattgtgaatgtcatctccggaattgtttgattcaggtcctaagcgactggagggactgggcctcttgggaggacgtcccgaccgacgttgcgggctgtagacgcagggctgacgatgtcgaaggcatcggtggcaggacggcttgtgttgactgcatttgaccttggcctcctgacaggtatcgcaggacttgcgcaggcgttcccagttaccggctagctctgaacgcgtggaagattggttcaccgtgctcatgatgagaactgtccttgcttgaggaggattgcgtgttaatgatggaggggacagttcagttcagtttgcattgtttgcttggtttgccttgtttgcgactgaggctgaggagtggctcaagttcttactgcctgaagcaccggacatccagtgcgaggtcttcaaatgtatgaacagtataagcaaacaaactctggcttccttatctacttctctgaagtgcatgataatataggctaccaactcgagactttctgggctcggcgtaagattcgctgccatgcctcagatgcagattgagaccgctaggatcgggacccctgaacgcgatctgcaggattgatggtgataatgttgcattggagaatgaaaggcatggccagccgcgttggcttcgccgaactgcagaaggatcacataggctaacgagacaagctaacgccagtagatactttcaccagggccctcctactaatctttctggattcggctatgtcgcattgctgcgcgttgcccaaatgtgtcctcacaagggcttggcgtggcgaacagcggccgatacaactttgcatgacttagtggcttgcaaaggtacttggcttagtcggccgaggtccagaatcacataatcacaaacgaatcggcttcggtttgcttcaagttgcctaatctgagatagctagatgccagcgaacccggtacgcgaaagccagaaccgcccccggccctaaaaaaatggtgccaagtacaagggacacaaccatcgcaaagggcgatgccagattgaggggcgcgacacgatagtatgcgtacggaatataagctgcaatgagcacgaggacatcgtattgcagaaattcgtgcgctgcgcgagcgagtacagaggcgtccaagcgagtagtttcttcagccgagcgaggcagataaagccgtttgaggactaaggtgagagcccccaagcggccctttctgtgagacagccgcatgcgatgacctaaagctcccccaagagcgtaccaatgccccactgtggcagcgcagcggcaaccaaataagggctagcctgagaagttggctgagggatcatctgcgcgcccagcaccttctctccaacaatctgcagaagtgagaacactaccggagcaaatcggtataatgcaatagcacgttgtcggctctccgtgccagaccgaagaaaagctggccagagaaaggtgaacggtaaaaaag

SEQ ID NO: 15953 - DNA, 3117 bp, Emericella nidulans
gcgattcccccgtttctatcaacaacgcgggcgtcgccaagatggcacatttctccagaaacccagagcccaagatccgtcagccgttaaaggtcaacaccgtctcgcatttcctcatggtgcacgagttcctgccgagcatgattgagaagaaccatgggcatgttgtcccgatcccctctatggccagttttattggtctcggcgacatggtggagtacagctgcaccaaagcgagcgcactcgctttccacgaaggactgcgccaggaactgcgtctatggtacaaggcaccgaaagttcgaaccacgtgcgtcattatcccatccgtccatccgtgctaccttaaaagccgttatatgagctaaactgactgttcgcagcgtcgtacacccgctctgggttcgcacccccatgatcaaggtcttgaccgacgcgggctcggaattcaagcagccgattcttacaccagaaatggtgtccgaggcggtcgtgaagcaagttctcgcccaaagcagcggccagatcattttacctgggtactacacgccgctgagtatgctacgcgcgctgccgaattggttccaggagtttgcgcggggagtaggatccagggatttcatcaagcttagagagtggcaacagaagcagctcaagacgcagtagatgctgaaacgaatgcatatgtatattcatgttctatagttacgatgtaatgagctgcggttagattaccatgacataattagtcgcaactcaatattacttttttttagcgccgtctgctttaagccgctgcatggaagggtcgcaatgaccaacgattcatataattcgtccgcctcacctatcatagacacatatatcgagtaaaaagtatatacgccaagcacataagcacatgaccttcatccccaatctcagcccgactacatcttcttcaacagccccctaataaacgacttggccctcgccccctgctgcgtctctctcttatcccctatatatagattataaaccggcgctacatgaccttcacccttgccaacacaaaactccacatcccccttaaatcccttgcgcaacttctccacaaagtcctcaatgaccggtagaaggatctcgcgctcaccgccacaaaccagaatcttacgaacggggaacttggcaaaccattccactggcgcatccgataggtccgtatagaaatccttcggagcttcgccgacatacccgcttccccaaagcggtccgacggcgggagtgatcaaatcgccgcgagagtcaatgatgcggtcgccgagctcgggctgcaattgagtccacggtgcaatcatgacggctccagcgagggcggcgccgtcgagagggagagggtcaatggcggggtgggtatgcgaaagatgcgacaggactccgccgaccagattcccacccgctgagtcgccaccgagcatgacatggtccgcagagtggcgcttctcgacgaggatgtaccgaagagcctccacggcttgtcgtagctgggtgggataggtagccaccggggcgagagtgtacgtcaaggcgaacacagcgagcgattggccgttgcgttcacagtcggcgacaatgctggcgaagaacttgaaatagccgatgtttgcggggagagcaaaaccgccgcctgcctctgttaggacacccggaggattatgagcaagtaatcgagacgtaccgtgataccagaccaggatgttcttagccttgggatcaccaatccagtggcccatggcgccatgttccagctggacggtcaggggcttctgtcgcacagagcgaatgtagcggttgtacaccaagttgctggcggggagaacatatctgccgtcgtcaatacataagaacgaccgccctgcgacacaaaaccatcacatactgcatctgggccgccgacagacgcgccgtcagtttgcggaagaccgcgtagccaacgtgcagcagccagtgtgaaggatactcaggcgcgcggatggcgaccgtcaacagcgcccacacaaaggtcaccgcaacagacgccaacgcggggatgtagtcgagtttctgcgcgatcgtgagcatcctgcgtggcctgatctatgctttttttttcctccttttcctgattttcgcccctatttgtggctatatagacgttatgatcgcggcaagtacggtaccgagcaacctcgcaataatctcgcagcccctgcctaggaaggagcgacatgcgttcaacctcgctctcacaagtcgcaagcgttactccatccagagcacagttcgagtttcggacagcattccctccagagtgttgcctgagtccgtgagtctgtagtaggtgtttgtgttcctcggctcgcgacggtttcctaattgggccagcctcggctgggtcttctttctcgatccgcttccactgtgagatcgtcttgcctggctgcctatatacttcaagtccgtccccgattgaggatcgataaacatttctctcccccttccatcctccaaattgcctattgttgcaagtccagttacaagatgaccgactacgacgtggtgattgttggtgccggcatctccggcataaactcggcgtaccgactgcagacccaactaccacacctgcgctacaccatcctcgaggctcgcgacaatctcggtggtacttgggacctgttcaagtatcccggcatccgctcggattcagatctattcacctttggctttgcctggcatccgtgggatcaggacaacgcgatcgcagcgggtccagccattgtcaactacctgaagcgtacgaccgcgcagtatggcatcaatcgccacattcagtacggccaacggctgcgcggtgcggactggtcttcagccgaccatacctggtcgctgtcggtggaaaacaccgccgacgagcagatgaagaccctttccgcccgctttatcattttcggcactggttactacgattatcaaacccctctccagacagatatcccgggtctagatcagttcgccggccaggtcgtccaccctcagttctggcctgaggatctggattattctaataaacgcattgtcattattggcagtggtgca

SEQ ID NO: 15954 - DNA, 4255 bp, Emericella nidulans
aagaacgatagaagatgatgggacgtgcttcgggagatgaaatcgagcaaacggaacagggcgtcgacgtaccgaatagtcaggcagcggatccgaactcgacggggcgtacatcaaaaagaaaggcaggaaacgcacgaccagactagtaaagatgagacctgttgttcaagcaaaaccgacaacaaccagatcccaacctcagtctctatctcagtctgagcctcgattcgaacacaatcttgtctccgctggcggatccggtgacgttgatgagctaggaatagacgacaacgacctagtcgctgttgcggaaactcaagcagatggcccgccctctgggcgtgttggtatcccagctgcctttatagacgatgatttagactcgcttcgttcaatctctgaagcagagcaagattcagactcagatccggactacgatgcagactcgaaaccattaggtaggagcaagagtttctcggagaaaatgaaggaggctattggggctacagggcaaggcagcgatacgaaacaagcacaagaacggcagaaggtgaaggcaaaagagaagaaagagaaagagaacatcgatacgaacgctaagaagccgtccacaaggaagatcaatcctcaagcccacgcaaactataggtcgttgaaaatccgaaatagagggggtggtcgcaatttcggacggtttcgacggaggtgaatggaaggcacggctttgaattcctatgagatacgactgttgcatttattgccattatcgagataccatgtttccagcggtagattgtctatatatataccttttgtttacatatcatacatcgtgcaacgttgagtcagctccttcagtccggaatataacgatcccgcgcatattggaccctccttgcaaaggaatccggagctctaccataacgctctgagccacgggaatactggggcttgttaactcggccgcgagaattccgtgccgcgcctctatagatcggagtaggattccgactagaagttcgaggatcatgatgggcgcgctgagcaggcgagtctggatcatcatactggacgttgcgatcccagtcttctaaagaagtatacgggcttcttagccaagcctggagctcatgcaggaacaaagaagcattatcccggcccaagaaatctctcaggagttcctccgcctgccccgcgctacctttaatatccaccgttcggaggatagcaatgatatactccaggagaaactccgcattgttgccacggcggctttcgagccgctgccgtcccggtcgagctacagaggagggggaggatgaagcgtcgggatgaagaaactcaaacacccgcagctctcgccggatccatttgcgcgctcgcgatactaactcttcgtctctgttgaacatttccggtgtaaattcgcggtattgagaaaggcgattagagcccacacggagggagtagagccggtggcggtagacatgctgtctgcgaaggagggggtcgttgggcgtttgaagggaagggcttcgcgcgcgtcgcggccgacggggatttcgaggtagtcgaccatgtgggttgatatggcctgttgacgatacaccggttgaagggaaagtatcaggaagctgatagatttttggtccgtcaggatgcacaagctcgtacttgaccgaggatacttcactcttgcctggacccagcgatgttagtagtgaacgagtagaaacgaacagcagtaagttccgtacagagtggacagttgcgccgctgctccagccagttcaccaggcagagaaagtcaaagttcgcatggttgcaagatattgctacagcgggttcgctgatgggttccaggcagataacgcagggatccgacacaacttcccgctgttgctgctcctgcgttacctcttgcagggttcgctgcagaatctgctgttggatatcgccatcatcggtcatcagtgggcaaagcgagcacggcgtggttggtcttccaaagggcgcagctgggaaattcaagaagatcttccatgaggtggttgtgacagcattacctaggcactccacgcgccggtcacgttgcccgccgcagcaacaattttcaagctcccagagatattcgcactgaattcgctccggactacaccacgattagcagattctcgctcatttcaaacttcagactggacattaaaacgtgctcagcctttacaaaatccatcctacagcgctaccatgcccctcgagcaatgatcaagaggtctgccaagtcagttatcgctgaaagctacgcaatggcgcgcggagcaccaaatgggtctctcctggaccatcaatctttatcgcggactattacaggattgcggcgatggtctatcattaacagagagttgccgggtgaggcttctgctgcgctttccggtctcttcgcaggagtggtactgacttgtctttttgcaatcttctagctacgccacaggtgagggcgattcacgtttacgacttcgacaacacatgtaaggtggaccttgagcctctaggttctgagagttgccgggctaatcgttgcgtccagtattcttaagtccgcttccaaacccacagctatggaacggcccgagtatcggatttctacaagcctacgagagctttgcgaatggaggatggtggcacgacccgaatcttctgtctgctaccggtgacggcatagagaaggaagagcctcgcgcctggaagggttggtggaacgaacggattgtgcgagctacatatacataccgtggaacgtgaactgataacggacaggtgcaattagtggagctgagcatgaagcagaaagatgcgcttacggtgctcttgactggccggtctgaagccggattttcggacatcgtcaagcgcattatcgatagcaggcatctcgagtttgatatcatatgcctgaagcctgaggtcgggcccaacggccagcggtttccatcgactatggatttcaagcagaatttcctttcagatgttgttctcacctatacacaggccgacgagattcgtgtctacgaagatcgtccaaagcagtgagtttgaaactgacatgccgagcggtggtccccttctgaccggtcctagtgtcaagggatttcgggacttcttcgagacgatgaaccggaacttccagaccatgagcggccctgattcacgaaagccaattaacgcagaggttatccaggtagctgaagggtctgcgtacctgtcccccgtaattgaagctgccgaagtgcagcgaatgatcaactcgcataacgttgctacccgcaacccggcgctgaatgtgaccaaatcgccttatggtcggctaagcatcaagcgtaccacttacttcactggctatcttatcacaaatacggatccgaccgcctaatcagacagatcttgacccgttgctgccccacgggctttctgactcaaatgacctgaagtatatggctaacagtattttgatcactccacggccggcgagccggtcaattctggacaaagtcggtggtatcggcaaaaagctgagctgggttgttaccggaactggcgtctttgaaaacaaagtctgggccgcccggctgcagccagttcctagtacggaaaaataccacactgagaacagggttccatttgtggttttagcagtacgcaaaggagctcgtcctgtcgatgcttcaaagattcataattggcaccccgttcccagtgataaggctattggcattgagagtgtggtgggcgaaaaggtcgtcctgcgcattgaagaggacggtcaagccgatgaccagttcatgaacaggtctagcaagagacgtatccagcaggagcgggacgatgatattctctacccaggtcaaagtaaccctgaagggccacagggacgccagaaccacaatcaccgcggcaataaccgtcatgcgcacgatgatgggcatcgtcgtggaggataccgcggccgtggccgtggcgccggtccgcgcggccgaggaaattcccgcggaggtggccgtggtaggactcgcggtcgtgatacgggccatccggcgtactataagtcccttgatgaccagtctggacatgaagcaagtggtggcggttacgacgacagaccaggacagagtgtcatgaactattagcttctcaaattgtatttgaaatgtcatatttgtctctttgactttgctcggcggcgttgaacgtggcg

SEQ ID NO: 15955 - DNA, 411 bp, Emericella nidulans
catacctttatctcataacggcaaccctccgagttcctcggccgggcttaggactacacaagactattcaattttccattggataacccacaggcttaacccaagcccatttcttgcactgtaccaagcgtgctccgctgctcatgcataacaagctaacctacctgccttataagcccctctacactgccggtcaacaccattgcctagactagctcgcatgctagccttaattgtagctcagcagagagctgtgtttgaaagtgacccctcttgcattatagtgacttgatcctgcaagctgaaaaactggaacttggaatacctcttgagcaataaagcttgggcataacaatacataggaatgaccaaaagcctggaatcaacagtcccttttgaatacacatttct

SEQ ID NO: 15956 - DNA, 1047 bp, Emericella nidulans
gaaggtctgtacgacgccgtctacccagagcgcaacagaatcagtatccactcgccactgtatgctctcagggagtctaacgaagaggcccttaaggcaactccgcgccacatgatcgccgacgccatcggccggcgccggcctctcgatggggtggtttttctttcttctgtgttttccgtcctattgggtctgttgttctatcttcttgcttgctctgcctctttctttttttcgtgttccttctccgtctctctttggttctttctttttatttcttttctctgtcctatttctctttcttctttgtttttctgcgctgtttttgttcgttctttcttttggcttcttttttttttctgtcttgttttctttagttatccttttggtctttgccctttgttgttccttccttattacttctttttttttttatcttgtgtttttcttcgtttcttttcgtccttttattttttctattgtttctctcttctttctttgcgtcttttttttgtcccctctctattgcttcttttcgtttccgtttagtcttttactgtcttctttttctcttttctgtttcttctccttttcttttttttcttcctgtttcctcttatgtattcttcttgccctcttttgcctacatttttcttctcttttacttttatatcagtgttggctctcttgttgttttcctctttccttttgtcatgttgtctttcttctctcctctcccttagtcttttctttttccttctcccctccctcttgttttctttctcttctttctctccattctttctcttcccccttcttcttttcttcttttctcttgtctcttctcttatgtcttgtgtctgtctcttgctcctactcatcttagtcttctttttctttgtgctctttctttacttcttcgatctgtttttccctcttttatttttgtctccttctcttctctctcctttccctcacttttgtttcttgtgtctgctctcccttctcctctgcttcctttcttgttctcctcctatctgttttctc

SEQ ID NO: 15957 - DNA, 1138 bp, Emericella nidulans
  unsure (1)..(1138): unsure at all n locations
gcgccatcgtggacggctggctatttacaatcatcgggctcgtggcattcgcgagtagcggctttattgttgtcatgagggtttttgggccaaggtggaaggagggaatggatcggttgatgcaataatgtcgcatctgcaagaaagctaaacatatatgccgtgcggggtggatttacgtagttgaattgtagcatagactatacactgatgatccccgaaagcaatggtttccttattattatgtacagaatgtcacatttcttcaaatatggttatttctgaataaatctgcatcgttctatataatgctttctagataaacaaccatttgcttaagctttagaaggtatatactaatcataaaatctcttcaatttaatattcaactcgtatacccttaaacattttacaactttttcttaactttcattttcctttcaacactacactcacttaacctttattcgctcctttctttcttcttatcgaaataatacccttaatttcctttcttttttatacttttgatcactattcaaatttcatattctttcctttgcagatctctattaaattcgtcttctattttctcttaatactccttttcattaaatccctctttattctttttacctaatattctcccttttcttctcccgatttgcttatcaatattctaagtttctgaacattagattatcctaatttgtctacttactctagttaatctgttccccctctcctttctgttgcaaattctttattctcattcatattcttttttaattaattttacacacctctcctatttttccttctctttatctcttaaattcttcttacttccatttttctatattattatctcattacttttatttcgatttaattttactaattcgtatatatcctaattttacttgatcttacttcattttctcttctatatatacactctgttgctctaatactattcttcctttcatttatattcacatctttcactaatcttcacacaaattctattttatatcttctctcttctcattttacttatcgatctcatcctattattgtctctttctttcttttatctctntatccttatttacagtaagtaactaaataatataag

SEQ ID NO: 15958 - DNA, 645 bp, Emericella nidulans
agtcccctcgaactccccaccccagggttccaactatagaaccgcgccagcgtaatgcctgcatccagcgcaatactctcgcaattatcccctgaaacaaccaagtgaaacaccatgcagttccccaccatccccgcctgcgtgggagtcggcgtcgcaatcccattccctgtgctcgtggtcgtgctcgtcggatcgacgccgatcacactcacgcagatgtaatatccagcccagagtccactgcagtcgcttcctatttgcgtgttccacgtatagagctggtttacggagatgccgtggttcctagcgataactgcgcactcgtcgcctgtctgtacgttgtaaaaagcatcgcagttagagaccatacccggccgagtaggcgtggggtgttgagatcccgttcgttgctgtgctggttgtggtatggggggttggtggcctcaacgcccattattgaaacacaaaccttgtatcccagccattacccgttgcattcggttttaactccgggtattggtaaccagttggctcatgagatccatccgctggccaatgcagccacccgttttttttacaacctttgaacgcatacagtgcccccatcccggcaatggctgggggtttggatccatcgaaatg

SEQ ID NO: 15959 - DNA, 405 bp, Emericella nidulans
ctgcgcgacttcgccggctgacttcacgtgttgcacgcttgagacttcctgtcttgatagtgatccgggtaggaagacaccgattctctgtcgtttttgcagccgtactaaacgcgcgtgcactccacggtcctggttgacttgacgctttacacaacatgtaacactgaactgtactctgggcctggatgtatacaggagctatggctcatgagatcgaccaaagcagataaaacgaccgatcactatgtcaactgattggggacggaccctcggatgcatacagcggacggacgagaatgttactccatgacagtggcagacacctgcgataccggaagcccctcgttggaaagagcgctgcccacttgtactgacaccgaatgaggggccggattttggcgg

SEQ ID NO: 15960 - DNA, 371 bp, Emericella nidulans
tcctccagaacattctcgcttcggaatcgtcgcgcacggcctgtggcaggctacacatgtctcgcagataagctggctacgtagcattctcgctaaagcgctcctgactccacttgctagtagattgcattcagtgaggagctgctcatccacgctgctgctgggtgtatacagagctgttgaagcctctgcatattgaaaaccatttgcgagaccgagggctaggtatcttcttcacagaccgttgcttcgaagctgagggcgggggcactggaatgctggacttgtcactggaggctacagacggatccggaggcacctgttacctaagagcgttgacaacttcgactggtccaggcttaggtgccggc

SEQ ID NO: 15961 - DNA, 2137 bp, Emericella nidulans
ccatcaatcgatcaatcaaagccatcacctccacactaggctgaattccactgtagactgaacttgactatgcgggcaactacggagtacagccttaacctccctgaaaaatacgcccttactctgaagctatcgatatacagcgtctgcgcagtgtacacagtgtacgcagtgttaacattacaactgagccaaacaaatgttgtgaacgcctacgtccacgctcaaacgtgtggccagttcacagttccgatcccagtcccgtcccccgtctcagtcccagtctcaagggccaaggcagccaacccagctgctagccgagataagatgctagtgtgggatttgggtttcaagaggcccacccatcaagacactaaaggtggaaatatgacggtaccaaagacgtgcgggatggggggggaatgaaaattttacaaaccatgtgcgatatcggatcttcgggtttcctggtaactgtacctgcttctctgcggctggtggattggaggtcagaaacaatacaggcgtattttttatctactgagtctcgcagcacagtcacgatttagtactttaaaacgggtcaggctactctttggaaaagaaaaagaatacacattatcatgggatcttattcatgccccgctatatacaagcggctggaattgtatatgcaacactatacaaacaacgagcccgtcattacataagagacataacaatgggatcgttcagtagtcattataccccctgaacttcatgccaacgttgccaacgttcgtgcctcgccacagttgcttgctctaaacgatgtctgccgcttcatcgtatgccacgctacggtaatcgccgctactatacatccgtgacggggtctcatacatccggttatagttgacaatttcgccgcccagcatggcagagccaggttcccgtttgccaaagtatggcgccggatcgcaccaaaagtcccggcaattggtaacgatgccgcgtgagaaagggtttctcggtcgtgcggcacgggggccgtctcggagaccatcccgcgcggttgcgaagaacgtatcgaaaccgaggagggatgaccactgcttcaagcagccaccccggtgccgatgtccgccttgcgccaacgctggattcgggccttggccagaagctgagagaccagccgcgtcgatggacgtagtacctgctgtgacggcagaagcaaaagctcgtgtgctggaatggcctcgatccaacgagtgtcctcgcatgttttcgtacgtcgtctgattccgagacacctgaacgagctgaacgacgccgagcatagtcacccagaccagctgaatagctatccaaacatcaaggagaagcgtaaaggtgtctcgaagcacaaagctgcagatctggtcattcagaatattgcagattggctccgccggggcgtgcaatccattaatatcttacagccacgttagttcttgtctcaagcagggcctgctattactcacagttgaaagtcaaatgcaggaacaaaataataccaatttccaagcagagaatgtacagaacaaactgccgcaagttattgacacccacgcagttatcaatccaggggcagtgactgtgcgcacacgaatattagcgtcttactacggtgagttaggtaaggtcttactgatcatgctttgcaacgcaccgcgagcagcgcctgcaatgtttactacgcagaggccttcgaatcatgcagtatacgcagaaattctcctcatcaaacttccactcctcaaacagctggccaatcactgctcgctgttcattcctgctgccaagttttggcacatacccaggatctgcgaccatggaatagaagtagaagtacgtcgtcagggagaaaaataccacaaatcctaggttcaggaagggattcgtggaatatgtcgctaggaccgcatatcagtatagtttcaaggcgtcaacctgccagggaatccttacctggcaacacataaagcacatatctgacgaacacccaaaacaatgagccggcaaaaacaccagccagaaacggctaacaaacaatcagcaagttgtgacgagaccaggcaagctcactcttaccgttttctgtatgattctgaattct

SEQ ID NO: 15962 - DNA, 458 bp, Emericella nidulans
gtggcacggagaactgccgattccacttccggacgtatacttggctgtaacatattgttttgtttgaactctgcaattatcctgtgcgcttgggatgatgctctccgtaaattgctcgatggctcttgacacgtgtgcaaaagtgcggcggctgcatgcagactatagcggacgcattgttggtgagtagggctgcctatatgacgcctccttatttatgagtgcaaaaatcaatagatcaatgggcgagcggaatgagccgttagatattgccctacaagagcaagtgttcctggggcgatagctgatcgagtggctgactgagtcacactgtctctatacagagctcgagtaaacaagtccgaaatcgggaagcatgtacagactgcttgattcctaccgtttcattgtcagttaaatgcttgctgagcagcttatgcgtttcctctagattatcg

SEQ ID NO: 15963 - DNA, 1659 bp, Emericella nidulans
gctccttcgaggtcgcgccgatgctgttggcgaaaaggaggacatcgcgtttcagccaggaaacctccttggcgggaaattcgtgcctgcgcctggaccggacatattgcagtgtgttttcaggtagaatcttcgatcggtagagggtgaacagtggagaagatagttgggacaacatgttgtgacttaaatatgcggggagccgtcagccgaggcaaggttagtgtggggagccggccgagtcgccgagtaccgaacgtggctggaacagctgccgggtgattattgatcaatatgcaacggaacggtacactccagggctctgagtcctaaacttggaatgcaatttccatggccgaggatttgttcgtggacgaagttctcaacgaacagcgcactgctgactcagcggaccgccgtctgtgactgcataacttacagtcacgtgattatatatagcatgcatggtacaggctctgacgacagccgttgatagagttgtcaggcagatatcatgactagttgggctccagcagagactgcttttcggtttatactcctcatattggccttagtgtctgtactcaagccgagataccttaaggcgagtccgcttcatatatcctcctatttaaaccctggcaaactcacaatgttttttgttcggcttaaagaaaggtcctgaggaagatgtttattattttagcgttgcgtactgctcagtaagcgctaaagcatgcctagagccggtaacatctctgcctccgcaaaaccggagtaataattctagcattgcacggcagtaaatccttcaagtaaaggacagggcgagcagcagtaatttagggattacttaaagagatgaagagagtccagctccgatagtcaatgaagtcttcttcgggatcctcctgacacgccgttcaagtataattgcggtcagaaaatgcgtttaatgcgcaagatgtctaaacatgatacgacagacacaagacacctctgcgaagtgtagtagaatgtaagagaatatgtgacgagtatgtacacaaggttttactccttcggtacgacgcagagagagaagtcaactgttctactacctcccaactctataccgtatccacagtagggcaagccgcataaaagcagtaaactgtactgtatacagctcgatactgtgggggacggagacaaactaaccacaactcctctgcctgcgcagccagacatggtccgtattcgtactaatccttccatgtgcctaggactcaaacatgtttgccttcaccaggtcaatgacccccagagaacccaggaaatctgcagtataaaagtcagaccttgaactcaaccgactggcagggaagatgtcgcaaaacgcgccatagatctcaggaccagacgtttattacaataatcacctagatggtgaaagccctgaaggtcggcggtgtcttggatataacgacaaaagtgaataaacaagccttgggattctccgcccgaaaccgactccaattcgaattctgtttccccaactcgagcaaggatcaaatatcgtataagacgcaagactatgctaagtgcagatcccagcacaatacaatgtagatctcggcgtattggggcgttctccttacaggcacgatccggccccga

SEQ ID NO: 15964 - DNA, 1153 bp, Emericella nidulans
cgagcgctgtccggatcggggcagggttctgagcatcttcctgttcattagtgaggatgccttgtccgggagcaggcacggagcgaccaatcccgtctgaggccatgccagtgccagcgatgatgccgtaaataggcaaacccattgctaacgccacatccccgcgacaaagaagctggacaccgcagccttgggattccacgaccccaaagcgagaggccgctgtatgacgcaacatgtgcgtctactccttttaacacgcctgatcacctatggcaccttcctggccccggaatcgtgtaaaaactgctgtcttctcacgcctctcggcggaaaaactttgagactgggcctttaatatttgcttgacctggttactcacgaaggctaaccccaaaacccgtttttctattctttttattcattaatctaattatagcatcttgctatttttatccttttttcggcacccgaccctgattcaactcctgtgaattcgcatttgtaagtcttagattttccatattttctatatctttttttaattaccacctatctttatttgtgtctgtttaaaagaatttttttttacttcattattgatctatgatgtataactaactcatattctatatatatatctaccttataattgataatattttattatctattaaaatatttttgtgcttttgttgctatactgtgtatatatacatagtctaaggtatatccatattcttattaatatttcattaatcatatttacgtacttagtctctaaattcatctcttagcttccataaaatcctatttcgaatggagtgactactatttctaataaacatggtggaatattatactggttctgtcgtactttctctacctcactgggtaagacatgtatatcttttatagttatgaggagggtaactaatatgtgtttaacatatatattgttgtgctcattccatctgtgatatttttgatcttatacgcgggtatcgttgttagtatcatatatgaatactcgcatcatcttcttctgttgcgttatcgctggaggcgagatgtaatttatttcgatgcgtattctactggatatatttctttattctccttctttaatgaatttgtaattgtaaatttattc

SEQ ID NO: 15965 - DNA, 915 bp, Emericella nidulans
  unsure (1)..(915): unsure at all n locations
cggaggtttttagggctgaccgcaacctgaagataccggctcctaattccacctcaccacccacagattttgtggtcttattccccgcctatctcataaatctcgtcacttccgaaatcgtggaataaaggctcccagaaagagtccgagcgtcttctgtccaacgtcatgcagtcaatacagcacgaagtcatgcagcatgatggtgatgataccataggcccaggagccttgtggctttctaatgtacatgaaatgttgtctttcgtattcttggccgaagattgatacgaagcacataaaactgcttattaccagtatgaccgcctgttggcaatcgtgaaacacgactcggtgagctcagaatttaacatctatcacacttgtatgaagctgctcaagacaaagttgtacaagatgattgtgccatccattcttgagtctcagcctcttcccggctttgtgacaaatgagacgaatcgattcctcggacagcttttaccatctaacaacaatccatcctacgacatggacaatctccgtagtcttttgaacaatgcatacaangcgatgaaagctttgtatctagaggactaaatttaactagactgttactgagtttgacgcctcgacggtaacgcttttatgacttctatgagcgcaattacttcctgaaacaggcctcaatcactcaactactcgatctggatgtcaagaccagatgcaaaaggcttcaatggcatctaagagcttttgactgagtaaactgccgggacgacactttcctgaggccccagtttaaccccctttggttgtgtcggtgtttaaaatagttcaaaaaaaaaaaaattggcaaaaaagaaaaatgctttaaaggtctttttttgggccttcctcttttttatttattaatcc

SEQ ID NO: 15966 - DNA, 2237 bp, Emericella nidulans
tataaacgggcagctattggctgtcatggtttcttctattcattatgctgaacgcttttgagcgggggctgaggggtgggtttggatcattaatgaggcttcctagaaggcacgcagtcgaattactttgctatgctaagtgaaaatatgggcattcattgccccctctttgccataatttccgccatcttctctcccagatggccctccaacatgcgtcgatgcccctccgacacccccattcgcactttcatctgctctgccgctctgactatacattcctccaacgttgggctctgctcagccttatcatcccaccccttgtccctcgaactcttctccttgcgtaccagagtatccttccaaacgctctcaagttcctcgtcccaacccagatgtctggcgacctccctcaaccacgcatcacagtcccccaggagacagacatcgctttccctagtcccaatattgcccacgagctctcgatttaccagcacccttggtacatggctcggaagtcgtcgcgggatctccgagcatggcgcaaccttcaggctcgtcccgataaccagcaacagatcggcagtggagagcatctcctcctccctgctgtcaaaaccctcaggaagactctcgccgaacataactatagcaggtttgacgattccttcacaatttgcctgaacacagaaaggcacttcgcccgttaggattgccttcctcattcgatccgcgggataggaagatcgacatttgatgcagtgctgatcactccaatcaccatggagattcatgactctttccctactaacgcccgcatcgagctcgagaccgtcgatattctgggtaaacacgaacccgagcacgccctttttctctaaaagtgctagaaatgcatgtccaacacccggcttcgtattccatggatggcgcccccttgcgattgcatagaaaggttcaggcgtgtgcttgaaataagagatgtggaagagggcctccgggtagggcagttggaggggttcgagttttgcgtagagacccgtatctggtgtgcgaaagtcggcgagtccagaggaggtcgagagaccggcgcctactaatgcaacgatgcgagtgattttgccagtttggatatctttgcagatggagtcgagggtggtctggttctggcactgggttggggttgggtttttcttctggtgggctcgaagagaggacattttctgttggagaaaagagtgtgctgggcagaaatagttcgtacgcagggaagtcaacgtagacggggagacatgtaatttggatgctggttgattgttggtgtatatttgctgcggcctgtagtgtgggtggatactgctgttacacattttcaggagtgttgaagaggctgaaccacatcacctagacaacgaccatgtgacgcgttcaataggaacaatttggagtaactcagaagaggtatagacctaactcaattgttattttgacagccagaggataataacaagataaccgacacatcaattgcattcaaacactaagggcccgtaggcggccgattcctaatccaacgagtccggctcgtacccaatctgccgctgctgctgcaccaccccctggtgacgcgagttcatctccaatatattcttctgctgctcaaacagccccatctgcgcggcgtgtctctcccgatcaatcttcgcccgatcctcataccccgacgtcaggagtttctcccgccgctggatgaaactggcctcttcctccctcctcactttctcataattatacgcctcctcccgctgcgccttctccataatcgccaagttccgtcggtactcaatctccctggagttcgcgtcatcctttcgtttattcgtaagttcagtgacctggcgcatgtatgcaagttctgcgtcatagcgctgcgacgcaatagttgcctgacgggatgcggtttcgtgctcaattcgggctgtgtcggtggctagttctcgattgttctcaagggttaggttatgcctggctctgagagcggccagttcctggtcttgttcggcacggcgttgcaaaaggcgacgttggtggtcttcctgttcttcttgaatggtcaactggcgctggcgttgggagcgaatggcacgcatgatctcctcgggcgcgcaaccatatctgcgggctggtcgccttctacagcccagaagcgttcgaggcatgagaactcaaggaggaga

SEQ ID NO: 15967 - DNA, 623 bp, Emericella nidulans
aggctcagaagcttgtcgacgaattcagataattgctggtgttttttatgaagatacgatgatggctgctggctatttacttgatatagggcctggtgcaggtattcacggtggacaggttgtttcagcagggacgccggctgaagtgatgcaagatgataattcattaacagggaagtatttaagcggtaaagagtttattccagttccacttgaaagacgtaaaggtgatggacgtaaagtagagattgtcggcgcaaaagagactaacttaaagaatgcgaaaatgtcattcccgcttggtacgtttgtagcggtaacaggggtatctggttctggtaaaagtacgaagattaatgaagtactatataaatcgctagctcaaaagttatataaagcgaaagcgaatccaggtactcataaagagattgaagggtcttgaacatttagataaagtaattggtattggtcaatcaccaaacggtcgtacaccacgttctaatccaacgacctttccgggtgcattcgaagatattcgtgatgggtttgcccaaccaaagaagcgaaagtgcccgatataaaaatggacgttcaacttaacgtaaaggtggccgtttgaaacg

SEQ ID NO: 15968 - DNA, 213 bp, Emericella nidulans
gactacgacgtgtgttggctgatgttaatcaagagctgtacgcctgagcaatgttgttcttgctcgcataggtgaagttgggtgggacgcctgaaaacgacgtggcctactatagctcagatcgaagattatctgaacttgctaaccacaatcagagggtatctttttgcggatgcgtacatggacaccagtctgtattgatgagctacaagt

SEQ ID NO: 15969 - DNA, 4743 bp, Emericella nidulans
  unsure (1)..(4743): unsure at all n locations
ggtgtcttcacagggtcacgcccggtcagaagagatacgtaggcagggatctgttagaaagtgtcgaagacgagcggccagttgtcgtgtttgatgagtacgcgtggtactattacaatttctctctctttgtaaatagacgtacgcaagcgatttacttagtgattatcaagtatcactttctctgtctagtgtcccctacttgaaaacagacccggcgaaccgccaccccccagggtggcatatgcaccgtatacccctccttcccagctctaatgtttctcgagaccggcacaatcttgatatcccccggcagattactcgcatccttaggaccagagatcatctccagcactcccctccccacgccgggaacccggatattgacggtctggtttgcggcgccgtagttggccaatttgacctgataggcagtctcgttggacgtggcgacccagtatagaggcccaaacccggctgttgagtgcaccttgtgcacggtcgagccttgattcgtgctgaacatgcggttgacgtagtagcttgttgacagggttaggctgttggggcgcgattcaaagccgaatagtgttggctgttcctcaccacgatcagcagggtgtatccctagataggctagggaggcagagggagtacacaccgaccactgtgtatatccgaaatgctgcagtaagggcgcataagcagccatcataacaacatcgctgttcctttccagcccaatcatatgcaccgcctctgcacaagacccttgcatgaagctccaaaacacgccgtcggggttgctgtcattgcgacacccgtactcacccaccaatactctgtccccgcggtcgtggttatcccagtaattgaacatggcgacgaggtcgtcagcagaccggtagtagtggtagtcgtgccagagtcccggcagagggatctctggtagacagttctcgtccatgttgtttgcgattaaggtgaggtttgggtacgacgcgtggatcgtgtcgtagatctggacgagacggtctgggtaggtgtcacaaccaccgctgtagtcgtcttcgttgccaatctcaatatactggatcggccaggggtctgggtggccgttgcgtgcccgcaaggcgccgaagggcgttgatgggggcccgaggaggtactgctcattagtattgggggttagataggctcggagagggtgagaaagaagagtaaggggaagggttacctcgagttcgtcctttatatcatcgagataaggctgcagctcctcgcctgagacgatccccccgtaagacttgccgtcccagacgctcagcacgggaaccatatccatgtcttcgcaccaccagagatactcgtccagaccgagggcgtcggtgtttgggtagtgccagtcgcctggccggtcagcttgtctggttctcacaggagaccaaggattgggtcatatactgactctctcgtcctggccggttgatcagtggccctatggtctcgttccacttccagcgtgagtcgatatcgagtccctcactgcatcattagcctgatccatacgttcttaacagactcgccgcgcacatattattgcctcccggaaagcgtaagaactttggcttgaggtctgcgattggccgcgcaatgtcgtttcgcagtccgttagtcctagtttagatcatatcagttatccctattttgcattcttcattcctagagaaatgaaccaacctgttcttatacgtcggcggaaacaactgcacgagcccaaaatgcaaaggatgtccctttgcagtggccgcatcaaacagcaactgccactcattctccgcgacatagctttcgtttgcctcgaaggtcgtctcatactgcgtccatttcccaccggtacttttcaccgagagattccgactcccgtacacagttccgctgtctgtccccgtaagcctcagtaaaacggtcccgctgtactcgcccttcatgtagaaactggtccagtacgtctgcttcagcacggtgatcccgttgtacccagtgtttgcgaacccgacgagcccctttgcgtccgcacgcacggagacagacagagacgactttatcgccgccgacaagggcatgctagggctttgtttgatttggacactcccaatggctttatagccagtcagccccgggtcgtcgccttgaaaaccgttgtttataaggaggtttccatggaggccgccgtcgcctgttggccgtcactatcatgccgagtccgggcagctaaaagaaaggtggcatatcagaagacaggtggatgggtgccaaacctgaatggtccatttcctggtgtccagcgtaagtcaaagctacgtctacagcctgcagagctctcacggggtgtaacaattgtcggtgggggtaggtacctcgaacatgatcccatgtagtagcggactcgacttattcccgccatcgcgcaagatagtcaggttgactgggacgagcggcggcggtccaggctgagcctgtttccagttccccaaccaggtgagactgggaaagcttgcagggatccgggttgcaacgttgatcttcatcctctaggctcgcgtctttggtgtctgccggccgagtgttgaccacgacatctcccaagaaggtctccatggttaaaaactaacttgagccgttcaattgtcaaaatacagaatgagacgctgacatcatacagtcacccgtcagggccggtgatggccgtgttcgctgcattgggaaggttggcgtgatgtcattcagaggcttggaagttatccccgggaacggcttaaggttgagtttgcggtggacccaagcaggtacagtggtttatctcattcatagccattcatagccaagcgagtacagctgctggctgtaatcgcgcattgattttttatgcattgatctatcttgtcggtcgcggaagcgggatgcagattttgggatactatgctcgagaaagagacaccagggggaggcccacagaaaatcaggatcatggtaggacagagagtactgatataagagggaatggcaagctctccggtgactggatggtgatagagatggccgccgtccatgagacaggaccagcagagtgaaggattcggcaagcaatcgctgctctcccaacattgccaaatttgcagaggatctattgataagattatattagtttatacattagacaagacttatcttatgtcccagtgttgctccaaacattgggcatctcgctcaagggaaggttagggggcagggggaggggaaaccacaaaggaagaatcgaactctatgctcgtcactgctgtcacagtccactgactgagaggagcagaaagccattcaagaggtgtgggtagaagctagcgcacaggactgctgaagtagggttatgcgttcctagtctgtcactggccactgcgcttggtcactcttcgagaccgagccgtggtttcgccctaaccaatatcgaaaacgaaactgtcagctgttggtttctgcctagtactttgtagtctttgagctgtgtgatagaagggaaggactttagcgccagttcaaaatgtaaggcaaattccttgtcctggattatgggatcaggattctgtaggggatgctgtctccattaagtctatggtgcgggcctgtttctaggctgtatactatggttctgaatgggattgtcgtctagtcggatacgcatggtctgggctcggcaggtataaggcgatagcgaggcgtcgtagagcaatctgtacagtgaccttcagtacaagcaccaacattacagaaaatcagctgcgaatgggtatcacatatgaaagttgccccctctctaagtattcaacgatatataatctggccatgtgcattatatccgtcctgatcgaccgaatcggaatcttatattctcaacaaaattcaccttaatgatcccagctacaaccctttgccgtctttgcaacgaccatcaagtgcaccctataacggtggatagcccaggccattattgtctaaggacctttacaataattggtgcgattatcaagcagctggcccgactggaccaagtactaaggatgtagtgacggaaaattttcaaagctgcaatcaatgcgagatctgtaccgtctgctcttatgccgatcttaagaattgcacttacctggcatctcatacctactattgctgtatacaagtgaatagatgagtcagtgaggtcgagggccgtttactggttaaggggttgtgttgttgaggcgaggaaccggacagattggctagcagagcaaagcagtcgtagcagtcgagaagctcaaaatggatgaacatgaacagatcccagcttttccacgtcccctaactcattctctttgcatcttttgcataggaggctaatgcgtgtagagtatactgcacgataacggctaaagtgtagactgcgactgcgggatgaaacggaacgatcatgatttacgtttgtctgacattcgcaacaccgggataattactgaagtattctttgaaactggtcctcatactttgagcaagacgaggtcactgagatgctgtcccgtgtagtatgttccaaggacatcatttgtggcacacanagcgttctcgacgggcgagaatcaccttctcgaataaagttcgtataggcctgggcccgatacatgactcgaggcgtggtcttgcctgacttga

SEQ ID NO: 15970 - DNA, 513 bp, Emericella nidulans
accccagactttatgcatgggctgacccttaccattgcgcagtaggctccaacatatgcaccagctacatgttttttatctggagaatagggcataggctggcgacaggagcggtctgtacaggggtctgccatatgtatactgacgcatgagatcgatagggccatggcctgtaagggctgctggggcttaaccggatgaccaaacttactgttcagcatcaaggtcacagggtgctacaaggtgggacaggagccggcatccgacatgcgtgccgcacatacgctgcctgctgttgaggcccatgatggacgataggatctgagatcagggcccacctgttcctgcgaacggtgtacgtaccctatgaagggcatcttgcagcatgcacaatgacatgagaaattactaggcagggatctagccctcaatccacggggctcagactagaataatatttctcaaggccacccggctttttctttacaagggccacaggtggacccgggacag

SEQ ID NO: 15971 - DNA, 2515 bp, Emericella nidulans
gcagccacaccactctaggttaccgtgattaaaaatggaatagctgacttagagttaaccacttcctagcttttcctttctacttccctatattttatcacaacaagatattcctgtatcaattagctacaaactagttaagaagaaacttatcttgtagcccatctagaataataatgatacctggagcttgcagagttacatggttttatctttgatgagagatttcagttagggtaaactagaggaagaaatatcattccagacaagtattatattccggctagctctaagttgcccatacaactttgggctagcatatctgaaagaggaatagccgactcggagacctcttgacattcaccacaagttatgtggtctccccaaaccgacccgtcgcggattttgggtagattcgtaacgggtaacccacgggtttgtgtcaaggtctaactgagaggatggacgtcttcggctgtgacacgtccggctttgattcagaatctgtcataagtacataaaaacggaaaatatgatcctcattataaagaatccgcggacgccagcctctaattcggcagctcctcctctgaagctaaggaattagcgtatagcttgctgaacgccgaatcgcgcgtcaacagtgtgtatggatcctcgcactctataacccgaccagaatccagcaccacatttttatcataatcaaggatcgtgtctaacttgtgtgcaactgcgataatagtgtggttggagaatttctcgcgaataatacgctgcattgtctcgtctgtcttgttgtcgacactgtaccacgatcattagtatgtgtggttgccaggacggggttcagggataagggctggaagatcttacttgctagtcgcttcgtccagaacaaggatcttgctggggtggaggatcgcgcgcacgaggcagaaaagctgtctttgcccgtgggacaggtgcagatcgtcgatattcgcgcttaaaccacccttctcttgtacaacggtcaggagttggacatttttaagggcatcccaaattgcacgatctgagcttgcgcctgtaggatctgcattctgtcggacggtgccctttatgaagacggcgtcctgtgaaacaccgttcaggcgggctcggatctcctgccgcgggatagttgagatatcgagtccgtcgataataacagtaccggcattgagttcaatcatgcggaagatgctcaacatcagagaagttttgccactattctccatcttagcccgtgattatcgaactggcctctcttatactgaacttaccttcctgtcctcccacagatgccaactttctctcccggcttgatttcaagagaaacgtccttcagtaccaagtccgaagatctagatgcagtcagcccgacaattcgtaaagtaccaccaattctacctacccgtatgaagcggagacgttgtggaattcaatcgcgccctggctgggccacaagggtggaacaggattgttctctgacggcagatcttccctttcgacattctcggtaaaatccttcactcgcacaacagagccgatatgggtttccatgtttgtccaaaattggaccagaagtttgacggtttgactgaaaaggatcacgttgaacaaggcgattccaacatagggggcattcattgagcccctcaaagctacaacaaggataatcaggataatggcgatgcccgcaacaacaagatccagggtgagggttagccatctctgcgcagaatacatggaatagaaagggcgctgggagtagtcaaggatgttcaagttcctctcttccattgcgtcttgccaaccgaaggctcgaagtgtgactagtccgctcaagcagtctgtaaaatgggacaggagcggcgctttggcttcgatttcgagcagtcggagctggcgggatgtgcgcagatacaccttttggatggcatacaatgatagcagcaccacaggaaatgcgattgccgcatacacagacgcaactccgactaggatcatttgtgcaagacacaagaaaagtgctacgtgctcaatgtcagtttgttaacctcgctttctgaaaggatcaaagggcgtgggtgtcgctcactggcaacgacgttgattgcagcgatgggaagctccatatctatgagctgcaaatcttggctgaatcggttgaggatggatccactgtctgtagtcgagaggaatcgcataggagcactattagagtgattagtacggtcaggtttgcctttacagatacaggaaacacgcaccttagaacagtatccaaaattgcttcatggaacctttccccggacttggggactgacgtcacaacgacctcccaacagcttatgatcaagcaaatcatagcaagaccgcctagcatgaagtagatcccgacgtagtgctgtgtatgctcaccaggttccgcggcatctgcagcaacccaccatttcaaccagatacctgcaagactgcgttagcaata

SEQ ID NO: 15972 - DNA, 116 bp, Emericella nidulans
gggaggacaccagcccataatggatggactcccagcactatcagtatggccccccagcacaggcaaaaggggtgtgtgaacagggcatggcggatgggccctggcccaccggacgc

SEQ ID NO: 15973 - DNA, 3990 bp, Emericella nidulans
ggatggttgtcatgacgtttatgatgcagttcatctttcaggtgagccctttgtgcctgagattacgaatctgtttcccaacggcaaaccgagagctcctttacccctcccggagtatgaagggatagtaaggaagatgaaagactaccggcatcgatatcttgactactggatatcaactgctgaacgaaccggcggtaggcacttcctgtgcaatgtcggagaaaaccactgatgatgttttcagaccgtcctgttgaggcacttctttcccctgtaacgccatacgcaggcgtccttcccgggaaattctacccttcaagtaagcggaagacaatgtcaagtgcaagaggccttggtggactgactgactgcatttaagcatataccacttccgtcaacgtattggattatgcttcagttgttattccggtgacgctagcagataaaacgatagacgttgtcagtcccaatttcacggccctcaacgaggtggatcagttgaatatggaatactgtgcggctcccgcttttgtgttcgagaatatgcttttgacacacgacagatgacccggaaaaataccacggtgcccctgctgctgtgcagcttattgggcgcagattggatgaagaaaggttgctgtcgttggccaagcttgttgtcgaagcgttaaacgactacagatccggatatggcgggtagagctgagctagcttcggcaagttgaacagccagaataacgcacacttataatgtaccgctaatagaatcccaaggctaatttctgtctgatgtctcctttctccgtgtggcgaatgactctctacttgatgttgattcgttagtagaggtcttcagcctggctctcaagagcatcaaccacatcacgtagtgatgctctatctcttccaaaatcaccagcgctccagtcagcgccctcaagaaacctctctgctcgaatcagctctgtgctccagaatccgagtaaagtatccatgacggcatcgaaagcttgacgcgtatcgggctcaagatcagtgcgcgtctctggatatagtaagccattcactctcaccactcgtgacgatctggactgaagttccgacgtgtcccagtctggaggattaccgatggactgctgaatgatctttcttacagcttctggtgtccgccggaaagttggatattccacctccggctcgatggggaactgatttgcaacgttacgccgaacgttactaagtccctcgaaaacacagtagatgaaaagcccaaaattatacacagttgccttctctcgcgcagatggcggtagggcgaaccaagcgcgattccgcgcttctatcggactttcagccggcgtatagcacgctgacgtagacagtgaatgtgagcatgcgtattctttcagtagatggtcatagggagaatttacgactcgttcaggaagccgggctcggatgttttcaacgtactgtcggtacaaaacctcaggagggctccattcataccagttaccacgctgttcaaagtcacatagaacggcattctcctcggcgtctaacaacacattgtcaggtcgcaagtcggaataaaatgtccccatttcgtggagatgagttagtgccgaagctacttgccgacaccatcgaagcttgacagtgtccgacagagtagcagaccgttgtcgagcagggataatatcacgcagcgagccaccctcgaagtactgcagaaggaagcctactacgccgcttctaccgccgaacgcactttttttcaaaacaaccgccaggggccgaggcatgatgtgaggatgtgggggacaagtaagcagaaaacggagctcatgatacatatgatgtaaggaatcgcttgcgcacttgaagatggcacgagattgacctgaaaattccaccagaatcacagcttcattaagttgcttgacaagacgcaattcgttgatgtcgaccgccggcggccaggcgtcttgggcaatatcagaccacgactgttgaagatactgaagagttttcatgtttttctcaattccataatcgcgctcaacatatagcatcatatctgcaacatccggagtgacgtcttcgaagataagcctggagccaaacggtagtttgctatactcctgtaagaatcccggattcttggcgcaatgatagtcgagtgcgcgacagagatgctttgctaagcctagccgagaaatggcatttccgtctcgcaggggcacaccagtacatgcatcaaggctctggcgcaatgcggcaggatattccgtctgatcagagatatagagtaagacccgtaacgggggcaagtttgggagcagatctagcgggatagcatagacgcaagtaccacatattgtcgccccgtcaatccgccagcgggaggaggtggtgtcaaggttgtcaacccgatttcgaggattgagaaaggaagaatcccaagaaggagggccaactcgaccggaagcgggctgcaaatgttcttgtagttcatggtattttaacaagaagctcgggcgccatacggcgtcaacgataagatggctaagctccatagagacttaagggaggttgggcaccaatgccttgctctagactcctactgttggtttcttaattcatcgttgattgtggccatgtggccaagggaagtggtagaggggggggagtcacttaccaagtggaccaccgtcagcaccagagacgccaaaaacgccttagtcaagccagcctggcttaaggaaacaaatgaggaaattgtattgataaagatgatgaagtggcgcggacgagtggagggagacgaaccgacgaggctgagatggagggagacggcgcagactcgaaagataactcagaaagaaaggcacgagacggagctctgaacaaccatagatttacccctcatgcacgaaataagacagcgggcgacggagaagggataagctcaaacaaaccagcaaggatggttaactccgcccagatcaagggaaaaaaaaaaaagaaattcgaggcacctatcaaatagtggccgcgagtgctcttctcattggcaaacctggtctgctctgttcacgatcgcatcagcgcaggctgagatggcctgtgactgaagcgatcccttcgctcacctagtgaccacaaagaattgacacgtccattaatccctggcagcgacggcctctacgcgggctgacagttgaacaatagactttcaatggcgtcgccgagcccctaggcgataaaaagctcgcccagcgctcttccaagttgaaaggattacccgtaaattgcgcctgtcatcatgccttgacgccagcgcggcccatccctgcactgacggatcaacatggtatggtgcctcttagaccccaacacgccaaagactttttctccctcctaacagtcgactgcttgttcttttcttctttgaccgtcgtggcacgagcagtggacgatcttcctgctgatttcttgctgcgttgccttcccccctcccccatcgttgattgccgaccttgcatcggatccacgactgttggatgagctcatggccacaatattgtcgccaaataaagtgagcagggatacaaggaataatccggctgctgtagacgcgctgaatccgccacccccactacccagcctaatgattaccagggacgttggacgacactggtcggactcgcgacttcgtccatctgcagtgtctggtttgcatggactagcctcgaagttcgatgcagttaatgatgcgaaagaagtcgtggacgatcagacgcttgtatttcaagattctggtctggacatcgacggtggaatgtcgctatcttggtctcattatgcgggttcatgggacgaccctatgttcggcgccaaagcgccttattagtcacacaggggtcaacactggacccgacactgctcccagttttgtttaaacggcaggcgatttgacgcaag

SEQ ID NO: 15974 - DNA, 341 bp, Emericella nidulans
agacaaccgaatgctttactggcgccggctccaccagggatccgctggttaagaggtactacgtgccgggggcatcgccttttgtcgatgcccttccgtatgggatggctggtgtgttctaatacatacgcttaatcgctgcccgagattcttctatcgcgatcatccattcctgacccgattttcactcttcatgatgcttctccttaggtgttcgctcctctttggatctctcgatacttcggacgaggagagacaacccgcatggaaactggcacgatctctatcacaggttgaagcatggcaacacggcctcagatgacgatcaactacgacatgtg

SEQ ID NO: 15975 - DNA, 414 bp, Emericella nidulans
aagcgtcctgagggcctactggcatctgtggctcggggaatgacgtgggccaatgagtaccacgcttgatgggagagtgcacattttcttgacacagcgtggggacctcgatgacggagattggactattacgtgcggatggatctcagaccagatgatatctcggataaccgcaccatccagatcatagtgaacgagagtgcagctcatcatacatagctatctccattagaatgatgggcgttactcataatgggtcgtgctcgaactagtgcagttgtatgagttgacacacccgctcggtatctagtccctgtcctatctgggattgaagagttgctaccaggcgctcagatgcaccatggatagacgataacgtggattggcatagctagctgacgaaactaagacaca

SEQ ID NO: 15976 - DNA, 1480 bp, Emericella nidulans
cagttgaatctgcagaatgtgagtttccgcatcgatctcccttctcagccagcccgcctgcgatcagatctgctggtcagctgttggtttgcgcagcgctgcaatgctgcatgagataacctaatactacgcttctgtaggcgagatattgacgtgtccctgttgcatgtgattgacgcgacctcgggatggacgaacaggttgagttgcatggcactgaccgtccttactccgttcttacaccgtgcacactgcctatataccagcccagctcccgatcaaaataaaataataataataataagaagaagaagaagaagaagaagaaaaaagaagagtttattgaagaatggccgcatcgccatcctactcaatccgtctgtcattaaccgtgcatggcgtgactttgtttggcgcaatcccgagttcagtcgtccgtatcagttgcgcgatggtccattcagttttgttggggagcggctgattctgttgagggttcatggttgggtctgtggggcgctagcgacaattaaactacgacgaaaaataccgggctgtaatttattcttttcattattttgtacttgttttgcacttgcttaactttattttgtacgtgtttttaaacttgactttgtacttgttttgtacttcttttgtacttggttcattagttttacatcaggggtcgagtttcgtaaatggaatctatagtaggtggactatgtgaagatagttgactgtacactatgctgttggctggtgaacccttctctccgagtcgatcaaccacgacccttgccctcctccagacaggctcactgtcgtgccccgcagatctggtaatacgagcaccgtctcgccgtggttgcggtagttgacctcgcttccgatcggccttcgctgcacctgcacgttttgcccgtggcctggtcctggcgttcccggccccgctaccgcacccgttcccgccaccgtggctgcgctggtcgacggcgactgcagcggtgacggcacaaagctcctaatctccagtcccgggagcagcaggtgtcccgccttctgcggcagcagcataatagcgaacgtccttgtttcgccctcgctcgcagtaaagtttcccctccgtcgtccacccaccatccacaggtctgggttggcatgcagttcgtacgagaattccagtgggccgtctccgttctcgcgctggtcgggcgagcaccagcggcgggtatgtgagagtcgcaactcggccgtgatggtttgacctacggcggcatagggtgcttgcgaggggagatttgtcagtcggagctctgccgtgaggacgacttggatttcgggaatgtcgacggggatgatgatgtggcgccgtcggatggacggttgcggtgggagagagaggatcagatgattctgtgtatattagcatgacctcaatataccagagaaggcactccttacatcatgccactgcttc

SEQ ID NO: 15977 - DNA, 898 bp, Emericella nidulans
acaccgggagagcaattgagtgagaaagaagatgaggatggggattaagattgatgaggggaaaactacacaaccaacagcgagacacgaattaaaagactactcaggtgcaaacaaagttaagtctggattcaagcataagcaaaaatcgtaggagcaaagacagagaagtgagtaattgaccaaacgttcgaaatgaagaaggaagcacggaaataggggtttctagaaggagaaaatggaaatccaaagctagcagattgcggagaaaaaatagcaccttaccagcaaacatactaagattagactaacttttcaactatagaatctatttagaagcaatggaaagtcggaaatagattattgtatcaagtaaattatgatacaccgttagcctcacgatttttaaagcaggatcgggaccataatttatatcacatgaaacagcaccagaaatatttattaaaaaaaaggacacctagaaatgtgcacaggtcacgcccactagaaacataattataaaattgaaccaagcaaaagacaaagaggaaaagattatacgctttaaaatacttaccaaaatatccgattggatcaagttcttacaatctgatccatggtaagggtgtaaaagtacatgcaaatgtgcggcaatacttaactttacaaggaaggataatggtcacatagatgtgctatgataagagaatccatggacaaaaatatgacaggaaaatatgttttaacatataataataccaggagactacacttgatcaaactaggtgaaagataattgatgaatgcacatttcaaaataagaaaaaggctacattatatactaaacggctaattacactaataatactagaagacaaaagaaaggtgtaataattca

SEQ ID NO: 15978 - DNA, 483 bp, Emericella nidulans
gacaaccagtggggtgcctggcccgggtgccgcccgggggctcttagataaaaagcctaacgtgcctgggttgtgatctttttactggacccgaccccaatcgacggctgatgcatactcctacgctggctgagcgaccctggatacatgtataacacgctcctaactgcatctgccgtgatgctcactactgcattcttctcctgtgatgaggggatcatctagaagtcactctctgcttggtcatcaggagtgacccgcttagtatggcgctacccacacagtagaagagtccaacactgcacgattagcacgggccgatccttaatggctcctaccggacatagagacgctgtgctctaggtgcatcgcgagtgccaccgagagtgatacgtgcactcagaaatcggaggtctcgttgagtctggctctgttgcgcaatgctccgtcgggctagtcttgtcttggaccctcgggtgagcc

SEQ ID NO: 15979 - DNA, 915 bp, Emericella nidulans
actggtggcggtcttcgaggatcgataggtggcccattacgcggacgccctgcactggccgaccttggggggtatgttttgagggatggggttgtccactggccgggagacacgggtcttggtggccgcatatcttcaggacgcctgttagaattagatgtgtgtggacgcggtggtgttgggtctgctaggctcattgccggcatgttaccttcaatccttcttggtccacgtttttctccaggaggcttatactggaaagggttctcaaagcccatactgtctggggacataggcccattttcgtggatgtgtgaacatgtcagtgtatgtttatgcttttcttattgtaatacttacgtttcattttatcttgtggtgttggcgttcgtttgatccctctatcattatagtctttaggtggttttccgcgcttttggcggatattcttcacgcggcggttgatgctcactctctgtgagtccatgacttctttttgtagcctgctcagatcatttttctattggatttttttaacttatgtcttttgttctcggcttctgtctgtgtacctttatctctgttaatttgatctaattcttctttcctctcgctttgtcttcctcgttgtacattatcttttttggcgctactctcttgtgttatgccctgattatattcgctactttctcttttcgtcttcttatctattacttttcatttctccttaccccctaactggttctctacctccttgcaatctctttctttcagccctatcctcacctttttttccttgttccttctacgtcttctgattctgttcttgttagttatagttctctctcccccccttatgttcattctcctgactcatttctatttctactcctaactcctctttacttattacta

SEQ ID NO: 15980 - DNA, 441 bp, Emericella nidulans
gggctgagctgcaaaatctcgcacagaacgggccgcttggtattccacgatttcgtgtggatggtaaggactgccagcagggaaataatgactccgacaatgaccctgattttgaatagggagttacctcgcgagcacggcgaaaggttcgcaaaggctatcagcaagcttagcatcgctgaagtcgtcgataaagtgcaggtcagagagagcatttcttctgctagcacaaaggcaaaaatttatgacattgagatcacgttcttccctgcggaagaatatactgcggagtacgctatcaccaattcgggatgtgcaatcgactctgcagaacaaggttcataccccagcttgttaagctgacaaaggtccgagcttaagaagcggcatgatggagaaagactctaaccaactcagcggcacagctgaggttgggatttt

SEQ ID NO: 15981 - DNA, 574 bp, Emericella nidulans
gatggctagaatcagacgcgcacacgcccgagcccgtgtctgcgaacaagccatgggttagatccgccctctagcgcgtctttacatgcactcatgtcatgaaaaggctgtcgtgagctggctcttgacacgaatgactaccaagggtgctggccatagatgctttcatctaactagactttgctgtacatcctccctttcttgtcatccaccggatactgctgcacacctcactatccaaactaggatgaaatgaccacgatgtggttacactgactacgactcactctactgcggatatgcgtgtctgacctagctggccgatcgctgcccacatgatggtgctcgatctttgtgaaccggtgaataatgcgctgagcatactcgtgcatacagggcgcctgcggcgcccagctggcacggagaccgactgcgaccgtatgccgaccgagtgacactgacggacctgctgcgcgcctggcaggatcatgcttgctggctctcaggcaccagagcatgcatacctataccgcctatcctaaagagacgtgtttatccgggctggtgcaggtgc

SEQ ID NO: 15982 - DNA, 2360 bp, Emericella nidulans
gtaaaaggtatgattcaggatgtggataacccatggatgaatacatatgggtagaaacgtgttaaaaatggtataatggagaagagtttgttttcccacattttatcaagacacagtatgtatataaagtagagcaggaggaatatttgaggaaagtattaaagaattatgagaagagcaaagaaggaaaaattatttgaagggagtataaacagtactagaccacgttgaaaattaccatacgaggaggggcaaatattcaaagttttccaatatgcgagactgaaagatcgccacgccctatatattccaccatcacagtgccatcgatcaaacacccactttcatctctctgaccgtcgcctccatcacactctcatcatcggtgtactcgctattatcccgctgacattggactaacgttgtataccaagtgttgatctaaaaagagtgcagatcttccgcatttgtcgacttatattgtccgagttgcatgcagcacctgtacctgtcatgacttccccaacgcagtctgggaacactaagttcactgttttgatccgcctccctttccccagaggcggctttgtggaccctccaccagtaggttcaagcctccatataccagggaaactattaaacagctctttaggtggactggaacgcagccaaggatcaagcgctttgggatatcctctcccgcccgtcaaagggaaatgatatagactgtatgcttgactgtgggtcttgaccacgagagcttttcttactgattctctctagggaaagcactgtaataactgcccggtacagcacttgtttgaagctgacgcctcctagtgccgaaagcttcgatgtgaccctcgagtttctacttcagcaagcggcctggctctacgaccgccagctatcgcaggtccgcgcacagatgcgtaaggtacctactgctcattcgaacgctgcctccccagcacagggctcgatatatgcgagcacggctctagggcagccagctaaaaccggtcaaagcaacagtaagatcattgagcgtaacgatttttttcacatggcatactgaactctggtaggttcacgggctccttctcgcttggcgtcgcagccaaaagaagcccctccggtgcgaggtaaaatcttaccgctctattatctgttttcctctctaattctaggtagcacccattccacgacgtaatagttccgggaatactgtgcaacagatcaaagcccagacatcgcatcctgggactccaacgctgggaacgaaagagcccagacgggagagtcatggtcgccaaccatccacaaacagacgcgagcaagctccagttagccttgctgatcagaggtctcctacgctcgaagaggaagatttgacatctagcttatctgagtccaattctgatgatgaaagcgacactatagcaggccggaagggtttagggtttaaacgttttggacgcttctcaacccaccggccggatttacgagacgatgatgatgacgatgatgaatcaccggcctttctcccactttcgcgtggtcacgaaaccacgtctcatggaacgtccggccatgatcttagtacaactctgagaatggagcaagagggcgtttctgcggtgcagaggcgggtgacagggccgcctcctagcttgagaaagtcggttaccacagaatcatccgaaagttccgttagctccggaagtgccagttggccgtcctcttaatcaaagagggaaccaaataaaccatccaagtccccgacggacagcagatgtgaaccatatgagcccgcggcggtctacaacttctgggagggacataagtgacggaacacctagtatgggaagcagctttagcgatttagatggtctgtcacttaagtccggaagtataactttagctgacacgagttcatccaataggggacacgagtgtcactcagtcaatgctcgaggaggctctcttaagcaatatgcagcacggcggaatggccagccgcatgagcacaatcagccaagcacttcgaagccgctatctcccttgattaccatgcagttctatggagcggcacactactacttggcacttagatatcagtgaatgaatttggtgcgctgcaatccctgcctcagattttgtaagtcaggattgtggacatacttcgttcttggaattggctaaccatttgcgaaacgggcccttggaatagattaagtaggtctaggcccaaacttagttcgcgtcacgttcatgcttcgggccgggctgtataactaacgtattatcaatacttcgatcgactatatatttataccacagctcttttgcttggcggg

SEQ ID NO: 15983 - DNA, 441 bp, Emericella nidulans
gaacgcaagaaaaccctccgtgagaaccttctgcttggcgacctcgtctgattggactgggagcaccatctggttttttacctacgggttgcgagacaatccagtttctttcaatgcgacggaaagcgatagcatatatgctcgataatggtcgcaacctcgcttcgattcctgcttcattcacagatgagataggtcctacagcactctgcataaccaaggccttccctctggtgctgatgcgaatcatcgatgcatccgctccggtgtacgaacctcaaggtgtggccgtgaccgacaccttggatttttacgaactctctctcctcaccggttcacgttgggcaacacccctaaattagcgccgactggaacgcaagacttgagggagcgatgccccacacctggcgagagagtcctgctcgctcttctgaagaggtc

SEQ ID NO: 15984 - DNA, 1574 bp, Emericella nidulans
ccatcatcaccagccgtaactaccctctttccatcaaatccctgaacaaaacccatgattccacccgcttgttcgccctcgtcgttttctgtgaggccaagatgccctttccattcagtcaacattccctgggcagcggcggtagtgccaccacgagcatcccatcttctgacaacaccgtcgataccaacggatgttaggagatatgaccggtgacccgcagtcgccgcagccaaaggactcgggcgaactgatggtgcgaccgccgcgcgactttgtaagaactcaaccttcaccacggcaccctcgtgtgcctccttgatatgtcgacgaacagcgaaccgatgagctgtgtcgaagagcgcaatcgagccatcaacagagccagccgcaagcagagttaacggaggagcggaaaatgagagggtctcgacgctgtccgtctgaggctgaagcgacgcgagaagagtacccgctgtagcagcggaggtttgtgtagcaggcctgccttttgctttggaagaagcaccggcgccggcaccagcaccagcttggccgagacgcggaaggccgacgattttgatgtgcccctcagccccaccgacagctgcaaagccaccaccgggtgcaatcgcaacagagtagagaccaccctcaacagcaaaccgctgatcctcggccgtcaatccgacaaccgcactcgttccagcagagtatgagacgccagcggccgcagcagcaccaaacacatcgtaaacatagaagctaccgtcctcggagacagttgcaagaaggtttccatcaggcgtccacgccccagcagtacaagggcctgtgtgctggaagaaactctgcacaatcgatatgggctccgacgcgtctttatgattaatccggaacacccacgcactgccatcgctaccaccaagcgcaataacgttcgccttctcgtcgttctcgccttgtccacttccggtgggacaaacagcaacccagttgatttcctctacctcctgtacttcagccacaaacgcccacgccattccgtcaagcttcggtgttgtatctctccaagcacgcagcttcccatcaagtcctgccgtaagaacatactcgccgcgcggctcagtaaacgctaccgcattgacactgtcactatgtccttccatcctcaacaaaggctgcagcgattctcgctccctccgcggctgtggatcactctcgtagctggcaggtaggactggcttctcagaattcggggttgagtcgaaaaggtaggcgctgtcatctcctgaccccgtaacaacaatggcattatggattgggtgttgcgcgatacagaagattgaatctgtatgagcgtcgaagtgggcagcagagtcattatggagctcaatctcttggtcttcaaacgtcatttcttggtcaccatcgacatcttcgccgtcggactccatggggtggtcttcatcgcgggtgaagacctcttctgcctcgtcggcgtcaatgaaggcgtcttcttcgttttggcggttagggtctgaggacgacattatgaaaaatggataatcgta

SEQ ID NO: 15985 - DNA, 520 bp, Emericella nidulans
gggcattgtgcgagagagctacgttgggtggtcatgtcgctagtttcgaggacgtagcacgtgctttttatcgcaactggaaacgaatggcgctgtgcgacacgtacattgtgtatgctgatgccgctgcgacgcacggacattatccgccctctcagcataacctatatccattacccgcgtaacacactgaggctgttatatgcacagataccagatcaagctcgctatgaggtgcgcgaaccctattgcgaacacgaatggctgtacggccggggtggtttagaccaagcgatctttagagactgcttgctattaaccgcgtactgctggcgccgcaggagctggctctgacaccccaacttgatacgctgctaccggtacaggtgatagcgctattgtcttgctggccgtgagtcagatgctcatgctccgtctgccgctgcgcatcatgcctaagctgccagtggctctgttgcaaaccgtaatgcgctatcagctgtagatcgttacaatgcac

SEQ ID NO: 15986 - DNA, 3088 bp, Emericella nidulans
atatgcaccccagagtgaccagaaaacagggtgcgtgtggccctggctggctgcgttgagagccaagacggtaatcagggtcgcagccattataaccgcaccaaacgcggcgccccttctgtctaaaaacggattcagaatctcctcgagtgataataatttcacctcttcgccgttagttgccgcctgtttttcctgttcctctaccccgccacgtgcgttcgggatatttggattgatcggattcttgagcctcgcttcttcaggcagctcgtgcatcttgatcgctaacgggatcagcgactcgtcggcaaaaatgatgtagagcaaaaagggaaacaggacgatggcggtaatgacaaccggaacgatcatgttcgctgtatagtcaataaacttgatctggaaagcactggtaagaacgagatttgtcggattcgaagtgacgagaatcgccgaggcaatattggcgacagcaaactgcgtatagatccacgctcgagggtgcacaatgttgctggacacgcgggtcatgtaggcgagaaaggcggtcccggagaggatgattggatcgttgccaatgaaactgcccaggaggaagaagaaggcatacagatagaaaaacagccgatgtcccaccttgccgcctttttgtaataccttgaaggccagataccggataaggcccgacgcatcgatggagatggcaatataggccagagtcaggaaaaagaccatgatatcaatcggcgagatattgtccgcttcgatagttccatcatggacctccttgcgtccaatcgccaatatcgccagtagaaataagtccgcaatcaacggcgctgtcacgaaattgaacggaaactggagacgaacgaagcggccgtcatggtgatcatatttgcgcggctcgataactctcaaggcgcacagagcacgaagaacaatattcgcaaacgcgcgagggatatatacggggatatggaaagggaagaggacgacgatatctgcgagaaaccggttaggagacactttctccacacgagactcgcgacggtcacttactggcaagcacaaagactatcagcgtgatgatcgaacgccagtccttgatactgtctgtatctgagacttccgccatttccaacactaccaacagatccgaccagagtgggatatcctgaacctataagggattctctcggtatcgcaatgcccccgcctgttcccgattggtgtcacttatgcacagtgagcgtatactctaaaaaaccgtcacagtaccgcgacagtcgtcacgaccagccagccgtcgctctcgaatcagtctcaatgtcaaaaatcttgcggtgatccatggagcgagagaatacgtgcgttttctgtcttgggaatcgggcgtggcgggaagacaagcgagaatatgcattgaggagtccgcttatggaaaggccggcaggcgaagcacgaagacgaaccctatgatgttgtcatcacagccccgtcaaatggaatgattttcgaaaagcctaacactttggccagccatcgataagcgaaggggcgatgatgtgggaggggatccttagctagtgcgactgggcaacttcgtgggtgtaggcttggcaagctgcgcctctcgggcaacgctcggcactttagctactatgatataatacgctgataggaataccctgatcggaatgttaggacagtgagaccacaagaatctgactccttggatttgccggctgtatattaagttagtactgatattttactaatatttgtctgaccacatgcctcaataactgatcgacctgaatggctagccaagctgttctgagcacttgcactagtacatctagtccatacctagtctagcatagccctcgtattcctgctttcacgagggcttatgtgaagatcctggtcatttcttcaatcattatactctgagtaatacgacaataaggtcgacatggggtactcgatttcgcagagggcccgccattatctagtattcacaaccctattgagagcgtctcgaactcttatactggccgaaagatcgacaaaatgctggccaagatactgaaaaatactgatagaatactggccagatctgcattgggtcgtcacaaccctgatcgtcaccctgcgcccagctacggtaagcgaaggtgacgatgcggctcttcagaggtcgcttgaccagaaccctgaaggatggacgtcttgcggccttgcccgaggtccagtccatggtcgtccgctgttggctgccctgtctggcctctgccgtataagagtggcactgctgcggacattcctcacaccaccttacccccgtcaagtcatccatgcgatccattctgcatttgtgctaaatgtcctaccatgccaatatcagcaggtggatgagtgatgccgcctctttctcatgctgctgttgtttcgaataatgccaccgagctaggcctcgaggtggtttgctcgtggccggtctctggccagtatggccccggcaccagggtgctgtaagtctttcatagttttcattagaacaaaaaaaaagaaggaaaggaaaggaaaagaggaagagataggctaattctgtgaagatactacgtcctgatcgcggcctgcgtctttgcgcgcaaggaagaatgggtgaggaatgcctgtctggccggtgcattgctcttcccggccattgccgcccttcatggcatagtcctcgctgccgttcatgttgatggtacgttgccggccccggtggtccccaggtggcagtatctgactggcgtaggtgctattgatatggatgtttatggggccttacagctatgctcgatcgggatcttcatcgcgtccctaacccgcgagattgtcgggcacatacttcaaagatccgcgtcggcacattcttttcctgtggacaggtctcattctagctggtgagtgcagtgcttcaagagttcggtggtgtcggctgacaagatgtgcagggctgctgagtatcacagtggaactctttagggccaagccctcaaagtgcacccatgatgacaacggcaaccctgtc

SEQ ID NO: 15987 - DNA, 3374 bp, Emericella nidulans
aagtcggttggatgactagacaagatatgactgtctaacggcacgaccgtctacttacccgtgtttgtttgtgagcgctcgcgaagttgacttcgatttagttatcttctgcaccctcaatacccagtagtgcccgtggctactgaagagtgccctctcctgctgcaccaactcctattgagcctccacaaagtactcgggtgaggtctgcttattctgcccgcattttccgcttatttactccgtacggcagactgttgctccggactacaacccatcaatcaaccatacccaaggtaagtgtgtggaaatggctgtattcttttgactatgctcaagtaatataccatcctttcagggctgtctttatagcccatatctgaatcatcgtatgcttactttcttgacctagatatctgcaatgctctggattggctttccagagtactttgagtatagttgaagttcattgatcttcgccttagcctactttagttcggcgctagaactcataatcgaagcacggtcagtatttagtgatcaggttggaagcatatgcattcacgtttttgtcctaaagctgttgtctgaacctttgaatatcgtgctaattataagccctggaactcaaagtccaaacagatcacctttacactgctaattaatccgtggaaccgttactgatgaggattatctgcctgctactggctcgatgaactcatgaaaggcggaatgacaatctatcaacaccaagccggctccacccagaggattgaattagggtcttcaaaatgacggtagagcgtaaccgacatcaacaatcccttgaagatgtttggggtaaagcatccattttttcgagcattcaaatatcgatagtcccattaatgctttgaccttatcccacgagtaccatcaactttttggcgctttcaaaatatattttgagcacacaggcaacccttcgaatacgagatcaagtctaccgaacaagaatctttcctaagcgatccattgctaccggttgttcgaacattgactttgagtccgaaccgtacaaacgacccaccgtctcaacgacgacttcttgccgtcaccgtgcgattgcgttcatcatcaagctcagcggcaccggaggttatatagaggatatcctccgtgatatggaaggagggaatgtgagagcagatagttcgacaaatccgggacaaataacgaaacttcgacttaggggctggctagaaacgagtgtctattaattccacctcttccagctacactccttaccaaccctggagtaggtgagccatagactgttttggctgcaataatctggcctatgctgcattgagtaatcatcccgtatgaatgcttaagccccctgagtagtaggtaaggtaccggctaacccatgcctgcaagcgcatttactctatgctccaaatggtggaagaattgcagtatccattactggcatagattttggcttcggccactttccacaatgccgaagcagctcctgaatagaaccttcaatacagaggcattagtagatccctggaaaactcaggacaaaaacctcgccctgcgtataggctggaggatttatatcgctaatcatgctggaatatccgcttgggaaagtgctgtacgtagagaagcccagcctgcttgtctagagcctatctggctaagtttatcaacaattatacagcgatacagcgagaaatccagaatctagtaagcatatacatcttgttaatctgcatagcgttctatagctttgtattcttccacctttcgacccttcacagtttagagcacaattcatgccacatgatggaacgtccactccaatttcataatagagaagggtagctgatccatcaagatacaagcctggcctttctatggggtgattacaatcgtcttggtgatctctatttgtcaagcagcggggcgcattcggcctcccaataagctctagtcgttttagacttagttttagtgccgtatggtacccagcagcattaacaacctgataaatggtaagttcattactcggcgtcatgtcatgaacaccagtttggggggggcgcgagattgtgagcaatctgtactatgacgataatgacgaaatcctccaggaggatcttggtgaattgggacagattacttacgcagcgagaggctttataaagaaggatataaggaagtaacacccattgggccagtcgctgcgttaccgcatttcatacaaaagcttgtaatggaataaagatggtcccaaagtagtttagcgtattttggttagggtttttgaactgaagaatacaacccattggcgccatttgcaacctactgtaaactggagttagcgaacgagcatttgaagggggccgatacaaggagagtgactctgcccttctagagccagggccctcctttcagggtgagagggactgcaactagaccttctgtctgtttagtgaaaacggccacgggtatatcagccctatcttatacttccatctgcttacacccatcatctacttctcctcttgatcctaatggtcactgctgctgttatatagatatgcacgtccaagtactgcgtacccgcggattgccaatgggcgcaatagataattggtatagctggtctaagggtcacaccgacccgtgcgcggagagtactgtgcgcaaagatacggatggggaaaatgatgggattgtcaatgatacaagaagttaggccgtggatagaagaggatgaaggagtaaggttgaagcggcgccgatgaccaggatacgacagattttatgaagcctaaaaatgatacagcaagagaaggacttatgattccatcgaggttgaccccttattattaatataagacatattccagaagctaacaccaacaaagggggtatatgaatgtaaatcccaggtacagaaaaagaaggaaaacgactgatttaaaaagagcaccaactccagatcccaactccaataaatagattgcatgtgaacctattctgaccgggtaatagtcatggttgatctttgtgagtcatcagtcggagcaaacggtattcgtccattggatgtgaatccaggaaggccatctctggttaccgacgctgacgcaggaggcgaaaatagagtggacatgggacctgcaggatcgccagcatggccaggggtgagaggtggtgaaatcacagcgtatgtaccctgagatgacgaatgactaagtccgccaatggcttgctctttgcctcgatggtggtcttcaattggaagcgattctttagcctcgatggtaggcgtgggcgaagaagcatccgttgtcgccaaaggttggctgatt

SEQ ID NO: 15988 - DNA, 591 bp, Emericella nidulans
  unsure (1)..(591): unsure at all n locations
gccgctgaggtgggtactggattcgacctggctgtggaatacctatctgtggcgggcggcgaaaaccggcctgtatttttgcaagcgagcaactacagtatcagagagatgcatatcaagaaccgggttctcttgaaggagtcaggtgattaccaaggagtcaaagacctccatccggctagaagtagtcnacctcgaagagtcataaaggcacttgctcacattcgaagcgtgcaatggtgctgcgtgcactaaacactggctccaccaggtgcccacggacatcgaacacgctaaaaaaggcccacaggtcattataagcagtgacggccaatacgtgggcacaggggaccgaggcttccggagacacccattcgcttatggccctgtctttaaagagcgtaatggcccctgttgataacgaaaagaacggataagaccaattgggagggcgacctcagccgacccaactacacactgggccccgcccatcgaccagcagggccaagttatccaatggcccatttaatgggtttccgtacgggcaacttaaaggcccggaggattgtacatttagtgcgacggtcaatg

SEQ ID NO: 15989 - DNA, 2503 bp, Emericella nidulans
tcttccttccctttttttttgtcttcaagattccacctcgtggtagaccttggtacgctgtggcatcgcactaaccctaagtctccctgtacgccaaaaactctatcgaaaagccccagccacggttctgcaataaggacggtcttctaagaaatgaggattagatatcctggttcaagcatcacgaaaacccacctggcgcgtgcacgaacacgcaaacttcattgaccaccagcttcgaacaaaagatactcccctccagccgttcagccccaactcaagtgctccgagtattgacgatcatttagcgaagtagcaacggctctaaggttccttcacaccttatgcttccctgctggttatggtggtatggtgtcaagtggtacggccatctgctcagagagagatcgaccatgctatgaccccaatgccctattttgggtgaaattggctaggcaaattttcagcaaggtacctgtgaccttctgcatgcagtagaaagcaagactagccccatgaatttcatgaattgtatcttctttcgacgtcgtaatcggcagacttctactagtggtcaagatgcagcttcgcctttttgggattgggagccattattctcgtaattaaactcctccgacttcgcttaggagtgatatacggtgcaaggataggagtagtgacataaaccgcattagggagactcgtaaattagatattcaaacaatgggcaaaaaacacaatcagtctgtcagtctgccaatccaacaacgtacaactttacaaccagagaaactcaaatcaagcaatagaatacctctttttcatctcttggatcgccagtccgaccaagcccttcacatttcccgctgccgtgatttcagacagactaatctgtacacccagtctcctcctcgcccatgcccttgcctcaattgcgatcagcgagtcgatctgaatattcgccaatacttgcaggtcatgcttggccgctatgctgtccttcgtccttgtttttgcgctaggcgattttatcatggtcccaaccttgaggatcaggaattcttctgttgaaggacggttcagcatctcagggtctgactcgacctgcgccatgaagtcaacgatgtcgtctgcttcggccgcaccgctttgatctcgttgagctacatttgagagaattgcaaaccgggtgtcgccccgtcgtcggccccagggagctatggggatcagaccaaggatgatatggttggggtcgtatctgttcccctgtgtgaacggtgtggtatttgggaaggttgagtggtggattaatgcctcaaccgcgtcgaggacctcctgctccttaatgaagcgccattcatagcggccgctgaaggtcttcatgagctccgggttacggcttacgtagcctatatctgcgaccgggcctaggtctagaactgacgccggttcattaagagaatggcgataacgagaaagggcgtgaatgaagctgtttgcggctgagtaattgcactgtccggccattccggtgatgcctgcgatggacccgaacatgaggaagaagtcaaggggtgtatcctggaaggcttggtgcaaattccaggtgccgtggactttggctgtcaagggggttgtccagtcttcaaatgtcattcgttgcaggcttgcgtcctatgaagtagggttagcactgaatatgctcaagcgaaaggtgtgacctgtatacctttagcgttaatgcaagctggacaacgcccttaatcggctttgggctttgggatattgccctcgacacgtcagatgcgtctgaggcggtgcctttgacatagactacttcgcagccttgacattccagttcttctgcaaactcctgatggtcgtcacctacaccggcactgggtgagaggtatagcaaacaacgagcgcccctctctaccatccagttcgagagtgcacggcccaatccacccagaccaccgcatagcagatacgcggtgtctggggagaaggaaatatgagcgcgcgtatccctcgttggaagctcgctgatattatccggcatccggactacgatcttccccatgtgctgccctgactgcatgtagcgaaaggcatttgcgacgtctgcagcagcgaagcaagaaactggcgctattgggccgacaaggccatctttacggggttggaactgcctgcattagcatcaccgtcactacaggggaagcacatacaatttgcgagttgttccagggccttttctatattctccagatcacgtgacaacgactttgggccacaagtgtttatggcagatagttcggtaaacgtacgctgtgatgcgacatttgcggcgggcaccacttctgggtcgggcgttccctgaaggtggacgtacggccccgcaccgttccttgggtttttaagtgcttggaaaagatgccccggtaccatgtcacaaatgtttttggttcccctggaatttttgtggatgcccttaaaa

SEQ ID NO: 15990 - DNA, 631 bp, Emericella nidulans
cgatcagctattgccaagcttgctctctatcgttggatctatggtgagccgctttacgagctacttcggtcgtttacaagccgacctcaccagacatgcacttctccaatttgtgactaaattgatccatctggacattctgttcgcgctgatccgctcctcaacgatctgaaactattgtgatccgcgatcaaccactatcggattggataggaagaaagggactaagatgatgacgggacagaagacactgcaggatgctaaggaccaagcccactatcaccaggacctctttaaacttatgctgaatcgcatatatattgatagactgcacaatctacgaacagcactctataggctgaccaaagaagtgaggaagctcattgaatacaccgcgagcccattactgcactcactggggctgaacgtggctacatttgcagtagaatccgctgaaacacacgctacggatactgtgagcagccatatggttacatggcaagctgcaaaggacacattccacaccgcacctatagctctggtctatagcaacacagtgatagcagactcctacatatactagtcgatacttgcactggagtggaccgctaaaagcatcggtggagtgcac

SEQ ID NO: 15991 - DNA, 702 bp, Emericella nidulans
ctattttccaattcttacgctctggacgtgccactaggtgaagaccgtcactaacataggtcacgctcttctatggctcgcgcacttggatgtgggaaatatctgagtcctcaactgcaaggcgacgacagtgaataacatgtcacatgggtgatgacaacttctggaacgcgaatgtatatatggagactcttatgcttcagcgttatgatactgcactgccaatactggcatgacaccaggctttgggatcgaacgataccaagctcacatacttctacgtcacgatttataacgatgatttgagactagatatgcagattgctatgctgacgtacgatcatcgtgttagtaagcagcaatcccggcacagtggccgcccgctcagaagatgtgacgtctcgatgacacatacaacgattggtacagttgctggttggaaacaaaagctattggccgaccagtgccaagtattgacgccataagacgttaacgtacggtttggacataaacctaccggagatggctctcattcatgcattgacatgtacacagctgaattgattataacattgaggcgattcaatcttgacagtgaacacttgttgagactttagaattgctagttacaattgttaagcttgggcgatatatgctaactatgctgaccattctgagggaacggattgatcgctgcctgga

SEQ ID NO: 15992 - DNA, 884 bp, Emericella nidulans
ggaactgattgttggcgaagatggtgggaaagtgaacgatctggttgcgaaaacagaacttcgcttgctttttgcgcgcacaaaggcacagcagcacccgagacaaacagattttttggtaacggccgacaaccctgctttgctctttaaggtctatatttgcgtcaccccattgccacgacatgggttctcgacagaatggtctggtacccaatggagcgatgcccactcatcatcttttgcgactagtgcttgctaatgatgtcggtgacaatggggacgttctatcgacctacagagatgaaatgggatgttttcgagctctcagggatcacgaagattgctttatgggggatgtcgcggaagaagccgatgttgggttgggtggagatccagtgcttcaataagcgtgcgcggacttgttctgtatgtgggtgacaggagtccccaacagatcaggatttgacggatttaatgggtagagtcttactgtttactgatggccgatctggcgctggtaactgacatgttggtggatggaaacaggtcgcctgctggtgttcatagatcaagtatattttctcaggagccagacttattcttcagaacatttccacccaggagcgttatatcggcagcggtcgccattactaaagggaaagaaaaacctttcatctctaatcactaaggaagtccaagccgcctaaccaaggcgaactggggaaaacattttcggttcatctgttatttgaatggggagtttttatatccctggtccgtcggaggaaccccttcttgctaaggttgagtggccatcaagaagtcgcctcgctacactaatttttccccccgtcactgtagaccacccttaatcccctcgaatt

SEQ ID NO: 15993 - DNA, 2994 bp, Emericella nidulans
atacactactatagggagacccaagcttaggttcccgttcgacagcataaccgctcagcttaaggttggcaatgcctcccccttcttactctaacgcatgttcttttgctgacagaatcagtaccttctcattgcagaggtcttctacatgcccgccgaagccttcacgcagctctccttcctggccttttaccagcgcatcttcccgccaaaatataaatatccaatatacaccttgtctgcaatctcagtatgctttggcatatcaaacacgctcatcatgatttttcagtgtacgcccgtctcgttcttctggaactcatggacgggtgaagtatcgggcacctgcatcaatatcaacacatattcgtggtaccgcgcggccatgcagatctgcatggatgtgagcatcatcagtcttccgatctggccgctctcgaggcttgcccttagtacaaggaagaaggcaatggtcctggtgatgttctgtactgggtttctgtacgtgcttccactccattccgccccggtcccttcacctttgtccgcagcctttcaggcccacatataccaattaccacagatctaataacaagaccaggatcacgatcgtcagctgtctccgtctccagtctctgatcaaattctcaaagtcgccaaataccagcagtaagatcaagcctcgccagcatgtagacagcaatggtgctaatgttcgttttagtggacaacaatccggccatctactggagcatggttgaatgtgacgtcgcaatcatctgcgcctgcatgccatctctccccccactgctgaagccgatctttccccgatgcttcgcgacaacccagcaaagtgatccagaggaagagcgaactccgcagccggtgcgtctgaatcagatcatgaagaaggacgagtttagtgtgctttcaagcagtgcgtcgggggataggctggtggcatgactgaagaattgatgtgatagcgttgtggccttggagtgggatatagcggatggaacaatacctcagcctctaatgctcgtggcgtaacagagatacatctagaggttaaataaattcaaacttgtatatgagtaacccaaattaatgctacccgctaaatggcctctagatgctgcctacttgctcgatctgagtgctttcttcgatgtgtctaatattccttgcgaacgtaccttgactcgttggcctgggaaagccgatgcttgttttgccgtccaataaggaggaatgactcaactgcccaagttgtttgtgggttctaagccttttgcggtctatatgtcatacactctactgcgcactactttcaaccgttcaagagtactggccgcatccactagaagacgcaagtaaccacagcccctcttcactagctaatcttcctcaggccaatgttaggtaactacggtgcgctggcgtatattgctatagagtaagggcccttgtccataaccaaaccagaatactaatatctcgttcttggggcgattgatcaacctcggtgaaacaaaggatgtgttgatcatagcgacagccagacctatttcatatttaagggcccggcgtgacccttctcgcgtgatatcaaaccccatctccaaaggcgtagattaggttcctggcttaccccggagggccgccggcatacttcccggcaaagcaatttaaaactgaccagattgactgcggggaagcctaaagaacgttggacgcgatgctgaaacagcgcacgggaggatgcagcctgagactaccggggattcgagcagcgcttgctaggtacctaatgatgttcaatcccatgatgcgtgattctctgaaagtacatactgccgttatatcaattcatgaacgggttgtagccccttggagagtgttgcctcgtgacttgacgtgtactggtgctttcaaagccgcctgcatggattgcatagatggaagagcgggcgacgttctgtctgccttcacgcagtcaacacttgaactttgaatttgacttggaatttaggcaaaccctcaagtaagctgtgtacaatgacaatatgtgttgtactgcttctgtgttaagtaccggcatagctgacctgtactgcacggaaaccggctacatgagtcttctgacaggatacttgacttgaagtgtacaccctggattaagtagaagaagaaaatagagctgtctcagtgatctttctgaaaatgtaacatttacctaatcctgagctggcagataccggatgggacaagtcgcatgcatatcaggaggaatccaagcgcgaaaggtagatgcactacaatcaatagacacacgcatatataaagactctaacaaacaagactgaatgccatggtatcgctcatgctggcgttgcggattgttcggattcgccattgcttctttgtgcagtgtaacccagcaatcctcagggcccgcgggtaatatctgccgaatggtaggtctggtgagggagggctgatacccatgctcttcacccaaatcactgcgtgggctcgacatagccttggaccatctcattttgaatacgcgtattgcaatatagagctttgaaagacagctggtaaacggcaagttactaacattctaaccgagatgggctttggaagacgagaagagggttgccattcttgtcgcaagcaacaaagctacacagtcagaaagctgaagactgacatgatgcggggaaccgtgtaagactgtttgtttcccccgcagcgtgaagtgttcgtgagacccttcatgtaaggatcagactgtgcgacaccaagtaccaacaagttggaatattatagcgattcgagaagccgaaaagaagaagtagcacatccaatgctcactttaaaaacgggaaacagctcgcttcctcaattgtatcttttgatggtctaatagtcataaagccgtcgctgaagagaacatacctgctctcacaaaatggaagagacccg

SEQ ID NO: 15994 - DNA, 3735 bp, Emericella nidulans
cgccatgactgcggggaagtttgacttgtttgtttgcctataccccgggttatcccacaaatgatctacaggtgatgttgagacgggaaaaatgtgtcaaattcaaggccgcgtttcagtccggaatagccagactctggactctcggggttatcaggataccaaaagctgaaccgttggtgaagctatggcgcctttcaaagtaacgttcttgggccccgcggcatcgttttcgcaccaggtcagactcaaccagccccatgattcaagccctacaatgtcgttaattaaatgtctaggctgccgttgagacattcggacgctcttctgagcttataccctgtctatcatttgctgatgctatcgctgccgtccaaaggagagacgctgactacgccattgttccattcgagaattcaacaaatggttcggttgtacaaacattggatctccttgtggatcgcaatggaagttataatgatgtaaaggtgtgcggcgaatattatcttacagtacaccactgcctcctagctcgaaagggtttcatttcggcagcacgacgaaactacagctccatcaccaagatatacacgcatccgcaggcatggggtcaatgcgagatatttctagcgaaatacttcaaaggcgtggaacggcaggatgtgtcgtccacctcgaaagcaagcgagacagtcttgaaaacaacctctgaggtcaacgccgccatagctagtcgcttcgccggggaatattacggcttagatatattggaggaaaacatcgaggacacggctaataataccacacgctttctggtgttgaggaacgtctactcaacgactacaattcagttccagcctgaattagcccgagaattatcaaaatctccagctgttttagaaacgaagaaggcgttgttctccttcatggtccgccaagacacccttgggaccctggcagatgccctgctgattttcaaggaccgtggattgaatcttacgagtataaacacccgaccaagtcatatacaagcctggaaatatgtctttttggtggaaagcgagacggatcaaaatcaagaagttcctgatatcatggatagtctgaggaaagtcacggaaaattgcaaacacctgggaacatgggccaacaaacttgtgtcgacatgacaatggctcattttgcatattttactatgccggccgttcctgtctgtgagtgaactgactcagaggaacaaggcaaagagtttcaggcagcgcaagcgtgccactcaagaaaatagatatcaatgacccagtgtagtacagcgaagcaaaaatctattgtaagccatatggcctttttatggagtaatactagattgacgaatgttaaaacgtaaacgagagcaactctggcccagatattgccagaacagaacaattttaactgccagttcagaacgcataagctcaacgattcgctctgaatggctgtcgactcatgcgtaacaaatccactaccttcatgcgaataacaccatggagcctttaggcaacctcggtgactactttacggagctgggatggccctgcatttgaaaaaaattggtagttgaacaagtgtttgcacaaggcacgaaagcatacctctgggcagctgcacaaagtgtactccaggttgtttcaaagtaccaaccgtgaaagctacggtttcgccttcggagccgcctctgtgatgcatcgggcgagccgtcaaaagatccgtgtttggaacttctggcctttcatcctcgctctctgcgaggccgctgaaccgtcaatctaagcgtagttaggaccctatcaaggaaggattgacaataacatggtgcacctaccatcgtagaattcatcctcgtcactgtaatcggcaagttgctcaaaattgaccttgtatcggaggattgctccaataccaccaaaccccttgacaaactggtttccttcactcgacttgtccgaaacaaactctagagtcgctccaaagtccttgtaattttccgcaagccattcgaggaaggagctttggtccacaacctccatttcggcgccagtatccttgtccaagaagaactccttattttcctcctgggctttggtggtatggacgacgacttcgttgccttccgagttcttaagaacccatctagtaacatccaagttctcataaactatcagcgtttcacacgctcccaattccagcgcctttagggtatcctcaacaccgtaacaaactttccctgtgtcttggctgatttcttcgaaatactttccaataagctttttctcctgaacgaatttgacgttgcttagagtctcggcagaaagttcaattgcctgattgaaaccgttctcgccgccataagacacatcaacgaccttgatgaccttcgcttgcagacgctggtcaaacatgtctgactggttcaaatcgtttttaaaatcggcagaaccagcaagaattataccggcgacattgactttgtcattggtgataaaattttgcacagccaactcagcaatctttcgcacgtagttatgacgcttctcctctcgtagacgtgcaaaacgaagggcggactgaccaccacggccgtgtttcttgggtagatcgacgctaagcttttggagaatttctctagtattgccactcaaagtaccaaagagcgcaccattaccatccatgatgataaagccgaacttctggtccgactcaagcaattcgctcaaggcttcggtgtgaaacttgttgtcacaaagatatagggacgtgttgattggcttgaagggctcgaagtcgatgttaattttacgctcctttccctctgaagtgataatttcaccacagtatacaacgagaccattgggggggactttgttgtaaagtttgagacgttgctgggtagacgtgatggcggaaagtacagagagacggttgacgcgggatttaatgttggaggcagtgccctataggcaatggtcagaggaattctcgatcatacataatagaggacgaaactcacaaattcttcagccaacatcttcgctgctctggatacttgatccttgggggctaagcaaaaatgttagtgctttcaaagagcgcccggttccaggagcaaaagcatacggatgataagcgagatcatggatgttccatttcctcgggcagcctcaagccgcttgataagcttcttgatcttccatatctcgatattcttctctgcttcattcgcctgctggaccgtgctcatgttgggcgagggcgacggagctgtatggccctgtacttagagacgattaagggttggccacctggttcttgagacaaattgtcaatatcgcgagttgacgtagtaaggaatccccgtgatcgaaaagggaaggagatgtaaaatttcgggccatgtaaggagcttgttgagattgacatgagtaaagggaaagtgagatgaccacttaccttgagggctggtcactttgccgtccaagtccagcggggtgtttaacaaaattcgtcaggcaccgtggggtggccgccgcattatgagagggtggctgtggttgatgatgtaagctctcgctagaacagacgcagctggtaccttcgtagttgtaagctaccttctcggcctggagatcttggagagttatactgatcgtaactgcatgttttgaaagataaaacgagggaaagctcttcaaggtctaa

SEQ ID NO: 15995 - DNA, 3898 bp, Emericella nidulans
ctctttcaaccaagcttggcagccacattccaaggatctgagccttacattccgataagatctcgctatccttctcaatacacttcgccagaaactgaggagtaaattttctggtctgcgttgtccagcgaagggccagccaagagtcagcttcgtacgggcttaaatagctgtcccatcgccgcaatttgtgcttcacaagagtgtgtgccatagatgaccagcagtcgacgactcccagaaggacagcatcatcaggacaacgatcgtcgccaaagcagttcgaaaccagacgtgataccgcagggtggaatacctgttccacatgctctactcctgaggtaatcggtggagattcataaccgtagacagcttcgatatcagtccaatctccataatcttgactgtcctcatcagctgaaatcaaggtgttcgccgagttcgtggtcgacgagcctgtcagcgagccgcatttctgaaggtacatgacaataacctggagtccctccaatacagttgcatttaaccgagtcgtgcggctatcgaaaaggtctaatattaacttgataggcgtctgggacacaattttctgagcatgctccaaggaaggcgcggatttgatcgcgctctgaagcccctgtagagccgtcttcagtagggattcaatctgccgctggttctgagcaactgtcctgtcaatcagctgttgcgagaaattatttccaccgtcaatttgcgcctcaatctcttttcgggctaggttgtgctgcttcaggaactcggtaacaaagtagccatgccactcggcgaagggctctagtccagatatatcctcttttgtggacaacttgaatctagcaagtcgcgtccatgtccgcaaactgattttgcaggtttcgcggtgggaggtggcaggatggaccaggtccttgattgttcccagccgaggacggcaaccatcaggaacagacgagtacaagacgcaaaggagatcatgatgatttctcaaagcattcaagtcagcttggtggatgggctgttctttgggataatcccggccatggttcggtagcaatcgccaagtataattccggatcgtctttttgtcataggcttttgttaggaaacgcagtccgctcgcgagtatcttcagcaagatatggaagcacgagtcacctggcagaatctgaaatgaaggattaccgtcaagttcatcaaggaaggcaggcgatttgtagctctcttctgacttcaaatcgtacaaggtccgcttggcaaaaaagtcgtagagggtgtcgagaattggtttgcaatcgcgccaaccccagccattgatgagaataaagcacctttgaaacaggactcggcagtagctatagtaagaaatagggcgagattctaaatccgcctcatcgctctcgagaaccggacgcaaaagccgctttacaactgtccagttgtcgtggccaccctggaaacgggagccaatgcgagaaatcccatgaacatcgatctcttgtagggggagagttgtaaggacctgttgccatccactttccaggatgccaatatccttctcagtgcttttagcatctacttctgggcacgcctccgccacaaagtcttccaggcagcctctgaatctgtcagcgctgcatagaacgtgtcgaacaatgacataggcttcaacaatcggatgatcatcctttattccctcctcttgtagttttctctgcttactcgcggcgaggaacttccgaaggcattcttgccccgcctggctcgatataagagtgataacttgtctcgaggccgtctttgctagattgattgtctcatgcttaatggtctggttcacaagactatggctagcaacctggcaaacttggtttgcgaaaacgacgttgtacgatgcgaccttcataaattgctctgcactacaccctgtggcagccattatgtctgataagatttccaagagttttgcaattaggctgtttgctcttgtcacgaacccggctctatcaatggggtcaatgaatgatagagcttcggacgcgtacctaatcacggctctgtatgtagcgtatgcagaatcaggcatgttccacgagatgtctccaggacctccagccttagcggtttccgcggattcgagaatcttgtcaaacaccgaaccgagctgggaggagacggagtcatcccaggcgtcccatcgcatagaacaatcaccaagttggaaatgggaggaactggtgttcttgtcaagatcacgtctggtgatattaagggagcgagagaactctccgctaccaatgaatgtggactcatgaaagaaaattcccgtgtgtaagggattaacatcaaaatcaacagagtatgctgttctgaagtgcctcagttgcccagctcccctgccttgggaaagctgtgccgtgcttccggtgggaatttctgtagctttgagatttggagagtaaaagtcttggatatttgtcgtaaggtcgatgcgtttcggtggtcgcttcctcaattgacgaggccgtaaagcaccagctgatttaggagcgtgaactggcttgtcaatctcaatattcgttggaggaacgctctgaagaatatcatgaccttgctgtctctcgccagtagaaaggaaccggttcagaggcagcctgtcatcacgggccaagagggcaagtgacctctgcaatgacgaaggctgccttaccgtgctgtcatggctgtcaaattccggaacaacaggacgtgggctacttctgctcagtgaagttacggcgaggttccgttggataatccaggcattgcctcgccgttgctgcgcaggtttcattgcagtcccacgagtgcttggtgtaatgtccaaaggagcatttactgtcaggagattctcctcggtaacattgtcgtactctgttggggctgcgtgttggacgccattcgggggagcattcactgttggtgaaatctctttcgcagctataccgtgcctcatcaaagtcgcttgtcgagtctcaccccgatcgctctctttcgccctcttcgcgcttaggccgttgaagatctgtctagcattcgtagacagaccccgtaggggctgtcttcgatgcgtctgactcggtactaggggcaaggtggtttgctgcacgcgccctgaacgccattcgcgcaacgaggcattagcatcttctgtatccattctagaactcagcctaatcaccttgcgggacgggctacgtctcccccgatcctcgcggtaacgtgcttttctcgcagcaattctcagaaattgaggctgtttatttcgaggcactgatgcgacatcgggagcatccaagatgcccaatctggggggcttttgagacaacctttttttcctttgtactctgtacacagagtccgtgagcctcgcttgccgttctaagcgtggcttctttgattgaccaccggtgcgaacttcgtctccctcctgtcctctgcgctttttggcacgctttcgactcccggagagagcagggttgcgaggtgctgtcggaaacatatagtcgatttggttatcttcgggtatgtctccatcaggccaaagcttttgatcaagtgatgaatcttcgaaaccaacccatctagctatgttttgttgcgggtcatcgtcatcagaaatatcgctactctgatcattatcctcttcagcgagctgccttaaagacagaatatgttccctcgcgctagatggggctgacgagtgggctttcttcgttatctttctcgcgacgcctttagcagcttctgtgtccagcctacccatcaaaacattattgcgttgtgtagcacctgagccccccttctgcttctgctgggtccagtcgcaaacatgaagccg

SEQ ID NO: 15996 - DNA, 4479 bp, Emericella nidulans
tagacggttgttgtaatggcctctttcactgaacaaacgtgacggcacttgatttcaaagagtgaaggaattgcagcgtaccttatcgttgggagcaaaatcgagtgcgttgtcatcaaaaatggcctggaggacatattctcttcagcaggcggctgcatgcatgcacgtactactcagagcacatatgaaatctacctgatagtatacgtacagcttgaccaccagaaacaagcggcgggaattgggccctcattgctataacaaataatgggcgccttatcagaggaaagcataaccatatcccaagttcgcgctggtaaccaagcctaccatcaattagagaaaaataaaaagagagaacaaatgctgaacaaaagtacgcatcccgtcactcctatctacctgggttctgatgcacggcacttgagtataattctcaccctataggactggtgttacatactgtagtaggtagtgaacccttctaagtcgagaatgtcaaggccaaagaggacctaagcagctcggcaagaaagttgattctagagtggtaagggcgcttcctcacgacaacgtacctggatctggaaatataaataataacagtggttaggacatggtgacttcagacgttgtgttgaatggattgatctacctggagccgaaaatgtaggtatagctccccacagcaatcctcctggacagtcccactaggcccactgcccgccacgcgcattgaactccttaacgtcacctctttctcccttattttctcgtctccaagaccaattccaccatgaacccagaccctcaggcgctcatctcaattggcttcgccattgcagcggctttccttttctggaccctctcctcaaccacaacgtccccttttgcccgcacattcccgcagctctacaacaagcggatatgtctgctcatcgcgcaccccgacgacgaagcaatgttctttgcgccgacattgctggctttaacaaagccagagctagggaaccatatcaagattctgtgtttgagtagcggtatgctggtctccttcattctatggccttgattccgaaaccaattgatgggttgtgctgtaggggacgccgacggcctgggccacatccgacgcggcgaactccagaaaagcgcaaaacgcctaggcattcgcggagataacgacgtgctggttctcgatgacccacggttccaggatgggatggggaacagttgggcgaagaacgagatcgccgcgctacttactgcaacgtttgcgccgaacgcatcagcatccgcgtccaagtcgatgtcgcgcaaacaagcaaaatctagagacgaagcgcccaccgctacaatcgacgtcctcctgacctttgacgcccacggtgtatcgaaccacatcaaccaccgctcgctctaccacggcgcgcgccattttctcagtatgctgatgaaagataaatccgggtattcgtgtcctgttacgctgtatacacttagaacgacgaatctgctacggaagtatatcggtgtactggatgcgccgtttacaatggtcaagggggttttggatggtttgtttgcagtttcgtcgtctaaaactaggaaaaacgccaaagaccaaatgccggcaaaactgctcttcgttagctccgtgggcgagtggatgacggcacagtcggctatggtgaaggcgcatcagagccagatgatttggtttcgatgggggtggattggaattggcaggtacatggtcgttaacgatttgaagaaggaggggccctcgccttactgatatttcatctggggttatattacggtctttgtgaagcttagcgcacatgtgacgctgatttatctactatttgtactattatgaaaatatagaacaactgatatcgatgatgtataatagaagttactcatgtcttccagctctagtattgacaagaaatgtgaagttccgctcgaacatgtgaacagcatctctattgggataagaacaggcaagggaagcttgatgtcttattcacaaagcgtgactaaccgtgaggggtatctgggaagtaaattaaataaataaccagcacaatgcatcgcaccatgcactcctgtgctttttttttttcgactaaaggcatgctacacccaggcaaccgaagtcaaactcagcgtccgcgaatgcaagtcgtgagagttgaatcgtaccgaaggtagactctaagcagttggaatagctgcgtactcgtcctcatcatcaacaccagaaagggacccaaaagccttcatgagcgccgatttcttcaactgggccgattcatacgcttcctcaacccagaaacgaggtcgggcgggctcggcggatttggtggcacagtggctatacacctcattttcagctggtagctgcacctctgatacttggtcttgaactgcgtcctccaggttgcgagagtcgtaatcgaagatagttggttcaaaaagtcgcctgagcagagggttgtgaagatcgccgggagacatatttcgtttatacgtggcccagataaactcatcgtcgtactcttggttgctaataacgagcctaaagctgtcgttgaaggatggtcggcggaccggtatccgcgcatgagttgaatactagcagacccgtaatatgatacaccatggaattggacgattccggtagacgtagcgtagcggactcgtgctggaataaagtctcgccattcctccataagctgaggcaggaattggcgttcccatacatcaaagctccgaccgagccagtctcccctgtggatcagaagatttgcaaggcgctctattattctcgtctgctgcatgactagaagccgaaggacatcgtaggtgtggacggcatctgcaaaacctcgtgaccagagaatctgggggtccatttccccgtcattagaacgggggtatcgcaggtaggattcgacaatttctcgcgcagctattctctttcgtcttgtctcatccaggactttgtatgccgcgcgcatgtgatagaggaaatcgttcaaacggtgaaatacccatgctgtcttggcgagcttcgaatgcatttccgctgagggctcgatattgtagggttcctttgtcattgtttcgaacaaattttctaagaggctggtgtttataagacctttagatttccgctcagcgtcaggtccatatttgcgtcgggacaaaacaaacgcccattcgaataactcggcccagattgactctgggacttcaacgtcataagaccgcgaaacaagctcgatgatgcgtactgcactttcaatatcgttggccgcactgaatgagtgcgctaccgcgcgaaggagccgagcagaggggtaaaagggtgaagaacgatcatactcggtgacttcaacatgtcgccctttccgtagtgcatcgacatcaatgttccagatggtctgtagaatgcattccatcgtttcgttatctcccactcgggcggccgccatgaaaaggttcactatgctcgcctcatcaccgtcgatgcccgatgctgtcatctcatcgaagatttcttgtacttctgttcgcacactgcgtcctgcagttccgtagccttcccagccgaggtctccaaactttcgtctcctgtaggagaaaggtgtaatgcgtaaacggtatttctctttaccggtataagctgaattccaaactttggcttccatgtagtgattgtaacactcaaggttgggagatatatcgtccatcctcatggaattccagatatggtccgccataagcgcatcgccgagagaccgagcgcagtcaagaaggtgtgtgtattcagcaagccctaaagcctgacctctcgatcttcgtatccggacaatcgcagaaagattcctaacaaaatcatcgaagagtgtatgctgcgccttaaagcgtttgatctgaacagtatatggatgcaacggtcggtatatctctttgaagggctcaacgaaatgggcgggtgagagaaggtgcaaggcttcgataaagctgctctgcggcattgttgcaaccagttcttcgcagtcatagttgagcatggcagccattacctggtctggctgagcggtctctaggatcgcatagaactcttttctcacagtgtccgcgtcttttggctttctcccacgaatagtgaccaggtctgaaattctgctatcaaaggctgcagtttcctgatcgccagcgtttcgattcgctgtgtcgatcatgatattccttacaggctcactagtcatttcatttgttggggtaatgacagtttcactaatgggctcatttgtatgctcgctgaccggctcgctctggcgttcgcaggccttgaattttggtgtattccagctatcaacagccccgggggttccagcttccgtgcttgagtgtcacttgtgggtcgcaatcgaaatgctaaccgggattaggtccgtg

SEQ ID NO: 15997 - DNA, 1084 bp, Emericella nidulans
ccgctttttttgacagctcacacaccgcacaagaatttccaacctgtctatgtgtaatggacttgctacagatacttgaaacaccactctccaaccgttcgaagggtaggaataagaaggcgctacctccctccttctccacccttcccctcttccctcctttcccccctattccttcccctcccccatccctcaacctcctacttcttctctcctcctacattaccctcctccctccttctcccttccattccccctcctcttccctcttcctccccactatcccacccccccactcccctctttccctctcctccccatccacacccctacacccccctccccccccctcccttcccccccctctccttcatcccctcctccttcctcactttccaaccctccctcactttcatctctacttcccctctcatctacttcccccctccttccttctcctctccctctttccccacctcctccatacatcccctcctatctatttaccccctctcccttttcactcctcctctcctttcctctctccgcttcccctcctccatcaccctcccctccttcctaacctcccctccactcacaactaccccccttctccactcttcccccactctcctctcccccctactcattctccctcattcccctactcctttcctcttccctctcctctctcctctccctccacctcccatcctcctatgttcctctctcctacattcagttctctcccctcctctctccttactccctccctctctttccactccttctccccttctcccccccccacccatctctcctcctacccacccccactacttctctattctcccatccctccctcctctccccctcttcctcctcctccccctccactccttcctctctccaacatctatccctctaccccttcccccccactacctcactttcccttatcccctccctcctatccctccttatccccctcttcccgttctctctacactactcccctcctctttaatcctcctttcttccactccccttccatcccccacctcttcaatatcttctcctcccc

SEQ ID NO: 15998 - DNA, 967 bp, Emericella nidulans
gccgttggttgaacgtaccttctggcggactctagggataatcttctggcaacattcagatgtaatcgtcactggccttgcgagtatggtgcgccctgtggaccggccaacagagttgtaagccgggttatgtcgtctgattgcacatcttccggaggaaagagataattcggggggagggccccctgctctgttcatgttctgcctccattccttcctatacttacctcccattaagatctgagtccggctcgtcccctgaccccccattaaccccacccctttaccattctcatcaatcttccgatcgcaccttcctcctaacacgttccccccttgccattctcctccctgtgcgtttttcactcactcctggccttttcctctttctctcccgtctcacccatctcccctcccctctcgccccctctctcctcttccctcccacttctcccttcattcctccttcgtccttctcctctccaccactttcccgtaccccagcaccctactcattcctccttaccccccttccacacttccttcacccccaccccctcttctccttccctctaccctaccccccccccctcttttcttccttccttccctcctattcttccctttccttaccttcccttccctttcccttccctccccccctcccctctcctgctcctcttccctccctttctctcctccctttcccttctcctctctctctcctcatcctttccccctccctctcaccttccttatctttgctccctcaccctttcctctacctcccccctctatattttcttttcctttcccatcatctctcatcttcctatctcctccccctccctattcgccatccctatcccctctcctccctttatccctctctttatccctttccccatcatcacttcccctcctttcacaactccttctctccctcctcccctatccctctcttctc

SEQ ID NO: 15999 - DNA, 3264 bp, Emericella nidulans
agtcacgcgactgaagccacttcagcgaagagacggtgcacttcaatcaatttacaaaggacaacccatccactaacaaactcaggcacggctctgaagtcgatcgaggatcaacagatagctcgattcccactctttgcatcaaagcctaagctttctgttcctttgtacatcgccgtagcccgacattgagtgtttataaatgacggtccagccgtgccggtgggagcgacggtcaccactcgctgtgctgcccaccaaggaaggaaatgatccttgtacggatataaagattgcggacagcctttagtcgaatgctggcaacgcggttcatggagttcatcgtcgggtggttcttggatgctgagctgttcaaaagcagcggtcagctcctccagagcagccgcgaaacgttcgtcgtccatgagtagaccatgtgagggtttaagatgaatactgctcatgaatgtagagaaatagctgtataccgacggcggtactaaatggacaagttagtggtggatatggtggatatggtggatttgaacaaatgggacatggaccaatacttacaggcaagattgtaaatgatagacgtttaaaaggagagacggattgggttaagaccgtgctattgagttcaccagttgcacaaagaagaaaaaaaaagatcaacatgcggcaactaatctgttgatggtcttttgacagagctcggtctgggaacagcaacaagtggtcgtggtcgtaccttcctcaggcccgtttcaacctctcgaaccgctgcaaaatccctacccgccaacttctctggaagaatcttgccgaaggaggaagcattgcatttcttgtctcaagtgcagttatgagagaagcatacgtctccaaaggaagtctgagttcttctagggatagggacgatgtcttcccgggctcgggatgcagtatcgcctcaacatcagcagtgggttgaaagaagactttcatggcccgttgggaagtgatgctatgctgggagctggaattggagaaccgcatatcaggattaaagacccagatctattcagcagtcaatgagcgaaaccggctttagaccagaaccgagaagacgcttaccagaatcccgtcttcctttccgcaatggatgatgaatctgcgggcgctctggcgttcaatgagctctagcagctgcgcagcaactatgagctctgttggatgtgcctccaagctcccttcttcaaggcggccttcagctgcaagacttgccttgaagagcctccaccctctggcaatcgtatcttccacacctataagtgtgccacagttttcacattgcagctcttgttcagacaaagggacattgatactttgttccgtggcctggcatctcaaaaattagcacaggtactacctcaaaatgaagtctatgcagaaaggccgagggacagtttcaagtaagcttttattgaagcacagcgaaactactacttgtttgactacagtaattggtagaaaccacttatgtaccttgtcataatcgcgttgatgccatccctctggaccaaacaacgaagaaacaacgaggcgccgtctcactcccgaaactcgcagtaggtggacgaacgcaaagaacagggaaacggtgcaaatccatcagccgaggataactgcaacgatcccaaatccttatgaccaccattcacgccagtgatcgaagagcgagactgtatttatagggcaactgtatcgaaggcctgatcatggaagagacaaggtctccttctttttgcccaccaaaagcgattattattgcaagtatgaagcatacggcagaaacaatggaacgatttgggatgacccttgctcacctttttcaaacccttacactctatagcggcgacaaggaaagtagccacatccacaagtaccgtgcccggcgtagccagaacctggttcgatgcaccatatcccttaaccttggaattttcatcttcaatcgtctgtttagctgcgccgtccgcatcctgcccctcatgagggtccggtttatggcaatgccagaaatccatcatctcagcccagttcccgctaggcagatctttccacagccatcccgcatgcgacgtactattctcatctgatagagtcggggcagcggtattgcttggcttgtcaagaatgacctgctcacactttacacaccgtaacttggtagtcgggagcatatcccctgcggaccagggaacaaaactatccatatgctcttccactgcatcacgcaccacaaattccgtatcatcgacctgcattcgataggagaattccctctcggttcctgtaatagtacccttgccctggccagcactttgcgtcgcgttgctcaaaagacgccttgacccctccgtaactttggcgggcaatttaatcgtctccatcacagcttcttgcgattccggaagggtaagcgataccgtcacggcgcgacgagactcggaaagggatatctctggataggcataaagagcaccggcggcagatatctggaggctgacttggcggatgttggggaggtactcggcgtggagagtcagggattctgtatcagttgagcctgctcgattagattgagttgttagtggcattctggctgttggcattgtttgactcgtgatggagtaaatgtttgctgtgctggatttggagcgtcggcagacgagagaacaacgcaaacactgcaaacactattccccctccgaagcatagtattacgttaatagtcctccttgcagaaagatgagaggtaaatgattattataatttcttccgcatcctcgagtgtcaaatatatacctaggtaagaagctctaatagtcaagagtcaacggaaagcgatgaatatttaagccaagggatatagtaatcaacaatattaatacaaagcaaatcacacgatgaaattattttttacaaggtggttaaacaaacccaccccatcctgtaaacccgtcggcaaacttgagagcagctttcaagtaaaactcgtccggatcaccccaggtcctcgctatatccctgataacccggagggctttgatataatgtgtctcggtggaatgttcgccgtggagagccttgtccttcatataaccccagccttttccctcagtgtcatactttcgacagagtgaaggttaatctctggcctcaagctgccgatatacacagtccgagtcattgaccaccactgccgcaccgaggggatct

SEQ ID NO: 16000 - DNA, 4340 bp, Emericella nidulans
cacaaatccttctgcagaacccacgacgcaagcttgtccttacatcagcactgattgatcatccaatcgttgtgtctcatcctgtttgagactgggcctggggaggcataccccgaagtttggggcccgcctgtcaatgatatatttgggcgggttgactattcgccagagcatgaactcgaagccgctctcgccaagtccggacactcgatcaaggatatcaaagctgtgatcattgggcatctccatatcgaccatgccggggggcttgagaaattcagcggaaccgatattccgatctatgtacacgaagaagagcttaagcacgcgttttacagtgtggccaccaagtccgacgcaggtacgtctgctatatttgcctttaatcactgcactcgtgataaatgatcagtgactaacaaacatgccaatttgaaaggtgtctatcatggcaaagatcttgacgccaagctcaattggacggccatccatggggagacatttgagcttgcccagggtattaccctgaggcatgcacccgggcacactccagggctggtccttatgcaggtatcgattctcagcaaaagttatctgtggattaagtcgaagctgacagcagacaggtcaatcttccagacagagggacatggctatttactaccgaccaataccatgtcagcgagaattacgaacaatctattccgcatggctggcttgctcgagactatcatgcctgggtcaagacgcatcagatggtgaagaccattgcaaagcgaacaaatgcgaatctggtgttcggacacgatttgggagtatttttccagtatgaacatgcccctcatgcctacacctagacttctacttaactagtcctggtgaatcttgcggagggaggatgattaggctcaaattttatgctttgtagctactctgtctattctttactgctcacattcacatgctgtctctaaagtatgcaagacactttaatgcttgagcgcttaggatgactctggaaactcttttgggtaatttcaattttgccaacacatatgacagataattcatatccaagtcgaagaagagcattccctgcccgttcggcgaatagtgtgaaaacggcctcgtccaccgtccagcgtacactgctatatttttgtattatgacttaccaagggttgagcccggaggaaagtcaagcgcagttttgattggtctcaacggccgcgtgctgctggccgcagaagattttgcaacgtagaaaggcaagctggcaccagtcttgccaaaccatccagtcaaaatatataatgcatttgtgaaattcatgccatgtatggagaattagccaactcaattttgagcccttagcttcgattcctgggcttatattggcttcctttcttcctggtgattgattggccctcgtgtgttgcgtaaaagtggcactctgatgccaccttagccggtatcccgttgcagaacgtattacatgttcagatcgagatacccgtcctcgcgatgaatcatacgataaaatgaatggtcttagccgatgcgacatttcgacatttgcattgtgttttgttgtttcgaagttcacatagagctccattgatatagcattgcaatggagccgccatccaacagccagactgaatcagccgctggctcgccgtcaatttcggaagagacaaagcgaaagcataggaagcgaaggaatggacgcacaagggtttcaaaggcatggtatgttacaatgagcagccgaagccctcgtagcgtccgtagctcatgtcgtcttagtgccaactgcgctcgtcgaaaggtgaaagtaagaattaaatgtgcaccactggcacaattggctgcttgctgacaagaccttagtgcgatggggccattccctgtatgccatgcttgcttcgaagcaaaagctgccaggcaaagccagtcggtgataaacgaggacacgagcaaattggtgcaaattcaggaataatttgggcaaaaaggttcgcatcacaatgcacagacagccattacgatcactgtgggcagccgctgtcccctgcctcgacggcaccatcacgaccgcaatccacccttccaggggaggcatatgacgaaaatgtccgtctaaatgcatttctcgactctgaatcatctcttgccagtcgcgacgaatggaacagctggttagaggctttctgtcgagaagtccacccacagtatccgttcttgcaccttccgacattaaagtatttatacacacaactgccagatccttcaggtctgtctggcgagcatgtctttcaaaatgaagagcagcgttgccaggtgtcgctggtgcttgtctgtctggcgattgggtgttactgcaaaagttcttattcgagcaatttcaagggttcctgtcctggcggctggggcatctattcaaccgccattgatgtctacggcaacatgatgaaaaccgcaacaaatccttcgacggggctactttttacgcaaacgattgtgctcatggtgagataaagttccagttccgtcactgctacgcttgattcaaaccactaatttgggggcttgatcaccaggcagtctattgttgctgcataggtgcaacgcaaatggcaaaaaagctgctcagtttggccatttcacaactacactgtcagggctgccatcaacgcgatactttgagcagcatcccagttgtcagaggcgagttcatgcggcgtttgtggtgttcagtctatgccttggatcgagaactgagcatccaaacagaagacgagttcatgatcaaggacatcaatgtcgactttgctcttccaatgaacctgggtgatacatggatgaccattcactatgatgacaacagaagctcttcagacctcgctgatctaattcaaaatgagatattgaaaaggcctacaatggaaataccgtgcctcagggaaacgacatgctatgcaagagcagctagcaagacccgggagatgctgtgtgacaaggacacgaataatcatcatgagaacagtccattgttgattgagagcctagagcgctatatctcaggggcgttccggacgattgtgttggcattccacgcagaaaattgtcaagccagccagccttcaacggagaaacaagaaattgaaaagaagggatggtcactgagaacaattgtatcttgaaccccggccgccgttcatttcaaggatcattctgaatccgcctgctgctgaatagaacgctaactcttcacctagagatggggctacttgcgtctcctgatcagtctcaaggcgctcaaacgatcgaaagagtcagacctccctgacagtcaagcaagtcggtttacctgtctgcatctgattgaggagattctcttggctctcaattcactgccacatgagtttccaaagtatacatttcccatcctccactattggaatagtgtggtgagcattggactcgagatggttgctgaagaacccttgcttcgccaattctatggcggaacaatactcgaagccgtcatctccctccgcgaattttattcaaaaacatggctgtcgagccagatgagccaaaacatcctccgtatgagctatgccgcccgctcaatttttgccgacgaaatcgctgaacgcgagggttttctggatcaaccccgaggcctctcaagtcaaaggaacatgaccgcagggttgaagaaagtaccattcaccacgagcacgctctctccagaatcagcaatgaataactcgttggatgagacctttggattatccagcactactggagcacctggggatgtgtctatcgatcagacaaccggaaatcatggtagaacaaccgccaaccacagccaagaacagaatctttcccatatatcaccggaactgtatattgaaaactccaatggccaagcttccttccattcccagggagctcctggcgtgccggaaaccaacaatcctcaccatgcagaaagtgacccgcacattctctacgcaaatggtcacttgggcagccaagaagccagcattgtccatgacgaactcaacagccaacagctttataccaatcccgattcacccgtcgctcaggacacatccgggccaggcattcctttgaatctttccaattctctcgatgttcacaatcgtcctgaccgctttggttccaccttggcaaacgaaacaacgcaaaccatcatgtcggacagtcacatctcacctgggatcaatcattcgagccttgtgattctggctaatcaaatgccctggattgtggcatttccgagcttggactaaccaggacca

SEQ ID NO: 16001 - DNA, 3556 bp, Emericella nidulans
tgcttgcggtccgattcttcgatgccagtgacgcgggcgtgatgtgctcagcgacccaggagggattccgggtgcgtcggtcgtatgcacctgttaggggaagcgacgtgattgtgtcggctatggggcctggaaagccatactgatagatgccagcgggatcgacgggcccggtagcggttgcggacttgctggcgagcgaaggggaagccggttgagttggtactgggacggcgacgggggcggttgggggagcgggggcggttgtaggagttgctgtagctggcttctgctgttgagggcttgggcgtgagtagaagagggctgtgataccggcgcccgtggcggcactggcggctgcaatagcagcaacagtggccttggacatggttgtcgttgctgtggattgaaaaaatggagaaactcggcgataagaagaaattgaaaatgtttccaatttcccctttcggtaacggcgatgttttattgctcaccgcccaatgtagtatagtatacaaaggctatgttgacaagactctctgatttactccttgttgaaactccatggaatgtcgttctcttatttatggccaacactgctgcgtgtcattgctaggcttcagctgactctgcccgctgatcacattgatatggtcatcctggcattgatggactaacccgttcaaactttcgtcgacgaatggcgtttataccaagaatgctcattttcatactaatcatgtatcaaagcttgtgtcgagattcgacaaagtggtgatgttacttcgctgtgacccgggatatagagaaaccagttcctaagaggcgagcagggcgagcggaacaaccaaacgacgattgggtgcgataacgttaggtttccaacttgcatggctgtccttgtgggattacaagcgagctgcaaggcaactgtttgcctgaagggatagtgtcctgatgaactcaggtttgaatgtacattgcgttggtatactgatataagctgggctaaactgactccgcaatggagcttttgctccttggtagaagtgtggagtgattgctccacaccttcggctccatggcgaagatggtctgtcattattcgtgattctatgcgagattgacatcttggagagttcgggcaccgaataggatatgaagcgtatatcgccatcgggaagccccttgacgtgacgcgaagctctcggttgacgacatcccacttcaagtccatgctgggaacataaatactgctatgatatcccctcatgccatcctctttaaccttctcattgtcacgatcaattacccggaactattatttgcccagtgcagagtatataccaaaggttaatgtacccatccaatgatgtgaaagatggatcggattgggactgatcataatggtcttccctagcagtcacgatgcattctctttggctctcagccgctgccctgctgccgcttgtggctgcggactggcagttcaagtcccgaaccgacttggctcctcctaggctgaacatcaccatccccgcagccccagatgtcgagaagggttatctcttcgtcgcacctttctccggttacccagacactgcaggagagcagcatggtccccgccaggcggcaccgtacatcttccgcgatgacggagagctgatctggtccggttacggctactactcgatctggaccgccaatttccagaaggcacgctggaaagggaaggacgtcctcttcagctttgagggtgaccataaccctggctatggtcatggccatggtcatattacgattctagaccagcattatgaaacaatccgtgagctgcgcgcaggaaaccacaagctaagcgacaagcacgagttccatatcatcaacgaagagactgcgctcatccaggtttatcagcctgttccagcagatcttactccgtggggagctagtcctgaacagcagtggatcgtggatgcaatcatccaaggcatgtcttatctttgcattgtgaagcacgagctaacagggacagagcttgatattgaaactggcgaactattatttgagtggtcgagcttggagcatgtgtccccggacggtgagtagatccagagctattgcggcagccaacgctaatagtgcatagaggcaattctgcccattaaccctggccaggctggttccggttataactcttcggatgcctgggattacttccacatcaactctgttgacaaagactcagaaggcaactacctgatctctgctcgagatgcctgctctgtccacaaaatcaacggcaccacgggtgaaattatctggcgcctgggtggagtcaaatccgactttgaactgggagacaatgtccaattctgcttccagcaccatgctcgttttgtttccaaagaaggtagcaaggaggtcatctcgctatacgacaatcgtgcgcacggtaccgaaaacggtcgcggccacgaagttcatacccatccattctctcagggcaagatcatcgagattgacactgctacctggaaggccatcattgtccaagccttccagccccccgatggcctcctttccaagtcccaaggaagcacccagctgctacccaatggaaatattctggtcaactggggctctgagggcgcattgaccgagtagccgtgccgatggcactcctatcttccacacctacatggattccggtttcctgggtttcggcgttgagaactaccgtggcttccggtacaactggactgggttgccaaatgaggcgccggccattgtgtcccttgagaacgacgagggcacagctgtgtatgtctcctggaacggcgacaccgaaaccaagatctggcgcttcttccgccttgtcgacgaatatggatctcgcagcttcctaggtgaggtcgaacgtaagggtttcgagacttcgctcttcgtcaaggatcatggtctgggcctcgtgacagctgaagccattgatgctaaaggccgggtcttaacttatacagttgccgttgaatccaagcctgagacgcttcctcttatctcttcatctgttcagtcctcgaatgctcctactcacactttgtttgatgagaacgaagagcaagttcctctgggtactaagaagagtcgttggcgcgagtacatgatcttgaaggttaaccggtttgacttgatataagtttgcctcgctctacttaagccgcctgtcgtggagtaagagaatcgttgacggttattgatggtcaggagtatactgcttgctttgaaccgggtgtattgttagtcgacttcagatagactagtaggaaagatcagcgcgacctgacgcggactgcccattggatatcctccaagtaggcaatttctacacccagttcagtgcgtggaccgttgctatcagatgtaccgaatatgtttccattttcagcagcatattccataatgcccgcgtcttttacggcaccaaccctgcagatcaaattcgatcgacaagccaccgaccacaattgcaaccacataaaactgatatcgagaataa

SEQ ID NO: 16002 - DNA, 461 bp, Emericella nidulans
cctgcagtgctttgtgtgtccttgccgacgtgcctgcgtgtggctgcctgtccatgttctggggtgcgttacaggggaggcaggtcctcggacttatcaggccatgtgcatacactagaatctccgggccgcaaagtgagtgagacacctacatatgtctcaggggggcccacataaggcacgagcaggagactgtctatcaaggcatcgatggtcgcatagggagcggggctaatatcagctgccaggtggcggtccatcaccacaatacggtactctcgcgcagttgctgaggcggatctctggagaattcattacgtgtgaaagtctacgctcgggctctccggatgtcggcacatccatgaagacactggtgacgacatgcaacgtatctgaatacctctaagcacgcagctcaatgcgacctgcgatagcttctcggaccgagtaagataggcgct

SEQ ID NO: 16003 - DNA, 888 bp, Emericella nidulans
ttatgcggccctccgccaagttgagcaactacgaccatcgaatgtgccttccatatctttcttggcgatgcttgacatttgtgataccgtgggaaacgcgcataatggcggcgggacattctcaatcaagagcggtcagacaggcgagctcgtcaagtttgagcctgacgccgttagcacaaccacgggccaccgtggcagcattgttcccggcgagatcggaagtcccattcctagcagtaccatgccggctcttggaggaatcggccttggtacacccccttcctctgctctttggcaattttcttctccaaccacgggtttctagtctaggcgtttcggatgaaccagggggctcctttcaatcagctttttcatcaacgttttgggatggattataagtttctcacgggttaaggataaagcgtcatctcatttttttgcctatcctcatcttcatttttctcccgttttttatttaacttcaccttccattaccactttaatcttttccaattgcgcacatgtccttgatacgatatgaaactttccattcttcttccatcctcctttctttatccgttttattgaatgacatggtttgtgttcgggtacttttttacccaacaacttaattgctgttgtttacatttttccctaaactatcatggacatggcgccattatgtattttttaccctactatgctagcccaaaccaaaatggatacaggttctgtcgttttttcgaccatgtcccactgggttatttcggggttacggttctacttgttgctcatttatttgaaggttccttgcacggtttcatagtgggaaatttccgtggtttacccaccttgaacctgtttttttgggcctttttgcttggg

SEQ ID NO: 16004 - DNA, 841 bp, Emericella nidulans
atggcctcacaggcaggctcgcttggagattgtttgagcgtcctcttagtgtttcgacttggttattttttgggaagtccctgatgctctccctctttggttctcttgtaatttcttgctgatattcctttcgctctgagtctggggatttttgtttcactcactatcttggttgggctggcgtcttgcgatgggttatgaattgggaatgcttgctgtgtccctagggtgctgggaaatcaattgtcgttatatctaggtctgagttatctctattctgttcgagtcgtattaagccttgagatttctgaaagctttccattgcctaccacgacgagtagtctgattcaggatgatatgactggaccgcaagaatgatgaatgacttagactcatcaccgcttcccattacaagtctcgcgacctgaggataatttgccgtgcttgaggtagaatgaacccttatttgcttgatgcgagagcataaactatattgggtagcatatgttaactctgtttcccgctcaatgtaaagaccaggttcttttgaccgaagaacttggatatgctggcacttgcccgcttggatggacctcctgtggtggagcacccgtccaccgttgctaccggtttaggttcaagccttagaaaggctttaggtttgcctctggccgggctaaacccgcttttcatttaaagcccagcctgaacttgctctaaacaattttcaggttttgtccattggccataatttattaaaatttcggggaaattttttgcctcaaaatgtaaacaatttccggcggggtttgaaaggtttttaaagggggtttttccggcc

SEQ ID NO: 16005 - DNA, 511 bp, Emericella nidulans
aagcctcagtcacgggtaacgcacactgggagaacacagagcaagaacatatacacatacactacacgtttctactggcgacgaatagccgggaccggggaccaacgctcatgcggggcagcgacggcttcgagatgaggttttttctacggtgtgggcagtgcaggattccggttgggttctttttggatgaggtacactttccagtatcaggggggctgaacggtgcggcggctggacctggattagatcgctccggcctgcagggaggggaaggggtagaccgagctgttgattctgttcctggtgcactaatggggatggagatcattagggaccaggagaacatgaaagcgggcggccgagagtggcgacactggatctaccgacctctctacggcagtgaaccgaggctggaagactttgcatctggcgatgggttacgctaatacattgtggatacatagcgcgacaattttacggacttatgaaagggtgcatcatatcattt

SEQ ID NO: 16006 - DNA, 663 bp, Emericella nidulans
  unsure (1)..(663): unsure at all n locations
tctgcagaggcctgtgcgagcccaccagtggtacggtgcagtatgctatgtggctagtagactggcaagctggccaacactgcttgtcgtctaggcccaacaacaaagaaccaaactgcaaaggcagtattaatttctcagaggtcataagaatggctcgaattgttcccgaggtcagttttgcgagcattcttgcgtattcctgatcctggaggtcacttggccaaccttaaggttctcttgggaaggaggagatgaaaacccagggcatgacaggctctgagtggccgatgggttcctgtcccacccaagcagctgcgcaaaaaaagtttgaattcngcgtgctagtcccggggtagcctagcgcagagcccgcattctggcttcccctctcccattctccaccccaaccacagcggagngggagatcaacgaaaggcgccaaataatcagcagtcgactcttttctgatgattgaaccccgagtacctaccttaggcgataatgctaatggaagaaactatagtactggaacgtatgtgtcggaatacaagtgtccatgcatcatgcatncatgcattgggaactaatcgnctncacttnctncatcatagcgcctatcctctcagctttcccccagggtcgaaaatctctcttatatat

SEQ ID NO: 16007 - DNA, 982 bp, Emericella nidulans
  unsure (1)..(982): unsure at all n locations
tcgccatcatcatagatgctcttctacgaccccggtgccttctcgcttctcgtgtcccattggccagattttaatttacccctgcacatcatcaccaattcttgaggcagtcctcatatctcattgtccttatcttctcgtgtccaacaatcatgcggtggtaacggcacatcttgaatcgaatattctgtgaacagctgagcgccaaacaggcataatgtgacctgatgatatcaatttcatgttttatatcaaaaagctgcaacgcctcagcccgctttctggtcacaatcacagtaggaatggcaaccagtgatctctattcatgtagcaaaataattgactcccctaacccgactctaacgcgaagaatggtgtgggaatctggctgactccttgttcagttgtcagaagcaatcagtgaccaacgtttccgccgtaagcatcccatcccttctgtaagcgttataatgcgtcaattcaactccaacccccgatgcaatccgcacgtcgggaataaatattccatcgacgacaaaatacctgcaatcgttagatggacgtgtacgcagattgcctnccagaccgtacagcatccaggtctaactgtatagtgtagaatgctgtctttgtcatgctgggacaggataccagcagaaacaaagntagaagcatncgaacatatttcggtccagtcaatcaatttttctgtcctcttagctgctaattccccaatacctacctaatnctgcttatacccgaantaagcctatcgcgtaatatctgtggaaacgcttgggctatacttcatcttgggcttcatgattttatctcgctctcgtgtggtgaaaaaaaaattttttttccctcccccccccctatttattttaaaatagtggcccttttattaatggcggggtgtctttttttggggccaccacccttctttttttttttcacccccccttaattaaaaaattgg

SEQ ID NO: 16008 - DNA, 893 bp, Emericella nidulans
ataagttctgatcataacgtatgtgaacatcgaaacatcccattgaaatataaatacagtacaatccacatgcttaacttccatatctgtacacaccgatggaaccattttctcatgccttatcctcctcaacaacaatttccccctctctcttcaattcctccacagacttgatctttacctccataaccctcaacagtgtataccgatgcttactcgtaatgcgctgcacatgcctccgtctcctcttcgtcttctcctttacccgcaacggctctgagtcgacacccataactctaacgcggcattcaaacagcctctcatcaacgtaaggtgcgcctttcagcgtgaagtcgcgggatcccagcacagaggcacgattgaagcggagaacgtcgcccggctgcacgttcggcatgaggaagggcaggcgcagatggtcgccttctgttatcaggtacgggcgatcatgaaggtgtgcggtgatatagtgcggttatttggctcgacaggagcggaagcgtctcgagagggattttggcaccgtgaggggagtgctaaagttggggggaaggttgtctcgtgtgtcatctacctttatcttgttgtctttcctccttcttctctttcttttctttcacataaccacctcctactctcaactctatctctacttcctccctatactcctatccactcccacttatgactactctctcttcccttttctttttatcactttctcctattcttatccccctcccacaaacattcatctctcccattatcttcctccaatcttcatcacccttctcattcctattctctctttacttcttcttctctttcacacctcaccttctcttcttccttcctctacttccaaccttcca

SEQ ID NO: 16009 - DNA, 3296 bp, Emericella nidulans
atgaaacgattcgagatcttcttgttcccggcggcgcaaaaagcgggctatccctgcgagaagactcaaacaaagcagtatcagtatccggattgtcaagccatagcccgaaatctgtgcaggaggtgatggatatgatcatgaagggtaatgcttgccggacaatgtccccaaccgaggcgaatgcacctcttctcgatcccatgcggttcttcagatcaatgttgcacaaaaagacagaaatgccgatatcaacgaaccacacactatggcgacctttagcattatcgacttggcaggaagcgagcgcgcgacgaacgaaaaataggggggaaaggctctttgaaggtgcaaacatcaacaagtcactcctcgccctcggtagctgcataaatgcactctgcgatccacgcaaacgaaaccacgttccttaccgaaactcgaagctaacacgactccttaaattttcgctcggaggcaactgtaagacagtcatgattgtctgtgtcagtccatccagccaacatttcgacgaaacccagaataccttgcgttatgccaaccgggcaaagaacattcaaaccaaggtcacgcgaaatgtattcaatgttaatcgccacgtcaaggacttcctggtgaagattgatgaacagatggcattaattaacgaactcaaagcgcagcagagggaatccgaaaaagtcgcctttgccaagtttaagacgcagactgaaaagaaggatgctgctgtgcgggaaggtctcgctcggatacggaacgcctatgatcattcgctaccggagcggcaagaaagaataaataatatgattagattgaagcaggtaagccgcagaatcggcctactgtcatcgtggattgcagctttcgataatgtttgcgcaaattctgaaaacgaggtgccattgtcgaatctacaagccgtccggaaaacagctcaaggaatcttgctagagctggaaggaagtaggcagcattaccaccagcgcctggcaaagagtacctgggaccgtggtatgacatcggccgttgagaatgctgtccaacaacttcaagaattcgatacgagtgataaaagtgatgttaccaaccttcggcgtgaggcggagttgttgagggcgaataccgagcgagaggctctatcggccgttgcagaacaagacaaggcaggagatgctgctgtagtgcagctgttacttcaggcacactttgaaatagcttcatcgattgagcgtattatgcatttgagcgaggaagaggccgtggaaatgggcaaacgaagtctgaccaaaatgctcgattcatgctgtacagcaacctcgaacgtcgtcaaaccggacagcaatctgcccccgatgccgaccttcagcccttcaaaacatagccccgccaaggcaaaaaagagattgagcttagctattgttcctccctcaaagagcctgaacgcaacagtcgcattgcacccgaccgccccaacctctcctacgcgaggatctcctcgccgtcgtaagatgggcacggggaggaagagcgtcagcttttcgcccaagaaggccccagcaaagccgccaaagcggagcgttcgatggaaggatgacgaggaagacggtaccctgactgaaattcagaagacaccgcaaaaacgtgaagccaccctaatccatcggagcgtcagtccgcaagagcctgggctccccagagcctcaccgattcctcgtggcatcccagttccaactcgaaacttcagcccttcaggtggctcctcgccaattccaacaccttccgatcagccattgagcattccgaagaataacagattcaagacgggctttttatctaaaaagactggcagctctccaattcctgcaccacctacagtagctctctccgtttccgaccggagttctccactgcgtgacatagaaggcagcagttttctaaatcgagcatctacagagcggccatctaggattgcggtcagaacgccgagcggcaactactcacccagtcctgcgcagcctgagactaagggcgaatggaaggctagcaaggatgatgtgagaagaattagcaccgctatgagacgtatctcaatcgggtctttcggtaccagtgcatctgcgactgcgcttcgtgctcaccgtcgccgcagcccgacttcagcaacttacggtagttcaccaccagagaacacgatgttcaccgcgcaagccaggcggatggccaagggcgaaaaagagctcgaaaacaaacctgctgtcctaggccctcggagccttcccataaagaagaacactagtcagagacgcacaacgttcggaggagacattcgtcctagagactttagcttctcaggccgggatatccggctgagtgctattggcggtttctgatgtggtagaaggagcaggatgcatgattgatttatggactctttattgtttttccttttttgcagtttggcgatacggtcaaaggggggcggcgttgctgagttttcttttcttcgtgggacatagtattttgaagatgtgtacaataacagatgctgctttggagccgaccaagactgggacccttagctgccccgatgattcacccagtgatatgatgaacatgtatcagcctgtcaaaatgcgcaagtaagtcatgttagctggatactattatttcgcgatttggtacataaaatgatttagtgttgggatcgcgatcgtctatgagatgacgccaccgactccaagcttagctaacacagcgacgtcctggcgacatatcacggagcgtataccaagctgctgccatattactgctcatcgcattcgaactataaccccttcaacaaatcgaacagaagggcataataatattgcctcctataaaaaagtttatggcattcgccgcacccaccctcggctcgaccgtcttctcacgacttttccgcaccttctccaccacttctccgtccctctcacacacaacggaatcaatatcgcgtaatatgactagctcgtctacacaaacggcgaccctcgccgcagggtgtttttggggtgttgagcatctcttccgcaagcaattcgggcagggcaagggcttgctcgatgcaaaggttggatattgcggaggaaacacagcgtcgccgaattatcgggctgtttgtacgggagatactgggcgtaagtggacagtaatctttaagtctcgcggtttgatgaaataggaggctgatcttgtggaactacagatgctgaggcccttaaaatcacctttgaccc

SEQ ID NO: 16010 - DNA, 4307 bp, Emericella nidulans
gtccataagatcatcatccaacaaatcatcgtcttcaccctcgctatggtcaccgtcatcggcttctgcaaaatcagtctcgtctcgatggacaccaagcccgatatggatgtcttctgtaccgtcgtagatatcagttccatcgtgctcggtgggaccgtgcagaatttccgctctggaatcgtggtcggcatggcggagttccttctcttgatgaggagctaagccggtgccatcgttcgtgtgtacagcgtgcgtatggtctttcgcggagggggcgtaatggtcttgaaggtcgagcgtatctggaaaccagttcaagtcagccacgtcaagtaccgcgctgacattacagttctcgtcaaacgtacccgctcgcaccattctaggtctagccatatttgcgaattatgtagcaggatgttcaaaggagactcaggagctcgggaacatcgaaatgagtgtgaatcggcagcgtcgacgcttcgaagtgaaatcgcgcgtagcgagcgaaccgtcatatatcaattgagatcaatcgatcgcaaaccgaaacggtaaaatgaaggaatgccacgaccagcggcggtcggagattgcgaacgacggtgatcggaggacaggtgtttcgagccacaggccgaattcaggtgttccgaaagaattaaaggcagaagataaatcagcaaatcctgaaagcagtgaaaaagaaagtaaaaagaaatgtagaagtcagtgtagagccgttaaagcaaatgaagcccgatgagttccccagactctcgagacatcgagaaaggaggtcccaggacaaagactccccgatcaaacgctccttgcgcgcgcttatccactacatgccccgtgcctgggcccgttccttggcactaactaccttttgggcttagtgcgactcaagctcatcttagatacagccctagcacatgatctcttctgtgtcgagtcgacctaatacatatacccttccatttactactcttccaacctacaccctaaccactttttctttaatccttcctatattcctcctccttcagagatcttttattggacgatggccatgtccggtgtagatgttcgggttagtgacgatcatacccccgctctagccacgaaccataataactccgacatcaccccttgcctaccgcgtctcatccttcactctttaggcgccagtattgactttgtcgtaagtcgggcgggaatggggatattctctgaccggggttcgcactgcactaactcttggcgctcatggtgaagtggaatgcagttctgaaacaagcaagtctgcttctgcagtgcgacgttgggcattgaaactgagagaatcatcttatatatcaattgggatttcgaaaggcaactgttctataagccgatcccatgaagctgggtctattcattccccatagcattacctcaaatggcccgcatgttcgaatctcaccaggatgcatctatattcgccgggcgccatcgtcaatcataagacacatccaaccccccgctccctccccaccaccaacccaatcgggtatgggtcacatgctcgatatcatgccataaatccttgagtgactcgatgttatagcggtgccgcgttctattttttgaagccggtaagaggatggtcgccagcaatgagactaccctgctgttgaccgataaccttgtccccgacttggtcgcggagcagccgtactaaaccgcgttgtcccttttagctgcgtctcgtagtttcaaagatggaggagctgacaaacacgatatctatgttaccgttaagcagccgtgtcagccttactgtgtttgttatctgtaaaatttccgcacgtaaaagttgcttcaagctggtattttcaatatcaacgatacccaaggtcaatgaaagattttgccatgtcgtgcccaaagaggtagcagcttgggatgtcctagtaaactaggaaacagatccttgtccaacacggcagccagcatcgagaattccggccttcgggttgctacggagctactccacgacgctcatataaagtggatggcttgagagatgaatggaaagaagcgtaattggcatatacaaggatcaaggcagacttgaaatgcctcatcccactaatcaagtccgtacgattaggccacgagccaagaataagaaccacctttagattatgggaagcaaatttttcggcgaaggtgcagctgtagctttccagtaacttttgggcatctgagtgatgctttgacatcagtttggtaccaacacgcttcgtgtcgttataaatcactatggcggggtctggaagatctaattactatctcatcaagggaggtaagcacagtcagccacatgctgggcgaccctgtgtttaattagttcttcggcctgagattgtaggcactcatgaacgggcagctacgagatagctaagcctgaatggttgtcgatcagttccaactcaataggaattaaggaatatactctgatggcgcgaggttttgcgcacgcagaggacttgtagagcagcttaacacctctctaaatgtccaaagaaggcgtgtgacaggcaatataacaacttcaaaagcgacagtaacttcctggtgtttcagtcagctgaggatgaacaatacgacctactgggacgccctaatcactgatatcgatcttctgtccgcaccgtctcccagttcgactctgcaggtcggggatgcgcgttttgactgtctagatgctccaatctgcgtgtcatagcaaaaggtgcaagcctaggctgaagaccggcgatattcgaatagtagacaccgcaaaatccaatttgtcaacttcgaataccaggcatatgcactcccttgatccattttcgagggtattctttatcttcatgcgccacgactgaatcgatttcatgaattgattggggggtataacgtggagggatttcgaagcagatcaaccacaaagctccgacctagacggtccacgaggagcaggcatcgggctgcgggcgatggaaaagcgatccttatcgagaagtttcttttcgactaccatctgctggcgaagctttttgctggcacccgtcacgctgacaggatacagcaatctgctgaattcagcgtctttttgggtgacaatactggcaagcttcgtctatgatgcccaaagagctgcgtggactgcactcatcagagatattcaaaaaaaatagtcgaacagctagtgcaggcttaagaagctgtagcgcattggaaaagagccgagcaggtactgctcgctctcgggagtcaaaatgcacatactccttgactctcgcagcgaattttcaaaagccgagataggcgcagtccttcgctttaccttcactttcattagacggactgccagcaggtatcgcactactatacgtcatcaagagcgcagagctcctggcaattaaaggtgtatgtatatctaggcattagcgtgcgccatccctaacttcgggtttcctgcaacctgacttgctgattaataatggagaacaatccctacttgaagaactgccgtcgcagccgcttaagggatgctattcttggggtaatgagtcattgatgttaacggccgtggctattattgcttggtcgaggtgctgcagttgccaggcatctggttggatcaaagcagccagggaggggcgtcaagcatcctaacagcgttcatcgataatggctgaggcgcttcgatgacgtcgccatacataagggtcctcaaaggatcaaagcctaagagggaatagcatacataatcgacttgagtaatgagctgcatacaaagtacgtagtcagtaataatagtaaagaagaggagtcgttcaaataaagacacaccggaatgactaatgaggaatctctgatgggctcctccgttttctcccgatgcgttctctcgttgcacgacgcaacctcatcgaattttgtcatcgttttctcatcttcaaaattctttcaaaaagtccttcaccttcacccattaaacagtataaaccctttttatagatacgcgccccagccgaccactgtttgggtttagttcttctttatcggagcctccgatagtcgatggctcgataagatactccacatctcatccacattacatcttccatcttcccccatactaccctcttcgcttttcgcctccctacggcccccgctcgtcaaccacatcgagcttacatacttcatgacttataactctttctaaaggccttctttgtgctctccatgagggcatggcg

SEQ ID NO: 16011 - DNA, 3602 bp, Emericella nidulans
agatgcattgtcaggtcgttggcccgcttgaatgggcactaaaagagacaaagattaaagggaggagccggaggaggacaagggactgagtactttgtagtagcagcaacagtcagtttgttggtgagtgtatgacatgagtttgagagaatgagtatggcgtcggccgaatggcatgatgatacgtgccaaacgctatgcagaattctcagagttatctatgtatgtttctaaagctcaatctcctcctccgtatgattattccccgccgaaacaagtgatatccccgcccatgcatcataattatcctctcttgccgcttgatatgccgcttgccggttccgaagtgacgattctcgtctaacgagaaatggatgctgagcccgaggtcggttccttgtctctagcaccgactctagttgtagagccggagctagatctctatctggatctacaagtccttgcgcagcgtcgctgatgtattcctcttcgcttgcggtttcttcctcgaaatattcgaccagtcggccctggttctggctttgactctgcgaagcaaatgcggatgaggatatgctattttggctgaaatgatgctgatttgtttcgtgctccgtgtcagtctcattaacagagccgttgtcgttgtcggtttcaaggatgatattgtgatacaaatccggttctgtattgtcaatagcttcatcgacattgatcccaacaccggttgaagtcggcaaaggtggcttcccttgtcgtacagtactggctattggctcgtaaatcgccgttggctgggaagacgaaaaccccccgacaagctctcttacatcgtgttcttcagaaatagataggcgaggcccagaaatctccccgtttgtggaccatgaagatggaagggagacaagttgaaacttattgctctgagatttctgggcgtcgttgaggtaatgccatgcttgttggatagtatatcgtctcgctttcgcggtctccgggcttaaggtgggaatggggagggaatccgagttcgagccattatctgatgcattgtttgtagtgcggtaggtatgttctagtggttgtgccatagtcgcaggtggtggagaaggaggggacgatgaggcaattgttggccttataggaggcggatctaatgagagcgaagaactatggccccccattgttggaacagcaccatttatctcacggccagtccgcatagaaatctgtgacatttgcgaggcctgtgaagtagtgctgttctcggttacggttaactgttgggttgattgcgatggggactcaggattacgtcgtcttctctttctggggcgttcgccgttctccaacgcggtcatctcacgcatgtactggtcgtggacgaacttgttatcggaacagagatggccaaagagactttccatagagacgtcttcatcccaatctagaggatccactgtgcaagggtgaatatcgcgaggtttgaaagcttttatcaactcgcacagctcggcgtaggaagaatggcgggaatacgggaatcgctgtgcatgttgtcagtagactgattataattcatgcgagtgggacagtttatatttactatagtccttggaagaggttcgcctgatctatctagtttatcgattgatttaggcaaatcctccagcaacatacgttcctcgctcagaggaccgcggctgaggatattcacaagctcttctaaaggcatctcgtgggcgtccttcattccgtagctgtccagagacaggactttggtgttagacctgaatgctgctgagagagcttcttttgccttggagagagcttcatgatcaggtatcttctcgctgcagagctgttccagttgatctagtgagtattggtccggaacctccagttcatggatctgatatagatcacctaggccaccgccagccccgagttcgggaatatcggcgcccttgtccgtccggcttattatggggattatgtggaccgtgttttttgatgatgcggcagagcagtggacgcctggctcacaactgtggatacgagaccgctcatcttcacttagacagcctgagacaactctatttcccaatctgaacccacagagcgaagctgcttcaactgtaccgctctgtgtgacggatctgtacaggccaatctgataacgatccacgtggacctacatatgtaagctagacgaaaagaggcctgtacatatacttgccttggtatcaaaggcagcggcgagcgccatccagacctcttcatacccgaatgtccatgcccgaaagtagaagttagtgtcttcagggtacggttccagtttgcgtaggagctcagctatgccctccgcttttgttggaaaggtatggggaatatgcgatgtgtggacgaacgttgtatctaggtatattttatctaatcgcttgatccccaaggtatatgggataagaattgggtgtcggatgaggctatcgatccaccacgattccgctgttgcccgtcagagaaatgaccaagtggggatggctagcgcgtaccacgtatatctcctgtataaagaatggcctttccatcaccttcaataaggaacatcacagcgccagtgcagtggttcgcatccagaagggtaactctgatagatagcttcggagtaagatcaatctccgtcggcgtgtttagtggaatcggcctctgcccccaggttagcaagtgccaccccgtatgttataaaaatgcttaccaaaagcttcgacaagtgcttgtagtgcagttttcgagactcgaggattccactattgaaattcattcgatggggatatttctcgattcgcaaaagaatctacaagatattagtcaatggactcaggcaccttgctgcagccattacctctctggtagctgatgagcagtatatgaaaggggctctaaaggactcgagtccttggagatggtcactgtgagcatggctgaggaagcaggccagagggggtggccgttctgggtttcttcggaagtaatcgactagagacacaatttagtcaacttagtgagaccatccctggtataatagctcggacgcactagtaatgaaagggaactctgcgagttggagctgtcaatgttcgagctgcaatgaaggtactctgaggcaaataccttggatgactccatcaaatgtcgacatcggcgatcctggatggcgtattctgatgggacaattgcagatttagcgacatattatcgccagataaggcatatggtgatgctcgcgatgagggtcgagtaacctggaagaatgtcggttcggtgcccgcacgtgacggcctccatttgtataatcttcgacctcaaccacaacacggagtatatagaacgacggggggctgagggtgatggagccatttggcggtctatgatatttgatagtggcgaacagcgatcgggcctgcgacggaatgcggagtaagccattgaagtattcgcactgattggggcaatctaccaagtatgccccagcctagactgcagcccttaatcttcgaaatattggtctggaaagcagagcctatcaagccgcgtcgttc

SEQ ID NO: 16012 - DNA, 548 bp, Emericella nidulans
ttataacgggcaagattggcactgggggataattttttgggcatcctctatggggcaatacaacggactatgctcagagtgggcacgacacgcaccaagaggaggggagcattcacagacccagggctagcccggactgtgtcaatctacctacactgcagatcgctctgacctcccagggacgtgtgaactctcagtaccctgctcaatgaagcatgcgggaatagagtaaccttacttgggctcgtttgcgcagtaaatagacctgtgtgcattatcataccacgtaccggctatgatgatatatgctacatactaatactcgtgaagacaatgcataagcttactgactttgtaactagaaactgggctctaacaatcggcgtatggtgcatgaacaactccaacctatgagaccagtgtggcttcagtgcattctggccaagtattaatgaacgaatctgcaggcgtggttgatctaggaaaaactccgatgcggaaaacgttggcctatttaataagcattagacagtgatcaacccatacat

SEQ ID NO: 16013 - DNA, 2641 bp, Emericella nidulans
caccgaacagacgcctaccactttcggacgaaaaatcagccactagtgcaacccgtcagtggcctacaccgccatacgatgatggagactggatgaacccagcctccacaaaatttttgacaggctccacctacaggtagctcatatcccaattctctgattttctgggaatatgtggctcatctcctgacatctcacctgcaatgtcgtgtatacataatcaaaagggaagtttttgtggttgttcataaggcgcatgggatatggtgtcggctattacctggtttctgttttttgttcaccttcattccccttcctatttacattttcgtgactctgctatttgtttcccagctttatagggcttggtagagcccgggatttatttgtcggctttctttgtcttcataccccaaaggccttttatagatacagtcggcctcgcactgttgtctttcctttgctgcatcatgtttcgacccctaccgcgcgggtcgtggtttttcatgcatcacttattctatatacatacctatatatactttcctcctcacatccaccccaaccctccctcgagcctcctacgcaccctttcatttgtcgctcctttccaccatctctttctccgtccttcctacccctgctaccccagcatcactcctggtaaccatctgtttacgggaaatgatgtatcgcactccaaattcctttctacgctgtacaatcttttactaatcgtgatggccacgggtggtcggcctgactcttaaggattttgtaatatattacacccacttacggcggaaagaaccgtcttgtacatccactgcatggacaaaatgagcatttcatcttgaattttatccctaaaagcatagatattttacctagttgaaacggagagctttaaaccgggatatatacttcgttgctgacagtccatagtttatgagctgggagcggaatggaagaacgattgaccgtctgagtagaatttcccaatctagcacagtcaattgcatcgcgagtaacccacctcaacgaaaagtcattatcaataatttcagcatggcttacctttttctctgatcaggatccgtttacctagcatctggtgcccgaattcgctcattgcgacgcacaaaaccccgagtgctaggtagcagcttgctcgcataaccaaaatttcgcatttatacctccgctcccaatggccgcccaacgacaagcctcatctgcttcgcagacccctcatttctctcctgccgaactctcctacctctacacatcactctcgctccctggcacaccgatccggccagatggccgctcaccaacgcaattccgccctctcacagcagaaacagatatcctgcccggcacgaatggcagcgcacgggtcgggttcgcagatggcacacaggctattgtgggcgttaaggctgaggttgagaagactattctcggtgttcaagcgcaacagctggaggatgcggaggggtttggcgaggccggctcagacggcgagggtggcgccggccggggttcctcgtctggccatggatcgtgggtacagatggccattgagattcctggctttcgagatgatgatgccttacctgttttcttgtctgaaatgatgagggagccactggtagaatctgtctcgggcggggagaagggtggtgctgaggagatggttggcgggttgaagggacggcttgtgataaatcggaggtggcattggaggctgtatattgatgtgggtttcctatacaccggttcttcgtactttggtatgtgctaatatgcgatgtctaggtcctgctcctttcacaaccattgtcctaccccctcccccttctatctcttacaacctacctcgccctcctcgcaacaaagctgccaaagctaaaatcaaaaggcgaagaagacccttttttcgacgatgactggaacgctgccgaatacttatacccccgtgtcaaacccgcaagaaccaccattccgagctcaatatccgtgcataaagtccgacctcccgttacgctgctcgtcatttccgtggcagagaacataattttcgacccaagccgtgaagagattgctgtggcggatgcagtgctcgcaatttcagtagcacatgacactgactcgggcccgctgaaactgctctcaatccgcacgatcgatcctccgtcgagcgttacgcagccgggaattccgaactcggagaatatcgcgacagtagggtctacggctgcggctgaggagtcactgatcatcaatccttccactggagaggaggaggtaccaggtgtgtggaggccgcggcgcggtggtgtaaagagggcgacgatcgccaagatggttaagatggttttggagaagggaggagttggcgaggaggttcttgaggggctggaaggggttgaagttggatgaacttagggaggcagtaatcgaggccttactctccagtacgagtgttgtcggacacctgaagcgaggacgacccgccgacgttaatgatgcaatactcttggtctgcatactcagcatgcgatacggacttggatatttacccaactctgttggagattatgtcgcgaacgataccgcatgaagatagagtgccgat

SEQ ID NO: 16014 - DNA, 414 bp, Emericella nidulans
gtacttccgaggggtttcctcgacaaggcctaccatcaagcagtggatcgctgcctacctagttatggcaagtagatgagcagctgttcctttcacgtgaatgcacgattgcggctagcgcataatgagcagacgccgcttcttaccatctgagtacttggaactgagactgatcccttattccactacccggacgcacacgaccatagtcttgatcctggtcatggccaacctgtccacgtgccaggtgcatctttagctggatcatgtgcagcctgtcatgctgagcactaaagcgatcttgtcagtaaagttggtaatgagtccattgccaagaacgagggggcggcctacgactttggaatttacttccagggcctaaactgtggcgataccccacctttcgggagagtg

SEQ ID NO: 16015 - DNA, 579 bp, Emericella nidulans
  unsure (1)..(579): unsure at all n locations
cggcgcaactgaatctcgccccatgccagagatacaggacttcttctggccccaggtggctggcaatatatacgttgtctacatctctggctggagaccctccgtagtgcccggtgtacgggctgagggctgatcctgtcgcccatttccctatcccagcaggttatgcagtgcgctgcatgatttctatgacacctgacagtcagcgtgaggtacaccgangggactgtcggcaccgatgtggcggaacatctatcccctgccggacgttgtatttgcccggacggagtcgatgctgtttggacatgaactgcagagcagcgaagcactcctcatgactgctagacgtatgctgtccgggtcatatgttcttcccactcattcgggcctgactttatacccgtgagccatatggcgcgtactctttaatagactggcaggccgggcttgtagatcgagccgatatcgagacttaataaccctgacgccagatcccgaggtacgatacctgagaggatctacgttacctactgacgcttgcttgtgtaatccgagaggcacgtagggaacaactgaata

SEQ ID NO: 16016 - DNA, 517 bp, Emericella nidulans
cactagccggttaatgtcatttacagcgtcctttatgcgcctggaaatgaccatactctcaatcacctgttttttcacttgtctacctacgattcataagttaccagacacgaactttttggagacacccgagacgaaaggcacacgcacaaccgccgtctgtaactctgatcgcgagctgaatggtaagacatggttagaggtgtgcaggatcttgcacggtggaggattgagtatgtacaggattggagacatgcagcgagttagccgcacaaacgagagaacccgctccgcgagtgatggcccttaaacatcatactgagtttaaccggccctacttactgatctgcataaagcccggactatcagtctgaaaactgattcacggcgttaaatgctagtacgtaaccatggtggaatgcctgaaccatactttgaatgcatgttggttgaatttgcgaaggaacccacaagctttcaatttccggagttaaggaaagttgtgactatatgccga

SEQ ID NO: 16017 - DNA, 733 bp, Emericella nidulans
aagacaatcgtaccatagaggcaccgggtcctgcccaagtcgccatcaggaaaacagcaacccggcacagttttattgaggccaaggccgaacgactacgaggcacgggggggctgaaacaaccagtaaccgggctcaaaaactgtgaaacatgcacggaagccacagtatttatatttgcgcgtgggcctccaaacggagcgcaacaacagcgccagtgacgggcagcagaccggacgaggcaggaagaacccaacccgaggcgaaggcgccggaagacacgcggaaaagacaccacgaagggtgcgaggataacgagacagcccgacggaccacaaggaaggcggaacccgataaggagcgcgtgacaactcacggcccagaagagccaggcccggaaatggagcgcgcccacgagagatagccatccctcgtcgctggagggaagaccaaacccacgataggaagcgggccgagggaagccctgacgacaaacaaggaaggggagcccggataaaccgggcaaaacaacggaccggggaaggagccaaaaaactcacaagacgacccaaagggaaatgtccggggcaaggttgcagggcaacaaggctcggaacaggggagtcgacgcaaacctgaggataaaagacaaaagcggcgcaacgaaaacgcccaagggagcccctcgtggcaaacatgcggggaacgaaataaccaaaaaggagagacccgg

SEQ ID NO: 16018 - DNA, 626 bp, Emericella nidulans
acggcgccgtaatcgtcaaaggcggctggctggatggaacctgtctacgcgagactcagacagcgggtgtgtatcggccatctcgcacggcacggcagggtgaggatctacctaacggccaatgtcctcgtgctacctatagccacatcatgatctccacgctcatggcagactgacaacctctaattgcaccagctcttgcgacagccgcaaaagaaagcgccatggaccggatcggacgctcaaacatcctgacctgggacaaggcgcaccatgaactacctataccttgtatgggattcctactaatgctcacagtgtttgcagattggaaacgtgtgcaacacatgacctgcagcgcgaactgtactttgaggctcaccctccgaaaggataacagactgcgcgggtggcataccctttttgccggttttgacggcaaatttccagtcagataagacgaacataccccgaagaccttactacacatgtatgctcctattcacactgcttagaagagtgggggtccggttggctaacaacaagccgagagcttgtttaaacgaagcctgtttgattggaggctctagtgctgtccagaatcatagccacataccagatcttca

SEQ ID NO: 16019 - DNA, 333 bp, Emericella nidulans
gagaacagacccacgagcgacccacaaattcaagacactttcgtacacaccggggaacggagagcagctggcaagggaaaccttagggggagccaggaacatgcaccaccggccaactaaaggacaagcgagtaccacgagcaacacaatcgaccaggcacaagcccaaggaggctggccaaagcacccgcaatagaaggacccagggtccggagaagctgggtatcactactaggggactggacttaaacgacggccacagtcgacgaaccagagcgagacagagcacccgatatcgaagagtagacgaaatgagaacacaagcagcgctaa

SEQ ID NO: 16020 - DNA, 622 bp, Emericella nidulans
ctcaactcaaaatgccaacatatcatctgttggtgcttggagaccactcaaattataatggagctatgctcctaggtatggctcgacgcatcagccagtggcgccgccactcgcatatattttggcccattcctgatccgcctagggctcgactggcggtgacacagctactcgtgccacacccacgaccagaaataaactagtaccatacctgaacaaccactacgcccgctatatagcctagagcacgacatacagaaaataccctatcaaaaccatgggacactagcaaaagacaaaccttatattacatggacaccggagtcaccaagaccaccgaggaatgtggcaacgaaaggcacccgctttcgatgtgagacccaccattaaaaatgacagctaaagcggacaactacaaaaaggacgctccgcataccaaaaaaacgtataccactttaaatctgatgcaactgatgagcaccaaacttctgctaaaaaacctgcaacctagaccaccgttctgcctccggatgctgtcatacaaccatcaaaaatgagcttccggacaggaacggggggggttaacctgggccagggatacccccaatgaaaacgggcctta

SEQ ID NO: 16021 - DNA, 1910 bp, Emericella nidulans
ctgtaaatacagcggctggaagggccgcttttcccttgaaattgctttcagagcgattgagcatgtacggtgacactactgagttggcgacggagaggatgtagtatgtgccccggcccagggagatggtcttgttgcggagattgctggccccgatttctgctgcgattgcgtatggaatcggtccaataggcatcctaaggcgttaaataccggggtgagtaagaggaaatgcaaatgaaaaacttaagagttaagaagaaggggcttgggggtagcagaagaaccaaatcatcaacagcgcgcactgggcccattggacaccagaggactgcggcgctacgcccaggagggcaacggccagcatcaagggcagcattacaacaagaccggtcaggtagatggtgcgtcggccgatatgcgtctgaaataaccaagagagacaagtgccgatgaaggcgagcgagatggtccttagacgaggtcagttgctggcggggaccttgtacggcgtctaaacaataccaagcgtgatcttgaacaagttgccaggcgataatccggcaagactgaagaagtaagtgatgtagttctggatggcccagcaggggagaagctggcagccccagctgattatcgagatttctgatcgccgaagattggtccacggagactcggggcaaaaccacgcgacaatgaacaagggtagaggaaatatccactgtagagcgaacggcaaccgatagggcccctgggaagggatgttcagtgtgccggtcaggacaccggtggatatcagtcggcccatgacccaacacgggttcacgaatgcggtgacgtatccgcgacggacgagagggcagatctgacgcatacgacggggtggcagcggcgaaaagccccaggggatcgaactggcatcagacggttagggctcagagctcaccggctggggagaggcaggcgtctacctactagagcagctcgcccacgaaaagcacctccaccgagggcgatacaaaggtgatggcgacaaacgcggtcaatgcaataagcgatatcatgatgactttccgggctccgaatctctcagacgcccagccgttgaggaaggtgcctgacatcagccccaggaggctcgcgcagttcagagccagctgccacttggccgggatgctgtactcgccatttttaagctgcactccatactcccgctggaaatgcggaaacgcatagaaggagtggactatctgcatgtcgtaggactccatgaccgtggtgagcgagatcagaaccgaccagatcacggccggctggtagtagcgcaaggtatcacggaggctgggctcggtctctgcccttctgcccacctcgagctgctccagatgcggttctttgggtggtgatgaagccatggcgtgccctggtagattgcgtgcactgaatgatggccaggtagtcgtggtctttgaccaattatatactgctccggaagataactagatgatgccctttgttactgtatatctcgtgctcaaataaaatacaataactggatcgcatacgctctcctctctatatgaaccggcagtgggccggcagtcggaaaacgctgggagaggagatcctggaaatctccagcccaaaccgtcatcagacagcccattggcaaatccccagacgacgccataccgaccccggctgtcgtaccccggactccagtagaataggcctagtagctttccgcatcaacacgcccacaccccttcagcttctcctcatttcagcaggagacggctgatgccatcgatcgcttctttcgccatctctacccagttcctgcgttcgcttttctccacgagccctctatccgatggaagtgtcaggaggccgctctagatcaaatgctc

SEQ ID NO: 16022 - DNA, 623 bp, Emericella nidulans
  unsure (1)..(623): unsure at all n locations
ctggaacggtactggttttctaataccnagtgaacagatgtctatcatgcggatgcaagtgagctgaacatcgcattgggtcgcaaccataacgaaccctgcagggtctcaccgggtgaccgatcaactgtcagcaagacaggcagaatgagctcgatgctatggcttccgcgaaatgcctatagaacgcgggggacctataactgaatcgggtcttagcaggaggtccggacatactcgctcattaggcaacacggccgaaccacatgtcgaagtgtagctagccgctgtatacgcaaagcgccgaagaaatgaaactaaaaaggagcaatgtgacggactcagcagagaagctctgcgaaccttgcgacaagctaagttgaagcgatcgagatgtgctcatggagaccacagtgcgaagaagtatgaacccgctcgggactactgaaagcgcaactgaccttgaagtatattaggccaggaggcccgaaccgatacttattcgcgagagttgaagcctgaacagcggcgagctaaccgtgactaaaaggcacggcacgccatacgctagtacatagcactagcctatctcatggacagaatagctgacgggtgtgacctga

SEQ ID NO: 16023 - DNA, 603 bp, Emericella nidulans
cgaagtcacggctgtaatcggcagcggcccttcagacctcatgtatattggctgccacatcgaactgtaggcagaagaggcagcccgactctgcataaatgatctagagaggatgaggagagcatagatagtgggtctcacctaactgcacgagcagcataaacgtctatgatacatggtatgctatcgtctcagatgcccagattcggacgaataagagattgcagcccatgcgcgcaggatgggtggcaactgcacaatcacacaataggcattcagtagctatcggagcgcagcagtgtaccatgcctgatcataataagcactgcggaaactacttacaaatggattatgttcgggcttgaagggcgctactaccgaggaaatgctcttaaattcaaggaacatcactattcagatcatgtgtggctaatacaggacgccagtatatcaattgtgagacaacgactgatgtatacggtaatgtatcagttagataaagtcgctttgcgataaatcacgaccccgaaatacaacttagtataagctggaacaagtgagatgtaagaagtaaagaagccttgtccaggcagactacattgg

SEQ ID NO: 16024 - DNA, 3670 bp, Emericella nidulans
taaagtctagcttagttttaatatatccaactcccaacaacaacattgttttcttcagatgctttgttcagatgctttggaaacggttgaacgatgtgaaactgttcgatcaattgtgactacgaaatcggttcatcattacataatttaacggccagtaacagtgttcatggcggaactagtatcttacaaagtactccgactaccatagaagcatgtcatagctgagaggatgaacatggtcgtacgttgctggttttgcccggggtcgatgaaagaactgagctgcagctacccttccggcaaaactagagattgagaacagtaaatgtgatcttggagaacaatcttgttagcctatagaaagattgattgggaagaaacatgtcagtcatagatttagcagaccggcacataattagaccgtcaaagagcggaagcctttctggatgccttcccccatcatcttaggagaagtttagttgcagcccacgaagttaagactagtcctacctctatctcttctttcatgcttgccatgagccaaaatacgtgcatgtagagcaggactattcaagccacaagtagcgcagagctgcagttattaagggttgcaattggaacgtccctgacgggacagttctggaagcctaggctcgggaacatgatagattcagaacagagatagaaaattcaggagtcaccggagcgctagccgtgagccacagtggatatatctgcgacgttaagtgttgatgggcgctaaaacgcaagatagctttgagcactgacaacttgacgggcaggcatggggggggttcaacatatgttgacacactcctggctatggccgctctggccgctcagctgcctgtggcgatggaacaactctcggaggtcttacacagggaaacgcatcgagcgttcgtggaagtgctcaagatagtaattccatagggctggaggtcgatatcaataagtctgtataagactggtagggtggatatccggggttgggcgatccggagcctggaaaaatctgaacagtgataaaacttaggtaatatttgcatagtaggttacttcacgaggcctctcaaaagaataacgtagtcttcaattctgggccagttggtgttcaaactctaagcgcattgtgacctccgcaatctccaagaaactatgacgttgccgtcgggcactacaattccagcgcgatcttcataaattgtcccgccggccccagacaaccgatcatgtgaggtacataacgtggttctctatacaagaatattccccgttcgtcgtcttaccactccccctgaaccttcatcatcggtccatattatcttaccaaactttggtatccataaattggtccaaatggctccgtttctcaactttctggggaagaggtcagccgaccctagtagcggggaagccgagactcagcccgatactcggctctctgacgatagccaccgttcaaccccattgagcctcagaaagagtcaggaaaacgagactcccgaatataaattgagtggtacgtcctctagctccaacagcaaagactccttctaacgagtatggattagtcgtcgattgcaatggcgattatctccccgtacgtttaacccaaccgccgcggttcggtcaaagaatgcgcgaactaacactatgcagccatcaccaccggagagagaaagcttctggcgcagatattcaggaaagaaatcatcgtcaaaccaccgcaacctagtcgatgagaatgaaccgttctcgatttcccgtgagtctttcgattcttatcgccgctcttttgtaagtccattgcccgcctatcttccagattacgtccaagaactcatcgaatgcaggacatctccgcgcgttcgcctatagtttacccagataacatgccctcccggacatccctcgactcgcgcttctcccgcataacctcaacatctggctacagcggacaacggcccacgccaaccatggaggaagatcagttcgaagatgtcgggctcaacgacgacgacaccgagtccaaaccaaggagaaagggcattttctcacgctttggcgacttgtcgggtgacgcacagacaggggggcctaagccatcgtcacatctcggctttcacattccgggccggaagaagtctacccaggcgccgcccagctcagagatgcgcgcgatgaaatcgccatatgcgcctgaggtaacagaagtgcgtgagtgagtgagcgctgccatgtctgaaggttcattgtgggctctatctgaacgctttttgtatgattcgatgaaactggttttgaaggtggcgttttggggttcttatgcatcttccacctacccgatatatgcattgggttgcttcatcttggatggtccgcactaatcataatgtttgttggacaattactcactaccattcacttcatcatcggtttcaataagaatactcctgagcatatcgcattatcatatcatttggaccgttcatacgtcttggctattgtgcataaatcataatcttatcgcggcacaaacactgcaaacagcactagcaactttgaccgcccacggtagagaccggcagaaaaaaaaaagtcggatagtttagccaagccccagaacgagtattatcagcggcgcgataccttttctccctgaaggacccctttccccaacttagacagaccttggagccacacttcgcaatggtcggagtcaaacgccgcgtcgacaccggcgacgatcgcaaagggaagcggacgaagacgaagaccgccgtctcgaccaagggcaagtccgcgccggtgaaagcacaaaagggctcgaagagcgctacgaatggcaaggatgtgaagggtagcaagaaggataagaaggctctgaagaagaaggctgtggaggaagaagaggacgacgaaatttctgaagatgattttgatgtcgacgatatcgaggactcggagattgaggatgtggaagacgatgtcgatatggatgatgtcgatgtggaggacgatgaggatgagagtgatgagaataaggaagaatacaaggataagaagaaggtgaactccaaggctcaggaggatgaggaggcgaaaagtatgttctatcccaccagcaccgtcaggaatcctactaatatatatgtctagaaacatcttcccgcgaatcgcatatcaaacagaaagccctcctgcaagagcgcaaagccgcaaaacccaacgccgaccagattgcgagatcaaagaagttatgggagcgcttgcgccgaaagtcgcacgtccccctaaaagagagaaaaaagctcattgcggagctgttcgatattataacgggccgagtgaaggactttgtcttcaagcacgactctgtccgtgtcatccagacggcgctgaaatacgccaacgttgagcagaggaagcagattgcgcacgagctaaagggtagctatgttgagttggcacagagcaaatacgccaaattcctgattggcaagctaattgtgcacggtgactccgagatccgggatttgatcatcgctgagttttacggcaaagtcaagcggttgattcggcacccggagggatcgttgattccttgacgatatttacccgaccgtagcgacgcaggaacaac

SEQ ID NO: 16025 - DNA, 4131 bp, Emericella nidulans
  unsure (1)..(4131): unsure at all n locations
cagtcttccgatccttacaatagaacgacgcaaagttcgtcagcttgcactagccaagtgaaagcaatagcccatagatgcaatgatatagtcaacggccggattctggttgagctggtacacttccacccttcaatagtgggtcctgcttgcggagtatatacacttttgcacagtggcgggatactatctagtgtactagtgatgctgtgaaagtcatacacagcgcctgcatccaaactttgcactgatataccctggttcggcaaagagatggccatctcaccggaatggtggtctagctgtttgcatatcacactccctttgacagatcacgctagagccttgcagctgctaggtgttggagcagagcgagggctgtcaactgacagggcgtctgtctcgtgctgagcggacgcggggtaccagtaaacacagtcaattgaaattggcgtaatcatttctcgtactgtcttagacgaatggcatgtgattgcctattgcagaagtaataggatgccgcgactcgcattccatcctttaagattctttaatattaggtcttgtcccagaggcaagatagctccgatggagagtccttgtacggagtggagcgagtattctcctcggaacctgattcctctgcaatctctgttcagctagttcaactgccagcgagtaaacagcctttgaatcacagggctagcgattgaggttactcaacagcgtctcaggctatttctgctcgtccactttgagctccgctcgtcgccaaggtgcccttaacgaggaccctctcagaaggaggagattgctcaatcaacgaggtatggcaggtcggaccaaaactagaaacgcgcattgaaaccaatcacttgttcgtcttaagtccccctctccacatctctggctgccatatcaaggatcaaccgcgcgtacccgcgatgcaaccggatcgcccaagcaggcagaactttttgctgttgcaggcccccttcctcctcgacaatctcgtaatcatgcgctgccgagaacctgacttccaccatctcgccctgtcccttgacgttgaacggctcggaaacaatcatctcatgtcgaccgccagacatcagtcgccacgggtatccccagcgcgcaattttctcaaagaatagccgcggtccatcgggcatcttccaggaaacaagaaggctattgcttccttccgcgcctggctgtctttgtaccgtcaacgccccgttcagcaggacgcggggttccgagccgggaccaggcccaaacccgttgtccccaaggtcgccaggctcatatttacccctggtaagtaacccgatgagcgacgcttcggtgcgcaggagccgacacgataataaagagcgtgcccaagcctcctcgagcgcggtttggtcctttgtctcagggtgccgcgttcgtgcctgcagagcacggagcggaatccttgccgcgtagatatcggtgtatgggcagtgctgagttggtcgagctggcgtgctgagggctttgcttcctgctgctgcgggcggtaattctggatatttattctcaaggtgtttcaggcctgaatgaatcccaagacctgttacaatgctggggattgcaatatagccgaatattcgggtaacacgttgttttgacattggctttgcgacgtatcggggacgcttacaggtgacattagaaaatataatgccaggaaagctgtgttggagctcctaggtggctataaatagcataaggcagctgtgggctgacgcggggattcaatcggcccgtcggtgagattgatcctccgtctatgtacactcagccaatcagaatgaggcgatattaatatccatacaaatgtcttggcgcgaatggggctccttcacgatgaactcttttacctagctataccaggagtctacctgatgatgtcgtctgatccagtgacaggtgttggagatatcaactttcaggttcgacagtagtgcacattgtcggtttatgcaatactcccagcactactcgccttgcatacaatcctatcgagtcacgtattgagtcacgtatgaagttgaactcattgcagggctaatgtcagggcactaaaggacgggagaatcttttgaaaagtgtaactgatattcaagagtacttaactatgatttgctcaagctgttcgttccagagctcgtcattccccctctcgtcactatttgaaggcgtagcaaacccggcatcggtagaataaaagcccaagaagggcgacgggtcgctaaaatcaagctcgtggcatctgcggcagactaacaccacagcctctgagaatctgggggcgttgagcgtttgcgacacccgccgcagcacatcgggtaccgaaggtcgtcttcgcacgcgcgtattctggccgcctgcctaaacgcggcgagcgctgcctcatcatccttgaggtatacaagacacttggctagtttgtagaagtcgcccgtttggccatctgatatccgggacgcgaatcgaaggacgctctccttcaagacgcctcgtctcgtgtctctgtcggtgcgtgtatatgggatatcgcaccatcgtgcgagcccgtccagcattgatcgatcgcccgcggcaaggtcgaaaggggtctgcccgtagtagtcgagacgcagcgggttggcgccatgggagaggagcagttccgcaagttctgggtgtctgttggcgacggcggcgtgcaacggcgagttatcctcccagtggctgttgacgtctgcaaccctcccggatcaatntcccttaccaaatccagattcccgctctcggccgccatatccaagacggttcggccggtgtgcgatcggacgaggtggtcggttcttgtagctctgtgtgtagcgataaacgcgctagggattgtaagattagatccaaatgtcgtgtaatgcagcggaatccgaccggcctcgtccgtcgcagagacgtccgctcccgcccttagaagcatagacagaatcactcctgaagagtgagacgccgctaggtgcagcacagttcttccgtgtatatccctggctgcaagatcagctccacactcgatgaaaagcgacgccgctgagacgttgaacacagcaaccgctaacagcaacggtgttctgcctttgctgtcagaggcagagagcgaggcgccgtcgattagagtctcgagtaggtcataccgtttcaaccggaccaacgtgtgcagtgccgtcgacccgtctctggactggacgctcggctcggcgccgaggtcgagcagttggtggatgacctccggcgggctaaactcctccagtgtgatctgcagcggcgtcaggccgtccttggtaggctgcgagacatcggtgccgaaccggtcgaccaggcgcgccgagatcgaccgctcttcggggtccttgaccggctccgccgtgggcgcagatttctccttggagagcgtcatgagcagctgcacggcctccttgtgcccgttctgtgcggcgacgacgagcggatgtcgcgccgtgcgatgcaggggctcgaccgtcgccccatagccgatgagcagccggatcatatcgcagttccccgtactcgctgcttgatagatcaagtgcccgttatgggcgacgtctagccatcctgccgcattgtccagcatgaaccgcaccaggcggatatgcccatggtatatcgcccttgccaccgcgtgctcgtagttcgcacgctcccccgtcgcgtttgtcggcgtcaccctgaggagcaggcgaagcagttcttcatccccgtgctgggcagccagcaccagcggaatgcctccattactcttgctcggcagcggatcggccccagcgtctaggagaacccgaacaacctcggtgtgtccgttcctgagggcttggtagaacgcggtgaacccgcccaccgtggctgtaacatctgcgcctgcgtccagcatctcttggtcagtggagagtattccatgttcagcagcccaggtcaagagggatttgcgccgcccatgcgcttcgaatgtgtacgttgtcacaagccgatagaggcggggccgcaggaggctggcaaagcgacggcacgatcccttagtagggttat

SEQ ID NO: 16026 - DNA, 938 bp, Emericella nidulans
cgtggcgggcccctgaaccatgaggacatgtcccattgatggtcgtttgctttcgggtcgacttcgctctggagagaccgagtgttgactcggagagcgttgttgtcgccttcgcggaactcaatcactaacccaacattgcgctgttcatctgattgagcctctgtcagggtagacgttatatacgtgccatagatgatccgcgttattgagcgcaaatcaatccgctcaaatgaaagtaccttgtccgtgttccagtcaaagcggcagctgtagacagcggcatccgtgaggagcagaaccgacttctcgaatggcaatgttctaagtgtgtttggctgccgcggcgttaacatggtccagccgtctaagaactcctcagactgggcgctaatcacaatgccgcagctggtatcgatggcattttgtctgagcttttgaactgagatgcccggatctgctgtcttgagctcagtcgcaaactctggaatacctgagttgagacattggcccaaaatagtttacgcacgcctgcgaaaaatgccattgggcatgttgttgttatccgaaacagcgtaaaccaaagtctttaatggtcacggaagcccgattcctagtactggttagtccccctaaaagtttttgtggagacaccggttggaatggcataccttgtttgcccaattggtaaacacctggaaggagcccctctagcaaattgtacctcctgttaatcccgtcaaagccattgcgaggggaattggacacctggggtaggatcctacattggcgcggaacccgcgtgtttaaaggcgcctacacaatttgaattttaggagttatttgtggccccgcaatataaaatctcttgtaatgaagacccccgtgctcatcctggaatttgtctttttttttctttttattttctatgacttata

SEQ ID NO: 16027 - DNA, 2945 bp, Emericella nidulans
caatgcggagtctcagggtgtaaaaaagtctccccactttcggtcggtttatatttttgcatttggcatgtctgggtttttaactccaccctactttgatttgatttgatcacgttaaccggctgggcttgcaacactgcacttaagctatggccggtcaatgttaaggctccctcttcctggtacaccgctggtatagccttctttttctccttcggtgactctccgccttcaggtgaacagtacctagatagatccagatcaaagcattattttagactgttcgcgaactacgacgcctattgacattatacacacattctcacctgctcatctcttttgccaaactagcaaaaataccaacccgacaagctccagcggcggctttaccgaagtttgcaggatatgtggccgacgtagggtatagggcgatctatccgtgttcttgtaccccaacggctgcggggaaccgcgatgtcagccaagaagagcaattggactagttattggatcctagtactgtgacagttactggtgtccagagtaggcagtattacattgttattgaggatgaagctttgctcgccatggctagagttccgcgtcccagggtaaggcatctttcggaggtaccatactacacagtacattctcactggaagcagtggtatcttgagcctgctgtgctggaccatggcaatagacctatatacctctgagaattcgcgtcgagacgctggaccagctctaggacaaaacattttaggttaatttaacctttcccagactactactactccgcaaaattacttatatgtttccaaaagcttacctggttctagcacacacaatgatgcaaaaaagcgatcgtcagtccaaatctctttaaggcctgggcggcctcggagacgaactgatgctccccgaacaactggggagcagtggggccggcaagcatacaattcagagccccctcttcaagatctgcatttctccatctttttttcctctctcaactgttttgcttcaatcattccttcctgctgctgaaaccgttccgtcgctcaggtcttcagctcctggcttctcgacatactcccccgaccgcagataggcaggcaatcggtgatcctactgtacaaaccaatattgcggcggtggccgataacggaccgactccaaactatcctcgcagcatcaaactaccctcgcagttttgacgaaggccgcatcaggagaagaggaataagaagaaggagaggaagaggaagagaaaaaaacctaatatactggtggacgaatcgggagttggaacggatatattatagtacacaaaatgtcgtccaccgcaacacccgcgcccgccttggacgcggccgagtcacagtcgcagtcgcagtcgcggaatggcgtcagaccggcgcctacgacaggctcgaaacgggactacaagggatttgtagctggagtgttttcgggaattgctaagctgagtggtgagttaccctgcagatcatccaccattggagcataactaataatggcttatgtacatgttagttggtcacccgtatgttctcttgcgccagtcctgccggttctccttcgctacgcatattagggatggaaacgaaaaatgctaactccatccattaagatttgacacagtcaaagtacgattacaaacgagcaaagacgggcatttcaaaggtccgctggattgcgtgctccagacggttaggaaagaaagtgtttcgggtttatacaagggggcgacgccaccgttagttgggtggatggttatggactcagtgtgagttgcgctgcggtctcgatttgagctatgcggggatatctaacaggaactttgcagaatgcttgggtccctaacgttataccgccgtctgctacttgaaaatgtcttctcgaacccttcaatacgtgctatgactccgtttgcgaagaaccagtctgacctacatacactgccgagtttcggacacggcattgccggtattatggcgggcacgacggtcagctttatagctgcccctgttgagcatgtcaaggcacggcttcagatccagtacgcagctgataagtcgaagcggttgtacagcgggccgatagactgcacgcgcagaatcgtacggaacttaccccttccttaccgacggtgtactaataggcccgcagcttagcgcccacggcatcagcggcctctaccgtggcctctgtgcaacaatcctcttccgctcctttttcttcttctggtggggctcctacgacgttctgacgcgtctgatgaaagagcgaacttccctttcagcaccggcaataaacttctgggccggtggtatctcggcccagatcttctggatcacgtcgtatccgtcggacgtggtgaagcagcggctcatgacggatccgatgggcgggacgcttggcgacggggaacggaagttccggtggtggaaggatgcggcgaaggcagtatatcgggagagaggctggaagggctactggaggggctttgtgccttgcttcctcagagcgttcccggctaatgcgatggcgctggttgcgttcgagggggtgatgagatggctaccttaagataacactgccctctgaccggaggtataaggtacatactacttatggacatccatatatacaggacatagacttgaaggcgaacagatactgcaaatagtttatggcatcagcttgagagggttctgaatgtcgctggatgtcatggtggcagtttgctggctggaacgctgcacttccgcttccggcgacttctcgcgagtcaccaagacgcgaacaaaaacttgtagcagaggtactggggctgtgacagagaaaccatattccgagcgccaactagctaagactggcaattcggcctctgcagacgatctaggatcaccaggcgg

SEQ ID NO: 16028 - DNA, 1455 bp, Emericella nidulans
tgaaccaggagcagctgtgtattcttcacctacatttgcaccaggagccgggaccccgtcaccagcattaccagtgggtgcagggacgacgacgaccgtggtggttgaaacctcacccgagccgctgccgtcactggacgggacctcgccagtgggctgcgcggaagtagactcttccgtggtggttgcgggtgggagggttaacgttaccgttgtcggggtggcggcacaaacggtacagactgtaacagttgtcgtccagccttctggaatatcggcggtgatggtgggctgtgccgggctggaaccggaaccagagccaggaacgtcggtcgtgggggcaatagctgtagcggtggcagaggccgtaccagggcagtatgttgacgtaatagtggtggtgatggtggtgaaacctgtcgggcagatgctggtgtacgaggtcacgatgattgtcgtagtcgtggcaggctccgtagtggtgggcttggcagtaacggatccagagctagtgctggtgggctcagagtcagtcgtgcttgtcgtggcggtctcatcggacccggcgctgctgcttggtacccccggagcgcttggcgtggaggtcacggagccagtgctagtgcttgacgcagaatttgtcggaatcaaaggcttgctggtcgaggcgctgggtgtctggttggcactggaggttgacacggttgaggtttccgtgtggccaccgctagttgcgggaacagagctggacaaagtggacgcggaggtggttccggtagacacggaggagcccggcgtagggaaaaccgtcagggtcttggttgtctcaggcgaggtcgaaggagaggcagcaggtgtgctggctgagggggtctccgagatgctggaagacgagtgagtaccgattgcagtggaactttcagagcagtccgtgctagtgctagtcgaggacacgaatgtgctggagctcgaagaagttaccggaggcctaggagtctctgagatgactggggtgcttgacgggctgatcgcgctcgagggaacagaagagctggtggcaggcacagatgtgcttgagccggtgaggctagtttcagggccagatgatgtacttgtagagatgtgagtgcttgtctcggagacagcacgggtgctcgatgcagaaggagtctccgaaggagtggaagtgcttgaagaggctgtggagctgcttccaccaacagggctgcttgaagaaaggggcggtgcgctcgatgaggtaggagtcttggtttctgagggagtctcagacactacaggcgtcgacgtgctggggagggaagaggtctcagatgtagtactgctctccgatggagacggcttgggactgggagtcacggtctcggtggtggaagacgaagcagtggaaggtgatggagagggagtaggagtagtggtagacgtggtggacgtagt

SEQ ID NO: 16029 - DNA, 963 bp, Emericella nidulans
gccatcaaagcgatcatgtacattagttcttcacgtaccgtcggctgacccgctcgagtagtgcgaggggcagtcttcaggctcgctgaagctgaacgtatacccccaagagactgagcgttggcaaaaccattaggattccatgtctgcgatccagggaggtcataagcataggaagggttatgtagcgacgggttcagccggtcgagattgcgatcgtagcgagccataggatcgtcgtacaaattcacgggcattggaccgtaggcgtcaaactgtcgcgaaggctggcgatgaagaggctgctgatggcgttgggagccaggggaacgcgaagaattgtcgtgatacatgtcctgggcttgttgataactcatggtggcagaaaacgaagaatttgcgacaagcagccaaaccgaagattgtggcgctggaacccaccacaacaatcccgcttattacaattcggatagagtgcaagcggactacttagtcataggagcgatcgagcaggcggaagatgttttttgaccagtcgataattatcaaggggtgttgacagccacgtttgggtgaggacggaagaagtccatcggagattttcgacctgggaaggagatgggtggccgggcttggctcgattcgtccgggggagggcgttcaagatgctctgttgaacagtgcccaaaggttatagaccgcgtctgtttggcggaccgatcaagatccataaattggactttttctggtgcccgttaaggctaataaatggttggaggactctggcttggtctgcggcttataaaatcatcatccacctagtggtgggctgggttttgtaatgtatctttagtaatggccctcctctttggtcctggtcggatttggaatttattagagtatctttattttggtttctatttttatctctccttctctccccctttcctatttactctcttc

SEQ ID NO: 16030 - DNA, 597 bp, Emericella nidulans
gaatatttactctccgatctctacacattcacctaaaggtttagcaccacgagtacagccccgctcttttttgtccagtggcttgcactgagctttatcggaaatgaatggctttatatatgtatccacgttcgactactcgtgggaggaggttttatccgtcaactggaggaaatattgaacctggaatgataaatcgacgcatgttgcggggggagatactctatagggtagggatggcaccgtcacaaaaattgcaactctaaaaaccgggcgtctttgaaacggcccacagtgatggcttaaatctgctaaccaaaagcccaatcaaactggtccgcaccctaccgtagagggtattcgaaaatttcctgataatttgtaacctgcctttgtgtcctcccagaatatttccactcctatttcaaggaaggttcgatatggtcttccgaactaggagggttccatatttaaaaaacccccggatatatacttttgtcaattttttggtagccacactttatatataacctaaattccttactttctattatatttctctttgttatttttctagttctcatttatcttgttcta

SEQ ID NO: 16031 - DNA, 483 bp, Emericella nidulans
tttagatcggccgaacaacagcatatttttatgtacctggacaacttgagaaaactgggggatcctttacgcgcagagaagatagtccacacaggcaacgcgtgcacgcattgggtgaacctaatgtgatcggctgcggaaccttggagtgaggcgggtaatatgacagtgtgcctactctatctaaggttacaatgttgaaaacaagctcatgaatctgactgtcgccagtaattgattttccgattgacggttctgatcaagaaacgcgctctcggacataacgaagcaacttctgcttgaatctcgtaatactctggggatcatgggaggacgtaataaaacctattccgccgcatactatcatgcttcacgatgggcgtgatatggatcccctcagcggatccgggttcaacttgtgcagcataattatgctctaaatagtaaaaccgactcttttgtaatactgtttgaaggtgattt

SEQ ID NO: 16032 - DNA, 446 bp, Emericella nidulans
tgatatgtcgcaaggcggcgagcgcttactctagtatgcgcccataattaagcgatgttctatgttgaacgaagacaacgcaatacaggctcgagagcggcgtctgaaataccaggggactgctagggtcagaatatgacaaatcggattcgattccgcaaactacatagatgacaaaaatgaggaacggctttgatggtatattccgaaagagagggtgtcgtcgatttgatgctaaacattatatacctgctacggaatcgcgaaaagggtgggcaaaggcattacaaaaggccgacgagactgcgcaagcgcttatactgagttgcgccgaggacactccatatttgacctttttaagaagccctgtcctggggcttcacgccagcataaattgatcggtgaagctagagtgttgtcgcctcttgagagaatgtggactgttt

SEQ ID NO: 16033 - DNA, 619 bp, Emericella nidulans
cgagctttgtctagggattaatcacctgcttgtgcctcagacgggctggttgtctagtcaaatcagtccattctctgctgtcggtgcttgacgaataagccggagctccgttgggtatacaccgcgtgtgtcacaccggcaccatgacatacaccttgcttagtctagtccgaagatagtattaattttggcatcgaagcgactggcctgtgtggttgtgtagtctacgaatacgatggcaatcgtttgcaggctgtgctggctataaattctccatgtagtggtattcgtgtgagctctgccgtatttaatgagagagatttttttctttccttcctgctcctttctattatcgttttgtctatttatctccttatttatattgtatcactttcttttcttttctcttttcaatgactctttcctgtctttatagaacactcttttttttttattattaccgttaatatttttttttaattgttttgacaatttcttctctattgatttcatcgaccttatatttatttatcttattcttattattatttaatcaatttatgattttatgtctatttctattatattcttttgttttttttttttacttacttttttt

SEQ ID NO: 16034 - DNA, 899 bp, Emericella nidulans
caccctttcagtctttcttagtcacgtcaatggaagggctgagcgacgaggaggacgatcccaatgattctgtttatgtggacgacgaagatgaccaaccgattctccttaccccgtcttatagaaaccataaggcggggatgaaatcgacaaaacgcaccaagacaaaagctgtgtccgacgacgacagcgaacacgaactcagcgatggcccagacttggacgacagctctgatgatgtctacgccgctgtggattatattagtgatggtgatgatgaagaacgagatgttgaaatgctggaagagctcatgatcttggaatctgaagatgagcatgatatcgcgagcgcagcaaacactggtgcctctgacgttcatgactgggccggtcctagtgtcttcaatgatgatatgatgttctccggagcgctctttgacgaacagcagctctacagtgcgatggaagcgttcggtgaaactgacgtagcaagtgagaccgcggtagaaacccccgtaccgtgccgagtacatttcgaagaagactcggattcgtcttctgacagcgattcttacaccggaaacgaaatcccgagtgatttccttcaacaggacaatcctggccccgaagctgccccgattgattgaaaccacagcattgaggctcgcggccgtcgttttgccggcattggatgaaactacccaacttgctatggccctcaacattacctggcggtccatgggccttcccaggaactcagtgcttgaagttgccgcccattgttggcctggtttgtacctttaacccgttgtgatacgtaaacctcctaatcaatttaaccgattttgccgatcttttctgggtgtggaaaatgcctcccaagagccatggctttgacc

SEQ ID NO: 16035 - DNA, 4653 bp, Emericella nidulans
gctccaaagaagggtacgtacgtccttgatcaaaacaggtatcctgaatacactctcctccgaactctgttaattatgctcagtgccaataagatgtcctccgtttttcccggctccgcagttctcatccaacactcagtcggacatactgcgtttctcagattatcgatctgcttcgcgcgacggatccgggattatctgctgagtgggcagttgcctcccccgaatagtacgtgtcaggccgatgcagagcccttttggtgagaatttcgctgctaagtctgggtatggatttgggggttggttggttcctttgtatagggcttgtcggaattatcaattctttgcacatgaatgtatgtaatggttttccggaggcaatttaggctcggatagtcttcgttatatcggtgggtgaatccttgtacccgccagcttcggtacccaaactggtatatgtattcagaggatgatatagatacagttacaccacggattccgccgacaccgtcctctcgttcctctccttttcgatttctttttctgtcaaaggctccctatccgtcacatccagtgtcccagcctcggaaatcctctcgattttcagaaacggtacaaggagcaaattcacccctgcaatgccgaccaacatccaaaaggccgctttatacccgcctagcccagtgtcatcacctcgtgtagtctgcttctgactcccggcatagtatacagccgtcgatatactcagcgtgatattcgagagtagcctgttgactgcgctcaggatcccaccagcgagagactgttgttcgcgtggcagagaggacatcacgtaactctacacgcccattaacatttattattagcatactgaaacaagcagtgcagatttaagggagcatacattcgccacattaaactgcaaatcggcgccaacgaccgccagcaaaagtgcgggaaatacaaacgcccagtagtagagtctgatctcctgcagcagggctagtagcaagaagctgcctaggtacgagatcgcaccaacgcccataagcaccctatgcgagacgcgatgtaggatgagactacagacgaagttcacaaggagcccgttgatgttctgcgggaggaggtagatcgcgatccagagggagctgagagacttcacgcgttgcaaatataggcagagccagaaggaggaagccgtgaatgcggcgttgccggtagcgaggaggattattacctatttatttgaggtattagctggaatggtttgacttggagggtagggaaggctgaagtacgagagaaaaattccggtctttccagatatacaacggcatcaagggaaatttgtagactgattgccaaaaaatgaaggcggctaggaggacaactcctagaaccagcatgacgatcacatagggcgtagcccagcctttgggggctacgtcagtgaggctgtacccataatcagcatcacatccccctcagagaaatgacaggaagaagggaggtagaagacgcacgtcaatccagccgacaccaacgacacccctcgcggtaacgagcaacgcccccagaagatcaaaccttttcagcgcctcccacccggacactcctaccccctgactcccagcagcagcagggcgagttccaatcttcacatcgctcggcactgtaaacgcaacgaggcccgcaaatcccgcgcagaacacacagaatacccaaaagcacactctcatccactcccattcccagtcgcttctggggaggcagtggtgcctgaaatctcaagtacaaccccggcaacaaatgtcccaaccacaaaccccagcggattcccagcactgaagcacgcaaacgcccggttccttctctttgaaggctcgctatacacagcacccagctgtcccacagcgggtgaaacagcagctgcactgaacagaccgatcagcgccgtgaagacgatcagggacggtccatcaggggcccatcccgctgcaaagacggcgagcgttgtgcagaccatggctgctagcgccatgttcttacgtccgattgtgtcggcgagggtgccgaaggggaggacgaaggcaccgctcgttaatcttccaccctacatcagtatgggataatgatattgtggagatgaaggcgataaggacgtacaggcaagcagacgtgatccaaacaacctgcccgttcatctggaggtccctaccgatcgtatcggtcatcacggtcgccataccggagaagatggtcgactgggcaaaagcaaatgtgacggttaggacgaagaggcattctgttatcgtattggagaagtatggggatggcatcgtgcgctttttttccttttttcgaggcgaggcagtaacaaaacggtcatatagagccgctacagcgggagtgattaaacggagggaatgacacaaatatgttccagattccaggcgactcgaaatccgaaatgttagagggcaacagtccgccatggccataatcgtggatctctcacgttcattccagttgcatgccgtgagattctccatgcatgcgtacagctgtagatcatgctgctgctcgcgctggcggttcaataaggttttcagctgcataagtatggaaccttcagagaattctgatgcggtctcgcctggataattcggcagtttgtccagggcccataaatcatatactattcttccaagcctcgtgttgaagcttcagagggttgaagaacctgcagtgagttcaacctaaaggacttagaattgaagcagtgctcagtttcaaccttcagtttccagacagcaatacctttcaggccaatacttacgcaagggggactatcgcttacctgcaattatgtctcgattcaactcatgtttcagagtctagacggggagtctactcgcatccgcttgactagcggtctatattggcggtgaaaagcattgggaacattaagagtcttggagcagaaatggcgacagtaatgaatgccttaagtcaacagcaggtaagcattggccttggtatcaactcggtaggtaggtatgtctcagaaaagtgcataaccgtgcacagatgatcaatccaccggccagattctatatactccgctgattgtgaatttgccgcttcggatcccaagtcgttcatatatatagcctgaaggagtcatttggtacgtgtgcagaaagggtctctagtgtctaaacgtcggacttagagctccttttttaggaagtgctccggcttatgcgtcgtctcatagtcaacgtggacataagcccgctcaacatcaggcaaggactcgagttttgtctgcagctcctcggcaacatcgtgggtggcgcgcaaggagtctgacgggtccatgacaatatcgacctcgacaactagacggggtcccgaagtgtacgcgcggacagtgtcgatagcagtaatgagtggtgagtgagtcattgctgtatatgttagcatcaccaccatttatcatcaagtgacaaaaagttaacgagacatacagatataagtgattaactgctgcattttcgtatccgccgtgataccaatcaaaagctggaactcatgatacgcggtgtgaagccagagaccgctgatcaatacggagaggatgatagcgcccattgggtctatccaccagcggagcttgctaccgccgacagaggtgagaataccgaagccgttaattaagaggtcgttgcggtggtcttcccacagaatgcggatctgggaaacctggttgcgcagcgcgaagcagtacaaaaagagggagaacttggtgcagaaggcgacaactacggcaatgacggacgggagatggaagtcgcccgtttcgctgtccgagccaccgacgaggtcgcggattgagaaggcaatgagcaagagcgagactgccgtcatgaggaagcagaagcagatattgccagccgtctcgatacgggcttttcccgcagggaacttgcgggggtcaacgcggttgaccgtcttattgcacagcaggagcgtcaggttcgatagaggatcgaagaccgagtccgccatggttgtgaatagcgaaagcgatgatgacgcaatagcaccatacagctgcaggatagaaagcgccacgttcgccgcgaaactgccatagatcgcaatcttgtacttcagctggttgttcgtgttcaactctctcgcgtcccgaacatgctcttcaactggtttgagcattcgctcaatattctcattctgcgtcaggtagaagccctgcagttcctttcttgccatggaagtcttgaaactgcttagcgttgggaccgtggaaagcgcagagtaggagcgtgctggctgtggggttgccgtcgtggtatgcccatggcgcttgcgcgaggtgttggctagcgggtgtagtgcctgaatttccgcatcagatttgagtttcgacgctagctgatagggatcattctcttccgtgtatcggggaggctgaccctcctcgtcaatatcgtagctggagcggtgttgggcggttggctcttctagggcggtggtcgtgccttcgatgaggttgtggtcacggtgtaggctagattggaacggggaggggtggtgcgaggctctgacccactatggcgatgt

SEQ ID NO: 16036 - DNA, 949 bp, Emericella nidulans
  unsure (1)..(949): unsure at all n locations
cccatataaggcggggccccgcacgctgacgaggacttctatctagagctgttttagcggtgatgatgcgctagctagacgataagtgctccgactacacagaaacgccggaactacaaaagcgtgaggctgaaactgatgatgacttgacggatcgatggcgcacttcccctgacgacgcaagactccttgtgagaacctagacatctatgcgcctacccagttacacatacaacagacctgatcggttcctgttgacatgttctggtcccagatgcttataatatatacactgcacttcgacgacagggggtccgaacctgcctcctatatatgaccgagcacatgcagctgctcgatgatgctcagttcattatacgaccataaactcggatcagatacgcattggactgcgatgctgctaaaaaccatgctctagacatcacagggctgagctagagcagcgacacctgtatggcgagcttgctctgatctataaacgatgcgcagtacccatatcttgtacaggatcgttttgactgtgctttgacttaattacagtaggttgctgcaaaatgtgccatgcactcagagctgattaaagagcgtacaatgctagactacatttcttagaacgacacttccgcacgacttatgtgaaaacccgctggagaaccgttcaaaacaccagaattgatcttatgctgggaacaagaatggtcctagggataantgagtcaagttttcttgggagaaaataccagccggtgaattatatgtttagataaaggtagtttttaccataagactgggttattgcccacctaaggtttgtttttgccagtcaaaagtcggttttttcttataaaaaccagtcttttttctctttttttttataaaacaaaaattgtattgtttcacttttggcttgatgtgtttgtctatttat

SEQ ID NO: 16037 - DNA, 2351 bp, Emericella nidulans
agctgatgaccagatgtacacttaccagctgcacctgccaagagtagtttcatccgaccaagggctttgcctttctctgtgaagggtctccgactaggtatagtgatactcggcataataagttgtgacgtcgagtcggagtttggattgagtggtgggcggggatcctcttcttcatcgccggaagcgacagcctggctactgagatcatctgtaatagatatctcgtcaaaatgtctcgtggactggttggtgatggatttgggactgcttgggagggacgactgatcttcggaatttaagtagttgagcggagtcaagggtcgaggtgatgttaaattagatggatgaaacgatgcttctagcctggggatttggatagaatcaaggtccttgagtgttggactctgacgagcatttgagctagcatcgtccgcttcttccaaattgttgttccattgcggtgggggcgcgggggaagcagagctggaaacaggcttgctgatggacgaggcgtcgaggtccggtagcgtaacagctacgctcaaggcagtggatgttgtcccatcaaaactttggatgccatacatgctatcccgcagaccttcagactcggccggcgagtgctcgcgctcatcggagcgctgactgcgggccaggaagaaggtggatggagtggtactgcgggggtcaatccactgctgatgttcaagcgacgacttgcgagatcgcgggggaatgatctctgggacaggcggtctcatggcggcgtggaggctgtacaccacaccagtgttgaactgagaaagcgaacattcaaagggacgaagttaccagacgtaacaggatggatggctcattctggcattgtcagctctgggaggtcacgtttctgggaccaccactgtgaccactcctacaaccccgcatgacggtcacgtcagtacttcgagtacagtgggctgatagtctattaagccactccgcgcaacctagatctctatgagaattcctggtctataatcttgcaggaagctgttggctatctgcatatccacttcgatttccactgtatatccacaatgatattctgaggaccatcatattgcgtgagtatggaaatacaattatccgatggcttcgcggtcttactgtttcagactagcgttgatgccggttctcgaagccgacgagctacgcccagtagctctctcagtggctggtccaggtaaagtcagctctggcgcggtagcaaatgaacagcgagatccccttgtgccgacacttgattgctgatgctaatcaaaatttgtcacgctaggctcggattattgcatgcatctgcgtctacctcgtccggcgatataagcacgatgcaggatggagaatctggctgctatacccttctggacgaccggctagcctttcttgcccaaatggcgttgtcctggatgaacttagtgctgccatcgccattccaggttacgtaactggatctaccgttctacaccatacaggcgtatagacaatattccagatgtcgagacttcggtaccgagcagggtacacaggcagcaaaatcccagggcatggtttggtgagcgtaggactgccccaaattccattttagggactgaccctgaagagtttgggtcgcagtccctgcgccagcaagtaagagtggaagtcgacagtcgagaactggtccaagggtacagtctccgagtgtcgacccagccaggctagcctagactaatgtagtgcggccgattaaaccgatttagcgcaactgccgcatcaaaaaacgcccccgtcctgtggaagcttcagccgtcttcgcatgtcgctgtctcatccttattctcaattcgtgcatctgcaattgttgctatcgaaaatgctgcaaacctgatccgccgctgcattcgagccaacctccctctgactggttgattcatcaagcccttccgacgagacccattgtggcccatgggtggagagaaaatagtcggcgccggatttcttagaaaaggactgggtgcctgtgatatatgttggcatttaaccagttcaatattgcctttgggacaggactgtctctgccactgctccgtaccttttttaactgatagcagaccggtatactttatatacgtatgcagtactctgtagtcactctggaaaccaccaaccctaatgcagtacagacccaggtcaagtctaggaccatcctctcttctctcgaattaagaggtggcaatgcgcacggcaatttgtatggagaaggcgcagtcaaaagttcaagagtcaatcgcagtcaacggggcactgtcttgttccacctcccactc

SEQ ID NO: 16038 - DNA, 498 bp, Emericella nidulans
acgcgcttgataaaaaatccaagagtactcggccgcattctgcttccagagcacagctcacatattcatttctacaatcgagcctctggtccgcttgctcgcggcgcatgatctcactggctgtcgagagacccggctgctggacaaagcaatccagcttggggagatgatctacacctacttcgacacagagaaccggatgcccgtcccacggtggaatctgcacaaagcaggcatcggagagcctgagcgcgcggcagtgcaaggcgtgctcgctgaactcgccagcaacagacctcgagtacacgcggctgtcgcattctgccgggggttattgcggaattcttaatgcagggatccgggatttcccgtttgggttaaacctccaagtggccgccttacccgattcccggtgttttagaccgtctccaaatgcccctatattatgcccagccttactcggggggataaaaccaatttacctttgctctgcgttat

SEQ ID NO: 16039 - DNA, 989 bp, Emericella nidulans
gttgaagacgtgctcactctggcgcaatcgagtgctcatttgctggacggctgcaagggcctcttttgcaaggatggcgcgctgggttatgttgtcaaaggcttggtcgcgctcaaattcaaaattcttgtcggatgtatcgacgtcctcagtgacagcgttggctgcagcactaagggcaatgtttgcgactgcacctgcgcgcacgccgagctggccgagggagagacgtgtgtcgggcgacagaatatctcgcgggatgggatcggggaagtcccgaatgagtctgaggatttgacagaccaggtcttgctcttcgtcgatgccccccgggccgcggagctggggctggctttcttcgagccgacgcttggtgcgggagtcgagagcgtaaaagtagggctcgaaaggatggcccctgtggcccacggcggtggggcagttccttttcccggcctaggtggggacgcccatgcagttcatgttttcggcgagaactggagccccggcctgcctggcttggtagaatcctaggcttggcaaggccctttaaaaagccaccctcctatggataatttgaacttgagcatcttgcaccgggcctggttgaattccattctgtgctggaagcctccccgggttggacaggttggccgtctttttagtgcacggagagcccaacgcgagatttaagtccttccggggatcccgggcaaccggtaactcccaaccgttgttaagtaaaagaatggagctcaaaacggcttttcaaaaatggtgggaactttgcaaagaactgcctggttgaagtttttgtcccaaactttttttatcgcggcttccactggggggccggctgatattcaaatggttcctttctttttaaaaaagtcttaatgcttttattctacggttgtgccagactttccttctcctacctttcacccctatcttaattttcccatctcccacctcccaccattaatctc

SEQ ID NO: 16040 - DNA, 2851 bp, Emericella nidulans
gactacgtaccatgatgaagctctaaaccagtcggaagtccctgtctatacgatatctgggtcaaatacagcccgtccactacctgaatggctcgcgagacggcgaaagcgcagtctaaaggacgatccagagtatgcgaaccggattgaactgctgcaggacttcgagtttgaggaggcaagccagtgcatccgggtcagcgaagatggggattgggtcatgagcacaggtaatacgagagttctctctaagaataaatggagaaactcccaactgactttgtaactccgggtaggaacctacaagccccaaatacacacgcaccaccttcctcagttatcactttcatgggctcgccacacagatgcgctcaatacaacattccaactgctttcctccgactattcgaagtctatccacctacaatctgaccgatcgctcgagttccacactcctggtggatgccattaccgaacaaggcttccacgatacgggcgtgacctaatatacgacagagcgtccaccgaagctcttgtcccagccgtcggcgtaaacgccgacggtatgggtgaagtctttcgcctcaatctagaactgggtcgttacatgcggagtttcgaggtcgacgtcggaggcgacgacttcacgtcggctggcggaggtgcgttgcagggtggtataaataccggtgctgtaaacacaggcgctattgcggaagagagtcatggtctgctcgcttttggtacgactttaggcaccgttgaactctgggatccgcgagcgaagggccgcgcaggagtgctgttgcctcctacgcagatcggacctgatgatgcgagaagcgagatcacagcgttggagttccatcgttctgggttaacgcttgccactggttcctcgaacggtcttattcacctctacgatcgccgttagccggttcctctactcaagaaagatcaaggatatggtttccctatccacactcttaagttcctactgccgtcgaccactacacgagaacagactttggagcccaagattctgtcttcagataagaaaattatcaagatatgggaccctcgaaatggtaacccatggacctccgttgagcccgccgttgacatcaactcggtcgcctggtgcaaagacagtggaatgctcctaacagccaacgaagggcgacaacagcactcattcttcatcccccaactcggtcccgctccgaagtggtgttcgttcctagacaatctggttgaggaaatggccgaagatccgaacgaccccaacgccttcaacgctggacaggccggctctgtctacgataactacaagttcctgactctacctcagctcaagactctcagtctagaccatctgattggaagaactaacctactgcgaccctacatgcacggatactttgtcgctcagcgcctctacgaggaagccaggttgattaccaacccgtacatctgggaggaagagcgcgcaaagagaatcaaggagaagattgacaaggagcgtgaaagccgaattagagggaagaaaaaggcagccgtcaaagtcaacaagaaactcgccgaacgcctcatgcagatggaggagaagaacgaacgccgcaacgcaaacgcgttctccaacaaggcggcgacgagccgatggaagatgccgatgctaccgcttctgccccacacccacagcagtactcagcgacaaccgtttcgccaaggtcttcgaggacgaagacttcgccatcgatgagacgtcccgtgagtactctctccgcaactcaggcagtgcttcggagcctgcccctcctcctaggaaagagcgcggcctcacagccgtcgagcaagaagccatcgacgaagtcccgaactcctcagactcagactcggattcagaaagtgaaagcgaaagcgaacaagaacgaccctctaaacgcaaaccctccgcccaaaaacagaaacccgccaataacatcacccgtcgtcagccccaaatgcaggtttcctcctccgcagcagccgccacctccaaccgcgaccgttccttcggtgctcgcgcccagaacatgcgcacgaaagagaagccagctcgtcgtgttaccgtggtgggtgagcaggaattcacattcaaccctagaggaaagggatcttcgaaacagaacaacaatgcgcccgtcaaaccaactaccgcgtcctccgactacaggacgaaggagcgaagaagcgcctccggtaatacgttccgcaagatgtgagcgtggccgtaaaccaaagaatttgcgctctttctctaggtattgggcttgggcttgggcttcgtcattgttcatccttctatcgcgcgatttgaagcgtgtatacaacacagctcgctatattagcgttagtgtctatgggccagagcagtgcagaccgccgcttcaaacgttgcgctctcatgtcccatccacagagtgctacggactgctttacctttctcggtcattcgagttaacttcccatgggaagaaagaaggattttagtggcggtaaatttcaaggacttggttacccttatagagagccgagtgaaacctgggataggacgaacgagattgctacaagtctctttaagccggtcgagccactccagccagacctttcacgacatattcatgcaacagtatcgcatatagaaactgtggttaattgtgataccacccatcttgttaatttagcgttctcttcagggagtcttaagattctgaagcaaaagttttatgatgcaaccaattcaacttcggagtcttctgtaatgtactttctcgaaaatcaattgcttgaattcatatgacatcgaacc

SEQ ID NO: 16041 - DNA, 520 bp, Emericella nidulans
gccagcgagaaggatatagtgaatgctatcctatgcatccatagatcatccagcttcataagaggtatggcattcttgtgaacgacgctacctaatggatggggagccatcactgtccaagatcctgtgaaatatacgcgacatcaattcaaggttttaggtcttacagacctaacctttggtaggagctgcacccttcctaggggacgcttggcagccacccgtcgaggataagagcctgcaggagctcgaggagcgtcgatgaacttccttgggcaccgacaatcccaggcagatcacgccacgccctggtatgggcggaagacgtttctgtgatgaccgttcgatataggagatacgtctatctttcgtcaggtattttctcaggaaaactggtcaaaacgggggccattcataaccgtcttttggttcacagtcaatcgacatttgcgcggtgtccgccttgataggcctgttcccgtccacagttcggtcggagtaggttgtaaaccggccataa

SEQ ID NO: 16042 - DNA, 622 bp, Emericella nidulans
gaagtctagtgcataggtactggcgtcacagcacagctgctcagtaaacctccttctcgggcccgacctatatgttgacctcaaaccgatgacggctatggatcgagtgtttatactgcaagacaacttaaccacccggcaaccaaatcgcgcggtgttttattatgtggtgatgtaattttccatccaaaatctgcatctggtgctaatggttttgtaagcatctgcgttatggtaaaactctgatggattgtactgtcttttattcgtctcttattcttttacttctcactattctctttgttttccttttttatatttcctttattcttcaaccttttttccttttaatttcctttttttcctatttctccttttgatatttaatcctcttttatatctcttttttccttcctcttttagtcttttttaactttctctatctagttaccttattatactttctcctactcttcttttctgtttcatcctcttttttcctactattctattatccttatctcttccactattctttttctttcattccctttttgtctttttctcattcttctccactcttatccacttttctctctctatctattctatctttagttga

SEQ ID NO: 16043 - DNA, 4570 bp, Emericella nidulans
attttgtcatccgcgcatcggcgatttcggcctcgtcgctgatatctcgcacctaaatgaccgctcgccagagagtgaatctgggcccagcaatattccgaaactgaaccgtgttgtcggaacagagttctactgcccacctttctttcgcgggtatggaatctcagaggccgaggacgaagtcgtccctggccggtccaatgaggaatacttcgattatacgattgatgagtcgctcgatgtgtacgctctcggcgttatcctttttgaactcgtataccgcatcagcacaaagatggagcgacagatggtgcttactggactgactcggggagtgcagaggactgacgctataaaatcaatccgcgaacgaccggtctttcctgtagacttcgatagcaaggttgatcaaggtggaatggttttacctactggggaaaccgttgccgagtcactgaagaagtgtatcaaggggatgttggagttgcagccgagtcggcgatggagctgctcagatgtgcaggaacacttgcagaggttgctaaacattgtgctcaagtccatgaccacttcgactttctaaccactctatcttgccgttttcatggcgaatgagcgacaataatccatcaaatgcgcccataatggtcttctatattgagagccttttgcccaatctttcgcgggctgctgttgaacactgcttgtgacttggtattcagggacttataaatcgggtcaaagtgatggctacaatgtatatggactgtattattacgcattagcagtaaatatattagagtaacgatagcttcaggttcattgactcttgacttaagagttctcattgctaagcggtagctttcaagtctccaccggttaggtaaatggcggaagctgggtttcttaccccaaacatgttccatattccttcaaaccgtgacctgattactcatggaccgcagagattctcgactaaacatgagttaaaatattcatgaatcctctagcagggggtgaggaaatagtggtcaggttagtcttttatacacggtatttagctgctttgctctgtacggcaaagcccagaaatgtgtttgtggattcgtccaggtaccattcaatggacctggaaaggacagaatagcattaaaagaccctattacagagtccacataaatacttcttgtattttgtgaatgtactgcatgaaggcagagcaccgcacgagccatcagaggttgaccgcgggcctcggctcgttccccgcatgatcgacgcaacactgcacctctaaataacaaaaatggtccacagcggctctctagctttcacgccttcatccctaccagtacgctacaccaccaaccaaccaccatcaggactctagactgcaaaatgggcgacaagaaactgtccccgctcacccatttcccaacaaccccctattccgagccccttcttccacaacttgccattcccaatccctactacacctctacacaccacgccctccgcgcctgggtccgaaattatgtagacacgcatatcgcaccttacgcgcaagaatgggaagaagctggcgagatcccgcctcatgtatacaaaacacattgcgagcacggattcgccattgtccacccactcaccacaccagaagactctgcgaacctgactttgcccggcggtgtgaaaagggaagaatgggatacatggtgcggactcattgtcgcggatgaactgaaccgacttggtttcgtcggtgtgatctggggccttggtggtggaaactcaatcgggtgtccgcctattgcgcgctttgggacggccgagcaacggcgaaggtggctgccgaaggtcgccaagggagagatcaggttttgtttggggattacggagccggatggtatgttcctcttattatattgatctgtgatctttgacatggtggatacgagctgacagtgacggccgatagctggctcggacgtcgcaaatatccgcaccaccgcggtccgtcaaggcgagtactacgtcgtcaatgggtcaaagaagtggattacgaacgggatctgggcggattattgcactgctgctgtgcggactggtggacccggacggggtgggattagcttgctggttatcccactgaaagcggagggagttactaggaggaggatgcataattcgggagtaaatgcgagcggtacgttaaattgagacgtcgggggctctgagggacgagtaagctgaccggagattcgcggctacaggatcaacattcattgaattcgatgatgtgcgtgttcccgtggaccatctcattgggaaagagaacgggggtttcccgctaataatgtcaagtgcgtatcctccatgaccagacccaagtccacctcgacggaacccaggtttgcagtttgcaaaatgcaaggagctaacacatagcagacttcaatcctgagcggctttccctagcctgcgcctccctacgtctcgcgcgtgtctgtgcggaagacgccttcaactacgccacgcaacgctcaacatttggggctcccctgataacccgacaagcgatccaggcaaagattttcaagtttgggctcctaattgagcccgcgtacgcattcatggagcagctggtcaacatcttagagaagacaaagaatgagcctagagatgacgtgagaattggcggaatgacagcgctcttaaaggtcatgtccacgagggcgctcgagaagagtgtgcgcgaagcgcagcagattctcggcggggcggggtataatcgggcagggaaaggggcgagaattgaacagattagccgtgatgccagggttcatgttgtcggaggcgggagtgaggaaatcatgatgggtttggcgctgcaggaggagatgaaggcgctgacgacgaggaagcgggcgttggagaggaagaagagtgagaaggccaatctgtgatcggaacactgtgattatgggatggattatatgggtttacaggggattgttgagtagaatctgtagaagattcgtttgaacgtttctgtctctactggattgggaatactgtagtgactgaaattagtgtgaatgtagcaatagatcttgtgggggacatccctgtaaggcgctggtttggtgcactccagatacacatgaccggaacgggccgtccctttcatgttaagctgtagatcaactattcatcagatataatcacaattgtttacacctatttatttctctcacattctgtcctttactacttctgttcggcacttgtgactagttgtgtcatccctgacgttatcccctgtccgtttttttgagtttccattacaatcgcctcattttcccaatcgtcattattaaatccatccaaacctttgtctttgcaactggaccatttcactccaatatgcttcattctcgctctccaatttagagctcgcttttcgctgcaaaagaactactcaaagtatcattggaaatgtcccgaaagcaaacactaaacgagcggcgaaggtataagggcagggaatctggatccggtactggaaacaagcacggccacttcccaatggcttgcgatctgcattctcgcaccctttatagcaatacacacagtgacaaaaccaggaactgcgttgtcagggataaggaggctaagtgccgggacgccaaagctcaccaagttgtacttcagagaggtaacgaccaaacgccagcgaccggaaggctgagggtctgcaaagcattaaacagaacgacgaaaaccaaagagtcaaaaatcaggagcttggagatcagaaaatcgaagaaggcatatccctggagttctcgccaagccggccctcacggggtagattgaaccaagcctcccactcccgtgtccagagtagttgtgagctaaaccttcagtcctctcaggcatcacgggcaaggacctaccaatcgtaccgtccggcgtcgaagactcagttctaaaggattacgttggactctgcgatgctccggcaccgctgatcgtccgaaacctcggctggcgtgagaacaatgccggggaaccggagaggaaactacttgacaatactagacagctccaagcagcattcgcacagacacatggaagtcttgctcgaactccttgcgctccttgcgcgtctagaaagggttcttggaaaacatgcgtaacgagggaatatcttcgcactggagagaagaagcctaccaatacggattgcgcaaaatgcctcttcgatgacagacaggactgctgtattactcttagtgagcgtgatatacccatctgtttttgttattatgacttgcctcctgactataattcatgcgtttctagctgaagcttcaacttcttcttgcatacgtagcagttctgcccctagtcccaagaccctaactcatgactatgaactcccaaagcagaactccatgtgtccttgccagctagaggtgtgagtgtcaaacagatgcttcagagggggctccgcctgcgaaaatccagcgtgctcgccacagccaatgtaaagccactaagatgc

SEQ ID NO: 16044 - DNA, 1001 bp, Emericella nidulans
agttttcggagcagacccctgagccctccggaccgagggcagaaaaccaagaggctcgctttggtattcttctagatgaactagtcaagcggtgtgtgggttctgttcagcgagacgaaaatggtcgtgtattctactcgacggaaatcaggcttcggtcaaagggaggcgattttcgatggcaccttgtccgcctggttcgggtcgataccagcagctttgggagcggcgaggctttctggtacggcacttgtactgatattaatgatcgcaagaatcttgaaagggaactcaacacggcaatgcaacagctcatcaaccagatggaatctaagacaaagtttttcagcaatatgtcgcacgaaatacgtacacccctcaacggcatccttggcaccattccattcattcttgatacctccctagacacagaccaaaggcgaatgctcgattccatccagaatagttcgactaatcttcgcgaattggttgacaattttctggatgtgtctagggttgaagctgggaaaatgtccgtggtcggttccctggtttcatgtgccatcggtgaacgaagatgtgtatcgtacagtcttatttaaggcaatccacaaaggctttgaaatgaactttcttatggccgtggtttttccgctatggtaatccgtgataggtttctatttcggcaatcccgataaaccttgtggtatgccgtgcaatcacctgttagggcaattcaagccgttggtatacattcgtcctattcttctaaaccctggatttcataatttaatttccatctgtaaggttatcctaggcccgtctttatcatgctatcttgtcacctctccaacaatcgttggtttatattttctaaattaaaaaagtgcgccccacctaaaatatggctttctttttttttaaacccccgctccttgttaactctaacaccccttaatttttatatttttgagaatgaatatattcttttctccccccat

SEQ ID NO: 16045 - DNA, 664 bp, Emericella nidulans
  unsure (1)..(664): unsure at all n locations
aactgttggtgctgaggccgattctggctcagccatctctgacttgactgcatctcttggttcaactttctctcttggcctgaccagttctggtgctgttccttccactcttcctattaacttatccgctttgactggctcgagtgtctccgccggaggtgcttctatcaactcaatcaactccacgtctttgactagctcgacttcctctatgccaattgatttgacaggctttgctggttcggctggttccactgcttctactggttcaactgactctactgttgtgaatggggccgctggcgctgtggattcgacttgatgggctgcgtacgaacggggcccttccagtgcagtggaaggaagcctgatgactggttataatccatatatgatatttctggctagctagccctccaagccaacacaaaacttcagccatctttctagacctgatattgagctacctctgatccggttcaaaggttgactgagttgagtacttacaaaggacctgacggacaagaagagttaaatacgtcgagtaaggaagattgcaaagtattctaatgcctacttacgcaacataattacaagacacaggcaccggattgactggngataagggttttctctttgtgctttttcatcaagatgatgaatc

SEQ ID NO: 16046 - DNA, 1735 bp, Emericella nidulans
cttgtggatgaattccagctcctttccgtcctcttggaaccgatagatatgaatgtaccctcccgctgaggaaggcgggttgacagtcatgtctttggcagttcccacgaccaagaatgtttcgtcatcctgactagtgaacggaacagcagcaatgctcacagctgcttcattctcttcgagctcgactgctccaaccaccgccttcgcatctaatgggtcgattatttgaatgcaagaagcccaatggcctgtaccgcgaggatatccaaaatcttccggaggaaggaccgttgtatcgccgccgcgagcctttgagtcttcaagcaaccgggcccgtgttgctggcgacagaacgttattgtcggcctcgataacataaaacaagggctcttctggatgtttgatgaagtggcgtggcgtatatgccagaggtatggattgttgcagcatgttgttgtccagtttctcaatcgagaagattctagtcacccaacgtcagcgaaagtcacacatcgtgtttcataacgcattatggatggtaattgcgatctcagtaggaacaattggagtataaataaaagaatgataatccacatggtctttcagggatgattccgttctcatcatatgatccagcatagaaacaatagtagaaacaggggtgcatgcacataccttaggttctgcccttgaatacccaccataccctcgacgcactgctcgctcgaaaagttccacccccactcgagtccaacatagtccagcggcgtaagcataaagccttttgtttgggtatcggagtagccaagccaaggacgcgagctcagggcaagcacggctgtctggcctgtcactgagacctggaagagtttgacggctttagatcccaggaaccgagtgcgtgtgtcggataattcgccggtcacttcgtcaagcgccgttcgaagatagacgcctgagtgaagaccgatatgaagatacaaagtggtcccgccagagctagagtcagccatggcaataatgttcagagcggatggtgcagcagtcaacgcttgaacagacttgctttctaacgtcgtatccgggtccaagctgaggatgcggactgtcgaatcgtcacaaccgacagccaggaatgagcttcggacgcgaacttctggtaccttgcccagactgagacacgttacagttccagacatttggcgtcgttcatcatactcagcgagtgacccgtcagcgtccagcttgaagtacactatcttacctgagctgagcgcaaccgaaacctggcgctcatttgtcgcggcggccacgatagaacggtgttgcggcgcaagccaattcgtcaactctcgaactggagaatatggcgaatgcctcgagatgaaattgattagggaatcctcgcaagttgttgacaaccacggtggccctaccaaaggaccgggttaagcacttttttcagttacccgtgttaaaccaggtgccttggaaggacagccatgcccttgattttccccggaagttttctcaaaattgtgtcctgaagctgctcattttaaacccactgttacccggaagttggccttcccaactaaatggggcatccgtattaattttaccggtggggatactcctacttttacctcgtaaagcacgcgggttgtataattaatctttccatctcttatttatgtacttatattttatgaaacctttcctctctctattc

SEQ ID NO: 16047 - DNA, 4319 bp, Emericella nidulans
  unsure (1)..(4319): unsure at all n locations
taaacttttactccccccgaagagaaccgcttcgccctcgttgacctcgttcgcgtcctctttgtttatctcccgcgtcgccgcatatttcggcgaagacacaggccacaccctcctcctcaccttcttctccacctgagaggacgaagcgacatcttacagcctccgcatcgtcaccctccaactcgcctgtaacctctttaaaacaccggtttacacaaatcatctctcttcgccatcgaatcccctccgcccagccctcctttcacttgtcacatcaagcctccttaatgcacagtccaatctccgcgtcgtcgccgccagtctagcctataacctcgccgcactgaatcataacgcgcgattcgccaataccggcagcgaacctctaacggaagaagaacaagtcgcgctaacagcgtcggtcgccgaagctctggcccaggaatcgtctagcaccgaggccctgcacggccttctcttctcactggggctgctgatctacgaggtgccgatggatggcgcggtaatagacctttgtcgggcgcttaaccttaaggaggctgttgagggaaagaaggaactgatcacgaatggtgaccagggcaaggataagggggattctttgtttagagaagttgggcgggagttgctcgcgaaagggctctagtttagattggctggtttcctagccagttagggatggtagtaaaaattgataccacccttctctcagcgttctttgatggcagggttaaggtaaaagatgccacatcaaagacttaagaggaggaagtagagtacttttgtgttgtcttcggctggtgatggctggagttggtataggatcggaaggacaaagaggaagaattagggcgcattagaagaagctttaatgattatgggaggatcaaggaagaaatgtatgtgatatgattaggacgtagcataaatctttacttaagcttaagagttctttattatttagttcactcgctgcatcgttcctccacactgtctgctccttgtttcctttcttagtcgcgatttctggatatgctgtccaaatttgactgaaatggtaaaagcacagcccggcaattgggtgggttagatttagattcgacctggtcgtcgaatgctgggtagctgagcattgtgcactgacgttaccttcctgaccctggctagtagtagaacgacgaccagtaagtagtacggagtacagtatatggaatactgaaacgattcgacacgaaggcgaagtgaacaatcagagaccagagttcagagtccaagtttgctttctactcaagtgatcagatgctgaaaccgaggggcatttaagacaggcatttgacaccttcagatgtacctcttgaaccgatgtgtccgcgggtaagagctctgtctagcatcaacatatgcagtatacactggcttatagtggcagcttgagtaggaggtgcgcttgttctaagcgtcagaagggtaggagctgccgtctcggtacctgatcggtcatcgcgcttgccttctgagtactgggtagggaggctaaatactccgttcctgaaagcataactgggacgttacaatcatccatcagtagagaggagttaccttcagcttcgcatactggccgcggccaaccgtgctcagcaggcgatctttctggctgtgtgatagacatgtccacacaaagaacaccgcgcatatctatttcgacctgaatcgatgcgacatcaacagacttggggcggtggcgccacaactcgcgtctagccgccgcggcaattgccagcagaagacaatcaattcaacgcaaacccagcgcagcactaacaaccgtgctcacaagcgcagtcgtaatgtacttcctcccttgacagggtgtaaatggagtctagatctagtctcccgtcttgggcttgagctcgagatcgagcactgcgatcaaacgaactcaacggcgcgggcggacggggacgaaacaaggattgcccatggtacgggacgcggaagtctgtacccgcgcgaggttggacatcggttaataaaaaaccctgagtttgggagattggggatgctgcagatcgaatcctggtgcaagtttgatacccgttggcaatggctgcggcagctgctgcggcagcgggaaagcagggcaaacagggttttcctgcttgacctgtccgaacctgaaccacttgacgaatgtcgcgatggcgggatggcgcagtacttattctctgctggtttgcttccactcgcgctctatgtttgacgtttgtgcgaagggtcgggtcgggtcggggttgaatgggtcggacagcagcagcagggttagggcacatgcgttgatgcatgcaaaagagcagagcacaggcagagcaaagtggattcaccgctacttcgagtctttcatggcttttcgcattttgtttctgccggtccatttgatttcgttggcttcgttggcttgactcatacctgaggcgcgtcaccatcataacatactcatagacccgtacatccaccgtatctatttatgggcacaactgggaatatcaggatgagggtccagtggcggaaggacgtcttgagcttggagctcgagtctagatctgtagataatccagtccagacccgcataaatgatcgttcgccaacaaggatatcctgtctcgaactcctcagccgagcatggaatcctggacgtcccaagcgcagatggagcttcttcgtcatatcccaagaacagacccacttacgaggtctatcagttcatcatctgcagatcgactggatagtggatgctcagtgcgctgctgcagactgacatgacaggctgaacgtcgccggacgtacgtatgcgcgtccgcgacaaggaccaaacttttgtaggtgagggtcagggcctggtccagccttatctgcagcggataatctaatccaatgataagatcactccactaaaccaggtctgtgtgtttgaatcgtcgtaatccaggtcagatccagactcacttggaaggactcatcaaggcggctatcgtgatgagcgatatgattggtgatgcgattggcgatgtcgacggccagtggccgtccagaatggaatatcaccaaaacatcgagatccgaccgtacgaaaggagtccaatcgaagaacaaaccccgccgatgagcggcttcgctcagaccggctcagctgtcgcaataaacaaagcgtctgagacaacgacgagcgacgaggtctgttcgtccaggtgtcgtctcgcttgtcggcgtccgccgtcatcagcagaaacagggccaaaagcgtgcgagagatagttgcaaatcggtttccaattataacctatatcacgacaatgataaagtcgtcagaggatcgctaaccggtctggcgtgacgagtggatggcggatgcaacccagcccgatagaaggcttctcgaacaacaccccggtcgcgataacagcggggccaccagtgagccctgtcaaactcataccggttattcagagaatcttccaaaatggagaccgttacatgcggcgcgggttggtctcctccgaccgccagcgctgagtcgacgcacacttcacctcctcctccacctcctcctccaccacgtcctccacccctccatagccagggtctagaggcaagccgatccagcgttcagacaatatcctcagagtatgcttaccaacggggcgtggggaggctgggcgaaacggtaggtgggggatgccgataatccgccatcggatagaggggtggcatttcctaaaatcgcgatattcgagatattcgataagcgcgattacccacgcccaagtcggagaagtcgtcgcgccacgttggataatcttggaagcaggcgtggccacgacatcgacgtgggtggcttccctctacatctgtgcggtgagcatccacgaccataaatcaggataatcgggatttgaggaaagtcaagaccttgtttcggcagccgcgtgccccatatgaaggttcggtgaacaatatatcatactacatgtggtattggcagtatcgacagtctagacttgtgaaggtcaacagtggaacgccctgaatcgcccgattggcgtaaagacgaaccaccgtggatctcgtgtagtgtcgagacctcgacactaacgacgataccattcagcacgccgaccccagagaatgacgattcggcgaccgagctggagttcgtgagcgtntgggatcgtggcacctgtccagagtactatgttccatacaatcgacggtgaatggtggaattggaatgaggc

SEQ ID NO: 16048 - DNA, 1025 bp, Emericella nidulans
cttctccgcaaatccatctcagcctgcgcctttcgctgccgcgcgcttatattgtcttaacctcctccttcgtctccttagagaagccggttatgctcggccatatcaaactcaaccacctcccactcatattcataccttccgctctggaacaacacaagctgtctttcatactcctcctcggtgactttgtaaaacgtgatctgatcgaagccttcaaaaagccacggtttttctggcgcataaccccgtttcgtgccgagaatatcaacgccggggatgggcattccatccatttgattccccacctggagcgataaccgcgttggatttccaagcaagagtctcgccccaaccctaaaagttccgggttgaacctttaaacccttcttcgttcctaaaaaccggtggggaagtggggcccctcatttggctaatccatcccctggatttggagcctccactacatcaaaatggcaatctcgtttatcgtgtttggcccagggaaccattttttctctggacaccgaatactagtagctcttcttaattacctgacactcacgggcaaaggggccttggaatccccttatttcaaaccactttttgtaaaaaaatggggcaaatattcgaaaatttggtgtttccttcacctcaatttcttgagggcccttttttcaaaaatatctttccaccaccaaattcaccggagtcttctcttcctctttcttaatcttcacctcgtcctcttaaggggatacacacttctcccgaaaatacgtgagaattcgccacattccggctcttaggagggtatctcaacagtgacatcctcctatcgtggttcagatcatcaaatttcagttctatctctcccactttcaccgttccttactttctaactccccttgtcgctcacctcatccaagatcttctcctccccctattcatatctcttagtccaaccccatctcctttccttaatccctctctacctaaaatccttccacatatatccaccactc

SEQ ID NO: 16049 - DNA, 4124 bp, Emericella nidulans
cgatgtgggtccgccggttcgtcacagaaatgtgcgatacaactgccggttcgttctactttgctgggttggatgaaattgggcttcgtcaggacgctgacattgtgaaagggtcatcttcttcaataggaaaattatcttgatccgccctaaaatgtggcttgccaacggtatgcacgcccaatgttgccattcgtctggtaccatctggttgggctcttcagacatagctaactttagcccgaatagatggaaactaccgagaaatgcgacactttaccccatggcagagaccccgggaagttgaagactactacctcgagcaaattgtcggcaagataacaggacagtataaggttccctttggcgatgcggtcattagcacgagagatacatgcttgggactggagacatgtgaggaactgttcacaccgaatgggtacgtacccgacgtttcagtagggctgaatggtaatgtgctaacgtcaccatctagcccccatattccctacagtcttgcaggtattttcgccttcacaatctgttatttgctgtagctgatctgggttgaaggcgttgagatcatttcgaactcatccggcagtcaccatgagctgaagaagcttgatacgcgcgtcaacctcatcacacaagccacaaaactggtaagcagctcagtcaacacacatgagcagtacttactgttgccagagcggtggtatctacctgtatgcaaaccagcaaggttgtgatggtgacaggctctactacgatggatgtgctatgattgtcataaatgggaatatcgtagctcaaggatcgcagttctcactaaacgatgtggaggttgtcactgcaaccgtggacattgaagaagtacgtctattagttcaacttcgattggccatgtactaagagagacaggtgcgcacataccgtgcctcaacaagcagaaatatgcaagccagcagacagcccccttttgtccgtcttgaccttgacacgcgattgtctcgttcggacgaagacgctgaccctggcattgcgccgtctgagacgctcataccccgctaccacgcgccagaagaggagattgcccttggacctgcttgctggctgtgggattaccttcggagaagtggtgccgctggatttttccttcctctgagtggtgggattgacagttgcgctactgcagtaattgtccactctatgtgcagggaggttatcaaagcagtacaacaaggaaatgagcaagtgatcaaagatgtccgcaggctctgcgcagagcctgctggctcaacctggctccccacaacaagccaagaagtctgcaagtatgtctgcaacatactgcaaacactcacgttcagggatagctgacttctgtagccgtattttccacaccagcttcatgggcacgcagaactctagtaaagagacaagagaccgagcaaaggagctggctgcggagatagggtcgtaccatatcgacttcaacttcgacaccgttgtgaccgctttgatgaatctatttaccgtcgtcacaaactttcagccaagatttaaggtccacggtggtagccgcgcggaaaaccaggcgctgcagaacattcaagctcgtctgagaatggtcctctcttacttattcgcgtcgttactgcccacagttcgccagcgcccaggcggcggtggccttctcgttctggcgtcgtccaatgtagatggtttgtgcccttttttcctgaagtaaaacgtcatgctgacattgactagaatggtatatctgcccatcctaatacaactacaacataatcaagatacttacatttcatctagtttacgaggctacctgactaaatacgacgcgagcagcgccgatgtatgtcatacctcgctacctcatatgtctttccccggccaggcaagcaaaactaactttgtctccagctaaaccccatcggttccatttctaaagtcgacctcaagaaattcattggccattgcgcaacctccttcgacatgcctatcctaacctcattcctcaatgccacgcccacagccgagctcgagcccatcacagcaacgtacgtgcagtccgacgaagcagacatgggcgtgacctacgccgaacttggcacgttcggttacctgcgcaaagtgtccaagttgggcccttggagcatgtacgagcgcctgctgcacatgtggggtaatgagtattctccccgagagatctatgagaaaacacgacacttcttctataattatgcgattaaccgtcataagatgactgttatcacgccaagttatcatgctgagcagtatagccctgatgacaataggcacgatttaaggcagttcctttgtgagtcctcctcatccttcacactgcgtttggtgcttggtatagtcttctggggccgtaaaactaacgtatacggtgcttagatcctcctttcacttgggcatacaagaaaatggaagaaagcgtcaagtactgggaagaaaggggctggacgacaggaaaagcgcagaaaaagagcgtcaaggcggattaggatggctcttctgatggccatcggttggattctggagtcaagctacatagcttgggttagaacttctagactaatgtgaggtttctagatgttgctgtatccattctcagataaaatcaaaccactatatgttatttcagactcttaaatgataaagtgatactacttggttcagactaatatacatgctttggcgaaccgcgtatgctgcaggggtgtgttataagccagctacttccaactatgttatgattcaaacactatggagaagttcacaaagtaccaaaataatacatgtatgatatagatctgggtttctgaagtcacaaactcccccaaacgctgaaaaaagagtatgaatgattggaacagaaagttcccatatttctgtagaaactggcaccaggcgttagcaaagcctccaataagataatcacttattgaagcttaatccttccaaaaccacccgctctttgtctgattaggctgctgaccagattgctgatcaggaccctgctcgccctgcggcggattgacaacctcagtggacgagttggtttcctcacggccatccgcgtatttcttcgtacgcacggtcttagtttggactgagccatctggaaggcggatacgctctgtgcttactgagtttgaaacgacgtagttctgaactggcggaatttcagcctgggctcctgtagcggccggggatgatgctggttctcgggagagatgcgcttcagtagactcagactcatctttggcctcagggacggtatgcttgtttccaccggatacaagatctagccagctctctgtgtcgtctttgttattggtttcggaagggaagatgccgaatcgacctctgcgtcgatcttctaggaggaactgcaaaagcgggctatgaaaggcaccaaaaaattcacgctcacgggcgtcaatatccgcgaggaatcggtcataaagatccagctccgtcgaagggccattgctcgacatctcggtagacatctcggtagttgaatcggaaccggccttctctggtgccggtaaagagggtgatgcttcattcttcggacggtcaaaatgatccaagcggtccagtgtaatactcgtccacggctggctctctgatccagaactaaatttccagtgcttccctaaactaccccgttttaccaacccagctagccattcttttccagactctggtttcgcaactgctccactctcacgatccagcatgggctctccattctcgagtcggagaaggtcctcgaaagcttcacgccatttgggttcattagggtcacattcggcttcagccggcaaactcatagtcgacataagggacgtgaaaacgccctgctcccggtgagatagatagcgcgcctggcgctctatatgcaaaggcgagtacggactgagcaagagatagttgtccggccaagcatgggagccggcgctcgtcatggtttacaacattgggtggtggtaagggatgaaaaaaagggccatggcatggtgatctagccagatccgatctaacccccgggtattccc

SEQ ID NO: 16050 - DNA, 532 bp, Emericella nidulans
gacacctagccaacgttgagctaccaaaccctaaccaattcatctacttgtgtcagcacgggttatagcttgtatatctgtgctgttggtggtagtacgtaaggtcttgtgagggcagtggtggtaagttggtggagtctcacactgaagataatactaaacaccgcacggaatatatatcgccaggatttgtagcagttgcgtggccgatctcagcagcgcctgtggaaagctatagcgaaccccgatgctagcgtagtagcacctcctattgcagcacgctgaggctcagaaacatgtactcaaaggagacctcagattatatccctccattgacaaaagccattttcatagcctactaaatccggagcaaaggatagcctttttattcttctctttataaccttaaataagaaaatcttttaccaatcaaggcccgtatttcatctatttatgtctactgatcttttttttttatatcttacttattacttttttcctcatttatatttttctattattatatcttatc

SEQ ID NO: 16051 - DNA, 516 bp, Emericella nidulans
gccacagcctgcctggtgtattctgatcctccccggctagtttctgaagaaaatcctctgagcaacaagtgtaaagagcgctgtctgagataaatccccgcaactgagacatttgctttattcgtctccaagcgacgtcatatccacctatccaagacatcaaagcccctatcatgagatccgtaaggcttcatagtggatagcgacgttgcattgttgatggatattcactgtccagtatccgcaacacgagatacgcgctggcctgactgtggtctgcatggatatatcggcttcggctacatgaactatgctgtcatcgacgtatacggagctgatcgtcttgatcgtcaggttcgactataaatcttccggtgattcctccgggcatggctatcgtcgtaaagcaacaaacctttttatctctagctctctaccttgatctctaccctgatctttacctctagaagtcaactagaaactgtcaccacaataagctcgtcttgcctctttttg

SEQ ID NO: 16052 - DNA, 985 bp, Emericella nidulans
  unsure (1)..(985): unsure at all n locations
ccgagccgttacatgtactcttgagtactcaagacggcctatcgggcaacgtctgagtctagactctctgtgtacagtagtacgaggtgacataataccctgaaaccggcagtgacatccgacccaagcccgagtatattccgggtcggcctccgcattcagcatctcccctcacggacctctaaacccctcacgagtttagaagtccagtgtcttgccctgcttggaactctcctgcgccaattcaatcagccggataacctcagccgcctcctctccgctagcaggcagctcgccctcgccggccagagcgcgggcaatcttcctgtagtattctgaataggtagggggttcgactgtaggagtgaacttgcggaatgactagacactcctatagctgtaccaccatatctctcttcacctacctccagatttccttttactattatatcctaatacttactcatcatatctgaactactaactgcctcctcctatctccatctacaatcgctacgattattgatctatctctcactacccctaactcaccttcatgtttctttcaaaattatattcttcactcccatttatccatattatccnnttgctctttctcttccatattncactacccttttttcctttcctcactccctccatcggataaaacctgatgatcttaatgtttcctaataatactccgcctatacctgatcttcattatcattaaaacaatttatactactatatcactcatttatttatttaaattctctatagcctgttctttaattcctatatacttttaaccaatctcgttcacttatcatcttccctcatttcctctctcatccatcaatcattcactacactgtttctcgaacttcacctccatccccgttcaaacatcccattaactaaatgttcttatctacttatccaatatatacatccactcaatcactccacagtattactttaa

SEQ ID NO: 16053 - DNA, 3286 bp, Emericella nidulans
ccccccaaaaataaaaaagatataaagaggttgttttttttttttaaacaccccaaagcgcccccaaagaaaaaatatttgtttccccccccccgtatccctgggtgcagttggtcacagcgactttgcggttagctcagcacggaggacggtgtctttcgtcccgcatgttgacacccgggggttgaatcgctcaaagcgaacgtgccggcgatcgtacgcctcccgctccgctcgatcggagtctggctgccccggtatccgttccgtcgcgggtcatccataacgtttgcgtcgagctcggccgggacctgcattggcatctgctggtgcaccatatatgccgggttaggcccggaactggccacgttcacgaagcgcggatggatagggtggataggaagggggtgtgcatggccgtagacagggctcgtcgggacggtagcggactcgcggaagacgggctccgcgtagctaggagatggccctggggttcgcgactgacgcacttcgtcgatgtagactcttggttggcgcgggccgcgcccgctatccgagtcgtagggccggttggagctgaaattgaacgcttcccggtaggcataccgtcgctgagagtccggggagagttctcggtgcggtcggcgagagtacgcttcgtgggaatgccggcgggcatgtggcgcgtgcggcggggagagattccgatggtggccgtatcgcggcgagatgggttcttgagttgcagtgccagagtcctcggatgacgcatctgaagcgctgtgtccgtgggcatactcagggctggcagggcgggagtagctcttgcgctcgcggcctcggcttttcgatgcatgctttggccatgccggcggagatggtgcacgtggggaggtgtaaccgcttacaaactcagctgagcgatgaggtaggttggtctgcgatttgtgcgatgtttttgggacgtcggcactttggcgtcgttgatggcggcgggttgtctgcgcctctgcgggtactgcgtagcggtgactggacgctcgggggtggtgattttgggaaaactcctcctccttatttggcgtcggcgtctccttctgagcgcacttgctattgtacggatcggacttcggagatgcgtccatcaggttcttcttccagtaatcgaactcaaacttttggctgaccgtctcgtgccactggatcatctctgggtctgggccccccgggaacgcctcgcggggaatcgttttcgggaacaacgtgccgttagggctgaagatatcccaccgctccactgcattttgaagataagaaacgtgctcatcggggtctagtaggagttgaatcgtctgccagcgcacgaaaccgtggggctgcaacgcaggaatcgaaggaggtttgtacggatcggacgagggctgtatgctatgaaagcaaccaagacgctggtagatgaaggagagagcagacggtttggtttcgaggaagaggacgtcgtaattgccgccgacttttcgatagaactgcgccagtcgtgcgggggtgaggtcggcgatggggaggttgtcaaacgtagtctgtcgcaatgtaagccttcccgtctccaacacgtgcaagcaatcgatccagcacactcaccatcaattgagctattcccagacacagttgctcgagcagaggcgacggactcttgtcggggttgatcaacgcaccccaaaactccgcgtcatgatcgtaggcgaaggccatggtcggacgagcttcaagatacagcgcaggcatctgacagcagcgactgtcgccttggtagttcgcgtaaaggatgaatgaccaggcaagtcacctcagcgagaggctgaggatgataataaacaaggccgttttctggcatgacaggcatcattgtctggcggtcaggcacccatcggggctattgttgctccactgcgggggagcccaactgacaactcaagccacagcaacaaagcgctgaagactttgaaaagacggcagtcgcttgattgggagcatacaagagcccaggctgcgctcttatgcatcttgcctattcagttctctgtagccattcatgaaccggttcgagaagtggacggtgcatacaactgcacggttatcagaacctctggctcattgtattcgcgctggccgtactatatctatcgaacccgattggatgtggtatataatgaatgatatctagctaaacacttgcccgtccacggctctcgtacggaacaatcacgaccaacgctcccgctactaaaaataacatcccactcacgtataccggcaacgtgctctgcaggtctgtcatgagagctaccacgggcgccaaaatcccgcccagcctgttcgacgcgctgacgagcgcgttgcctgttccacggtttctgctctcgaatatttccggcgtgtaggcgtacaacacggcgtagacaaggctgctgctgaaaccgtaggcgctgttccagcccaacaaggctgaggaggtgctagcgctcgtcgacgcaaggaggcagacccctgtcattattgtagcaagggtaagcgtgcccttgcgccccaattgcggcatctccaccatcacaccaccgaccagactgcccgggatcgatgccacagcgatgatcagcgagttgcgatatgttaagtatgtagagccatccccaaattctataccgcgttcgtgttggagatatggtaaaaaggcgttatataaagggaagccaatgccgatcagtccccagatgatgatcatgagggtcgtcgccagcccccgccgtctagtggagaatagagatctgatctgggtcatcgagaagggctcgaggaaaagcttgagttggtcgcgagcgctcagtccttgccggtgatattccccgcttctataccctgctccgctgtcagagcagtcgtgaagctcatccgtggtcagattgcacgtcttgccgttacgttttgctacctcgtggacaacggctacagcatcatagtgctcccctttgcccataaggaacttaggagactcgagaagggtaaacaagaagtaacgggtaatgctcatcaacagagctagcccgcccatggccgcggtaaaatagcgccacgccatgttgtcggctctcgtgcagccgtcggcagaagagcaggtgtggccacaacaagtgccatgcgacaaggttcgcaacagctgggccagagccagttgacagacaggacagtaagtaaatattggtgcgaccaggcaggactctagaaagat

SEQ ID NO: 16054 - DNA, 2543 bp, Emericella nidulans
acgaatatgggaaagacgcgcagaacaagggtctgctggctagcgcaactcgatacgacttggccaaagcctggatggacgagagcaggtatctgatcctcaaggttcactgggatctgattatgaggtgcatagagaacacttttgcgaccagcggcccagacctgcgttgggatgatcttatcttccgcaagtcggttgcagaattagtggtcaagcctctacaggagaactgtatccaccatctccggtagtttgagtattgagcggtttttgaggtcaggtggtgacttgcgattgctgcgcaaggttgccctaagtgaatacgtgtacggtagacccgacgccgtatgaggctgagccgaaatactgctggaactttaatgataaccctaagatttctttgcactgtctaagactaagcccgggttggcgatctgaacagtggactaaagtcttaaacgtattcgttcagaagaccagaagacgaggataacgaaagtatgtcacagcgccatgtattcctgggtgtaggccatttctttctctctatagcctccatattgcccttctcagctgccataatcagagacgattctcgtttccaaagtcatctattctctaaagtatccaccacaccgtcgccctgctgctgcaacacagttgcgagacctggatacgcgtttctaaacctcctccgatcttcgaacctccataagcggcgctcaaacttctcaaacagcctcacaattgctggcgacagggtttcgttaccctatactgtcgcaatctggacatgtctgagcattcccctggtaaataaccagcgcccagctgtgagcgcaagtgtattggcaatactgagaaatgcgtcgtggctggctgggttattcaagtcctccatgaggataaagagggcggcgtagaaatgatggaagttgtgcactgcttggtacccgtagctccagcggttcttatacattgtgacgagtctgtttatggcgtgggctgaggcgatacatctatcctgggcggatgcaactgacccctgtgtcgccacgtccgactcggtattggggatggacgttttgagatagctcagggctgtgattatgaatgtgtggtagtccatgctttgacagtcagaaaaggactaaaagaaacagaacaagatttgatgatgctgaaagtagggtcggagcagctcactgcaagctcaaaacgtccggcaaagagtcttcatcgtattcgatgcacgtgggtacattcttccgccagcgaagtagatcctcataggccttgctcacgatctgctcaatatccgttggtactcggccgtcttgtccgctggaatagagtccaccgcacagatgccaaataattttccccaactcgaccccgtgattgagaacgcagtttctatgaatggctgggacgggctctacttgctgggggtacggaaaccaggtctcatcggttttctcatggaccgggagacgagcacgtcggggcacgttcaccagcggcttccgacgtaacccaaagcaccttgcgctgtttgggtggttagcatactgcctgctgcgccaggtgcagagcgtttgactggggttgtacatagcggcgttaaaccatgaaatttcaagctgatctactatagacaaggttaactctctatggatatcggtgttggaagggtcttcgagataggagcgcaggactggaatggcatcggatgtttggacagcatatagccaccccacttcgtctttacccatgacgcatgacctgtgggtgttttgtcagactggtctgcaataagatgatgttgcacgctgctcacgttggaaacataatcgccatgccttgcactgttggcaaggtgaccttgccctcctgggcatcgagaagacgccgagcttctcgccaaaagtgctggcccttggtggtgacatcacccggcacggcacaggtctccggatagcttgaataccactggattcggccgttaacacggtaaaaagcccgtcggattaggacgagccaacttacacaggcgtccgccaaaatcgcattcaccaggaacggagaacaaaagggggagtcgacatttccggaatttaggtctcggaggaaaaggtcgcgatagatccagttaaagaagagattgttccatgtgaaatagagcgagatgaggtgagagactaatccattatcgtcggtgaccgtcgtccacggacaagcgggtcccgcataaggtgggatgtcgcagagccgagcaatacttaaagctcgatgcgccgacatggtcgcaggatgatcagacccaccctcttcatcgtccatcttcagtagatcgaagcccctttcaaggtcttcgggtaggaagtaacgattcatatactgtctaatctcattcaatgaaggtttctcgtcgacaatgtatttgagcaggctatcgacctgctggttgtcatgacgtagggtgcggagcaatcgaagaaaaagatcttggtcctcttccaagcttctgaggcgcggtc

SEQ ID NO: 16055 - DNA, 930 bp, Emericella nidulans
aggggaaagcccccagttgacacaccatgactatgtaaacgtaggcatagacgaacatttgtacgatccggagctcgagacaatgccttacatggccttgtacattcacagctctctgaagctataggtgctgtgcgaagagatcagcttctactacagataagttctcactgtggcaactcaaccatatttcatgcgcatactacgcacacaaggataacagctgcactaatcgatctggtggacgacaaagatcgataacaaacaggatatatcatggggcatgacgctacctgcagaggtagagtacgcacctggacgcgcacgtaaaggatactaatactgatcagattaggggtgtacatgtacagataaaactcagcgtgcgctatgtgtatatcgaaccgacaggaaatccaaaccggtacgataagaaactggagatcgtgttaccataaatgcagaacaccgtcacacagacagcggactctattgatatttgcaaccatgcaaaaagcgtggagcagatagttacaagacatgttcaacttgatgatggagatcaagagctaaacgaaaatcgacgaaagaacgatggtgggctgactggccttcttttgattaaacagcgtcggcgggcctaacatagtagttactgtctttgattggagaacaatgccgctttttaggggaacacgaacaaagctttaaataaacgaagaagaagtttcggccccccagaaataaaacacctttgggatttttatccgcctaatttttttgtgccaaaagaactgacgggttggacacaaaaaaattttgctctatggttaaaaggaaacccgattccgttaaaacttaatacaaaagcccgttttttttaaaaaaatgtttttataccctctttttttttttatttataaaaacgtg

SEQ ID NO: 16056 - DNA, 3446 bp, Emericella nidulans
ctatgtagtatacacctccgacttaggtgacactatagaaatactaggatctgcattctgaccgtatgttacaggcggacttcagttggagttaatacactgggatccatcgagcgacctagaccgtgattcgggcggcagcagcttcattctcatctactgctgataccactaccgtctagttcaatatatgcacacgccagatttgcgcatggctaaggatagcgctcctccactgaagaaaaactggtgcgcgatgatagaaggtgtactctgttctctcaggacctaagtgacaataacaattggtgagctcaagaaattcaaagctggataggtataatgcatccatatacacggtgctactctaaaatgcgtaacttttatcaagttcatacgctacatgcgataagtttggtcatatcagttttcagcctttggccgttccggaagctcctgctcctttccggcaccctcgacctctgcctgcgcctcagcttgggcctgggcctgagcttgggcaccaggataacgagttcccttactcttaaccttcttctgcttcttctccacaacaggcggcgggtaagcctgtgccgtgatctcctgccactcaggggaagcctggtacgccgcctggataggcgccattaggctcgtcagcgccgccgtcacagcgggcttcagggcttgcggggtcaggatgtcgtttgcatagtcttcctttagcttggcgatgtctgtgtagaccaggggttcggcgtcgcggcgctccacgacgaattccttcttgcccttgaggccgacggcggggagaaggacgtattctaccattgcaatgacgccgttgtcttcgactactttgggggctgcttcagcttttcgaatcttcttttggatgacgtcgggtccgtcgaggaggtcgattttgctgtctgggtggaatcagtcacatcgtaaagagttgataagatgtgagaacggaccttgaacactggagctcattttaccgccgctgagaccagccaccattggtgtaaccaaatgcgcacgctgtaatgttcagtagccgttatggacgaagtaatggacatctcacctttcggtatccgattttcggcagccactcaacagcggccgcaaagagctttctctgatccatacctcccaactgagcatcaacctttagatgctcctcatcaagcacctgcagaatcgaataaagcagcccacttagaggcgcattggcactctgcttaacaatctctgcaccagccttcttagcatcatgctcactgaccaacgatgaaagcttgtagacatccatcgtgtactccggggtcttttggtaagagctccccaacacaaactccagcttctctgtcggcacgcccacagactccaggattgcccgaataaccttggcatagtacttcgcgcggttctcaaccaattcgagcggggccttcaggttatccaagaaggcgtggatgtctgccagcaaaacaacgacttcacaacctgcagctagcagttgggcaatctttatagcagcgacgaagtaaccagtatgcgggcgccctgtcgttgcggtgccccagtagatacgcgggtttcggccctcggcgaggatggactcaataatctccggattgagggtttctgcgaggttctcagtaatgagatcgaagcgggcttttgcggcggcgtccatgattgtggttgtgtttggagaacgaatcaaaatcgtgtgcgggggaatagaaggacaaacgtgggatgatttggagaattctcgtactgttctacagtttttgactcattgcccctcgccccgctatggcagtgaatagaaccactacaagccctgttttgccggcagaattatcgagctagacccaataaggagtttaatgcttccccgcccgccatttaactgcggctgtgccgatagaaaattaggcggccagagacgcccttcactgagccacaatgactcagcatcagccactttcggcccttctccgacaactactcgacagacaatcagatcagatcattcagctctgggaggtacaaggctatgtatacctgtcggccatactggggtttgggcaatctaaaattcgtcattttgtagtcgtcgtgaggagacttgatcttagtacttcttttactacgatgattttggcgtgagtatctgtagacgtatggctgctgaacgactggggagccctttcatgttgtcagttcgtggtagttctctataatatatggttttacccatccagactacagggcggtgtgttccaaaggagtagcaatgcgcgcactgacttctgcagcagaaacgatgaacagttggctggtagagccaggtggcctagagccaagactagaaaacaataaagccatcggctgaagggtcctgggtaaatctacgagtggatcactgttagacgcagtagacgcagcaaagagtgacggctgagtccgccgagagctgggatggaggctgtacataaacgaaaactcccgggttgccgctcggcctgtggcgtgaactccaaatatagttctcgccccaaacaatgtttcgatgacaatatttatagaaaatgaggccaagttggacgttttgactagcatcatatcatggatgattttatgacatcagtggcctggctgacgacgccggatactccccgggtactctgccgggtactccgttcaaccacgttcctgatctcaagtgtaagccaagtatcagacctacaaaggatggagtttgcggtcccgggccgacctgtcttgcgtgatgccaagagcttcgagaaggtgtcatgaaacatcgactgattggtcatgccgggcgtcaaggacatcggttgacaaaccttcaaggtactttgcgcctatgagctcaggagtgaactccacgacgtgatatcccgtagaccgctgtttcttcaattcttgcaaaggatctagactggccagggtcgagcttgcagtgaagcgccgcactagcagggtttcccgcggaaagacgaataggagctggtctcgccatccggtgcctgattctgcaatacggtaaggttgctgtggatgtgagcctccacaatcatcgtgccctggagccctagagtcatattattggaaagctgtacgcagcaagcagccagctggcccaattcaagtaaatgaataccttgagatcttcgcggcttgtttcgcatatcgccgggaaaccgcagaaaacaaatgtcaaaaatcacccaagaggcccctattattcatagtccccgaggaattcgactcttctccataacgtccggtccacagtggatgattccagatttgttccacaaaaaaatgagcaatcccgtgattcatcaaatgaggtttcatctcggcatgaccaatgagtcagagtcagcctt

SEQ ID NO: 16057 - DNA, 1012 bp, Emericella nidulans
cccaagctttttgataaacgcacattgaacccttcccgcccaaacataatgtcattgtcggccgcaatggttccgggaagagtaactttatcgccgtcatgggggtagttctcagcgatgcctagactcacctacgcagagaggagcgacaggctctcttacacgtatgaggtcgtcctgcccctcgggactcaagcttatagcgaggaggaaggttccggctcagcggacatgtcagcgcatgttgagactactttagacaaactccgactagcgtttccctaccgtaaagcccgagctcgtcccctcgccgtacaattggtcttaagaaagatgaatacactcatgacaggatgaatgatactaaaatcgacgaatgaaccaactagagttcgccggtttcttggtgaaccatcccgactaatctcctccctatggtctattcacggtcttacaaagttagggctcccagcgtcataccctccaaggtactcgcgggccccactactcaaacacgattatcggttcttctcaagattcaactcccttgttggttctggcataaattgttacctctcataatactcccctcccattttcatccttgagtgaccagattacaccagattctcagtgctgactagttcatcctttaccagtctcccactctgtagaaaccctctattattatgactcatatattcaaatgtatttgcggtctatcttaaccgacctaataagcattcatatcacattcatctaatacgcctactcaatattcaactgatgtaccattaatatatacatcgatttgattcatcccctcagcccttatatcccccagtctacttaccctactaattattacgttcccccctttactacaatgcactcattcattcctcatgtttatatactttacgtacatcatatcactccttaaataatattccgctaaccctcgttgtacacttcctccttcactttttatccctctcctaactctccccta

SEQ ID NO: 16058 - DNA, 582 bp, Emericella nidulans
gtatcccagcagattcaatgagctcgccgccgagcaaagccgcatttgcaagccgatggaccgtgaccggcacggtttttcttcgcggttgtcgcggctttcgcgttttaggttgcggctggtcttctgcgccgtcatctggaggcccttcgggctgggctggacgtttgtctctgcgcttggcatctttgggatgttgcccgggttgagactcttgttcagtctctggctccagctcacgctccggctcttcctcctgctccgcggtcggtgcccggttttgtcgtttcttccccttatcagcatgcactctttcagcttctggctcagcctccagctgcacatcctgcctttccgccggcacctgcttctctggccgctttctccccctcccggagcgggcttgtccagcttctgcaggggctaattgttctagctccgacggcagtctttgttgttgctgcttctttctacctgcccgagctgcctttactgccgtaccaaactctgtccgctcagcctgtggagttagttctcgttccttacgtcctctcctccgtttgtatcgcgggactttcgacc

SEQ ID NO: 16059 - DNA, 1010 bp, Emericella nidulans
  unsure (1)..(1010): unsure at all n locations
cttttgcccactgtcacaagtaggccgctcttgcatgtcttggttacactggagatttttaaacggctccatgttcgttccccaggagttgccgtaccgccatacgtccgactaccctcggatagcacctgctgagtatcattcagatgctgattagcctctccggactaccgttctccagacccatcaggcccagatcggctatgcctttagcgcccgctgcccccttcctctgaggcttccttccccgatcctggtcaacatgcctcaccacgcggtagaagggccttgaatcaacaaatgatgactaaggagccgtccgaacattggatcgcctatgggtttaagggtgcagatgtgattatgggcaacttttagctactcacgctaacataatggtagatatcgactacaatgaattatattcattcctcttcacaataataatgacagacacgtgtcacaattacacgagactgtttaaatgtcaaatcctacttgtaattatcagacttctataatcacattgttccatattcttaggcttccctctctacacatctcactatctttgataccttttgtccctaaaggtgtatcatttgtttcatcacatctccttttgttatttgatatttccacgnctcttatagacaccttttttttatctcacaattgttacattattcttttttcgccaaaatctctccctccctttcctcacctctgaaatatggtatctcgttcaaccttttaatttacccgttacttaaccatcatccgtgttgagggctccttttgcggacaattaacccttcctcccctttaccaactttccctatcctcccttaggtaacctcattctccatacactccaatcaatatccttttatatacccctttattaaaccacatcttcctattttcttttatattctctttttcctcacattactggcctctcttcttattgaagatctcttactctcgtgttaattctatcacccacc

SEQ ID NO: 16060 - DNA, 1109 bp, Emericella nidulans
cctgtactttacttcagcgccaaaaatagctctcttgataagaagggattcctcgtcgatatggtatctgcctcgaactataagtgtcgcggatcgcgacgagtgtcgagtatctcaaggcttttcaagcatcgccattgtaccattattcccttccaggctaccttaaagacaataacaccatgaactgacataccatgccccatgctatctcccttcaccaaccgagtatcacatgaaaacatgtgattgttacacccgtgaaatcctaggatccccactgttcccaagtagcaactacaatgcgcactagctaccaatcctctacgccacacgatccacacgcgttatcacactacaccatctttgaccgatctactattataacatctcgctctcaccttcatacgaaaaactaagtcccaccctaacactcacacctagataacactctcattccaaatgccctcatccatcgtcaccttctccattaatattatataccgtttaccaatctatatgacacactcaaacaccaatttatatacacttaaacaatttaccactttcatacccatcacatgctacatacatacactcgccatctatatactacataatatatctttccaatatcaaattgtctattttcatcaatcttacacatctccgtataaaatcccggccaactctcaccataccacccctatgagttcataacatctcactacccatcacttacactaaataactcccatctaactcatccttccctatctgactcaaatacaatattagcccatcctacacttcttcctatctattatcaatacactaccgtactgaatacactatcacacatttatcacatactaatattttaattacgcagatgttctcatcccactagaccctcaccatatccaactaaacttataatcaaatctcttcataaagtatatacgcttatatatccgcataaactatcacttatcattattaatctctcctaataaaacaaccacatatttccctacacaatctcactaattataatgcatatattgaatgaaaaaataattataacatacatcccatacccccccccc

SEQ ID NO: 16061 - DNA, 1587 bp, Emericella nidulans
caagcaacaagttccccgaactagttctcgcttcatacaccaagaatccttcagcaccccatgaaccagacggccttgtacagatctggaatcagcacttgcactcccggccggagtatgtgttccactcaacctcggacatcctaaccgcaaagttctcgccttttcaccctaatataattgtcggcggctcatactcaggtcaagtgcttctctgggacacccgctcgtcgcgtgctggcggcggcgcacccgtccagaaaacgcctttgacaggcgcaggacacactcacccagtctacagcatctcgattgtcggaacacagaacgcacataacataatcaccgcctctacggacggcgttgtctgcggctggaccgttgacatgctctcccagccccaggagtacctcgaactctccacccctcctccgtcaaagacagaagacctcgctcccacaaccatctctttcccacaatccgatccaaccttctttatagtcggcacggaagaaggtggcatctacccttgccaccgctacgaccgcgccggagccaaagcaggcaccgaccatcgccttgcttaccgcggccacgccgcccccatcatgtcaacagccttccacccagcgcgcggccccgtcgatcttggagaccttatgctaagctctagcctcgactggagcgtcaaactctggcgcatccgtcctccagccgctaccgccccggccgccacgtccggcatcacggacacccaagtcgtcacccccatccttgatatcaaccgcgaagatgtcgtatatgacgcgcgttggtctccacaccgaccaggcgttttctctctcgtcgatggtgcaggaaacctcgaggtttgggatctctacacagacactgaagtccccgctgtgcgaacaacaccctctaagggccgggcgggggtcctctctcgcagcctaaacaaggtcgcctgggaggagcgcgagggccggcgcctggcaactggagggcttgatggcgtcgtcaccgtttttgaagtagggcggggtctcagcggtacaccagacgatgttccctctgaagaatggaccggcatgaagcgccttgttggtaaactagaacaaaaggataaggaccgaatgagctaattgattggatctacttctctgtatttaatgctcttttgtgttgtgtggtgtctttattgagcttaccatatacccctgcggccctgttttgtcaatgacaagatcctggagttagtaagacatcctcgtttacagagttaaccacggctgctatacccagcctgctcgtaaggtggataataacctgactgcattgagatacagtgtggggttccggtgtctggtaattgcccagttggcaacaaagaagaagcttcttgtattgcatttgccatcattgagacgtctatacttcattctatctcctaggcatggaggcattttcaaaagtagatctacgcgtttatcaacgcagctctactgtcatttaaacattccggtttacgagtctcttgacatgaatacatccatttctttcatgacctgtagtcatgagtatcca

SEQ ID NO: 16062 - DNA, 5148 bp, Emericella nidulans
ctcgctacgttttccgaaaccaccctttgccggcgtgagtacgctagttcctggcttaggcggggcgcgggaccggtttgcatcgggacgtcctctgcctcccgtacctggagtttggggcttaagcggggaggagaagagctctgagttgagttgcggacttcaggttcaggactagaaatgggggagtcttcaaaggcgtatttcttgacggaagcggcgttgggagtgacagcaaagcgggacgttgagggatcgtaggccttacccatgggtgtggcttggacgcggtaagttttgtctccgaagttgtgcagaatggggcctttgtggttgcccgatgtgagcacttcgttggaaacaggggggacgaagggtgatgaggacagcaaattatcggcgtaagatcggttgtatgtaccgcgcgacgtctgttttccgggtgtggttgggagatacgagtcgtcttgctggtagtgctcgtcatcttcggcaaggccttgatcgtaaggggaaggatgggctatagaggaggttactgttgagtcgttgcgtgcgttctcgcgcagtgcagcgcgcggggtactgtgcggcgagaggcttaaagaagtgagttcgagatcgtcgggtttgcggtcgctatctaattgtgcagttgactgattgtcgtaagattcattttcggtaaggtggctttgcgagatgttgcccgactcatcttcaggcatggtttcgtcgacggttgtttcattgacggttgtttcgtcttggttcggttgttcaccgttggcattgaggtggacgttggcgctggcttcgaagaactttttccagaactagaggggtaggtgaggatggcatcgcgaaacacgtgggggtcatcagatgcggacctttgcgccctcccagacatcgcgggaagcttctttgtactcagtgacgacagggaggatactcgttgtgataatgcggtgagcacggctgaagttgtgatcgatttctagaagagttgaggcttagtgatctgaaatagggacgtctgcttgtttgtttaccttgaagagtcagcgtgatggattgttcaagcttttccaactcctcagtgagcgtcaagggacgctgcgcaatagatgaaggacgcgacatagtgccgtagccagaaaaggaacgaattgctgaattgagtgctgaattgaattggtggaaacgcaattgcggtctggtggttgatgatgggatgaacttgtgatgatgaggggaaacggcgggtgccaaaagcggacgcaaagtagggcaatagataagggtctagaagccacgtgagagcccagcggggaagcgccggcgggcttaaccggacttgactgctgccttcgccacgactgtatcagttacgcattaaaggagctggagaaagtggtaaaagtcattatgccgactcctgttgcaaagggtatgcttccttttctattagatgccttcttttcctttcttccggtccactccgaagtcatacctacttgcttctacgggggcggtgtgcttatcgagcatgacatgatgtatgagctcttggaatggggatactcacccagcttggatgcttccaccaacgaatcgtgactgtatcagattgacttttattgaaatttatcagtacagtcatgtgtaagtgtactgacaagcccaggcatcatcattggcgtcgcggcactcgttgccgccggtattgcagtctatgaatctcctcagttccgaagatgggtgaacaactcgcggagaaagctggcaatgacgctacacaatctcggggacgacattcatcctggagatggtgactcacgctaccgaaatgatatttccatgacggaagagataggcccagccgccgacgagcgaagacggatagctcgggaagagatatcgcggcgacggagcattctggaagagcgccgcaagagaaggtccaacagctcgcttgggacgtttgatgcacttgtagacgagaacggccgtcttctagatcttgaggatcaaggtaacccagcggcaaattctacggctttagaccttggcgtttcacagccaactcatcggggtcatcaatcagatgacccggcagcgcaatccacagtgcttttcgaagcagaggcagcgcctgagcagagcaagctgcagctttccatcccaactccgcggagccgcgcctcgtctgtcgctggtgctgacttcactcctgtgtccgatgtatctgaggttatggcttcggctgtttcccagcagtcaggcgatgctgcccgacccaaatcatctgcatctagctatacggagggggccttctccgaagtaatttacgcccatcccgaccacatgaccagtggacatgccgaggattcccggtcaccattctcagacctggaaggcttgcgtttcccgcggagccgtccagtgacgcccccaacaccttctacaactgacaatttcagccatgtcgccgtcgacgcttcgtccgacggagtgcttagtgaattcgagggctctatagggagggttgtaactcccgcgagttggtcagaggttggcagcgatatcagcagcgatgagtatcgtcatcgtggattctaagtctgtactttgatatataatgggattttagctttggttggaataggcgctaaggatggaaagatgtgacaagacacttaataggcgttgaggttttcgtctttgggcttttgagtcgcgtgtgatttttcatgcctagaacagccacttggataaaatttgatctgaatctgtcttgctgcgaccataacgaacatcagctgtccaaactccgtaacgcttttctatcgtgacgtcagctataagtacaggcccgtctgacatctgtacggcttaacctgcaggctcaataactagatatacatttgcatggttgcactcatgaatgtgaaaacaagaaactacccagagaaaaccagtggaacaaccgtagaccctagactggagtgtatacatatataattgtcaaggagcgaagattgggcacctggatatgaaaatgcatggtgctgcccgtccttcctcgaaagccagcccagctgatttcatctcccccacaacaatgcctagaaagaattggtggccaactggatgagaacatggagcatcaccagcggcttcttgtgctcaagatgcggtgcagggtttactgcttctcaaagctccggttttgtctcacggtcgcttctggcgggaggtccttgttgatgaataaacagagcattcactaagtgatgtcatcctgcgctctctagaggtgctgaacatggcaacacattgcttgcgacttcgtcaaggaactgctggtcttttcgtggccagcaatttcccgacagagaaggtatactcaagcacgagttatagccatcagaaatgggcccatactcgcatattgcttgagtgcaataccatattacggaaaactatttcagaattttcagatggttagaagtgagtcggatatgtcaccgctatatgtgactaggttgggcttgtatacctgtcccatggaccggagcggacttcacaggagattggagatattttatcctggattattgagtattatatattgttgcattctagtagacgactgccgactgtttggagagaagacaaggcgcaggcgcctgggctacacctggccaaatcccgagttagggctaagaatttgtgctcccacctacacaagttagatcaaaccgacggtgaccttgaagtctgcaaagatagattaattggacccacggagagatctattagcggcagaaatagcgtcactagagggaaatagcttcctatattcgctactagagaagttccctgactacaaaccatcagccacatctacatgcacagaaatataaccgtcgatgttgctgcagactgacaaaccgtacatctgcttgcaaaatccagtgccatatggtgtttggaagaaacaccccctttattgctccttcccccccccgtgaacccacgtcgacactggacatgaaatcctttgctggactgaccttaaaaataacttcacgcgctctaggcggccctatggctcatcaactgatgggtctttcgtcgtggctgagatggttggtggaagagctaggagccgggacccggatctctgcagatcacctgcaagtccgtatgcaagaccttagcagaaatatcaaaaaggcataatgctacacctatatagtggttcacaaagtcctagctactgacacgggtccacaacattggccatgctgctggggcccgacgcgcagttgcgggagccggtaccgcttgaacccaatgaagtgctagagctcacctgttggtgtttgttagatgtgctatcctcatatgtgaatgaacgggatgggtgatagcagcgatcgagtgttcggcagcggatttcttaaggaggatattgaagccaactgcataaaggcggcttctaaagaggcaaagacgttctgctcgtaaagcagacaagttcagcgcgcaatgcaagtgcaatacataaacctagtagaatgtcggcggtatccccagtacattctcgaaccacgtgtcatcgcccagatccatcgactgcataaacaccatttgatccagatcgggaacgtagtagttgtacgtctgtgtctggccggttgcatcagaatcggcgttaacaggggcaggggctgtcgatagacatgacgcctggacgtcatccatttgactctgcccctgcaaagtacacggtccctgctccagattccacctcgcttcaccccaaacgcgactcctcctcaatagcttggacaaaaacataagtaaatgatcaccacactcctgcaactccggctcctggctcgccatatccagtcgctgaagcatacggtctagggtcgaaatcaaatgtactgtattccgtacagcctcgcaatcccagtccgggtctttgagggtggacagatacttcaacagcgtgactgtcatgatcatctgcgaccagaagtggaacgtctgtccggcgagcttcgaggaagggatgtcgtagaagttgtcgagccaggatttgatgttctccacggactgccagagaca

SEQ ID NO: 16063 - DNA, 1244 bp, Emericella nidulans
attcgaactggatcgccttgtcattacccagaagattattcaccagtgtcgaaagtgtatatcgcttcaaacctgtataatcgagtggatcagtatactggctgattaggcaagctgcgaacagatgactgaccggtaggaactaagattgggcctgtgttgtcaggcaaggtaatatcctcttgttaactgaggagttgcacactgcacttgacgaattggggagtgatatctaagatcatacttctatgcattttagtattcaattaaccgtgacctgcgaaatttttattggtgttctatacgtgtaacttttatatttcctctaatcttatcttcataatcggctttaatcaaaaaattgcttattccttttagtctcttgatttcaatttgcttacttctatacattaaatctatctttcgagatctttactcttctttccttctctcctcttttagactctattttgtttttttttctagtatttcttttaagttcatcattttttcttttcctcttggacacatcttctccttatgtttttatttcctttagttatcttcttacgaaagcatctttgacctttatactatccatgtttcctcttatctgtatgatactatgtaatctacgtgaattctctttcatattatttgatctgtgtccgaatgccattgtgattcaagcttattaatcctcatcacatctattctatcacatctgcgtcatagtttttcttgaccgctcttcttagtcacgtctcggaatcttaccgttcgatattttcaaatacctcttcttattgcgttttggtgtatatctttatcacttacacatctgagtacttctttacctcatattcactatctactctaatattctcacattcgctttatctgtattaccacttcacacctctatccatgcaatcgaaatatatgtcatcccttacatcgtattatcctcattattcttcattctataacattattcctgatcagataactcaaccatctctctaagttagtcactttgattctacttctcttccatcccacatgagttgaatgtctcgtgcgatgcgtactctctaattatgctctatactagttatgcatctctattatattatttctatcctcgtttcctattgttaactatgcagatactaaacctttactatgttgtgttcataatgacccttcttattcctacttactaccggtattctgctaactac

SEQ ID NO: 16064 - DNA, 1244 bp, Emericella nidulans
ctcctccttcgacgttctgaaggaacaaccgcatttcggggtatacgtcggatcgcatactacaatgagcttgtctagaagacatctgccaatgcctagattggtgtgttcatcctttccacataactccacttttgctatgacatcactctctgcctgaccatctatctcccacactcggccttaccctctcttctctctcgctcgcttccttcattacccctattccctcctcatctacatcgtctaaccctctcatttcacactctaaacctacttttcttctactcctttcaatcttcactcttccctatccctttctctcccaccctcttcccccctttcatcattctttcttacttctccaccttcatcctatactctactcaaatttctatctacctttcctatactttatcctttattactatatcctttccctacttccttacttatctcccaccaccctcattctaccttttatcactctctctctctactcttctctctcttctcttctcatctcctatatctcatatctcattcccctcttcctactcatcactcctcacccatacttttatcattcccctaccttattccttctcccttctctcttcctctacctcttactacttccatatctttcctcactttctcttcctctcctctcatctctcacttccatttcactctcacattcttcctttctatctccccccacctcttctctcatccccattctctctttctaatcaccttcctttcttatcacactcctgtcctacttctttcacttctaatccacctacatctctcttctatacccttaccctttacttttatcatcttctctcttattcctctcatctctacactattccacactcttctactacatctttctctctatcttactcattcagactcatcatctccattactactctctatctcctacattatcataaatctcatgtatctcacgtttcaatctcacactctatacctacttctctatccacctcacttcttcactatcaattacatctctactcaacttcatcctacttccatccacattctgtatcttcacacctatcaaactcacactccacacttactcctctatatactctgttctctcttcactacacctcacacttacctcccacttcaactcttcattcaataccctatatccatatccattctctctcctctacaccaccttctcaatcctc

SEQ ID NO: 16065 - DNA, 465 bp, Emericella nidulans
cggacccgcggtatcaatctcactgctcgttgtgcggcaccggggactcactgtattggcgacacttaccggacacagtgatgcttagtctgagggtgactctatagggaatggctgagcgccatatgacctgcacgatggagtaaacaaacgaaagtgtttggagcaagatagatagtagggtatttgcttgcacatcgctggcgatcggtacacatgtccgaatgcctaggatcgctgcgccaagtacatagggcaaccctagctgtactctctgcgactgattggagactggtccgtgataactcgacctagtcctttctaatgagactgtatgctaagaacgcttatagaattctagctagctagggcatacttctgatgagtgactccacttgcaatgatctgatgggctaaggatattcttttgagatccttctgacggccttatgtgagcgctaatca

SEQ ID NO: 16066 - DNA, 1025 bp, Emericella nidulans
ggatctttgtttagtcgcgtccggcgaatgaccatgcaactggcggtggaccggactctcagggagcaattgtttctccatggtggcagtcaatccggctcgcgtcaaccaagataggttgttcatatcctcgacatctcctgtatatgttccctggactaactgaggtcgcgatatcagctttcaaccaatccgtactgactctcgttgccgccaccactgcctgtgagactggggaacttcttgagattgtgaactattatgcgagggagaacaattccctctgtgcggtccattgtttctcttcttagtgactccatttactgtcgcacaccctcactcgtctattcacattggacgaacatccaactttctacccccctgtttatagatttcttcaccattcttctctataacttcccgtgcaaatcggcaccttcgcaatgctattgccttagaagcttccttccttcaactgggctaatcaaccatttgcctttccatctacttgccgatcacgtttgttttattctcaccaatgacatcccccctcggtattcacagcccttttctctaagtcccactttttcttaccgcagggcgcatacctcctacttactccccctctcactggttttagtccgtcccctcttctcctcatctttcacctttctaccatcgtattggtctctccttctggtacttctcttagtctgccctctgtatccctctcctatgatctttccctacctgctctccctgcgaggtctacactcttcctcctcctactctgcctccctcttctctttgtctcggctctttattcttcatctcttcctctctttcccattaattctttctcatttccacatcctcactctcccatctcctctctctatcaccatctctcccctctccttacttctctctctatcatttcttatcctcttctcttacatctttctttccatctctcattctattacctcttcttactcactacctctctcttttcttcatctcct

SEQ ID NO: 16067 - DNA, 3352 bp, Emericella nidulans
taaagactcccctcgccatatgtgcatgcatacttaactcatcccactcaccgaagacactcgcagaagacaatcgcaggctaaacaatgacaatgattaaagacaactgaaaaggcagaacaatgcacgcaagttgattgcttttggaatcagaaagccgcccgcccgattttgcatgacccgagaacagaaacaaggaaagcaacttgtaaccccagggaaaatgcaaatgatgatggaacgccttttcccgctgcttcctcccaggttcccacccttcctcacgcctttcttccatctccctaacgtgaactagtcagacctccattttctcgccgttcttctcctgctgctgccatatctgttgctggcgtctcttttcacagaactcaagagcttttgctccccagatctccctgcccttatattcacccacatgttccggccagctcttcacctctctcgccaaattctccagctcctgcattgggagctcatcaagcgtcgttaggaacgtcttgactccaaatacgattgcgcctgtccgagggagtctgcgaaaagtctgccgttcacgccggactacaatatcctgcggagatggatctgggttgtcctcggataacgtggtgggacggtacaagatctcaaacagattctcgtctggtcgtttcacttccacaaagtagttggatcgttccatgggcgattcaggtgtgaggcggcagagaaacctagttcatgacgtgttagtataacgattcgtccttcattccttatggcttgacttacttgctaaccgagttggctacttgctggtgccataatgggactgggttgtgcagctgagagattgtccacccaatgcgctctgctactgtccagccaacagggaagagacttgcgctcgcagccctgcaagtcaaagttagcatggtttttctggtttctctgtggaaaatcccaatcccagtggtgttcactcacaggtaatactctccgtcttcgttcttcattaggatgctgaggtcctccatagtcaatctcacggcgatttccagaggatccatctgctcatttcttcctccgccgaaaacaaatgtttcgcccgtaactttattgtacactgtcgtctcctcgccgtgtctcttcatatcgaacatgttcgaaaagcgttgcgtcagaaactcgaccacctcctctaacgcctcaaggcacgcttcgtacgactccggtaggcactgaaggactttttgtttctctcgtgcaagcaactggctcctgacaacatgctcatccatatagtttttgtccaacgtaagccaattctcaacatccagctttcggacatccatcatgacccgatacctatccctccctttaatgggctgggctgggtaaggggccattcggttgatgtcattgcaaccggcactttgtgcaatgcgttttgtagccgcaagccatgatggaatctctttcctgaccctgagagcgaggaaggtaagcaacaggattgcaagaccaactgatgccagcgtcttcatttcctccttgcagaagatgtgatgatacagagaaagccaaatgcaaagaaataaaaaagaaaaaggaagcaaagctccaagaaacttccaagctctctcacacttcttcaaaactccacaactcagacctggcagacaaaaaaaagaaactgctcaacatggcgaaactttctctcctccgatgagggcaatggctccaattataatcgaacccccggccttgggcaaagatcatcacttgggtcatacgattagctatagtttggacctcaacattccggattcagggtgcctggttgaactctgatacgctctacatttccccgcaaaagccgcaattcgccgccccaaaaaagaaaatggacctgacagcatccacatgatcgagcagagtttctcagcttgtcaggtcgatcgagatccaccaggcttttggggttaattgtaggagccttggggggttggttgcaggatcctctaggttctggattcttagtgggcgggatgtcccaaacagtgccgcaggttcattctggccctagatccgcaaagctactgtagctaagtcgtcactaccgctacaaccgtgctatgggtcgcaatgttaacatggatgtacgaggctaacctgatatagtactaattatggggaagcgcagcagccactatggaagcagcaattcaaatcgtcaggcgagctctcgcgtattcgtccgtgcgcaccgattcatgacagacctcgtgagctgtggccaggctcgagacactaaacgaattattattgaatttccctgtctcacaggttcctgcggttccgtttctgtggaattcaagctcttaactctgcttttctccgataatgacgtctaaaacaaggggcaacaaagcgacaataccaagtcgaatgaatactaaagaagcaaaaggtgggagactgttgctcaccgaattacgagaaattgaaaatagcgcaccagggcaatttggaggcgttcgtttcatgacacctgagcaatattcacattgagatttgctgaagatcatacatcatcttacccttgtgcaacaggagctcccccagagagcgtgggatgttgcgtgggccaaccgaaactggggctttgacggtcaccagcctcaacagtaatacacccgttgtcagacggcacgagaagtgctctggtaggtacgcgccccttgccgcaaacggagaacaagagactgaggaaagacatccttcatacatcgctccatacggagggcatcgattttcaagcgtcctgtggggatgcctgattattccgggcccaaccactggccagtacagtgtctcggcgttgctgacactatcgtgatccgcaaaggactaagttcgtggggacggtctggagtcaagactgacgtactatgaggtgtccttgcaggcgagtgatgctttttcaccgattgctgtgcacaggcatgttgactcctaatgccgtatcaaactagagagatgcaacgctataaaaggatccaacgaattagcgcgcagaccagtaggtaataggcctggtctcgcacgttctatggagccctccaaacatattgtgccgaggatttacaattgacttttactcagagaaacggaaggtcgacaagtctagtgaagaagaatgaatccgatgatcgacccagaattcagctgtgccagtttacatgtactcggccccctactaagccgcttggtccagctggggtttttgcgctgcaaccgccccatatcccggaagcgcgttgccgctcgatattatggagaagcggg

SEQ ID NO: 16068 - DNA, 777 bp, Emericella nidulans
cctggacgtgtattacgctccgcgttaatctattcatcataccgctcacagggagcgcttacgagatacattcttcacagcacacaccccagtattcacgtcatcctcaagagcaggagtcattgctggcatcatcatgtcgcctcggccagatctcaggctaagttctttttagcctacaaaccgaacagtttcttactaactttctttctaaaggctgacgacgaagtccggatctatccgcttctaccgctcccttgcctacggtgactcccattatactgaaacaattcgtattttcaaccgtgtggattgtttctcaccccaccgcaaagaaccccacttcatggctcgtccaatctccaaaacaacctttgcacttgcgaatcttgcccgcactgaaacgggcggcctggccgcccgtactattgagccattactggcttaccatagatttttacctcaggctttcttccggcctaattaaaagattgagatttcggcctccctccccacgtgctaaaggctacttgttaaaactgtcagcagctcacttccggtacacctgcttgttgcggatgccgcattacttcccaccgatatgcccgaccatcactgtccgcgacatttccgtatctttcttcatactccctctcgattaactcttccctcatttaccctccatctcactacttcttaccattggccgctcctactcattttctcctccacttccggactcttttccctttctgtacctttcctctcacctccctt

SEQ ID NO: 16069 - DNA, 639 bp, Emericella nidulans
acatattcatttctttctctttcgatgaagatcggtcacattctgggccccactggaacttaggttaattgaccaggcaggcagatattggcctatatcgcctgtggtctattatctgaggttgtgatgactgtgacggcacgacgaacacgtggatataacactcgctcggcccgaacatgaaggccctttgggagcatggcccatctgagtgacctgatagccccggatctatctcggtcaataacgaaccaagccctgattgtttatgccatgctcactcggatcctgtaaacgcctaacatgccctgccagagcagaccaccaggcttgaacacaagctttatggtatatggccaagacgctcgggagaatgaccactgatagcagactttaacttgagtagggagatggcatctacagcatgaatgatgtcagaatgaccactggcgtacacgacgatgcttggatgatgccacaggctcataatagcctcactgagcaacagcgagaaatatgacctatgctgccgtcgagccacagaatgtcgggacgtactatatgactacaatgcctggaattctcgagggtaaacgcctttacattagtgccgacatgctggtatagatctataggtgc

SEQ ID NO: 16070 - DNA, 1225 bp, Emericella nidulans
  unsure (1)..(1225): unsure at all n locations
tctctattgtcgccggcctctaaatacaattagatggggcaaaaaatagattatgccgctgataaggcacctagactctacttaccgtttccaggttcctgaattatctgactgacgttaggctcactgtgaccggagtagataggagagcacggcgtcaatggcagccaagcggaccgtccttgatcggccccattcttgcctcagcttgtttgaaacaagcatagggtccctttttctgttaacgtattttccttgatttcctttttgactatcccctacttatacctctattcctatccattttctctctgtatcctctactcctcattattttgacatccttcttttgtttctcagttcccaccttttatcctatatcactacttttcttcattatcgcttttagctacgattcacattatttattcttcttctctacttctaaaatcccatagatcagttattatagatgcctcttctcttttatcctatacgatgcttcttgatctgctttcactattcgagtccgataatgtcctgctaaaaatcgtccatatgtttaggttatgtatttatttcctatttctgtcacgatcaaaattcttgtattaatgacgttcaaaacgcttattctacctaatttatagtactttccttgtagttcaatctactattctacgtatactatcgacttactcctaatctatattatattacagttcttctcacttatcgactctagtattttatattttaatttccaccactttttttccttcatattaatcattttatcttctttcacatttatcgaccccctctaatcatatctcatttctttcatctatttttaccataatcaattatttatcctattttcttactacttatactcctcactacctctctcgttgtaccnctngctctctttttcttttttcttttcttccttnttcacttccttttcccttctcttttctccctttcttttctcttttctcttttctttactttctccaatatccctaactcatactttttctcccttttctcatcctctccttctcttatttctttctcaccttctttttgttctttctttctcctcttcttcttctccactctctccttcttctcttcctatacttctttctctccgtttgtgctgtngagctgtggggttggttcttcattttaattatattatctgtttattcatctc

SEQ ID NO: 16071 - DNA, 2472 bp, Emericella nidulans
ctctactcgaggcagaccagtttctgaagagctttggcgctgagtggtcaatactcggtatttctcacctccttcatcttgttcgcaactgctaacatcaaatagaggagctcagtcgcgacgaggcatcgagcaaagtcaacagcgcaatgctcagtctcccgctttgcacagccttacagattgctttggtgaagctcttgcagtcttggaatatttcacccatcggagtcaccggtcattcaagtggtgaggttgccgccgcgttcacggccggcgcgatcgacatgcggtctgccatggcaattgtctacatgcgcggagcgctcacatctagtttccaggaaaagattggatctggccgtggaggaatggtggcagtaggccttggaaaggaagctgccgagacctatatcgcgaaactaacgactggaaaggttgttgtcgcctgcattaacagcccggagagtgtgacggtatccggggatattgcagccatcaaagagctagaatcactactagtgggcgatggcatctttgctcgtcagctaaaggtggaggctgcatatcattcgcatcatatgcagccctttgcggacgaatattcggcggcactgcaacagatcctccgcgacggcaagttggatgataacattatctatacatcgccagtctctggcattcgcactttcgaggatgaagtcagttgtgcggagcactgggtgcaaaatatgctccagcctgttctcttcctcgattctctgaccaatttatgtctgtccagtgacttggaccaacaagtcgacgcaattcttgaggtcgggccacacagtgctctcgcaggccccattcggcagacaatgggtctccctgcgttcgaaggaaagcgcatttcgtatctctcatgtttgtcgcggggcaaaaacgcggtcgagacaatgcaatcccttgccgctactttgcacagacaaggcactcgtgtggatctgagtgctgtgaacttcccccatcaatcgagacggcctcagagtcctctatgacctcccttcttacccatggaatcatgagcacggatattgggcggagccacgtttgaacaaggagcaccgtttgcgcaaacagaagcaccacgatctactgggcagtcctctcattggaggcaatgcactgtctccgacatggcgtcatatcattcgcgtatctgatactccgtggcttcgtgcccacaaggtccagaacaacatcatttacccaggcgctgggtacatatgtatggccattgaagcagtcagccagttatcgcgaggtcaaggccacaccatctcgagcctcagtctgaaagacgtggagatcctcaaagcactgatcgtccccgacactggggcgggtgtagaggttcatctaacattgcacgagggctcggagaaggcgttaaccggccaaccctggcaagaattccacgtttactcttgcgacgacactggaaaatggagcgagcactgcaagggattcatcgcgcgtaatcaaggcaacgatgcctacaagaaaaatgcgaacagtgacgacgaggtctaccttcggcgactgaatccgcaggagctttatcgtacacttcaagccaaaggcatttatcacggcgacgtcttccagaatcttgtttcaatccaatctaaccgaggtcggtccctgtgcactttgcgagttgccgatacggcatcctcaatgccgcatggtgttgagcagccttacgttctacacccaacgacgttggattccattttccaggccgtatactgctctctgccaaccagtgcgcttaggagcaacgcagccatggtgccccgagcattcaagcgcatggatttgaggacggtgatgtccagcacacctggtcatgttttccaatctcaatgcatgctgcatcgggccagtccccagggaatggaatcctctgtggtggtttctgacaccactagcgaagatcccgtcctcacggtggacggcctatactaccagtcacttggggctgcgccacaggctgatggtgagaagaacgatatacaacacaattacacgttgcaatgggcaccggatatctccttccccatccctagcactgtgaaggcagcgcttcaattcgctgccaatctggatgagattgatatcattcatgacatccgagaagcgtgtttctactttatacggcgtgcattggccactctcaccgaagatagggtcctgaaactgaattggcaccagcaacggctccgcgcatggatgaaggtgcaaatcaaattggcccagttgaatgaactggggcccgcaagctctgaatggttcatccaaccgctagcccatcagcaaaatctcattaatcgagttcgagtcgccagtgtcgacggcgagatggtctgtcggattggggagaatcttcctttaattctaagcagcgaggtagccccatgcagctga

SEQ ID NO: 16072 - DNA, 527 bp, Emericella nidulans
ttgaaaccctatgtcccctggtgctgaaaccacggtcgggcgatgggacagactcggacatgagctaatgggatggtatcttttatctggggttagacgctaggaactttcttacgagccacaccagcgggcatacacctcgtataggctctgaaacacaattttatctacatggactatatagcgttactcgcgcttcagggcttgtgcatggtcttgtatgaccacgccaaggcagataggcctccaagtttgtggctcacggcacttgagtgtcccatgatgaggaaataaccacacgctccaatggcagccatagcatatcggataccatatacagtgactatcgagcgtaggacgcccacattgtatactacgatcggacgacattattctggcccaccacgaattcaagcggggaacgtaggacgctacgacttggatcggatggtgagccgcgacagattgtggacaggctcactaggtgccaagctgccatgcgaccgtggtggattggcccagcaaga

SEQ ID NO: 16073 - DNA, 3689 bp, Emericella nidulans
accactgctccagaccttcaagatcccactaaaaaattcgatcattcgatctaaaactgtcaacccctgttcatctccaggccttcccgcttccgtgagaacctgcgccgtagggtgagaccgaacgaagaactgcgtcgatcaggagacgaaatgacaaataagttcgagaggtactcattcttgcttggttgaaggaattcctctttgtcatcagtttgcctctaagtcataccactgcagctcaatggcgaggtttccaattgcttgcgagggtgaggtgagatctaggccttggatgcctgttattgacgaggttcctggccgtcggccctgcaccaggaaaatcggtatcggctaagctcggcatacggggtcgaaaagaacttccatatacgccgaccgtatgcaggccagggtgcaaggcagtccggcgcttggctcccgaaaattctgatggtgccatgcatcgtcgccaagggaaaaaaaaaaagtaaggaaaggaaaattgattgtcgttttggacgtgcattttggtgcctccttccacctcgtattcctgctcagttcgtgttcaacgcggagtttacccgcaagggtgcaaagaggcagtatatgaattgcgcaataatccggggaaatgcagcctaggatgatattcctcacgagcgctcgtagagcggctcctgctgccttggcaggtaagcggattcgtgctcttgatcggctggcttggttgcctgatctgactggtggagataggcatggctgaaggaccttgaggccgcgatggctcttgtccagcctaaatgggcgcggagtggatgtccagggctgatcttaatgatgtcagacacaggccggcatgcccgtttggtctcaagttggcctggtctcgaatcctgatgatcctgacagtgagctgatctgtgcgttgcgagtgaaatgtgtgggtttctgcaggtttcaatggatgataataatagagaaatgtatcagagatgtacagagagaggtccattaacgtgctcaggtatgggacgaaggatgcaagggattttttgagtttcaaacatatataaggatccttcattcccgcgatactgtactgaattgtccacgtttcctttatcatcggtctcagcacacagtcttcaatacacttgcattcctaccgtcagccaaaatggtccgcatctctcttctcgttctgacggcctctctggctacgacccttgcccttccccagaactattgcactgctgtctgccgccccgtcaagcccgaatgccccgcgggtgaggtggccaccggaagcgaggtatgctgtctcccttggtaaacctcttatccaaccgtgacacagaccgaattgacctgtcacttcagaactgctggggctgctgccagcctgtctccatctcggcgaacagagtagccaatgctacggaaatgtgcacggccgtttgtcgacccgagaagccagagtgccctgccggtgaggtgagtacatcatcatcatcatcttcatcatcatcacctgttagaggtagcccaagctgactgaatgcaatcgtaggcacccactgggcaggaaggctgctggggctgctgtgcacccatcacaaaaactgaggaacacatctgcactcgcaagtgcaggcttgagaaaccggaatgtccagctggagaggtaggctctgtcttcgccgtcctgtgcttacacgtcgattctaatgggtaccatggcaggcccccaccgggcaggaaggctgttggggatgctgccagcctatatcaaaacgtgaggaaagaatctgcactctcgagtgtaggcttgagaagccggagtgtccagctggagaggtatgaatctgtcttggctttgctgtgcttacacctgattctaacgcgtttatgataggcacctacaggtagcgaagtacgttacccctcaacctttgtgttgtttttgtctcttatatgttctgtaaaggtactaacgctattcatcacagggctgctggggctgctgtcaacccataacagcctctgaaaaacgtgagggagaaaatgacggggatatgtgtttagctgtctgccaggaaaagaaacctgagtgtcctgctggagaggcacccactggtagcgaggtacttggattatacccttaacccgtcctctcgcatactgtatacgatagacgattctaacgaggtattacagggctgctggggctgctgccagcccaatgccatcgctgagaaggttgccgaaggcgacagtgacgtttgcatggccgtttgccaggagaagaagcctgagtgtcctgcaggagaggtttgttgtcttttccttaatggttatggctaccactaataccgttatccaggcaccaactggccaggagggatgctgggggtgctgtacgtcggttgcgtaagtctcccgggagaaccctgcgattaaggcttggaaaggttgcgttggggtaaactgaaaagttttttttttgttagagtaacctaagatgatctctctttgtggtaaaattcatgtttctggtccagaaaagtgtctgcgtttcgttttatgatatgtatcacttacctggctgaagtcgtagcagtggccattaccctaattctatatctcattactgtcaatataagatagtgatcttacctccttcagtcagatccaagctcattcatgggataaaatgaaggttagcgctaggatacaagaatcatggatagctatccacgtttgctgaccagaaaattcaagattttacggtgatctcccatttatgtagatctccctctgtgaaaaatacctagattagtggctaggcaagatcaagcccatgaacgcccaaacgacgaccattactgggtgactgaggatgccggactcgctcaataatgtcctccgattccttccgagcggcctaatctgcaatacgggtttctcagtgcacctagcaagttaatctttcaatgtatggccagaatattgaaagaaggctatttggcccatgcaaagtctgaccagctgtatctaaaaccacgaatatccctcccaagaatgaacgaaaatttgcggacaaaaaactccacgaaatacatccttctttgatccgatagaaaatgagccatcggcttgccgtccatgggtctgagacttgggctaggagagcaggatttgggatgagtggtggccgacactggcccagacatggaggagcgggaaatttcccggcttacattctctcttggtctcataagtagatgtaaaggtttgtgccgaagtaattccatcaatcgctttaagataacaactcgagagaaacgattggctcccagcccctaagagatggattcgcgtattggtggtagatagagcgacgtttttcttagaatgactttgtcaaagctaagcattgcctgaatcatggccatccgaggctgcgacatactgataaagatgggaatttgaattgatggccacgccacaggcactgcagatagcctatcttgagcagatgaagcgtgatataatctcccgctttcggcgtcgtacgggctgcgaggtcttttcctcacctgcatctccgggtccactcaagccccgaggtttgttgcttaacgatactgccccagtggagtctgcttctgcattatcca

SEQ ID NO: 16074 - DNA, 672 bp, Emericella nidulans
  unsure (1)..(672): unsure at all n locations
gcaagancgccgagcagaacccagggattggaactgacgcgatttttaacggccctcgggtctgcacaatattgggcgacggatacccaaagaagcaccggtcacatgcgagagtggacaattactcaggagcacgcatcgcacaagcaccgcaacaagccaccccagaatcaatcacaacctctgacatatacaacagaagacgataacacttgacattgctaccgggacctcattaaagcatgaacgaagccgccattcagacatcacctaccacgagcatatcaacttgaaacccagccatcaagaagcccaagccacacgggtaccacttaaaacgaatgtcactccacgcacacatccctagtaaactaactatacaaacaaaatacaattacactgaccttactgtcccgaaaatccacacgaaaaaacaaaaccacaccctctcaacagcggaaggcctccagtgtcaatagctagccaccaaatggtcccttcacggaaaaacgaaggcataccaagccctacaatggtcacccccaaacctaacactattcaaacaaaaaccaccccggacgggatgggggaattaacaccaaaaactacgggtatactacaaaaggggcattaaacattctacaagaccacgacataggatagataacggca

SEQ ID NO: 16075 - DNA, 4954 bp, Emericella nidulans
cgagtcctttctttaaccagcgcttagtgaggtacgcctctttccttcccttagtgtttccttatatggaggcacttgggataaagcagtacatattagcgcagacagacattcccatcagcacgagtgctcaagccctaacccctacaatatgatgatcgtaagaacgagtcatcttcgctcaactagataatgctatcactgattaagtgtagacatgaatgccacgcggtgccgaactcgctgagccggttcattaaagccaatatttgacggacgactgcccgtccctggaatacggcctagccattacttcagagagcagcggcattgagggggctcttaactatgtacacgagtgatgcgatgcaatgcaacgaaatatcaacagcagtacagataagtacaatatgtactcgggtttgtagtatgaacaatataggtaggtgggtacgggtatcaaaacctcactcactcacgcagttctgtccatcccggatataagcagaaacaaaatagatatttgcataaccataccagccccctcaagccaaatatacctcaatagggtgataaagaacggccgttagacactcggccacccgtccgcccactgcagcacgttccacccgaactggtactggcccgtcgagaggccaatgtcgggattcgcatagtggtagtacagcacccagccgcgggtcctgtcttcgaagacgccctggccgccgggtccgtatacgttgccgtgcgaagcgaggattgtcgtgcctccgttgtcggtcaggcaggaacggccgctcttgtcgacctgcgcagcgagaacgattagcgactccgtttcagaagaaaacaaaggatagaaaagaaaaggataggagatacatacaaaatcaccggtgccactcgcactccgacagacgacaatacgatactcctcgcccgtcgccggcggattcgtatcgtagctgcctgcccgcccactcgagaaggtcaaatagtaccaaccccgtctataaaacacaaagcccgcctcgatcgcatggttgcccgagctattatatgcgatctgggtcggggtcgccccgtccgcaaggctcagcgggcctgcgagcgggagctggtggatgccgttccagtacgagccgaatgtgaggattggcgagccgccgatcgacgcccagttggcgtcgatggcgttgtagtttccgccagcttgggatctgaagagggcgccgtggtcggtccagttaggctgcaggtttgggctggttgcgacgccaatgacactgtcgcgggagccaagcgttgagacggaatagtacatgtagtagagatttgtggaggcttcatagtggatgtctggggcctgtgtttacatcatactatcagcatatcgtccaagagatccatggtcccaatagcaagggtgggatgtcgatctttctgatcgtgcggggatgcaataatgcatggggccggggtatgctggctaggtcgggctggggtatcgagttagggctaccactgccactaacaatcgccggcccagtcccgccggtcattcacagggcaaaaaggagaaaagaaagaaagaagaaaagaaagaagaaaaagagaaaaagagaaaaaaaaaaaaaaaaatggaaaaaaagaaataaaaaggaaaaaaaagagaaaaaaaaaagaaaatccaaatgaatggaggggatgaagaagaaagagagaaaagagaaaacagagaggacgaataaagagagaaagtcaaaaccactctaggcagggacatgtcgattgagcctgtttgtccaaggtaaagcacggccaagagcactggcagacagtcgcagacgtaaacgagcagtggcacctacccataaattggtgctcccagcatgatcgacaaccgatccccccggcaaagcctcccccacagcctcccagggcccctcgaggttatcggacgcatggatctggatgccgccgccggtcgagaagcggtaataccggccgtctgagacgcgctggtagaagcccgggtcatggccccagcagtcgccggagcaggcgcccgggttggagtactgggcaagactgcctgacagcaggaagagggagagggccagtttcattgtcgctcactgaccggtacggcagtcatacaaattcgaccgggagtcaagactatgagagggaatagatattataagttccaggtgaggaagacgagcgcgatgactggaatgaaggacggacggggtgaatggaatgggcattcttatacatgtcgaatttccgtgctggcccttggccttggcctttgtctccagcattcgccattttagccagtctgttgaggtcacgcaagggaggagtctagcaggctagctagtatagtcccggtccaagactccaaattgactaacaaagcttccaaagtcattattcactgctctgcagggatgcaagtgacgtgtcacaagactccggataatgtgatcactgttccctattttatttattttttccggccaggaggatgaggatacttcatagagtctacggtatcatagaagaagatcgtcatcgggcgatcggctgcggctgtcttgtcgtccagtccaaggtctgcgcccagacagggatgcgactatccatccctctttgaggccactatcagccatgcgctctgatgccactcttctgcggtcttcggcgctgctgctgcccttcatggtgcctgactcagtgtgcgctctgcttgtctgcgcccgatgtcacactgccttgtcttgagtctgtcctaccgggttgcgctgcatctgcctcctataggcaggcagtcctgaagtcctgaaccctgcactgtcaggcactaggccacgtcctgcacctcggcgtcgccttccgcccggcctagtcctcttgtctgggctgacttaatgcccgcccgacaggcattttgaccccgtagctggggccacgtttctgtcttccgtggtcgcggtcggtcgggtcggtcgcaagccctaatccgcttcagtgcctcggtgcttcagtgttgagtacttcacgcttgaggcttcagtcaccgccagtgccagtccagcggtcaactgccagtcatacggggagcgagccagctgatctcagaagcaaatccagtaaatccgatgggccgtgctcgcacggctcactagtaggttagcgggggatgcgcatcgaactaaagagtctaaggtattctccgaatcagatgagatatattagctgcagatcctctaactgctctcagtctagcatcccccgtccacaaacaaatggccggtcgcgtggatcacgaaacttagctggccagcacaccatcgtctttaccgtctcccgtagtcatctgcaggtatatagcccagtagtgagagctttagaaaacgagaacgtctgcccgagcccggctcgggctcgggcagacgcgggatactgcatggagattcgactcgagcaaaacgacagtcaacgacagtccagcaatcacgcactggccgcatgacatcgatatgaacatggcatggcaaacgcatcaactgcggtcagcaagcaagtaagcaactgcataagtacgccatggcaacacgcccagttcttattcgaccccaataaactttccacctgaaaataagcaaggctcgtggcatagcggtggcagcgctatcgcattaccccacactttccacacttcccacttcctgctcgcgataggagagctgagcgatggggggccgtacgggctgcaatgatgaggtcatacaaggcttggaaggtgcacgatgagcgatttggggctcagatggagtaagagggggcctatctgattggtagttggtgtttgagtgttggttgccagtatgagggacttggagggaggatatggtttaactatgatagtctactataggctggtaggctggtatgcaccgcaagcgaaaaatcagaacaaatcaggaaacaaatccgaacaacaccaattattattattatattagtactatagtactaacgtactgattactactattcgtgttgcatcaacggcaagaactaagacccattctcgactttttgagcccgtctgttctctccaagatacctaggagcgtccagacagcgacatcggcagccgtcttactcagccttggtaccggcgccagcgttgtcgacggcaacacactggaatatgttagttttgatcgcctcacttgtagcagatctgaaagacgtacgttggtggttccctcagggcagcaagcgacgatgttcttgcagacggggccttcctcagtgtggtcgacgagagctgcacacatgcatctattagcacaccatttctagaccgtcgctcgtcttccctcagcctctccgggagcgactgagtggggatcacgtaccgagcagacccagctggtcaatcaagctcgccttggcgcaggcgctgccagtgttgcccgagagcccgttgagaaggccagcaccgagcagaccgctcaacagactgtcgttgttggtctcagcgggggagttgcagcaagcgatcgagccgacattgcaggtggtgccttcagcctgcttggcgaaggccgccgaggtggccagcttcgcgttctttgcggcagaggccgggagggcggttgcggtggccgcggcagtgaaggcgaggagagagacgatgaagcgcattttgatgagttgagttgagttggctttgaaagctttgttgctggatgattggattgctgaattgctgaattgcttgagatgcttgtgatggaaggcagctgatgaagggtgactgggcaggtttatatagctgaggttcgaccgattttgctctatatatttgacgttgacacctactttcagcagaagactacagatctaaaatactacagtctgcattcat

SEQ ID NO: 16076 - DNA, 428 bp, Emericella nidulans
cacgagccttgtcgtaagaggcgttaatgtcgctgccggacatggtctagctcgttgtttgagattttttttggagccacgacacacagatagcccgactgacggacacgcaatgtttacagtagggtgccgttgcgcctgtcgcatctgcggtgtccatagcagggcatttaggcggtcgcgatgggcagatatactaccgaggataggacgcgggtcctttacaagcagtaccaggagcgatcgcggtgggcccatatgaacaatcaggcgatgaccgtccgctgtcgatccagcggggcatactgggattgatacgggcttgtgacgtattacggtctacgaaccttgagtgatcgttacgatgaagctgcgctgccttctggggcagctagggctgcccttgcagtttgaccggaacagcggca

SEQ ID NO: 16077 - DNA, 526 bp, Emericella nidulans
gctgacttgtggccctgcgcttctgtattccatcttctccctgatgatacgactgaggcccctgccgacttttttgttgacggcggcctcccgcatggtatgaatgacgtgtatccatacaacccttaagccctgccctagatttagccggagcgatcctccctcccaactctctatactgtaagacacgagagcgctggttatctgtttgctgatctatggtacccctccctactatgagtggatgagtcatccgctgctgctgtaagatctgtcaatctagtgcaacaacactgtctcactttgatcaacgcaccatctgtcgcaccccagaccacatctattggccgctctcaggtccacgccgcgtacgtagatgattgatatccttggtcgaggctagggcattcactaacctaggcccgaccttaaaagccacggttggaattttatttaggatccccccgtagcgagcagctttaggtgccggcacaccagtgcatacaggctgccttatttttttgcc

SEQ ID NO: 16078 - DNA, 4217 bp, Emericella nidulans
  unsure (1)..(4217): unsure at all n locations
aatcgagagtggtgggaggaaagtaataaaggaaggcaagaggaatagaaatatacccttggtaggagagattggcatgagaagcaattgattaaaggagaagataattgctctgggtaaagggaagggttaagacgagaccgaaataactatttttttttcagtggaaagagactttcaagttgagcaagatgaggctcccaagtataaaggggaatgggaactgtccagaagcccataaagggcacgggagaaaaatcctaatgggcccttaaaggccgtggggtttttgtagagggggcttacctgaaaaaagggcttatttatgaacccttacgggtttaaaatgaggttggcctgtgggcctatatggaggcacaagggaaaaagggcccttacctgtggtcatttagagccatattagaaaagccgggtcacgttaaccccaaaaaaaaaaatccagggcccggccatctcaatttcttggtctcgagcaaaggctttcattggcgttttgaaatcaaaccgcccccctttaatcaaccttcctcaacggttctaatgtcgggtcttctctcccctacaatacaatccgggctccttaggcaaccgaaatttcccaaccaaagatgtttgccaacacgatctcacacatgtgtgccctcgttgactccgtcagacacggcatggcagggtggtggaaatgctgccgttgtgataacatgaacaatcccgctctgtgcgggggtcgctgtactatttgcggccacattaaagacgacagctgtggccccgtttaagggctcacagcgatgaattcagggcttggctctctcaatggctctcaatttctgcgcttgtctcctcgctcttcagctcatatgcatactcgacaatgcatttgagtgttctcggctcctgcgcgctgcttttgcctgcagactttataccggacacggtggctctacctttattctatttatcgctttcggtttcttctttcttagttgttttattagagttttgcactttcggcatggccttgttactttccattttcgggtttcttcttcctctcgtctccgcatctcaggcttggttagatatatacatagacttccgttgtttttacttctccagctggtctttctgttttctgtatcatcatcgctgctgagctcatgttgttggagtgccgttctgttcttatttcttcccctgttgtatgaacaccccggcgttcgtcgcatacaacttagatttcttttgtttttacttcttgttggagctgcattgcttggtcattttgcgatcagcgctgggtttgattatcttgggcagatttcacgacgaatagattattcaatgaaagcgaagcaatcattaaatgactcgaccctcatttcagaaagagttgtgcaaggtagcaaaacagggcaaggcagcccggtagaaatcccgcagggagcaaaaaataccgcagtggagagaaaccggggcaaagagtgttcgttgcccttgaattgaggcggttctagttgattagggctttgtccagccacattttagcttatagtctgaggccatggtcttacataagacctccatacttagttcgaatttgagtttagactgggcatcaaaacccccgggaaatcatctctgtgatccacttgatttttcaagtgtaatgatgcgctggtgtggctcttagatgcattcgtggctaagcagtccagggtacccagacgatctgaacccgaggtcagtattcacacatgaccatgcgagtcgttaaatgtttggccatagctctcaaagcttacggtctctgaaagtggcagagatggtatgcatacccaaggcataatgaggcttttgccgatagtcagtcactagtaatttttataaatgtgataatactgcctgatttgatcaaccncagaatgctctgtatctcatgcatatgcagcttcgtttcaatttttcaaaattgaaacgaagttcggcgcctgaaaaggaacgaagctggttagtacggtctgctggctatagccacagctctacggcgccgagtctagacaaatggagatggttcagagtcgctttgccgggatgccgtatgctcctcgcgcaaaacatattatgagtcaacagaggctctggcaaactggcgggtgggtcgccaggggttggggctgatagtgagggacagaaacattggtgaacttgacctcgttgccatcaccctgatggcagcaaaggcaaggagacctagcagactgagattacttatcttgcttaggagctttccgtagtatttcctactactagacattcattactaagtacagtttgctgacagaaacctcgcggtttgtcaggttggatatccatttagaaacgactatcgcaagcatagaagatgccataatcacttcaatacacaatgttacatgttaagctctttttcaataggcaaggccagctcttctttcaggccccctacctgtagatgagacagcatagcttctagccccaagtgaaacaagctcaccaacaaacactgaaagccgtcttaccccttaagactaataaccaaccctaaatccaaccgtagcaaacggatcaccgtaatctgcacgatgcagcgcatccgtgccacgccgccggatcctcgagggcacgacggctatgagatgggacggactgcgcggtcatgcgttgtgtgctatgtctcactctgggtttcattcgaaactttcataagctgactctggcacaaaatgccgtacggggccttatcaggtcaatgtgttggtacgcgagttattggtagcggtaattgccggctggtaggagggtcggcccgaggccgtttagaggtgagaaccaacattccttaaacgttgtggacaccgcagaggtatgtatatgctggcttatacaggattagataatattgggtgcacaattccgcagtggcatatctttccgggccgccgcccgggtcctactcatagtcgatattccctgccaaaacccagaacagaagcagtgtagggctaaaccatgaatcatgaatgaataatagccttgtttattgttaaattgtttctggcccccattacggagatctttgaatagcttctagtccgtagcttctggctattgttgtagtacggcccctggcatgacagggatcggtatacatgctccaagtgcaggcgggatctaatattagaacggcagactaagaaatgttcccctcagttcatgactgtgcgacgtcgggaattgtcaacgccagatatagaagcgagactagtagagttaaacctcattgacggaggttgtcgatctggataaagatagaacagtttaagcgaggaatttcacagacaaggaaaggtaggcactctaatagctatgtagagaaagtcgaaggcgctatacccaactgggcggagtgacaaaggtacctgaatgcttccagtgttccgcagggacaggattctccccgctaacggtcgtccctcgacccaagcagcaaactgccctcctactaacacccgaattcaagtttccaggtcatcaagatgcaaaatacagggaaaaactggatcaacaagtttgcaaatcacaacaccgcaaaaaaaaaaaaaagaaaagaaaagaaaaaaagaacattaatcctccccaatagactggtagcaacgacaaatgaactacacagcctctggaaacaacctaagcaggatgagtcaagcaagacgcatgaatgacagagttctgtgtcatcgtccgttgatcaagccaaatgaaactcgtaagtcgtgcataaatgagttgacagggcggaagaagaaagtcggagctgaacaacccccacaaggccgcaaaccgccaggcgaggctcaaacaccgccctttgcctaatgtcctgcacccgtttctatagcgaaccggcggtgttgggggccctcgtggggtcgatgtgccccactttagtatcaagtattctggtactccacctgcaatgtaaagagtagtgtattgcaagcaacacattgaagctgaaactgtagacttctaaggcttgaactggttattagcctgaggttagttcatgccgctgggcgcgttttcggcgtttctgaggtgtcggtgggcagaggggccgaggctgcgcactgcactaactgcactaactgcgc

SEQ ID NO: 16079 - DNA, 780 bp, Emericella nidulans
ttttttcaaaacgccctggaagcgaaccggctgcggccttctatggcgtttttttggacccgttgaaggagaaagctaccgggacgacccttcagttcagcctgaacggtttagggacgatttctcagaccaggaagacgatctgccggactctccagaatcagaacggacggtgcagcctgaaaacggtttaccacgactgcgacggcagttctaccttcgctcaccgtactggaggcggggaatcattttgtcgactattggctaagacgaactatcttaatgcttggttcgcttcgtgccgcgctctctctcctcctaatcctatcagatgtatgtatctctagcatttctgttcctgttacccttagtcactcttcctcttatctactccattttcccgctgcctccacatcatcccgaatgtccttttcctttcttattctactctaccttcactttcttacatccccccctctaatcctctccgtttctcgaactctccccctttctctcgctcttggccctatctctatggcttcccctctccacagtactctctaatcctcttctcacccttcttcagctcctctatctccccgtctatcgccatcccgcccaccattgcaccttctatgaacccttatatccgtctaactcactctaatctgttccttcttgtcttactcttacgttgcatctcctccccgtcaaccttctctcttcacccccttctcctctctttcctaactttctcctacgtctccctttcgttagtac

SEQ ID NO: 16080 - DNA, 358 bp, Emericella nidulans
aatgagcggtgagcgtggccccggttccatctgggggctctttgttaagaagccatacgcggctggggtaaaatcttttgactgggccctaccccaatcgatggctgaagctaactgatactctgtaggatcgagcctggagattgtcgtaactcactccgaactgcatatacacgttatacacatgactgcacgctatctcctgagcatgatgcagttcatgctagagtgcacactctccatggtggcaagagatgaaccgcagtcttgtggcgctacatatcgagtagcagagttacacagtggcccaatgatgacggaaccgacacctcgactgactcgcattgggaaatttaca

SEQ ID NO: 16081 - DNA, 435 bp, Emericella nidulans
gcccagcctcactactccctgtacgtcacgctctgctgaatttttttgcatccgtcatagtgaggcggtcgtggcactggaacccgggaggtgatgcatctgctggtcagtgtagctctacacaatggggcctttatacacgggctctagtgacacttaagtgggacattgcaatgtggtgaggatcaacgaatcaccttccatggtactcatgaagtcgtaagcgggaggctagaaccttatatgctcgatgcaaccttcaggggtcacattctatggaagagcgtttatctggcccgcattcacataactgactaccgctaagcaggggcttaagtgtggcaggcttctcatagctggtgcgacacgtggtcatacctagccatgagtacagatatagggcccgtgttgccccgcttcttttctatcacttgg

SEQ ID NO: 16082 - DNA, 691 bp, Emericella nidulans
aagccgccgccacccgctatgaaccgatccttacacgtccgatcttggggccattttccattaaactcgtcggtctgatctcgagccccaattcttggatcaaaagctctcgccgatacgagagtcccgctctcattcgcgacaaatcttacgtcgcttcgagttaccataccttcgtagactatactgcaccagcaccttgagcaacccacagcggagtctgcagtaagcagtacgcatggcccagccctacataaggcttcccgggcttcttgcgatgcaaaaggattcaagcccatgcggatggcgtagcggcgctagcgtcaagtttccagaattggttatgaaggggcaggacatcgttcgatgggggactgaaagttctcgcgtacttggcaaggccatcaaggtggcattccgtcgggtgaggcggctgtagcagatactaagccgtgggctatttctgcccgcgaccactgaagacccggatgtatcacgagccgcagatcatccgtgcgaagaggtcagcttgacccctaaaagagggcccccatcgagggcggctatttcggcccgccggaaaagaccctcccacctttggatccaagtgggttataccccgaatccccaaacttggtgtttggcctccaaaagtttggcagaaagaccgacaaggttttccaatgtggac

SEQ ID NO: 16083 - DNA, 500 bp, Emericella nidulans
gcattttggcgaacgacattaacgaggcggacagctctgcgtggacccatcaacggaggaacacttgtgttttttgaccgggccatatgctcaatgacggcgcgtactttgactcggggcgataatggtcacacctgtgcagaggcaccacaagcgcgaccgacaaagagttcgtcgaagacgggcgatgcgagacggacgacatatctagtggcttccaagcaatcgccattcatttcaacgcacaacatcccacttctttattaacgatcgatctcttgacagcggtagcagattttacacattctgctttttcccgcagcggaccctatgacctgcacgcctcgtacaataactgcatggtccaatatggccagctattccgaatcacattccctttctgcaattcatgggactgaccctaaaatttttctgtttgaagaaccgcgcaatccgacagcaactcactaagaacgaaccctatgaaaaaatcaattggg

SEQ ID NO: 16084 - DNA, 746 bp, Emericella nidulans
  unsure (1)..(746): unsure at all n locations
gaaacaaatagaaaacaaaaaaagggggggaggagggaaaaaaaataaaaaaaaaaaaaagggggggggccgtgggacgcnaaaaggaatggaagaggaaagggaggaaagagagaaaaagggggaaggagaaaggggaacacaggtggtttttaggaaggagagaggaaaaggaagaaggggggggggagaaaggaacaaggaaagaaggggagaggaagaagaagggggaagggaaaggaaaagagggggaagaggaggaagaaggggggacggaaaagagagaagaggaggaggaagggggagaagagaaaaggaggagagggacgggaaagagaggggngaggaaaagagaagaaagagaaaggagagggaaaaggaaaaaaaagagggggggaagaaagaagaagagggaggaggggggaggaaaaagaaaaaggaagggggagaagaaaaaaaaggggaaagaaaaaaaaagnactcaaagggaaaaaaagggggaatagcgaagaaaaaagggaagaagggggggaaaggagagggagaaggggaggaaaaataagggggaagggagggagaaaagaaagggaagggggaaaagagtgagggagggaaaagggagaaaaagaaggaaggggaaacgggagggggaggagggaggagggaggaagggggggaagcgagaaggaaaaaggaacaagggaaagggaagaaggggggatggaggaaaaggggaggggaagaag

SEQ ID NO: 16085 - DNA, 845 bp, Emericella nidulans
atgtgccattcctgggcaaacggcactcacttgcaggcgttcgcattcggtgtgttactggacctcatgattttttttgaaaccacaccagatccgtgactgtggtctatcttgcttggaacttgaggctgcgcgatggcagaaactggtggacgggcaggagattttcagacccggttatcgatggcattaccttacagaggatgcgagtggcacgaaggcgtggttgctcggaagcagccttaggcccggcaacacccctggcagtggcgatgagagacacggtgtatcaagatctgtcgattgatttagaaaggtacggtgcgctgggaaaagagatgacttgccctgactcccgaccctaggaaagcggatgttattgggcgtgcaccggtcggtactctttttgggttaggggcagtcctattacctgtctttgatagcccacctgagtcagggaaaggtggcatattttactataaccgtacacttttaaggaaccgggctgcccttgtttgtcatgcttacgactggttttttgagaagggcccccttcccttttccacccggggactgatgcttttattttggttcaactggtcaaatttatactgaattagggggacccttttgaacctcttgtttcggaattttgttgggattttatacctgtctttttattttgacaccttttatgttctgtggtcctcatttttataacggggggggggggggaaaaattttgtgaaaaaaatatttggggtccccaattttacagtacttttaatctttgtaaaaacttgtgagggccttttatattaatttggggcgtacctcctttatag

SEQ ID NO: 16086 - DNA, 536 bp, Emericella nidulans
  unsure (1)..(536): unsure at all n locations
ctgggtntgcccgaaatgcctccaatcactaaagttaacatctttctgttcctcatcactctccgcctttcctgctccaaagctcttgagatcccatttctcgacgccttcgatgcccttgagagcatcagggtactcacggaagaggtctgcgttgaggcgctcgtactcgctatagtccttcggccagccgccgagacgctggatggcgagcttgaacagcctgaaatgttggcggacttggtcgtcactaagggcggcgtttgcaaggtcgctgtcaaggtcgataacggagccgtcggtgctcattccgccgtcgaggctgccgtccaagtctgcgaacgtggggtcgcttagcgcacgaaggatattctcgtggagtgcggcagcgcgcttgtagtaccggttcgctaactcttgcgcatccttgtgggcctggtagcgctggccgataccagtatagagttgcgatagcaaaatagacatctggagagtgctggggtggcgagcgccgtgaacgctgcgacagttgtaga

SEQ ID NO: 16087 - DNA, 970 bp, Emericella nidulans
tataggactgttgctaagaaaccaccggatgctgtatgctcctacgaccggatcggactaattgagaaggttttttaagacacctcacgactggaccgggggaggtacaaggaaggacctgacgacggggactatggcgctggcgcggcaaagtagaggcgccaaggcgccagagcggccatgcccgatctacactgtctgtaggagactgctgtgtcccgacgcatggcctgactctagctgctgcccacacaccaagaccggcgagcatgatcaccctagctcacgagtcaccggccaccgatcatgatgattgaactcgctcatacacaccaaacactgtaaccaaacgacatcaaactgcgaaacacagtccagcaccaggaaaccgctgacaacgagcagctctaacaccatgcgccgtataggccaggcacggtactgtcgccggctgctactgctgactgtccactcgaactttcgacatactaacgacactgcggactgaccagcggaataactcaataggcggtgtagatcgaatcaccaaggtcaattttacccaagtgcttgtacagcttgggaaatagatgcaccgccccgtgatattgatcgaactcaccggcaagcctgctaaattgtccttaccgacagccgttaacagtcgatgttcccacacatgacggcataaaacgtgccctatcagcaacggcatatggctgagcgtaacatggatcgcgacgtactatcgaactcaagtggcccgagcataaagatgcgattcttttaccccggccgatgtttaaccggcttaactgctggccgggctttttccgaaggccgggggataccccattccggttttcccccttaaggaggtggatactcccccccggagtatttttttttggcggattttctaaaaaaaaaaaataaaaagggttctcctaaaaagtgtaaaaatctaccc

SEQ ID NO: 16088 - DNA, 3023 bp, Emericella nidulans
  unsure (1)..(3023): unsure at all n locations
tgccaaatagcttctacaagttgactcttaaagcaatgatagcaggactcacatgttagattttacctgatccagctacggccagtggggcatgctgagcgtgtaccccgcgctccgagtcccccaatcttcgaacctgctcacgaacccctacatacttattacaaatatcgtccactccagaaccaaaaacagatcatgtcagacacacatgcagccgttgggcttcctgcaacagaagcatacgtgcgcctccacctcctgaatggaggcagcatgaccgccgaataccacaagctgcacgcgggcgatgccgcagaggaattccgattatacaactgggccttcttcgtccagcatactgcgcaaggacggaatgttatttgggatgtggggatgtcgtccgtaagtgccacccttgctccgtactgcatgcatgttttctgatgctgacaatcaatgaagaactcggacgactttccccctgttattggccatggagtgatcaaggaagcaaaggtccttgatccggcggagtcgctcacagcgcaaattcagcggcgaagcgggatcatggcggatcaaatcgatacggtcttgctcaggtaccacgtcctcttgtcccccaagcccatgccaaccctgctctatcaggagactgctgctgaccttgaagccacgcccactttgaccactgccgtccaataagccggctttttccgaacgcaatcgcctatttcggtcccggtacattcgacttttgtagcccgggccacttcgccgatccggcctcaccctgggacggacggttcttcgacccggcacgcgcaacagaacgctgcgaaacattgatcgggccatggacgccctttggaccgtttgagcacgcgattgattttttcggcgacgggagtttctgggttatacaggccccgggccatatgccgggcaatttgtgtgcctgtgctaggatcgagagtggcgagtgggttctcttggggagcgactgttgtcattcgaggtgggtgtctatttctctacatatctcgcacattttaactgactgcattgtactcaggggtctgcttgaaggcgccaaagagatcgcgacgttccccctgccggatgggggtacgggatgcctgcatactgacgtggctgcggccaaggacaccctggcccggcttcgagtcttgcaaagtcagttgggtgtacatatcgcgctagcgaatgatgcgagctggatggagaaagaggatgacgaggtcctgatgtcgttgctggatgagaaattccaagaggatatgcgccgtgctcttccgttgcaggagccggtttgacttggctcctggtcaaccctggtgggaaggatttaacaaatgacatataactcttgggtctgagttgcagctggaaagtggttgggcggaatgggaaactggtgatgctcgcaaaactctatagacttcctcgagaaaacttctactctattagaatagaaagaacacgacccctaatcagctgatttactgataccagtttctccatactttcaccgtacacatcagttcaaacgcgcgttcatcgccagagtcgtactagagacacgggtaagcgtcatctttgctcgacccttctcttggttttgcaataatctacaagatctcccttgctgcttccaccagtaggtttgctaggagacaaaccccatacatcctcatcgatcttgcggncagattctagctgaacttatcaataatagctcaaagaagccagatgctggtctaatgtggcagatcatcaaacacgtatagctcagttcccaccttcgccagccattggagctttccagcaaaggtaaccccttgataagtcgattcttaagattagtactggttccacacttccctttcttgaactagtcgttgttcaatctttcgctggcaggactactcaagtcctagagtctactggaatcttgccaaatgtgccgaagtccggaggtaatccttcccaattgatatatgatatattactcggtaaaaccatatatatgccgaatggctatttattatacaaggtcaaatagaggcagtatttctactaatatccattgccttgcattctcggcggagtggcagggaatgacgcgacacgcgatggctgccaaagaacggccgcttaagcaaaggaacggaaaataaagccagagccttcaggacgagaccgactttaaattattcggtcacgttaaatcgtggacaaccgtactacacatgactagaggaatagttgggatccctagccatatgcataagctagcgttgctaccatgacgtccaaacaggactaccgtgtttaggctctgggttgcgttaacaaattaaatggaatcccactatattaacaccagtgtcgtaccagacatgctccaccgtcaatattcagcttcctgggactggttcatgtttttcgggcgtggtgtcttgtgtgctgtctgagatggtgagcttgtcccatttctgcaggaaccggtccaagacaacatcttcttgccgtattgggccattccggatcaccgttccccagtgcgggtaaaagctgctgagtccctctcggtccttttcgctccatgtctcagcggcaaaggagctgaaaagagcatccgtatcctcgggtagtgtcacttgcatctgccttgcggtgagctggagcattcgcatgacgcctttcgcgaacgggtaccgcctcgagaatgcccgggcagtggtgcacagctcggtaaatgcagctcggttctcagctgagtcaagagctcctagtagggcgtatagcgctgttgtgacccactggattgtacatggggccatacgttcgattccccagcgttgccggtgaagaatgataagattcgcaatgcaccgggcgctatcaagagtggtattgcgggcagaggcggcttcttcgtgcctcgcccttggatagatggtagaattgcaaaaaccaaaacacgtgagtcacgg

SEQ ID NO: 16089 - DNA, 3290 bp, Emericella nidulans
gtagctcggagggcatgaccccgactccgccttgggcgaacataaatcggaagtttgcgatttggctaaaagaaggacgatcccgaaccgccaccagtccagaggttcaatttgtttcttccactacacgacaaccaccactgccccaaactcaaaggcctgctagtctcttagcctccaacttctggagtatactgccgctgccacatacattgtttagacctacgaatgaagggggctaccggcggtcatggcaaacaagaacgcacttttctcctgagataaacctatggcttggagatggccccggagcggatttgatgacgactccggaagtgaactgggacctagccgtaccgccaggtttcgaacgacaaagggaacgacccagggacgcctataagccaccaagtccgccccctgagggtttcacaagaagtgcgacagaggaagatgtcgctgtttgtccaaactgtgatgaggagctcggagtgggagatacgctcaaacaacagatctggatatcgaagcaatgtggccacgtgagtatttatgctcctatacctgcctatccgtcttttttatgttattttaacgattgtcaaggtttattgcggagagtgtgcagtgaatcgttcaatggcgaaggcgaagaagaacagttcaaaaacaaagcctttttcaagatgtcaagtgcctggttgtggcaagcatgtcagctctcccagatcgatgttccaggtctatctatgacaactctattatgcagctgcatagtccggtgttgggacggttctttttttttctcctttatctcgatacccttattgcattggttcggatctggtcgggttgtttctcttttagcggagggagttgaggcttttttttctttcccccctttttggttatctcatatgtcaagttaaatccgtcgaaggaatactatacttaaggaatacgttagaatataagcttagagatgctctatagcttgagagacatttcggacggtatatatgcaagtatgatacaaattggtcatcaaccatggagaaagtccagaagacagcacaaaagaacccctataatgccaacaaaaacaccgatgcaataaacaaggctaaacccaactcaaacagacttgaggcctccgtggtaaggcgaccagataccacgaacactctcgttgatactcgtgacgggcttcttggtgcgcttcagcttctcgccgctagcctgcttcaataagttggctttctgggttatctgttccggctcgagattccgcacgcagatcgccttctctcgtccgttgatatagtgtcctttgatgatagggtgcttgtgaggtcgtggtgagactcggatctcaatctgggggttttctttcgcgaaagctggaagggcatgcttcaggaaagcgctatagttcataatattagagagagatggttgaacggtatttagatcggaagagcaacatacttcattccccgggaactgccagcccagtcacagtagtggaaatccaagcgcttgcattgcagaatgaaggcaccaacgccgttctagcaagtgttagctctcaatgctccggagagggttatttttatagtgtatgaaacatactctggcagtggatactgctcgaaccccttgtactggcattgttgcgtatctgttcgttgtcttgtaccttttaacaccaggtcgaaggggccgcgggactttttcactgattaccgcttgatgttattggctagcggcaaccccggctgtcgcgcttggagcgcggctgtcgaagccacggcaaggcaagagcgaacgcaaaatcggaaataatccaactactcaagacaaggtatcaactccctccctccacatatgccccttatctcagttgctagaactctcattcttattctcagctgtgatagttctaggggaaaatgacggacaagcttccccctccccttctggcccttttccaaccccggccgcccttgcgctgggttacgcccatcgatcgtgcgcccgacgacatcaagaagagcaaactttctggcgtcgcccagttcttacccgaagtgaagaagacggccgaggagaccgaatacaacccggcagaaacatggctgcagcgcaaattgcgccaaaaggcggagaagaaagagcaattgcataagcatctcactgagggtcttgcagcttgtatgatattgaaggctaaatgaatatcaatcaattacatgctaatacttgggagtagatgacccaaattctgatccccaagcacgtggggatccattcaagacgctcttcgtctctcgtttaagctatgaagctactgaacaagatctggagcgggagtttggacgattcggtcccattgaacgagtaacgaaaccaatgcccttctcctggttcgcctgagctgacagtagctagatccgcattgttaaagataccgttacccccaaaggcgcgaagaagccccaccgaggatacgcatttatcgtctatgagcgcgagaaggatatgaaaggtaatgatatataatgcttccgtttgtcttacttgtactgatatagatctcattcataaattagcggcctacaaggaaacagatggtatcagaatcaaagaccgacgcgtcttggttgatgttgaacgtggtcggacagtcaagggctggaagccccgtcggtttggtggtggcctagggggccgaggttacacaaaagcattaccttcacgtcctattggccctggaggctttggtccaccatctggtccaggtggttatggcggcggattccgtggtggtttcagaggaggttccagaggagggtttcgtaatgaccgtggctttgggcctcgcggcggcattgggtatcaaggtggccgtagcggattcggtggccaggcgccgccaaacgctccgtcaggaccaggaggtgggcgcagtggaggttatggtggccgttcggatcgtggtggaactgggagcaatcgtgaacctattaggcctcgggatagctacggtgatcgtgacaggcgtgaccgagaccgcgatggcgaccgtcgagaccgtgatagagacagctatcggtaccgcgaccgtgatcgcgagcgcgaaagatacggcagcagagaagaccaaggacgaaagagataccacgaagacgattcatacgatgattcccgtgccaagcggcgatactaaaagcccgcttttacagatggcttttgtcaatcctgaacccgataatggtttgtttgtgggt

SEQ ID NO: 16090 - DNA, 239 bp, Emericella nidulans
gcgttaatatccgagagagtgtgaaaagacttgtgcttggggctgtacgccatgaccttacctggcttgctttacgcgagcacactgtgcccctgtgctaagacaggactgctagaggctgaaaaatgaactgatacagccgacagtcagggctagagtacctgctagctgatcatcaagacaaaacttacgctgcatgtaggataaagtaactggttgcctgacacaccataccagtc

SEQ ID NO: 16091 - DNA, 2505 bp, Emericella nidulans
gttcaatcactcgccacagctgacgccaaacctcgagattccgttcgaacggcgtcatcaagagatcgttgttctcctgtagttccgccaaaccccgtcgccagtccatgaaactctcacgctccatagcatcaagctcgttccgagtggtcgacgcatcccacgccgggcgacgcggaaccgttaggcggcctttgtttttcttgtgttttcgtagggctgatttctcttccgcggccgagagcaagtaggggttcttctggtccgtatggatgatttgaacgttgttcatcttctcagccgtgaaatcggtgccagccagctcggcggtggtcaaaaactcgtctagcgccgcttgttccgtgatactgcgcatcttaacccaagaagcctctttggcggagttcgtgatgtaagtttcgccattcatatctttgcgtgcaattccagcattatgagacgacttcttcatgttagaggcctttcctttaccaaagcgatcgttcatgaggctctggccgagccccaccgagtttttagattttgccagcaccatcttgaaccgatatgtaaggagtaggtgcgaggtgaggttgttgaagaaattggatttctaatagtttccggcctggcaaaaaaaaccccgcggaagaatggctgactcagcatatactttcttctcggtttgacagtgctgctgaagtcaacgaatataacagagaaacagagattagagattttaagatggtatcctctcctctcgatttaatatagatcctccggtcacttctgttcagttctctgttgtcagtaaggaggggtcaacaacacgtgacccaccaccgcccgcaatttttttggatagcttcagtttttatcttcgagtttcagcctgacctttcctccggtcactcctattagtcaaggtcaccttgcaaaatgcctccccgaaagcagtggatgtatgttcatattatgcaagattctcaaagccgctcactcgctgacatttctctagcgataagaaaaacgccactacttatcaactcttccatcgttctcagaatgatccccttatccacgaccccgatgcgcaagaccgtattcttcatcctgtttatggcccagctgcccaagcgccaagtacatcctcagcaagtacatcttcagcaggtcgtgctaagcacttaagcgatcttgccagtgaatttgggaatgattccattcgcaagaacgagggtgaggcagccaactatggcatttacttcgatgactcgaagtatgactatatgcaacatatgcgagagttgggtactggaggcggtgcctcgtacttcgtcgaagcgaccaacaaggacaaaggcaagaccaagtccttgaagctggaagatgcccttgcgcagacttcactaaataacgatgacacacgaagtaactggggtaatcgtagttctgtgggctctgcatatggagcatactctactgcttctacatactcacgaaaaccgacctaccaggaccagcaagacgtgccggactccattgcgggatttaagccggacatggatcctcgacttcgagaggtgcttgaggcgcttgaggatgaagaatacgtcgacgaaaaggatgatgatgatttctttggtgagctgactgccgaagggcaggagatggaccctggtgactgggaggatactttgttcgaccacgacgaggacgaaggttgggaatccgatgcaacagagaaagcacctgtccagccaagtacctcatccttgaaacaggagtcgaacgtcgcacccggagaactcccagagcacgatgccccggcacctgatatgaatcctgacgaccaagattggatgcgcgaattcgccaagttcaagaaagctggaaaaacaaaaaccacgcccgcggctccccctagcattgtcccatctgaacagcgcacgacccttgcctctacagtctttacagcaggcggaacaccaatccgtcggaaaaagcgcaagggcgcctcaccaacccctccgcctactccatgacgtcttcctctttagcccgtacagaaggccaccgccttctagacgaccgattcgagcgcctcgaagcgctatacgccctcgacgaggaggaggagtacgatgactcaatgtccatggttagcggcatgactggaatgaccgacatgtcgaccgcctcctcacaagcacctagtctcattgacgcaaatggcaacgcagtcgcacctcgccacgactttaacaacatcatggacgattttctggacgggtgggataataacaccagtgcacaggccaagagaaagggcgcaaagaacaagcgtggcaagaacggcaatgaagcgattggcatccggatgttggatgagattcggcagggtctgggtcctgcgagagtaccgggccgggtgtctggcaaggtttgaagtcactttctctcttagtctgggagagcgttcaattgacgatttcaatgatatcc

SEQ ID NO: 16092 - DNA, 3973 bp, Emericella nidulans
ttgaacgacaattaccccaatacccctctaatgaccgcgacactcccatagctgcgcccgatagaactaccgtttatcatcgccccctgagcggatgccacaatttgctgcagatttgacctcttgacgacccggatcgtggaaaggtgcaccgcgccgggttatcctgtatcgctgcattgaggagtgcaacttccaagcggaatgatagtgagaagcataggttatttggagtaaagcacctcctagccagcgtatcagaggtcgccacccctttctaagtgatagcagtatcgcgcggaaaggctaaactgccacagggcagtttgcctcgaacattttgtgattaggcttgctatggtctgtgacagaagagatagaagacgttggctggaaagaatcacaattacataccacctcggtccattttttttttaaccataaccatacagaactgagtggctgattctatccgcccattggcccagcgagttactagcggacataacggaactgattttgatgtttgagcaggagccaacaagtctcacgatatgcttgtggtaggtaccatacttctaccacgggatttgagatgattcccgacggcgaatatacaaggcacgatggacaatgagcggaaacagccttggccatggcgacgatgtatctgaatgatgctagtgctcagcacagcccgctgaacaccatcctactttcgcttcctatattcagccaggaccatcatcattctcaagataagtagtcattgatcaacttcgacgattaaagagtgccgtgtagttttaagaccgcgtagtcacgtgcaaacgcatcgccgtggagatttcccgcgtcataatcaattcatcttcttttcgatctatagactcagtaacttgattatccaacgcatttacacaatgctcttatcatcacggatagcccttcggagcgcctccagcatccgctgcttctctacctcttcaagacatcttcggtctgatctctcttttcaagtctacggaccggaaaaggctcaccctaggcgcaatcctatcgtcttcctgcacggccttttcggctcaaagcagaacaacaggagcattagccggtacgttcacgtccagctcagactgaacatatttctgacgagctattagggctatcgcacgtgatctgaagcgtgaggtgtatatcagtggttggttccatcccagcccggttcagcatgtcgtggggtttaaagctcgtgcggttatggctctcaatggtgactgagctgctcgaataggacctccgtaaccacggcaactctttccatgataccgagcacaactaccctgtcatggcggatgatgtggccgagttcatccacaagcatgacttgagcaaatgtgttcttatcggtcattctatgtatgtctacttcttccctagcttatttgtgttcttttctctagggcttggacgcggttgttctagaagattgctaccttacaactcatacttacttggtcttatgaaaaggggcgcgaaagctgccatgaccgttgccctcaacgcccccgagctcgtctcagctcttgtccctgtcgacaacgcacccgtgaacgcgcctcttcgcaccgattttgacaagtacattaagggcatgcagcatgttgagtccgcgaatgtaacgaagcagtctgacgcggacaaaatcctgcaggaatatgaagaagtatcctctccatcctaacggttcatccatatgtgaatgcgaagccgaaagttactaattgtgttaggccctccctattcgccaattcctcctcacaaacctcatacgctctccagagaaccagacgatgaagttccgcgtccctctttcgacgctaggtgcgtcactcagagcaatgggtgatttcccattctcgcagcctgggtctgtgcagtataaggggcctacgcttgttattaggggtacaaagagtccctatgtctctgaggatacgttcccaattatcaaagcctttttcccgaattcgaaaattgcggatgtcgaggccgggcattggcttatctcggagaatccagaggcgtttaggaagggtatgtacctactccttgccctatctacctccctactcagtttattgtgcttttaaaagtcgaaaaactgactgattgtttgtagctgtggtcgacttcttgcaagagatagattagaggtagaagctggaagtgaagcaatgggtgcaattgttgatcagattccatcttcatatgttcttgttccatttgggttatactcatacatagaaatacatagacgactccatagaaaccacgccttccaagccgaaatgaagggtatgaagaaaagttaacttcggtaagcgcccacgtagaaaataaagctgcagtaaaagaccatggccttcaacaccagataacgccaatgcttagattcagttcattgcgccgcccaagattcaagagacacagcaggtagtaagggtattcgagaatagaataaatgcagcaaagaaagagaaaagcggtggaaaaatctccatgtcggcgtagtcgttgaagagatccaccacagttggatcatggggttctgattctatcggcttcttgtagttttctttctcttccgacgagatacatctggagagtctttctgggtgccgttcaagccaggggagcggggagccggggagtttgatgttggctgtgaggtgtcttcgtccgactctgaacgaagacgtttgatcttcatgccctgagaacggtcggcgtgtaacaggtctggtctcaaggccggaggaagctgccccgagggggagtcacagtataatgagtcgacttgggagggctgttcaggaagttgcacgactttcttgatcctattgagctccttcttcgtgttctcataagttacttttgcactctgctcgattgatgtcatacgcagctgcaaagagtgcatgtccccttggttgttctcctttgttaggttataatcctcgtccagtctttcgatgacatcactcagaaccttcagccgatcacttagcgacgtgccctgacgcttaacttcttgcaaagtctcctggtccgctgtctgcttttgcaaaaaggcactatcagtgttgttctgtttttctgcaaggaactcaagtcgtgcctgcatcagccgaaattcttcctgactgggccattgatgtcgctctacaaaaccaccaatcaatcgtttcaaatcctcttgttgggccctgatggacttcagctcatcttgtgttatgacagatgtcttcccctgggtttccaactgttcgatcttacgtgccagtgacggcagcgtctgatccaaggactgcttgtgtaccgtcaattctttccaaagctggtctacagagggatacatctcgtgcattgccctgaccatgtgctgcactatcggctctgttgtcaagttattataccttgactccagcgatagcaaagccaccttcataggctccaagtcggcccccaatctccgtacggactcgaacaagccatcaactttggaatcgagccgttccctaggaacgcgcagcatcgcctccttaacgctttccgtgagccgttcttgggtctgttgaaactcgctcaatctcttattaagatcctgcttgagagtgtccatttctgcaaaataaaactcatctttagcgcgctgaatctcaatcagctcatccattctcgcgttcaaaagttttgccttttccttgagggattgaattgatgtatccttctcacccaatcctgctgttcgctgctccagaatcctgtgctgattggaaagatcatctaaaagctttttcgtatcaggtgtgatcccaccatctggctgtattgatgatttctcctcgatctgcttgagccgggatgagaactggaccgtctcattctttaataggccaacgagtgcgtg

SEQ ID NO: 16093 - DNA, 479 bp, Emericella nidulans
gcaagatctatctcattaggagtcttgcgagccgtctaagcctctcctacttcgatacacgtctcttcaacattaccatgggtaacacagaacactcataccttgcttagagaggtatctccaggggaaagtattcaagggcctctactaaccccgtactatttttttgtcttaccaaaacattaaaaagaaaaaccttatccctaaaaacactaaagactatcttagcagcactctttctgaatgccccatcatgtttctgttaatcaacaccctagcaagttctacgaacttggtggagacccatgtttgtatcgatttggatataaaccatctatcttgttaaggggatccacaacctctcaatcagaagataataggttaggccagtgaacgcaagagaacagctagagggtccgctttaagacatttatcactagcttcaaagagctggcggaataccactggttctaatggga

SEQ ID NO: 16094 - DNA, 4272 bp, Emericella nidulans
  unsure (1)..(4272): unsure at all n locations
ctttatcgataagataagagcttcttgagcctgaggctgcattatcctccgccatgtccagttgcgaaagctagctacagaggagatctgagagtcaagcaatcaagacgtaggttcacttcgtaaatagcacaggcatcggcatctatggggatctctccgctataagaatgccctcgagaatatgcacaggtagcatgctgttcatgcccagacgtattgcggccgacccgtctcaagcagcatataacaaaaacagaaccatagttctcctccagtccatctgccaagtcgctctcactttgcactcttgtcatccaccttttcccattcactatcagtacttgcgtacccggaactgtcgccgctcagactaaggcgctttcgaacttcgctcgagccatcaggaacctgaagtgaagtcgacgcagtggctgattgtggggctgattcagacggctgccccgtattcaggctcattacatgttctgtctctgtgtcactatccgcaccctctgttgtcccacgcgtctttgcatcactctctgtaaactgtgccgtctcggccgtcttctctgatgatatttcctgccgagccgactgaccttggctttgcttcaactcctgagcaaaccagttgatcgaataccagagcgcgcccgagaggatcgataggataacaaaatgaatgctgtatgtggctagaaggagaacgaagaggagagtttgcaaggcggcaaaggtggtgttggtagcaaggaggagagttggggtcgggcctgcagtgaatatgctcgaccacagctcctccacaaaggatgccatggctaatctcgatgcgcggtaagcgttggtagatggtagatgttggagagggggcgtgcggagaagacgttcctggcacagctgaccgagttagctggggtatgacgcaacaaatctcatagtgaaatagagtagagtctactcaatagcacagaccttcagacgaacgctcccatggagtctgaaagaccagaattgaaaggtggagccgagctaagcagcgggttgaccggcgaaagtttgctgcctgagaaaaaaggtatcaaccgggctggagaggaaggatgagagccaggtgaagtctagcacgtttagcaggcgctcgagtatatactctgaagatactctttgaagacgctcacaagatgatgagaccaggaactcaccaggccggatcacgacaccaacgaggggcaggtgcccggttatgtaaggttgttattgtcgggcaggtcaggacgctaacccgttcggtctcaggcatcaatttacccgtctataaggcttggttatagtctaagaacactagtccaatgatctaatgtacgacttaaacctcatataacagtcttatgacaatgtaacacgacgatcgatgaacgcccggccgcataacctactatctacgttccatccaaatacagttactgaacatactcaaggtttcaccattgtgaacaaggccgagatcggaggaaaaaggaataagagatgactaccacagaaactcaggagcaactgacttcattctgaaactgggttaattaggttcgtacctatatttcctctatttcacataaatggtgccaaggctatgccggcacctgtctgcttccatcagaaacgacatcgtaatatatatcatgggcatggagtcaagtacattgccaagcagggaggccaagcataagagggagaaaaactggcttaaaactccgtagaggtggctaaaaaggaatgccgccgttgtcgagatgaaatccagtctgtccaccaagcatcccgtgcctactctatcaacctgatctctccatctttgtccaagatctgttggaacaccctcttattacactgccgcctacctacttgagacgcaccttggatctgatttgcgtgtacccacaagacaaattcctgtctttattcttttaagagcattgtcccttgggcaatcttaccaatattcgtcttatcctgttcaacctaagcaacgcaggacttatccttcattcgtacgccattctgcattgaaagctacacagctctggctccttgtcaccgggaactaattggaagtcaagatggtgctctcgaagtatgatttcgtcttctgcaaggcacacttttctgacactatagagtctgcaggaagctcgtgacaccacaaaaggtcgtcaaatgatccacgctaatcctgctttgacccctttacacctataagctcaaatcggggcaattctatttaagattggaacccttctgcccgcgctagctgtgtcttctagtggcctctaaacctcggatgcattctttggctcaaggccactctgagagtgtgttgctgcgtctatgcaagggggtcatacgttatttgtctgaagagcactgcctgcgttacaatcaataactcgtttgaaagggggtttcagtactctcactactacgaggcgcagcctctgtcaagcccaggcggtttccttcctagagaccatttcgcaccacgagtcctcacccaactcgtcggtgatgatgttcttgggccatatacgatctcatccatggaaacgaaggaactatggctgctacgtcaattcatcaactttccctatccttttaaacccatgaagtcgatgataccgtacccagtgactggatgaatcgttgctcatcttctacaaaactatgttcgtcgttcgactcctgttaaactagacagggcttaaggaacaagtgttgaatttttgagaaacatactgaccgaaaagaacaaggttacatatgaagaaaactccacatatcacgcagttacttacatagtctgatgccctataaagactagcgctcaaatgcggacagcacccatcaagattgtcagccagacccaaaccatcttcctccctccaaggagctcccttaggcgcaacatgacaacgctgcaaaggacttcactctatagggatatgccacttggaggatactcagttctcgaccggaacatccttctgaacgtggaccagcttattagtacgtagtggtcttgtatgcgctgctgaatcgaatgcctgcttactgcaagaggataatctgagggcatggtaatcaacgtcaaatgcttaccgtctggttcactggctcgcctaactacgaatggtgatcatatcttctatcaattcgtctacgagctatatgaacaaggcaagtctagagagatagcaagccaccaaagtgagaagagcacgaaagttatatcgtcaagtgaggtgcagctggactctctagacgcttaacatggtggggtctgatgagcggactatgaattccgtcttgaaacacactgtccgtcttgccgaattatccatggtgattgagctgccctaggtgctcctcgcgagctttcagccagctgtttgcgctctagggaggagcaaatgtaccagtcaacagccatttgaaagtctccttgtcccatcctgagatagatgaaccaaacaatgtcatgtactgccttataatcacgtcccttggtcccagtgacctgagagaaccttccaatgcggtcatcagtgtcctgctgtctgcggcgagcaatgctcgtccgcaaagtactgctagctatctgctaaaaaaaaggccgtcgagtacacaaaggtcggctttgaatatctccactcaaacattctttaaaagtatactacgaaatgttcacacaaactgcgtaatctttttatcccttcacaggattagtagacggctatctgcccctcctcactcgacccatgccatcctaggcggccataaagcgacgaaagactcttggctcctccactgcacaaactagcaaagaacaccttcgtgggcgggagacagctaacaatgaatacaagccacatctcgctcctgcaagattaaaagtcagtccacgttagctgaacacgcataaatcatgaataatgttgaactcactgattccacacaataacattgcccatttggtcttttcacattatatatctcgcggtcagtcctttatcccactcgatatggagatagttagctatgaaggaaagaagacacataccgttcgcgtcagtaaaggtcgtcaagttgcttcagtcgnatggttttgacgattgtacaggcgccccgaacttgacagcgacagacatattttgttggcatcaaaatcacagctctagagatgattttggtttcggaaagcccggcagg

SEQ ID NO: 16095 - DNA, 3276 bp, Emericella nidulans
tgcattcgcagatatcgtaatttacatcgtgacgttgggaagatatctgggagcttggaagcagtgctgggcccggcagccttgcgctttttacgaccgatacgagtggtcggaggtggtggcggctcgtacttaggcttgtccttctagagatgagtgttaaacagccgtaacagagtcatcgcagaaaagcctcaccttcttatccttatcgtctttgccgtcgtggccgccgccgatgttggactgctggttaccctgttttcaggcttgtcagatcggagctacgcggtgagataaatgcaacgaagactaaccatagccccaaggtgaacaacgaaactgaattagacgagtttctctagggaataatgtgacagaacaggatgggttgatggagagaaaagatggagaagggaagagggatgaccaagaggagcttggatagtagctgggcgtcggcttgagctgttgctgttgtcgccttcgtcaagccttggcattgattatgtcataaaaggcacgtgatcggatcgtactacaaatgtcctgaccagtgcctaggattccaccatatctattaccaagtaatggcaatatgtagtgaggcagctgcagtaatgtgaggcagctgcagtaatgtgaggcaagcctgacaatgaggcgattacttcaatagagggtggataatgaacgctggtggctgaggcagcaccgagtcagcggcttagaagatacagccatcctatcaaatagtccgccgccgagtcaatggtgcagtgtgtgcagcagcgcggaacaaaaaggtataaagcttcggtgaccagctggcgacccgattattctgcggaacttcatcccgctctccatctttgttttcgcaggctcgcagtatttctatttgttcgagtcttctagacaagctgataattctaagatcttactggcctgcacttggtccgtcatcgtccaccggcccctcagtttcccctccgcctgcgtgaggctctttcgcaacccaaccttgtaagcgcgcttccagtgaaatacccagtgcacatattacacgtcatcctctgtgactcgttcatcataaggtgcttcgtgaccatcgcctggcctcctctcccgcaactgcgacgttaccccaggttcacccgcctctaccgaagctgaccagagacttaggctaccagcttagcattcattctccagcttcgtcataccatggcgtctaacagaatccgtcgtattgcaaaggagattgccgatattcgggcagacactcattctcagatcactgcagagccgttgggagacgatgacgatgtcacacacctgcgcggttcttttccagggccgcctggcaccccgtacgaaggcggcacttacaaagtcgacatcaagatacccaccgagtatcctttcagaccaccagtgatgaaattcataacgaaggtctggcatccgaacgttagcagtcaaacgggttagtccgcctttcctgagcctttgatagcttcttctaacgatggtgaccggtgactttagggcgccatctgtctcgatactctatcttccgcctggtctcccatcctcactatcaaagccgccctcctctcgttgcagtctctactcagcacgccagaacccaaagatccccaagatgctgaggtcgcaaccatgcttctacggaatcccaaagagttcgaccgcgtcgcacgggaatgggctgtacagcatgcgggggccccgaggagagctgccggagagggcagcggtggtgcgacgagcgagtccttgcgggagctggagcgaaaggagaaagaagcccgagagaaggaggatctatccaagtacgtcctcatcggtataccagctttcaaggaattactgctaacacctcattagatacgatgggtacaacaagcagctgattgatcggtttgttcacatgggcttcgacgtggacgcggtcgtatcggccttcaactattatggtatagaccgtaacggcggcgaggactacgaactggaggaggcttacatgggtgatgtgacggcgcgacttctaggcgagccataaggccttcagtgttcgatgattggtttaccattactggacttgataatgagcacggtgcctggcgaatttatgatttgtttgtttgccttttattgggacctcgggacgtttaaccacagattaagtcgcagtgactgactgcatatatcaatttgcatattgacgtatttcatggatactctcattctttctatatccttactataacggaagaaatattatcttattattttccccagattgttacatggattcttgtagagctggggctggtgggttttactaaattggggatccctatcgataagctgggccggatggatttgatcagctccgaatccagcttgggcactgaaaacctcttgacttcctgggactgaaagcattgtgtcatggatgattgatacagccagcaagtattgtaagtgcattctcagtcagacttatttccaattttctgactttaaaagcagtctgttaacagagcctgaacaagcccgatatccgtcaccatgatcgaagacgacatctaccgcacttcgtcacagtatcgtctgtggtccttcaccgaagagactttacgatctgtgcgacaaaatacaaacagactggctagcgaccgggtacgagttgcgctgcgacgagcgcgcgaagctcgacaatccgccaactcatctgctgcaggcaccccaaacgcgaatgccagcgatgtagacagcaagaccagcgaggagaaggatatagagtgtttgacaccagaggaggagcaggacttggtgcgatattactgcgagcagattatccagttaggggagagctacaaacccccattgccgacgatagttagagtatgagtcttcgcaaaaccccgtttctcataactttggaatatagtccctttgctaatgcgttcatgctaaccaggccactgcaatccaatacctccgccgcttctacctcaccaactcgcctatgacctaccatcccaagaccatcatgccatgcgccctcttcatcgccaccaagacggacaactactacatgtccctgcgccatttcgccgacggcttcccggcgacacaacagcagaagatatcatcgcgccagagttcctcgttatgcagagtctccgcttcaccttcgacgtccggcaccctttccgcggcttagagggtggcatcatggaactc

SEQ ID NO: 16096 - DNA, 2800 bp, Emericella nidulans
tgcttctcagttccagagagacgcagagtaagacgagcgacgtcatccttctgctgatcgatgagactagaaagacggcggttctcacgcttatggttctcgatcttgaccttgagttcactggtttctttggtgagttgttcagcgaaggcctggaacttgaggaattgttgcttccaggtctccagctcctcaaccaagaagttgttgcgcttggtgaccttgcccagctcggtatccatgcgacccttgaggttaatgaaatcttgccaggcttccatggcgtcacgagagtactggttacgctcacggacaatctcgttcagatgtctcatagacaccttggtcatgagaggcttcttgaccgatccgccaaaaatggctttcatgccggtgttgcgtccctaaagagtcagtttacagagactagaagctggtacggtgtactaaccaatttctcacacacgtggtccataacacccatgaccgcatcctggttccaccagctgggttcctcaacactctcgacctcacctctcatgacgatgatctggccagctgggatgagtttgccgccggcgtaaggcggaacggagatggttgggaacacccgacggggagacatcgccgttcaacgcctgcgtcaagcggttgatgaacttagttcgctggccggggttcaggatgttcggtgggctggaggtgagaacaaagttccggtccaggtccactaccagagcgtcggatggcgcgttgaaaagtgttcggcactcagccgtcacaccaagaatgtagggtccaggttcctgcacaaggtctttgatatggcgggcatggaccacaggtacatataagccgctccactcgtagacacgaacgcagtagcggatagtttcggccgcaatagtgagcatggccgggtaatgactgacaaagataatacggcgagtcggggaaactgcggcttcaattacgccgacaatgttggggatcgagagacacgtgaacaacggccacatcgagaagttctggaagcccgtgggggaggacgggaactggtagcagagcgcatagtccttcatgtcgatccggacaagatcattgaggcgaggcgcggggaagctgaggatgcgggagacctcctcagcgtggaacagattcgtggccttgttccagtggatccacattccacggagatagtcgccgagcaggtcgtacaacggatatcgagaaaggaaactcaaacagtatgggatccaatatgtctcttcgggattgtcgtagtaatccgactcggtcttcttacgcagctcgcggatggtctcagcacgcttctcatcggctcgcgaccagacgcggagggcaatgccgtatagggtgtgtgatgagtcctgctgcaggacgaaagcatggtggacacagtgcggttgattcttgccggtgcaaatctcgacatcatgaggaaagcaggcctgtaaacataggttagtctattcaaccgagtgtagactatcatccaaatacacaccctcattgctgaatgtaaagctttggcgatctcattgtcctgctccaggcggggactgcttcccaggatctcaggcagccaaaactggccgacagcgcccttcatatgaccgatctttccctgggaaggcgtgggcgccttcacccactgggcgggctcgcggccgacaccacataccatatacgcatgagtgagtgttttgggtgtgcgttgggccggtttggcattggactgggatgggatcggctgtgtgatacgagaatggagcgaggatgtacggctaggaacgaccagcgaattctcgccctggtcgcgcgtcgacgggcggtcgcgggtcggcgggcggaaagagtggtctctcagagacgcacccatattggcgagcgaagacggttatgcaaaggactgtatggtggtatcgcgagtatggaaacgcccgacaggaatttagccaggcggggcagcactgctgagggagaacgagagcgagagacgagaagaaagggaaggacaatggcgggaaacaaggtgcagcctaagtgaatgaccgggtgaaggctggctgtctgattgctataaagcgaagagcatctccagtccaacaaaccgtcgagcgagagaggtcggacggatatcgaagcaaaaaataccttgcttcagtacctctctgagccgccgttgaggagatttgggatggaaggggaaagctcacgaagacagagagaaggaggagtgatggtaagaggtgaggagggaagagccgaagcgggagggggcagtcaggaacaggaacaggaggtacaggaccaagaacagggggaaaagaggagaccacggcaagcagggagtcaatcttgtcctgggagagtttagaccacgggctaaggggcgcggatattaatatcagaatttcattatgataattataataatataattccattattactgagttcagtctaggctgcggagtcgtttgtcgttcctgcgccagtgctgctagagcctagtcagggacgcggtcatggcgagtgggaagctctgcagagaacgcccagccaagctgatatttgtggatcctgctctcaaaatatgtcacgaagtgatgtatatgagacggtctactgaccgcccatccttgagaccgtgagaccgtggaatcgtggattcctgaatcgtaaagtggaagagtggaagcttccacgcgatggcgggatcgccacgagcccgagcacggaccatggtcggccatggtctatggcaaagagccag

SEQ ID NO: 16097 - DNA, 414 bp, Emericella nidulans
gcactcgcggatcatatcaaggtcgaccgtcatttttgtaccagccacaaactgcctacagcttggaggactatactgttgtcatcaacccagatcatattcatgacaacggttatgactacttagagggagccctgcccaacaaacataactgcaattgaagcagcaggcactgactagtgcgcggtgggggtattctaacggagcaattcttagaccagcagacagcagaccatgcttgttatgatcctgcttcccggcctcatgccgaaacatcatttagaaaagtatgcttaaacgtagaccctcctgtgcgagctcgaaaacctgactgcaacatagggggcctataggctctgattgaggttggatcaaacgttcgaagacatgtttgttgcaactttggcagccggt

SEQ ID NO: 16098 - DNA, 1543 bp, Emericella nidulans
gggataggtgcgccagtcactgcccatgcaggtagttgtctcgcagaccgagaccttgagttcggagcccgacggctgttgatggctgaaggtcgtcccaggggaaagggatagccagaattaacaagcacaatagttggtacgtcaccagagggcatcattcagggttcatagaactattatgggaagttatctgcaaaagtagaagagctgttgatgggacgagccttgtgtcgctctgtacgaggcagacagtgtttgtcgttgttgtcatgtttgtcctatttgtcgtgtttgtcatatttactatgtttggctagtttgttgtatccaagagacgcggttcagcttatgtcatcatgaggagtgcccactggcttggtgctcgcaacacattcctaaaatggacggagacccgaggtctcgcaagaatgacagaattcggcactggaacagaatgatattcacaaaaaaggagttttgggtatatacatgtacgtaaatcatgactacaagattctgccacctagaaccaaggcagcgacaaggtattctcatagtcgatgttcacctcctggcactcaatgcggtcccgacacgtcccaaacaatcgatcccacagccgcgtctgcttcccgtagttcccactcgtcttccatccgtaccggtggtgcaggtcatgatcctcgatgattagttcagcattcagcagacgcagtgcccagctgagcgtgtttggaggaatggtcacacatcagattcggctgcggattgttcctcttgcccatgcattaatagataggggtataaatgcccacttcttttacagtctccttagggcatgcttttgtatctttttgatcgtttatgggataacccatttttgggcatatctcggttcttgttgtatgagattcttggccctctggtttcagcttcaatgtgttggttgtttttgtgccctgcctagtagcctttaataggcttcctcccctgtttggtcttctaaccctcttcctggtgctcaacattcgttggcgcttcaattgtgtctgaatatgggggcttttcttttttgggtattaatctcttgtccttcatatccatatctgtgtcttccctcccggcccgggtgggctgtgcgcctttttcttgtggtttactttgttacgtacctctttcgtgttccatcttattttttttttttgggtaacaactcaatgcccctcttttatctctattagtctggaccgcttgatgtctgcactctttattttctatccctccttgtaccgttgtgttccccactctgtggttctattctagtcctgactttttcactttactcatgcgtttaataatgatattgtggcctactcttggtttctttgctattccaaaatggtacctgtcttccttatattagagctttctttatttgtcctgcaaaatacccacattatgtatttctaagatggcttcttgtggtaatgcctacctactcggtgtgtatatggtaatgttcttaatatcatctttcttt

SEQ ID NO: 16099 - DNA, 1978 bp, Emericella nidulans
acacgagttagctgatcatgacatatactgtcgaaccctacttcaatggcatgctttgtactatgatggacgggctcttttttcagtttttgatattgctcaaagaatatgcagcggactatatgttgcttcctagataaacaatcatattctaaagctagagaaggtagatatttatcagaaaatatagttttccgaaatccgacgtggctacacttgcacataagacacctcatgcttagcaggaataaccctccaacaccaaccgcaccaacttcgatgcgccccttcttcctcacgagtgagataatcccctgtttcccgctcgtcctcatactccggcacacaagcacctaccataacgcgcttcttcgccctctgtttaacccgccctccaatgccgatgatctcttgccgtagataccccggctctttctcaccagggtcctcccatctttcgcccgggtggtcatgagagctattgtcctgggcaaatcgatgtccgaaatggtaaccgtactcgggagggctgtgtgacatggactcgtctgcctcacactctacttccagttcaatttcctgtgctgcgaggcagctctcgccacgcccgcatttgaccccttggcagccttcgccaattcctgttcctaagcccccaaggtacgtgctgtaccgcgtgcgccacgtccaaactcggcggtaggtggtatcgttcctgcgtagcttttgaccgcactggttacacaaccaaagcacatcatggcaggtacatgtatccctcaggaaaacagaagattttggggtatcggatgttgaaggtataggagcgtgcagagatgaggtgacaaggctgttcagtggcgctttacgacaggtcgtgcacagtcggcgaatgcggttcttcagggtcgcactgtttgggggtttggccgtacagttctgtaaattagcagactatacttcagcaagagcagtccaacatactcgacaaacaatcttcgagcatcctcgacactcggcaaccatgtcgcgagcacatttcgcgattttaccgctcgtgagctgtccagaattcagagcaccccggctcagcagtcggatcaccgacttgacactgtcaggaatggcggtgccgctgtgcagcatttcagaaagagtctcaatgtattcattctcgcaacgtagtgtctgtttggcgagctgatgccggtagggagccaagtttgcatagaactgacgacacgttcctgaaagggcatacagcgtattcaagtcaactgcgcgagcaatctccttggctatcctgggctgtgttagctgatcaaccaggcacataagcggttcgattcagcaatcatacggatagcagcctagagctactgagaaagcatcccggacagaatgctgctcagaagttggagcttccgatggagcttcagcagatttctcgggttcgaagccgacgctcagcttcgagaaggctggcttcccgggttcaatgtatggttgaaatgcatccgggcctttcggcacatggttgccgagatcatggtcatagtcaacaaacaccaccattttgagagtaaaatagttcaaagatagacaagcatagagccctgatcatgagccaggctgttccatagctttataatgagttcagtatgtatacttcgtgggatgatgcggttgtgaagcttccaggtccaggtccagctccgtcttcggcgtaggtggagctgtcgttcgtctcgggcgatcacaaagccgttgaggattctttcctcagcttgatgggttcgacgtgcgtgaccgatatcgccaattaaagctgtttcactcttgcgaagccggatcagttaactctcaaacttgagagctcgagatgaggagttgagaggacaagctttaagaccagagcgtcataggcaggtgcccaaccgcgtgatccgacgcttaccggatcaggaaggtacttcaa

SEQ ID NO: 16100 - DNA, 2911 bp, Emericella nidulans
gttgtgggaggtggttccctaatgtcttcaggatagcgtttgccatttgacgaggtgatcacgatagaaccaggaaagcaagcaccgatgtagagcttctcgagttcgtaccccatacttatctctgagcggatagagcattaagcgctataagtgtttgtactgttctcgagtgagagacgaatccattaacccgagggatgtagctctttgcggaaagtaacaagacggggtgaagaagtacataaaaagcgagagacgacaccggctacagactctcaaggtcaaacgtcttcgcgtccggcttccagatgcccaacgctgcgtctcgcttgatgaactgcccataccccttccggcctacaacccctccgttatcgcgatcccagacaacctggccgcgtagaacagtgtatctcggccagttggtgactttacgcccctcgtacggagtgtagtccgtattatgatgtagcatatcgttcgtcaccgtcaggtccagtttgccaggataccagattgtcaaatccgcgtctgaaacaccaggaatcagcgcgccctttcgggggtatagaccgtacagtttcgccgcattggttgagaaaacctggacgagctttgtgagctcaagctttcccgccgacatggcaaggggcatccgcgtttccacgcccggcaggccgttggggatgtacttgaactgccccacggggtgctcggccgtgatacatgtcttcttgccggactcggcgtcatcataccggaatggacaatgatccgagctgaggatggcaaacgtgccgttgtcgagacccgtccagatcgcttcctggtcgtttttgtcccgcggcggcggggagcagacgcactttgctccttcgaagcccggcttgtcgaggtcgtgccgggtgaggaagaggtattgcgggcacgtttcagctagaattggttggccaagggtttgtgcctcgcggatgcgtgttgtcgccccgacgtcgctaacgtggacaaggaggatgggagtgtctgcgattagcgaggacgctatcgcgcggttggtcgcttcggcctcgaggatcggcggccttgagttcgagtggtacttaggagcgaacagttcggccgcttcgagctggtgcgtcagccagtcgaggacctcgccgttctcagcgtggatcatggtcaggatcttgtttttgcgcgcggctaagaggaccgataagatgtcgccgtccctcagctgcagcgcttggtaagtcatgtagatcttgatggagctgatcccttcttcgcgcagcctggggaagtcttgcaaggctcggggagctgccgtgcccatcaggaggtgaaaactgaagtctgagtaacatcggccgtcggcgagtgcgcgcgtgtcatggaccacattcacgggcgttgccgtcgtctccttttgcaacggggcaaaagtgatgatcgtggtattgccgcctgcgatggcagatcgagagccagactcgtagtcatcggacgatgtacccttgccaaaaaggctaggttcctggaggtgaacatggcagtcaataccaccgggctggctgctggtcagtcattgtggccctgtaacggttggaggctccaacttaccataataaagccaccctcagcatctatcactctggtgccctgctttgccagggagccagatggggccaggagcgcgatcttctctccctgaatggcgatgtcgagaggcgctacatctgaagctgtaacgcagattccgttagtaatgacaaggtcatacatgttgagttccagacgatagtcagggtatagaatgatgaaagaggagagcgtacctgaaagccctgcagacaccgacggttgagcccctcacgatgatcccccctgggagcggggtgagacgataagggtggcctccaacgagggggctgtgataagtcgcctaagataagtgaacaacctgaaggagattacgagatacgaaataaagagttagcacgtgccacgctagataggccgtatcgtagtggggttggagtaataattgcttggagttggaggagtcttgacttcctgttcgagttggggctagaagcctaactggactcttatcgtccaacatacagattcgacccacgatgactctgcgcggctgagtcaacgatactctactgtatcgcaccgggagggtagctgggcatccagtcacccactgttcaatgacctggagaccagagtgccagccctcacgtcggaaggaggatttcagcgaataaactgtctatctgccttaacatgactgagcttatgatcaacagagggagtcagagaaggtctaggtagatcatggataaaccttcagctggtgaagacgagatgctcctagtaaaccccatcggcagagattaagcaaagaacgtattgacagtaatatgcggaacgcatgcgaagcagactccctgcagggtccccgtaggcttcaggagatgctccgcatgtattaatcatgtacctgaagctctattgagaaggagttgggtgactcaatggaacattgttctggtttaactatgcagaccgacaaccatggacgctgccgagttagagacgtttctcaacctgagatatttccccctcagacgagatagtggagacggaacccaagtctcacaccctcagcgctgctgggttttgaggggaagatgagtctgcactgttcttgtctttggtttatacccaacgctaacctgaaccctagcggccatgtcctcacccgaggacaactggcgatgtccttctagcgagacgtcaagcccccctatcccggcggcaggagatctggccggataaatattaacgtaagaagtggaattggacgtagctactaatggaattgcccgtttga

SEQ ID NO: 16101 - DNA, 528 bp, Emericella nidulans
gctggggttggccaggcgcaatatgcatttttcaagcccttgaggggcacgcacactatttttgggtgtgctgtgtacagctgtatcatgggccatgactgacaacgggaacgtaaaagtcgtatccttcatgcagggctcgcttggacacggggaggcacgcccctcggcgcatgctggacagccggcccaaaggagtgagtaagtgcatacttcccatagtacatttcgggctcatgcgcgacctggagcccgcactcaagccgtctgcagtaccctgctttgaatagggatagtcgaagacagaacgagtggatcgaagataagtattcgtgctcgcacttggactcataggagaagcttgaagattaacatctcgtcgacgagatgaagagggaaattccgaacttagactcgtatacattaacgcagcagctggaataccatcacagtatctcatgcgcgagcagaactagccgtattgcatgccacgcagtgaccttacttgagaaggtcattcacacgatc

SEQ ID NO: 16102 - DNA, 619 bp, Emericella nidulans
  unsure (1)..(619): unsure at all n locations
aatgactgtactcactcagctgcagcactggcatggccttactgcatttactgccccattctcagatggatccccggccgcaagccaatggccgattcccccgggccacttcttcgactacgaagtcaagccagagcccggctctgcagggagctacttctaccactcccacgtcgactttcagagcgtcacggccaagggtcctctgattgtcgactcgagcgagccggctccctaccactatgacgaggagcggacggtgatgatatcggattacttcagtgagcccgacgacgaaatcgttgatggactcgtttctaccaacttcacatggagcggcgagacagaagcgatcctggtcaacggtcaaagtcgacctgcgacgaatgctaccggtgcatgcaagttggctgcgatctccgtcgaagcaggaaagacgtatcgcctgagattcatcggcgcaacggcactctcctttgtttcgctagcgattgagagccaccatatgcatatcatcgaggcagacggccattacacnaagccactggagacangacttctgcagatcggcagccggcagagatacagtgtccctctaacagcgaagggtgaggatgag

SEQ ID NO: 16103 - DNA, 681 bp, Emericella nidulans
ctcgggactcttgtgtctcgtcggggtggcttaggtcgcgatcggatcggtaacccgaaatcatcgaattccagtttttatgcactatcttgacccgcggtagggttgtccaccggcacaccctggtccggagtctctctatccctgttactatcgttcttgggcgcattgacatccttcggcgacggcttgtgggaggaaaccgaagtacgtaagggttgatcgacagggaggtcgtcaacgttagaagccggaccagagctcattcttcatcgagagaaatcgagatgcagtcttctaggttgctctaatcttttgtttttcccaattggtacccccgtctgacttccgagaaagagacgtatcatatgacccatccgcgcaaacgaccaccctgaagaccaagctcgttcgtcggagatccagctctcttgggttgacaaatgttattgcagtatacggcagcgagcccccagaagacccgagtaaggtgttcaagttggagatgtggatcgggaaaggggtgggtatgccgtttctgaacaaccaccggcatcataagcaaggggagctttgaaagaagcttgggccggttatgaaatgcaaaaaaaagggttattgggtgccgggttgcaagaccttccttcttttcaaaaacccccccagggttgtaggtccaac

SEQ ID NO: 16104 - DNA, 3125 bp, Emericella nidulans
atgctgagtctttgcccgccgctcgattggtccctgagagccaaagtcactctggtggctgatacgagtcttccagtcataagcagccggcctcccttggcacgtggcccagaccaccggagggaagccagaaggggtaaaggctggacgccaaggtttctgctgagactgtcagcttttgcaattagcacgcattccgctccttttgctctacttccaaccctgccataagcgaattcttgattaagaggtaagctaaatggaccgagtcaaagaagagaacgaaagggcacacacgcggtgcaagaattctttgtgaaacagaaccagtgaaggtaggtaatgttatctttaggctaatttacgcacgaagctgacggcaagcatcaggatcctttaactttctcggccgtggggactggtgcttcgacaggtgcgtatatcgcgcgtagctggagcgcgttcgtaccgtggcttggcctgacaagtgaccaagttgaacattccaatccaccccacaacgcccagctcggctaccccagacggttcccaatgtttcgacatttcaagggctggtctccttccgacctgtcggataacccgttgagcttgttcggaacgagagctataaagactgggccagctcttatcttcgtcccgcttgcctggctcacttagaactcggctttccagggaccctatttcgctgcattccaatccgtcgcacagaatggcaaccacctcggtggctgacgagaaagccatgtcgggccatcaagagaacctgaagccggtcgacgaccctacacaatttgcccaccgtggtcaagctgccacggatcagtacggccatgcgctcttcgaattcgataagaaggccgagtcgaggctgcgctggaagatggatttctatctcctccctactgtcgcgctcctctatctattctgcttcattgatcgtgcaaacatcggtacataggtcgctctgatatcaaattactggcccccgtgactgaccggatcctaggaaacgcccgcctcgcaggattcgatacagacctgggtctcaagggaaatgactataacaaggtcctatcgatattctacgtctcctacattctcttcgagattccatgcaacctttgctgcaagtggatggggccgggctatttccttcccctgagcacgctctgctttggagccgccagcgtggccacagcgttcgtctttcctgatatccctcgcgatgatggcgcgctgatcaattgatccgatacagcttcgttgacaacatccaagaggcctctggagtccgatttgtgctgggaattttcgaagcaggcatgctcccgggtatcgcgtactatctcagtcgatggtaccggcgcagcgagctggctttccgtcttgctctatatatcgtcatggcaccgctggccggagcttttggcggccttctcgcgtctgcgatcctgacgctggatcatttcggcagcctgcacacgtggaggatgatcttcgcaatcgagggaatcgtaacttgcgcgctcggcctgattgccttcctcacattgaccgatcggcccgagactgcgcgctggctcagccaagaagagaaggatctggcaattgcacgactcaagtccgaacgtgttgctactactgaggtaccctcccctgtacaggccggtgtccagcggagttccagctaactcggcacaggtcctcgacaagatcgacaccaagaaactgctccgcggcatcttcagccccgtgacgttgtccacatcgttcatcttcctcctcaacaacatcaccgtccagggtctcgccttcttcgcccccacaatcgtgcggacgatctacccggacgccagcgtggtcagccagcagctgcacaccgtgcccccttacgttgtcggcgccttctttaccctcctcttccccttcctcagctggcgcttcgacaaacgcatgcctttcttcatcgctggcccaccccttatgatgatcggctatatcatgttcctcgccagctccgacgcgatgacgcgctatggcgcaaccttcttgatcgccagcggagcgttcgcgttcggcgccctctgcaacgcgcacgtcagtaacaacgtcatctcagatacggcgcggtctgccgccatcgggacgaacgtcatgttcggcaacattggtgggttggtttcgacctggtcatttttgcagttcgatgggccggactaccatatcggaaatggcctgaatctggccacgtcgagcatgtgcttgatcctgagcgcgctgctctggatgtggatgaagtgggataacaagaagcgcgatgataccgatgtcgatgcggcgttggatgggttgacgcagaagcaggtgcaggatctggactggcggaatccggccttcaagtggcggccttagctgcaaagtatcggtactcctggaatttttggtcagtggtatcagttcggtatcagcttgtgctatgttctgagaaagtaaatttaaatgggatttggatttaataaattctttttgctaggtaggccgaattgattatcgtcacatcgaatcacatcacgtcacttggacacagcaaccaagccttgccaagtccggagacgccgacttgacaccgacaagcctgagcctgggctgcatgtgctgattataattctgaacctttcagatggacccatgtttttacttattttccctcgttgtatgcgagactttccctcccgcgactcggctgttctccgaacgcagctcaatctgttgcgtaagcactttggatccttctccaactcctacttcgtcaccagccatagaatgtcactcttttcctcttcgcccataggcgtagccgtgcgaccccgcggcgccgatccacaccttgttctccgcgtctccggagtttaccctgcgccaatcagaccggggcgaatgcggatggcgttactccaggatttcacaccccctgctcggtcccagcgacggacaacttccgacgacactaggccgggtggactggcctggttggagacggctggtcatctggccggcgtgatgctacgctcgggttgttagggttggttgtcgcgctgttgtgt

SEQ ID NO: 16105 - DNA, 3558 bp, Emericella nidulans
  unsure (1)..(3558): unsure at all n locations
gctcatttgccccacagctcccgaggaggccgtgaccacgcagccgacgatagggacgagccagacggcagtcatggaggagagctggatctcgtcggtcccggacatcctggaatagattagccatgcccgctacttgttggcgttgatcatacagcaagaatggtagcgataatgcagataccaccgagatcacagcatcgatgatccagatcgtccaggcaaaactggtggcccattcaccccacgcaggcacgcagacaaagcagaacatgttgacgatagtcgctaggcccattggtagtgtgccgatgaacatggactgcactgggtgcgagatcatggccctgaagatttccgggtagaggatatatcggaggaatgagatgatacatgctatgaggaaaagaagaacattcaaagcaaatatgacgatagagatccagtacagccagcgcgcattgtacggcagcgtattcaagagggtagacaccataccggtgcccatgatgacagagaaccacctgccaatgttagcacttctgtctcagaaatatggcataagtggcgtacgaaggcgtaaaattccgcaccaccattctccatcccacatcatgcgtgcctgtgcagagttcgtggtcctgatcctgatcatggttctcgacagccatactctccgtttagctatactccgtacgttggacgggctcaagggcaggttcgttctcggcgcaagccaagctcattccctccagttcaaacaccgatccaaatcaatggccgtactgtgtcggctgctctgcccggctgctctgccgggaactggctcaggatcaggcccggcgtctgctcggtcaagttcgggtggtccccggtgaaaatttggtagacgggactttgggtggagtccaccgtaaggctcggcgccgcgatgccattttcattgcaaacagaatgaaaaagatttaattttagagctttgaagttgatccaacggtatgccgtacgtaaaaggcgagttcgtgagatccaaatccagtctctcccacgatgaatcccccgctaggctagtggggggttactaaagtagacaacccaaaaaccaacagcgatcggctttatccaatggcgccagcggacaccgaaagctatggtgcaaacctaatgctgacatcagtatgcaaattgttttcaacaaggctgtgtgaggaacaggaaatgatcagccagggcatggttctgcagagttccagaatacgaaccggtaagcctgggcccttggaccacctgaaggacgacagatgcgtgcgcatgaccatagacaagagattagagacgatcagggatctttagtgttctccgcctcgctgtcgttcaacggtcagcaaaagagttgggcctgtgtcatctcaaaaagaacggtcagtgggggagatgctttctttaactgatagggactgtgcaagcctgaggtcagcaagcctttgacacttcattctgataactcgcctcaaaaaggcttggctatagatcatggccaagctgaagctgctcgcgcattgctctgagttcgggtggacttaagaggcatagaatggactgcccggctctacaaagcatccacaagctgtatgcatcatcaccgaccaagcagatcaaaattccagctgttcgtatgctgcaaggtcagccatcgccgctcagctatctggagcatcaccggaaatcgtctgtaagaggtgcgaatacgcccttgctcgcaggcccccgacgctgtagctgtgcttgctgtattgagctctccccaaccaaccctaagtcgtcatcctggggctccgctgccaagattggaatcctagagaatccattatactctgatagagtctcagaaactgtccagggcaagggagaagtaagcacggccgagaaattgttcagtcgtaatcatcgtctcatactcggtttcggctagaaagttccagtacggttaanaggaagtcctatgcgtcgcaagcttgcttgagtaaaggattaatcaagttcaatataagcaaaacagagccaaactttagcggctcgtgctgcgcctgagtgtttcatgcttggcacgtatacagctccagctttgtgacggctaagcatgtcctgtccccataggtagtagatcgttatgtctgtagggcagtagtatcatcactacccttgatctttcgcttgacccttggaactgccctgtttgcttggccgttggcctaaaacgcgcaatcgcgtttctagaccgacagacctagtggagatcaatccacctcagaactgcggcagccgacggcttcaaaatagcgcccaacagccaataatatcaacgcaagctggacggattgagctccatggaggagctattaagctttagagaagctcgtctcaactcttgaggaataacatgccaccgacaggcgggccgctctcaagctcaaacagtcgtccttagtaatttccccaatctatggtaagaggaaaaggatgctgtatataagaaagacgacatggccggtgccgacggtcgacccggtataagcatcgcatcatgtacgtcagtcgccttttgctctttctggcccctttgctggtcaagggtcagctctctggcagcgtcggtcctcttacatcggtcagctccaagagccaaaccaagacctgcaatgtcctcgattacggcgccgtagcggacaagtctacggatattggccctgccttgtcatccgcctgggatgaatgtgccgacggtggggttgtctacatccctcctggcgactacgcgattgagacatgggtcaaactgtctggtggaaaggcctgtgccatccagctcgacggtatcatctaccgcaccggcaccgacggcgggaacatgattatgatcgaacacacctcggacttcgagttcttcagcagcacctccaagggcgcattccagggctacggatacgagttccatgccaagggctcgtcggacggaccacggattctcagactctacgacgtgtcggacttttccgtgcatgatgtcgccctcgttgattcgccgctcttccacttctccatggacacctgctccaacggagaggtatacaacatggccatccgcggtggcaatatgggcggcctggatggaattgacgtttggagcacaaacgtctggatccacgacgtacgtctgattatgtctgatacccgtttgatgtctccatgactaacgaaggcaggtcgaggtgacaaacaaagacgaatgcgtcaccgttaaggtaggtaattcatgcagaacatagtcccttcgacgcccggtctgatcgcttgcagagcccctccaagaacatcctcgtcgagaacatatactgcaactggagtggaggctgtgccatgggctccctaggcaccgacactgatatttctgacattgtgtaccggaacgtctacacctggaaatcgaaccagatgtatatggtcaagagcaacgggggcagcgggaccgtgtccaaccttgtgctggagaacttcatc

SEQ ID NO: 16106 - DNA, 387 bp, Emericella nidulans
gatacttgagacatacaaactccgtactgaaagtcacccgaagatagctagtgtagattgtggcttcaaattaacagaccgctggcccataaagtagacgtgaggaggtcatatgctcgtcaagccacactgagagctgggatcctgggaacgcgagacggagaccgagactactgcgatcatagtgatggataaagatatgcacatctggtcaaaagatctatgattctatctgacgatagacaagccgtgatgtatgtactctatgtgaggagagtgatttagcactgagcctttacataatacacgtatatcatggcttctagtaagctatgacttttgcacaattcatgacaaaccactgacgatttggtagaactgagcagc

SEQ ID NO: 16107 - DNA, 492 bp, Emericella nidulans
cgagctgctttcggacgactgcacccacagcttatagggcatatcgaccgcgcctgtgcggtgcccatgcatattggcgcaacaggactctagcaagatcagacgcgccatcctctagaaggaagatgaatcgcgagatccaggaactgacggcacatgcacgaggattctgctgcttcgcctgccttctccagcgaccaggcacagacaaatgagtgatccgacactgcatgccgtggccccggctcttgtacatcaccagggggattcgtggctcttggctggaacactctagcaaccctgacatgttaagagcgccgcaatacacgccaaactgaagctctacggaagtgacaggactcctaccatggacatgaacataaacggtgagaccttacaaatcgggattattctacgattactgagcacgcaccatagcgcaatgtgcgacattgctgctgtatcggggcagtacccacacctgagggcaca

SEQ ID NO: 16108 - DNA, 1933 bp, Emericella nidulans
ctgttaacagtggtcttgtcagccgtccgagagggttcgggctcgacggcatcatgttcctccctcagcgaccatacctgagtgtcggaacccttcgagaccaggtaatatatcctcacactgaaatcgacatgcgagatgcaggtgtctcagaatcagccctccagaaaatcctcgatgatgcccaccttggctacctcccttctcgcgaaggcgggtgggactcacgcaaagagtggaaggacgttctgagcggtggcgaaaagcagcgaatggccatggcgcggcttttctaccatgaacctcgctatgccttcctcgacgaaggaacatctgccgtctcctccgacgtggaaggactactatacgaacaagctaaagaacgagggattacgcttatcaccatctctacgcgcgcctcgctgaaaaagtatcacaccttcaatcttactgttggtgtgggctccgagggggagcaatggcaatttgaaaggatcggaaccgccaaggagaaactcggtgtagagaaggaacttgaggagattcgcaagcgtctcagcaaagttgacgaatggaagaaacgacggcaggagattgaagacgagctccaaaaggtctgggtcgatcatggagagcttgcaccgtcttcatatgaagaggatttcaaagcggcagaggatgaggttgaagtagctggtaactaggacgtatctgaatggaattttataggaagtatatgccatgaaatctagcatatcttatacaagcagtttttgtcccatctacccttgttgcatgtcacgtttgccctctccgtatcactgctattgagtcacgtgattgaggccttcgtctgtgacgaggcttcacttctcgattcaagttcgatataacaatggcaaaagacttcaccacattttttttcacaataatgctctttttatcctgtttctcttctaatgatgatagaaaggacttgaaagtaggattttcacgggtttccatcttgtaaatccacagatctggcatccctcgaacacgaattaaatatccaacaaacatcaaaactcagtaccatgcagcaaggctcgggagaagatgatggacacgttgtggtgattccaatcaatcattcattcagtgatggtgattcgtcgacgtggcctactgaagagaggttcggaagacccgatgatagctactacaggcagaaactcgcagagctgtggctgaaggaaaccggtgcttatgcatccggtaagtatgggatatcttctcagattttaggagtatccctaaatgttaccgctccctttgcccatgcaactctccaattcccggtttaaaaatatgttgtattttccacaactacatcggaaaagtttcaatactgctattggtgtcgctagagaaccttgatatggactattgatgctgacagctccaggtgtgactgccttcattgatgaattgccagacggctatgcagttttcgatcggccacgcaaatcggatccaagtacagtgagttgttcagaaactttcagaaacttgagtatattggtgagctaacccgggtcacagcgtgacagattcctttatggtcatccagttggccagtacttttcttccacagtaactttcttcccacatttctactacctaatgacagggggcactacaaaatgcccttgtgaactatgcgccaagctagaaaaaagacagaaaggtttgagtctcaaagaatgtaccatgttcgaaatctaacaatttcagacgtcgctacgggaactgctcgacgcggtaggcctcccgggagacttgctggaagatccgctgggaaaccgcctgggacgccaaatgaaacgccatctggaagacacccaggaaggcccccaggcagtggcaggcctcgtggtaggccgccccttaa

SEQ ID NO: 16109 - DNA, 466 bp, Emericella nidulans
cgtgaaaaccccccctggaaggccaggaacgcttgctattgcccacctgcaagagttttttccagtgcgaatacatcaagctaacgggggccacctgtaagtagggtgcgagaaggatacacctttgaccggattggtaagtattgccactcctgattacgtgaatgtagtcatcatacatggctcaggctaaggaatacacacttggattgcaaagcccccgctggcctcttctatatttaagcgcactccgtactggatattataaggttctgctggacccaatactctagatatgtcgaccatggaagtctgcatcccaatatgaaagtcgctttcaagggcaggggaagcgccagaacgttttcgctgaaagcacactgcatatacgacacgggcacctgcctaatgcactcggaaatcatgattgacgggtgccttgccacctcaacattttgtgcatcat

SEQ ID NO: 16110 - DNA, 973 bp, Emericella nidulans
gatgatgaaacccttcatcccgaaagccaggtaccgcaggaattaggaccaactgattttttccgcgaaatcttgccaacaaaaaaaaaagaatgctcggccagacctgaggggactagatgcgcttaatgttgtgtcgcttcatcttaccaaaagtgggcattctaagcaagaatttgcggaaagctgataacaacaaaaaatgaaccccatgattttttggatataacttgaaaggtcgctgcagaggactagagacataaaaccatctttcccatcaattgggctgtagataccccggggtttccgcgtgaactgtggcctttatgcatggtatgggcattacatagtcattaattcgaccactcctttccacaaacccaggcccacatttaagcgaaggagaaggccaagagttgccaagacccttttttttgtccatgggcggaccgttggcccacaggaacctggggtttttttgcaaaacctgttattttaagggtcgggatttaaatcgtcttctcttttctaaaacctggggaagcatacctagtgttggggcctcttaccatctgacacactccgctcaaacctattctatgccccatacagactctttacaaccctcttttttcactaatctaacagctctccttttctataacaacctctcacacatttgggtctagccttattcccttcccttttcccatttccttttgtgttttctgctttccacctcccaatctttcctttctatcccttccccctcctgcacccattgttctcttactctccttcttaatatctactctattccctctacctacctaacccttctgttctcaccttcttcttccacatttacgtattaccttctcccacttatatctccaccatacttctctcctccacctttattcacctcctccttatcattccttccacgtcattcctttcatctcattcctcc

SEQ ID NO: 16111 - DNA, 889 bp, Emericella nidulans
gagaggactattttcggattaccacctgggatcctagcgatgtcctgagatatggactgttgacagaagcctattattatggccgagcatgcaaccgagatcctcgaccgacctggctctaaaaagctcagacataacgcggcgaccgactacaatgtgagttataggaagcgggcagcaccacgtaaattgtaaccgcacctcttcatacctgctagtgacgtgaccatgaagctgactggagggacagtggccatgatcaatcataatgtagttggctttcatttcagtgcctcgatgaataacctgcgcatccttttcaagaaagcgccaaagtcgcggtcctcattcaatatgtctaactcccggtccaaatattccctatccaacttgggtcgtgaatggaatacttcatagtcgcggctggaggtgccaagttcaaaccatgcttcagcctcccaatccttctccagcagatgactataaacgaacttcaaccgatcttctctacccgcaccttcaattcgtaagcacaaataatcttgccaaaattcaagcctccgaacgttgagacgcccctgtgcgtcaagatagcgagagtgacctctttgcggcttcaattttgattgaaggcttagtgagttttctaatctgttgtttaacccgtcgctttcgtgagacggaagtccgtctaccggacgatgaaacgcagtgggcttccgcggatccggggcttttttaaagtctggtctggtttggaataaattggggttaagggtctgccctaacgcaatcctggcaaagttaatgaaccgttttttaatttactaaaaaaaaaccccttgtgttaagaaaattgacaatcttttaaaaatgttttctacgaaaa

SEQ ID NO: 16112 - DNA, 491 bp, Emericella nidulans
ccaactgcgagggccactcaggggaagaggggaggcggtcggctattatgaggtaagcagcaaaacgccctcgacagtgacgcttgttcaggtgcaaccctggattcgttacaaaagcccccaggctgccggctgcgttgcactttctcggcaccgaactttgagcgagggcgaggatgaggttgcattcaaactctggactctggcaactctgggtccagggtctctatccctaattacttcctgcactcaaccacttctgactctaactattgactcttgaagcctctgcaaggcgcacgtgaaaaatcgaaagggatacagtacggccgtgactggccggcaccgaggatctctagttctcgacaaaggaacgacttttgggcgtcttcgcagagggtgggatccgaggatttcacgcaccacatacgcgatgacgcaactgtgtgaaccgatcactggggtgcgcacactacttgagcgccacaaca

SEQ ID NO: 16113 - DNA, 266 bp, Emericella nidulans
  unsure (1)..(266): unsure at all n locations
caaaatagcngctatnactacctaccacgggggggcctttcatgagcaaacatcacaggagtatactcccgcctcgcgccagagcagcggatgaaaattatagtggtggaggagaatagccccggggagagatgctatatataaaaggcccgtgcgcctgcgctagacttcagagttcagctatatgagacatcaagtgtcaaaatgcgaacgacacacacagcggcatagcggcacagcacaggagcactacctcgcatatggtc

SEQ ID NO: 16114 - DNA, 5291 bp, Emericella nidulans
tatagaatgatagttgaatagtaaaaaaattgagaatgtattaataaagaaaagagataataggaggaagagagtaaatagaacgaaagaaagaataaataaagaaagattggaagaatggaaagttaaagggagaaagtacttagtcgagtcaaagaaagaagagggattggattataaacaatagaaagaaaaggaaagaggaaagagaaaaaaaaaggaccacatttaaaatacaagaccgagctttatgggagatgataaggatataaaaaaaaaggacttagagaatgaaagagggagcttttcgagatcacaaagaaagtgtccctaccttcaacaaaaatcctaaaactaaataaccgaccaagagccgctagaacgttaaaaaacggtgtacagcccaaagaatgagatcctccgcgatacaacacattctgaaccacatggcccttccttcccggaggacaattccaactccgggaccggcaacgaccaccgacagaatggaagtaacgagccagcgcagaccggccccatggtctactctcctacgaacttttacagcaacctcgtacttgagggccagtcagcgcggttgcatcgagtaacgtactgcaaggagactgggcagcggttgctggatgcgggggcgacgtgggatcttatccagagtcatgagatgtttaaacggggacttgtagatattgcggcggtcacgaggaagttgaagactagtgcgcagtgtgatgggcagggaccggcgtttcgagagagtgttgttagacaagcaattgaggagagtgtggtgcaggacccggatgggttgttgtgatgtgtgggtggcttcttggtttgaacatgactcataactggctatacatctactgttgagctggagtttgatatgattgtgtggtatgcttgtctttttgcagctcttgggcttggatattattgcgcatctttgtggacttgtgagcgggcgtgatgggtttctcgggccactcgttacttgtgcttatagtcggtttgacttcatacagatatctgcccttaggatttggttagtatcgcatttgatggagcggcgctaagtttcttggatcttgaattgactactgatgttaagattgcttgtacattgcgcgccatgcgtaaagaggtccatgggccgccttcaaccacgcaccatatccaacataagtgatttggcttgaccgtggcttcgacacccacaactcagaccgctgagcggtcgtaacgaactcttcgcagctgtacccgattccgtctgtatgtacagactaggctagaccaagtagccttgttgaatttggaggtcagggtatgctcgggacgtcaggataagcccctcacccaccgtgagacttctgccttagacacgtcgatcaatcccagtcatcatcatcatcctccacagtaacgcccttcctaatactagacttcgttttgaagttcgacggccgctcatcctccgagtcatcgtcagccttcttcttcagccggatgtcactctccttgagcgcaccaacttcaatcaacatattctccaggtctacaaactcaattagcatcacccagtaaaaggattagagtagtagaagatatcgaaaacataccctcaactctggtcgccgcccccttaagcgccataagcgtcacatattgcttcacaatctctccatccttatacaccaaaatcgtcggtgtattccggtccggatacccttcaatgcacatatttccacgcatttcacaaaacttgatatccccatatttggccgcgagctgtctccatatctcagagagccgccgcgactcaacgttgttgctagacgaagaggtgaggttcacacacacgaagcacgactttgacgcctcggtgacttcgcgtgtgaagtctggcttctgcaaaccgtagacctgattgtggacggaggactgcgttatattacttaattccgcgaggcgtttttgactgtgtgcgtgattcctcttagctttctccgcgccaaatacggggacagagagaagtgatgctagggcaaggacggggacagacataccgatactggtttagaaaggcctcatcctcaacgtcctctaattcgtctagttcatccaagtctttatcctccaaacggttctcgtaggccttgcgctcggcttcgacgagggcttcttggatcaacggctctgggtcttgcggcttttccgggatgatgccatgcttgcggagaatgtcgttcctgcattttttcagagctgtcaaataaggttgatttgagttgcgacgtgaccgcgcctgaaagctgaaagagagcggggacgaaccattctgtgtcttcgttggggtcgacttcgacttgcattgttggggaccaggaggaggggggggattcgcaagggactgagacagtgtatagctgcaatgaatatgtttagcccggatatggtggattcaacggcgtggtgacggaggagtatggtttgggatttccgtgcagatgcgcagaggggtaaattgataaacctgcgaacgtcttggcggcgcgggcggtcgtttatatagctgcctacaaactgctaagtaagacatgatttctgatggcattatattataggtataataattactgagggatgttgagggctaagtattgataatgttattgatattggtttgctggaattgttcctgaaagctttgggcacagatatagcattgctactctgtatagttcgaactttccaaccatgctgggtagaatcctctgattatgctttcagtaagtaaaatgtgatatctgcataatgtgcatcatgaatagcttttgggcaaaggtccaggtacgaaacaaaccgaactccgtcgtaaaacctcgaaacaaaagagaataatgccgaatgccctccgaaaacctagtccacatccatttcgtcctgcgtagtcccatccaccaacaatctggtcttcttcttctgccggagcctctcctccccatgcactctgttcgcgaccttgacaccttcctcggcaagcgacctcccctcttctctctcgcgaagttccttgcgaataagatgctcgccctctgcaacgaccttcctgtcctcctcgcgcttgcgttcccgcgcaagtttgcccgccagccggcgcttcgtaaatgcccgctcgcggcgcgctgctgatctcttccacccgctccatagcctggacggtcgccgcgacaagatttcggtcgtacttgacagggacgtttcgttttttggcgaactgggagagcacgagcgatgagtcgacaatcatttccttgccgctggggtcgcggccggccttggtccatttcagcttgcgcggttgtctcttcagtttgaagttggcgtgacactttgagcggcagaatcggaaggctttcccgtccagtctaaccatctggatgcccttagagggatataccgggcgagagcagaagtggcatgtttcaattctgtggtgctttagtagtgtgctttgttggcctagggcttatagtataaaatagatttgaaagactaacctcatcttggcagccttttatctctgagaaatgataaaaggataccggtatagcgagagtgagtttggatgtttatccaaaagtcggggagaaaatcatatcgacaacagaagttttgaaattctgccggcgctaagcctcattcggcctcgggggcggcgttccgagtttttatctcgacggctgctttctctcccaacgtcactccaatatagctcctgctgaatactctttgcactcaattttactcgcatcatatcgtccaactgactgagatggcatcggctctcactcttggtcttggtgttgctacggccgccttcttggtatgaccggaccctaggcgcctcctccgctggccagtactaatcatcctgctagggccgcgctggccttgtagcctaccgtcgctccaagggaggtgtgaacgccttaggcaaagctttctacaaagggttcgtaatgaaactccagtgacatataaggaggctaacgtcgctgcagaggctttgaaccgcgcatgaaccgccgcgaagccgcgctgatccttgagctcccgtacgtctaaattcataggtcaaaacatgtcagaatggtgctgatgggttgaaagggaacgtacccttaacaaagagaaggttcgcaagaagcaccgtcagctgatgctgctcaaccacccagatcgcggcggcagcccctatctcgcaacgaagatcaacgaagccaaggagttcctagataagcacacttgagttcgttctgagatggtttcactacttggaactggcgactgcaattccaaatgggcaaccggccgagggacccgggttgagattctgatacgacccagatcatacttcgtgtacaaaatgctgtttttgggtgcatagcgtggcgttggatggatttcgaggatagagtacatatactacttcctcgtctctttggagttgtattgtatatattgatgaatcgccgctcttgaattgatactctcacgcgtttccttaggttaccgcttaggataccgtaaggccctgtacatggaacaatcggaaacagtaggatgaaagagtcacgttacaacggcatggctgacgtgatcgtctgaagactgacggggttaacactactaacactacctacagagcacttagttcagggatccccgtctctgagccacagtcacatgccacagtgaaagtttatcttgtcaagctcataaaatagtaccagattgcccaatgcgctgccggggccggcctaactactagggaacagagcggaaggtcgcgggcccgaagagcagcgctcggcgtttcgggaatatcggggtccgttattcgactcgtacatcgtttagggagcttcaatcaggatggatgcctccgagatgtgcacactagggagcttggcctcccggcgttaaaggagtggtttagttgtgtcccagcctaaggcaacaccgttacgttcgcttgtttctttgctccgtcaatttgtctgttatacttgtaacgaagctaggccaggtcaataacaattgtcttcctttctctgtactacatggccttagggtaatcttcttccacgtactcgtcttctgcctcggtggtcaaagtgtggttgccacgtgcctggaagatacagtaagtccgcatattctgtccccccatgtcatcaccactttttgcccccaatgctgac

SEQ ID NO: 16115 - DNA, 1008 bp, Emericella nidulans
  unsure (1)..(1008): unsure at all n locations
tctaatcggctaccaccatacttatgctcccgtacgcaggcctcggggtcgcccagcgacgtnttcctattccacccaaagtacgttacctggaacgggactacaatcatcaactgattggcatccatggggctatgaatctggctttctgtgcggtttacaatcgagcgggtgggtttgagatccctcctcggacaccgattctgtccctcccgaaagaagcatccaggctctgcagacggactgtaaaagttctgacaggctgacacattgattggatgacgggggcggtcgtgctactgatttctatgtgtttgcagagggaaagataagaaaggacaaacatggctgctttaccgggtcatcagcccctctgtgaccgagaaacggttcccacagcatgtagccgtaagatgagtagtccctttagcacgcctgcagggattcctggatctgccggcccgccttgtccgttgcctgtgatctggactaagcccggtggatgctttgcaagatcttgcggtgctatcggtatgtacagaaattcagtgcggttcacaaccgtggttgtaagggacagcttggcttcaaatgtgttaattccgcttgttcggttggatttagggttactcttcgcaagcgtgatactttccgttatcttggggatgctctccttatcaatatgttttatttttcttcacgtgctcttccttttcccagtgtttgttaatattaagcgtggtaaaaacttgccctcttttgttcacctcgggcttagtttttcaagtctcccttctctctttggtttatttggtaattcccattaatttattccttgtttattgggcggttaccttgatcattcctttttcatatcatatagggttttaatgtctctcttctcttctctgttttgtgcttttatattgtttttcttaccattatattcatttatattataaaactcttttttcttctaaaatttttgtttttgtcattctacttctg

SEQ ID NO: 16116 - DNA, 4283 bp, Emericella nidulans
gtccctgggtaatgggcaatggcaatgaatgcagacgcgtaagatcaccatatatatcaacagtaccgatccgaggtccagcaataaatacaattcagaattggtaggtattcctatccctctatccattgaatatggctgccaaactagtagccacttatgaaacaattgaacaacccaagtttagacctatacgtgcaaggagattccaaccgaggcttttgggacgctcactaataatgtccgtctcatactgacctccgtgtccagcagcacatggggttgtactggagacagcaacgacctatgtatcagatccgcaatcgagttgactttgtatgaagccttgacaggtctacaaagggcgaacaagtatagatgtgtataagcctgtgagactgtaccatctaccacgtaactctgaacatgaggaacgaaggggttgggtattctattctggacagtttatgtaacgcaggctttatggagggagggaagcgtgtcgaatagaacacatatcccggtctagaaggtgcccagaacaatagtcagacctccatcaaatcaatataagagccagtctgagagccagtctgccctcgacttaatgaaaggggggcttgctatggataagcaagagaaaatgtatgaattctttttatccgacccttatggagcagtgaaagaagagagcgagtctgggaactgttagcgggagtgaggctcggctctccttgaaccttgttcgtttcctttccttccccgctgggatttagaagcgaccaggctaaaggtccacagccattaccatgcccagtctactgggtcactaggatcacattccttccctggaaactcagcaacgaacagataccgtcttcgttcacatccagcgcccgagacagagtttcacatgctgatccgacatcagcccgaacagatcaaaaagaactcttttgagtgtgggtgcgaaaccgtgaaactcggagtcgctgacctgaccggacccgagccttgacccgagcttgatctgggctggctagctctcacgaggtcggcaatcccgaatgtccgttaaaagaatcgttggatgaatggctgcggtgatttggaataatgagttggcatgcgagtggccgattgcacaagacaagccagggaatcacaggcccataatacactcggccgtggtttggcaaggctcaaagaaaggtaggcagggcaaggcaaagcgtgcaagccacagtggcacctttgcaccttccccgtgccacgaaccacggagtcgggattctgcgtagacgagatcccaccatgattactgctgcggtggctcagatggctcttctttctttgttctcgttcgcgtggatggctggacgtttgttgccgagtcgccgagaaggaacacgctagcttgcccggatatgatgtccacacaatgttggtggcagattggcagcatgctgctggggaccggaatggcggggtcgaaattatgctgctgccttctgaatcgtggctcgtgaggtctccaggtctgtggggaaccctgcgtctccggtggccatatcatccatccttggccgctggaaatatatggcaggagcgactatagatgtcagatgccgccactttcccaaaggagcctaaccctgagttctaattctgaccgccgaaactgaggttgagttaggtgaggacaagctcctgaagccgtccggggaagctgttatgtcgcaaataaatgactttccctcgccgagacatggccgagattcatatcgtatgataaccagctgaggccagctcgactcctcaagatagaaccaaacgtgcctagtgttgctcatcacgcatctgcatctgacccttcatatctcacgagtaagcccaggttgtttgctaggccagtgcagctcttgactctttggctcaataccccgcagcctatagcctatgggctacaggcagagctagaggcgatcccatcctggatcgacataagacggccttccgatttcccgtaggttggcactggaagacagacaacaaaatggtaactcctccgatagcgcctgcagaagcaggttagtcccgttccagatgtagcgcagaatgcaggcgggttctgacacatcccccaaccaacacgacaatggagcgcagtagctcatgctcctaagttctacgtagcttgagcccttcgacaatcatccttacgtcgcattttccgcactgacattgcgcaataagctgttagtctgatacgatcagcgacggaagctttcatgccggtgccgtcatggtgcagctgcgtcaggctccaacccgtcttggatgccgctaccgctgcagtgatcaatcagtcttgggaatatgcacccatgtccatgcagctcctgctgaataaaccatcaattgggatggagcggggtcaaccctagcaataaactcagtccagactcccgcctaccgtcaagtgtttgagagtcaagccacggtgctccaagctccagcctttggcatccggacttgggccataacctcacggggcccggtcgcggcagaaattccctgccgtcagcagtgttgtcatggtactttgttcgcgttctccgccgggatgctcggaatcccgcgggaaatagctcttggctttgctgaggatattccgtagagggctgcgtagagagaagagtcggaagatgccgactcacgtgactcggactgcgcaccgaccgatcaaggtccgtacagagctgcagtaagatgaacggcaacgtcaatgatcttcatcagacgctgggaaaaccccatcgattcatgagatcatcgtcgcaactccacccccccttcaatctccgttcgcgtcgtcgtatcagtgctaatttcgtagggcagcaagggtcggcagtccaagatccataatagggccacgaagcacaggcacagtagcgaagccctcataggcgagctccgtggatcgcggcagcggaggcacaaacgcgatttattcaatcaggttacaggaaaagctgcagaaacagttacataaatattttgttaagaggtggaccatgagccttctccacagaagtctagattcaagtctgctcaagtcttgtacggataacatcggggtggacactcttcatcagacgatactactgctctctcgaagagtcgattgtctctgcctgaggcgcctagggtgataggttacattgacgtgttttgaaatttttcgtggtacgaggatgaccaactgattatgcacctgctacttagagtaaggctatgaacctaatcgtagaattcggcttgcaaccgaggaacacggtggatatgttccgtgatggtggagcgggtgggatgagagttcttagtcgcgcttccatggaaaccggcttgaagtcagatagacgtctatcggagttgtcctgtgttccgagcctctgtgatactgattagtcgtcgttgggtcagctcatatcactccaactcagatgtggcttgagtgttggtaagccgaactttatgaagaataatggctttggttctcggagaattctcatggatgctctgaaaatactctggctcccctgaccgttatggacagggtgcaggttacactgagtcgccaccgttgcccgataccttttatggtgagatgagggcttttatgtggcggtccgagattccagcaatgttctggaatgcgggacctgccagacggtatccatacttctttagaggaatgaacttacagggtagtggtatcaatttgcccatgtgcagcgtttgagaaattctatgattgtgcgagtcagtaagtggattaaaccgaattttgggatccagattaaagaagatctacgcattttttcagattgactcgcacaatcctgaagatccagaaatgacgtcttgagcttgtttggttcctgacggtactctgatacgatattctgagcagttatcgggcttgtcttgatcgagtcttctgctgtgtcactgagatcccttcttgctgatagtctgccagcagtctgctgtgcaacgctcgtctctgcgggtacgtaagcctcttgatgtcgaggtagtcaacagacaggagaatcccctactcctacattatctgtctgtgcagatattgcgtattctccgccatcactaggtgactgaattgacgtgattacgatataagaaaaagcaatcgtgtgagcagtaaggaggacagagatcatgttgtctgtggattgtagacagaggaaatctct

SEQ ID NO: 16117 - DNA, 489 bp, Emericella nidulans
gctaccctttggttcgacctgttgtcgtcgtctctggaactcgatcagccgcgactatggggcttgctggatttgttacagactaaggttactgccggctttttttgatccgagatggattcccggtgcacaatagcgctattgcattgaaccggactgccagactggctgctgaaatgtactactgatcatacggcgtgctcatgctcaatgttctcgcagcctaggctcatgctccgaccagcgggtggaatagagcgcatgcctattaccgcgacggctgctacaacttgtaagacctcgacgatcacgcgttatcaatgatgaagacctgctgttgtcatatgagggccacactcagcatgtgagtgaccgtatattcacagtgcgccaaatctcattgatactgttgccactgtctatgcagagagctagattggggttacgctcgacctaccagaagtgcagcctacaaagtgtgacaaaact

SEQ ID NO: 16118 - DNA, 438 bp, Emericella nidulans
cgcaggggctggtgggccatcggcatggcatccggctctactttcatgccgcaagggccgcaccacagactatccgggtgatgctattgtgttgagcggggctggttcaagcttggctctgcgggatcaatccactcacggcgtcgggaacgcgatctgtgtgaggggcggtataggacagaacggccggaccgcagagacatatgacagcactgtggaccagaagagttgcaggctctcacccaggctgatctctgctgatggataaagggcttcgtgcttgatctacgctactagaggaaagatggtggaccttgcttactaaccagcgaacaagactgccgatgtcagactgtataatgggaccagactgctacgaggaatccctcatgtattccgcatgtacaccgatgtggccaggagcatagacgcagggac

SEQ ID NO: 16119 - DNA, 788 bp, Emericella nidulans
agactcgtacaaaattttttgacagaatccccggggttgagtttatcggtaggccacaagcatggggaaaggtgtatttttttcattggaagatgtatgtatgggaatgatgactggcggttactaaactgaacatatatggctattgacgcagtacaaattcgggcgattagcaggtgtatatatttgcaaaagcaccaggcgctgatgcagccatactgtctgtctagctggccggtcggatcgtggtatcttacacttgagggggatatttacactgactgagtctaagtaggatacaacacataagcgctacctaagttctacagagagaggtatgattggataagaaaagtacgcttgataagattctataaatacaaacctgcagagagcgaattaacagttgcgtgatgtgagggtgaataattactgtttaaagcatagttacagacgacctgttcagaattgttggagacagcccttggatacgaacttgtgcacgctgaacaataagccaggcttcgtgctaccaataaacgtagtgctaagcactgaaaccgactgctgttacaactcgaaaaaatcgagtgacatagtgcgtcttgacgtgtaacagaaaatggtcgtcgaccgcttggtcgaagttgcacagaataagtggactacaagtttcgagattactgataactgccgacctgtcatcaccaaaatgggtgaaggtaatgcgttggacgttttttttttgagactcccccttttaaagagagtgagcattgttgtagctt

SEQ ID NO: 16120 - DNA, 5796 bp, Emericella nidulans
acttgcagacctgcgaggccgttcgaattactggattcaaaacccctgtggaaggcgaagagcaggcgaatgatattgccctatcacttctttttaacttgctcattatggtaaaatctgcgaaagaagcgagctgttagaacataatttgagaatcgatcaatcatgaaccgggttgtgcatcataattagagacttccgaggaatacactgccggccattgaatatttacagaatcgccgcgtagatgttctatctgatgctgcacgatggaatcagatgaggtcggcgacattattgttttttcttgttcttcctctcaagcatgcattgtttactagggccagctgctgctattggtgtatatctcgaataacataactgacaaaaagatacagactgcttttagtatgtttgagtaatgacagagtcttcctttcagctaggtgaatataaagactgctcattgcatcctgacgccagtgtcggcctaatagtataagaacaatattcgaatacgagtggcttggcagagcagctgtgtcccaatcgatatgtactgtcaaataatctctcgatcatagcatattacgctttattgatttgtccgggcagggcagccagccattcacctgaatatcttctatagcgtaactccccagacacgacgtcccgaattctcgcctatttccacctcagtcctgacgtccttttgatcatgcaagagttcaataacctggtaccatttcaagcctgcagcagactatagttttgaagtgccactccatcattccatgtttttactttatacgcatctacaattctttggtagctggacgcgcaaagacaaatgtgaaaatgggagttttaagcagtccgatccaaccagctgtttctagttttaggataagcctagaatatctcagttttgtcaaaccgcaatataacattttggaccaccatctgtgggctgattgaacaaataatcaacgtgtttttttcgtgctttttacccctatctgtgagacggcgaggatgtttaaagctttggggtggaggcatgaagagcttctgccttgacagtgttgaggtctggtagcctttgaggtagcataattgaagggtaagtataaaagtgatatgtattggagtacattgccaagtacattgccaggacatatatcccaggatccggccctgattcaccctatccaaatcacaatttgccctctggaggaagcatgcagcacagagacgggcactgtggagtcagaatatgccgcatcgtctactcaaagtacgtcgccgggagccttgccccatcaaaccccgccattactttcccccaaatggctccattttaacgaagtctccaacaagccgtgccaatgaagctcttctatgtctaatgcgtgagcagcttgctcttgcaaggtttatcgatccgtcaacaactgtcaagtattttcaactaaagtttgatagaatctgaaagtacaacgagagctcccggtaacatctccgcagaggcacataccaatgactggggcataccctatagttgccgtcgtttgatgtcacgcggagccactgtaacattgtaaagaggtcaatcccagccgagtgcttgtagatataggtaatacgtgtaaagtcaatgagatatggtgtcttggattcttggatactcctacctactgagatattactaccatcggcccatgcccgccaatgaacgtcccctggcggattagaagagctcaaaacatcaatgatgggagtcatcgcagcagtagcaaacatattctgcacgaggggatgccattttttattggttcgctaatgtcacaataacatcatttcctagcccgttagcacattggctgaagagagacgggatatctgcagcagtccataactggcagggaccatcgtcagggtaatgtcgaagagtgtggctctaatcaaccgtcattcctaaaccctttttactattgtgatcccagcctgatccgtgcaggcctgaccctaaactggaccatgagtgatgaggtagcggggaattcatcccggcgccctggcaaactgtattaaaaaaaggctttgacagcaagccttccggcaagccgcgtttcgcccgagctctaaccaggatccaggggcagattccgccaatcggctgcgattccagaccgctgagtcggtggtggagccttatcaaaagcatgatggcgtcatatatcagggtttcttgactgtgtaatactaccgtcccttctagactacgcatatcagcacggtagctaatcagtaactgatcagggtttctgacagttcgcccttaccagctttgtcatcctactacaatccaagaaggtcctaaagtcggctaacaggccgttgatcttgacctatcgtttgcgtcagaattttaaccgaagcgattggttcgctcgtagtctattaccctggaagaagtaggcctgcagtggccacagcgctgcgaaagggtgaatgtcaagaaaccgttgtttatggcctggtaatgtgggctccattcgactcctctctcaggaaagctcttccggtcgagactccttcttctgtcagttggccgggatagtgtccgattcggttactgcctagtgatgtaatgctccaccctccgtcagcagaggatactgacaggaatataaaactcgtttagaccccgcggactcattggtctcttagatgccataaaccataaactcttctcaaactccccagtccttctttgcgagtatataatgtcgcggcagcacactgcgtcctcgcgcgacctcaacaatacttcgacgtctcaagccaggccgcgactggatgttcgtgctggcaatggcaatagcagcggtcttaacaggtcggcgatgaacgccaacccagccatatcaaatcacagttccgaccgcaccatctcgcaaaacacctttatgacgcaagccgacggcagcggcgggaacccgacgctctactcactggccgggccacagtatagccgcaaccagggtgctgcgtatatcgacccgaactaccgagcgcacaatccgaactatggcaaggcgcaggatgcacctgtctggagtctgacatccccattaccccacgttgtccgaaatgggcgctggggcaagaggaagaagccacggcaagaccgccccgaagaaggggatactcaagctggaggagaaggaacaggagggagttactcgcgcccgaatgcgaacgcaccgcgccagccggcgtccgaagaagcaccggccttcgagcctccggaccaggcagacgaagagggcaaggcagaagctcagcaggcaacagaagacaatcgggaatttttcaactactggggcaagatccggcattatgtacgccaggaactggctgagtggctggggatgaccgttgccatgctgctcggtatctgcgcgggactgtccacattcacttcgtccaacctggcaggttcgtttccctcgctcgcagcggcctggggttttgggttcatggtcgccatctaccttactggtggtatctctggtggtcacctgaatcctgcaatcacaatctccatgtggatatggcgtgggtttccggcgcgcagatgcctcacatatacgattgcgcaggtcatcggcgctatcacggccgcgggaattgcatatgctctttatcacgatgccatcgtgcagctcgctgcttcaagccaagttccccagcctcgaacggacgcgaacgaggcgatggtggtgacgccgaagcccttcgtccagcccgttgccgctttcttcaccgaattcgtcggctcagctatcctaatcggtacaatattggcattgggtgatgactccaatgctccgcccggcgccggtatgcaagccttcatcatcggcatcatgatcactgtccttgttcttgccctcggctacacaaccggtggctgtttcaatccagcacgcgatttctgcgcacgcgtggtcaccgttatggcaggctggggtggtcagatgttcaccgaatatcatatctggtggctctggggcccctgggtggctgatatccttgaggggttgtttggaggattcatgtatgatcttatcatcttcacaggtggcgagagtccgattaattaccctccacgacgacgcaagagggcttttattctcaagaaccgcaatgcgagggcgcgcatgggggtgggccaggataagattccggatttggagagggcggcacaagagtttgaatagacgctcgctccgagttcgatctttggttcttgaatagaagcttctcaattgaactgggtataaatttgatataatatacggttatgagtacacggcatagcgcggcgtcggattggtttttaaaacatttttctgctttcacattactttgagatattatacacggttcatctcaactgctttgtttctatcctgaacctaccttaatgcttgtttatcatttattctgctccagtacttgaacaaaccatcatccaccagattgttaccatgactgcattgatccagggtggactacctgggcgtacatgactcgccattctattttcgcctcggttgtctaaaaaacaaggtttatgattcaagtccattgggcgctatgggcatcatgcatttgcagccaagtatggtgagtgcctgataggtgggctaggcgaagtatgccaggaatactgcacgggtcggtcttataatgtttatgccataggccctcatgaaactggtacataagataccccgtaatttattatggcagacggataatattcatatagaacttgggtcttacaaggagtcgaagttctatacacttcatcatctatggtcctgataatcaaatactagtaattctcagcaaagttggttcggttgtagatgtcagccaaacagacgagagaagtacataaactgcagccactcctaaagtactgtcaactatctaacccttatgagcgcctattcttcatcgaagaactctattcccaacctcaggccctaagacgagtcggcatggatgtcctccctcccatcttgccagctagagcagttgacacaacgtaacgcctttttccaaatattagtatcgtccgctcaagcatagaatccagaaaagctaccttctcactgatccacttccgacaatagcggcacttgacgctccgcttgatgattttgtcatgcgaggcaaacatgtagatttgcgctaaggtgtaaagcgtcaagctgattccgaagaagttgaccacttgttcaagaaagagactatcaacctatctgccgtcgaaatactctgtgataaacctatccaactggccagtatgcgaagtaggatcgggtctcagcgggtgcacagacccatacgccaaaacaagcgccccatcatcccacgcctgctcgagggtattgtatccgcccatctcgtcatagttcggtcctttcgagagcacagcgaacattgcgttcatgttacgattgatgaaggggaggagcgagatcacggggagaacaatgtctgtgacgaaagagctgacgacgctgttgaaggcttgcgcgattctatccaccgcgtcagtacaaccaagccggcccctaggggtgaaaagtggttttatggggagctacatcagaccaagcgcgacctcgaggacattatcccgggctgcgaaatcaataaacccgtcccaggcgcggtggacgtgggattttgtttcgccgccaagcggttatc

SEQ ID NO: 16121 - DNA, 3183 bp, Emericella nidulans
gggggcacagcgggaagaatactttcctcctagccccgggcttggactgatagcaggcctggagttccggacaggggtatcttttttccagggaagagaattggcccgcccggccgagaaggtaattgggcgtcggcctagggtgcagtggattaagtggctcgtagagaatgccatgtggagggcagccgggcttcaaaataatcattgatttcgttatccgctctatggaagtcctagagtataccataggtctgttgagccttgagtaggaggtaatccaaggcctacgttaggccgccagggataaacctgctgctccagggatggagggaccgggatattgcatatgtatttgccttttaaaacctggggcgctctaagacctaagattaatcgaactgtgttgcgcaagcaagcaagcggagcaagcactttctcactttatgaaatcttgactcgttctcatcccgttttcatacttagccctacctatctcaacgccatcacatacatacttccacaacaacctacgacacaatgcgcagcacactttcccgcacccccccactagtcgcgtcgctctcagcccgaccttctatgtcaatatcagcatcagcgtcagtgtcatcttcatggtctcgcgttcgctctccatacgctgtctcccgcttcacctacaaaacaacaacaaaacaacagacaccacaagagaccaaccacatccaagcgcgtgcacccgacatcaagaacctaagctctaagccgcggttccgcgaattcgacctcgaaggccgcgtctacgccatcaccgggggcggacggggtctcggtctcgctatggccgaagcgctcctcgaagccggagctaaaggtgagcattccctctattctctgagcacataagaggagataatcctaacgagccgaaaagtatattgcctcgaccgtctccaaaccccacacccagactttgaggccgccagatctcatgctgaatcggcctacggcggcagcctacactaccaccgcattgacgtgcgcaacgctgctgaaacaaacagcatctttgcaaagatcgcctctgagaactcgcgcctcgacggtctcatcgccgccgcaggcataaaccatctggaacccgctctctcgcacagccccgagaaactccacgaggtcatggacatcaattataacggcgtctttcatagtgccactgccgctgcgcgtcagatgttcaactaccagcaaaagggttccatcctgctcgtggcttccatgtctggccttatcgccaacaaggggatgacgagtcccgtttacaactcgagtaaggcggcagttgtgcagcttgctcgcaatttggcaatggagtgggggaggcatggcattcgggtgaactccttgtgtcctgggcacattgtcacgccgatggttgagatggtcttccagaaggagccggccgcgagggcagtttgggaggctgagaatatgctgggacgactggcgacgcccgaggagtttagaggcgcggcactatttgcgttgagtgatgcctcgagctttatgacagggagtacaatgctgattgatggggggcatacggcttggtgattttctatcctattctgtttgcatgggccttggcttgaaaataatgtaccatatcacacggcatcgtctcgtctgcttactacgtgggatggtcttggtatcactgagcgtttgaatgagcgttgtttcctgttgattcgtttgtctgttcagcccgggcacatacaggggttttggttgcattacagtgtaaaatagtaatccatctatttatctagtccaagatctgattcatgccaggactatatccagggtatccagggaatatagacagtaagccaatccgtttacataatatacgtgaacacctccctcctttgccctccactccccaggatcagcacctcccgctctctatctgtcccgtcgctccccctctcaccctccgccatcttttcgtttgctctcttcaatatccccctcaataccgccgcgagaattgcaacaacagccataaatcccgcgcagaccgccattcccctgacataccaaggtccatcttcagcaggatagagcctcgtgcccagcaatggcccgcattgtccaatgacattgagaatcgccacactcgcacctttgccctcttgcgctgcacgattgtccatgctccatgtaatgatcagcgtgattgccgaaaagaagcctgctgttgcggggtaaacgcagatataccggattgcggtgtgaagtgagggtgagagggacgcatggaaagaaccggttagcgcgatggccagatacgatatcgccgagatgagggcatgtgttattaggtacgggctgcgggagcgggagcggtcggagaggtaggctgttgcgagcacagtgatgaaggcaaccaagtatggtggggcgctgagagcttgcgaggtttgagaggtatagcccatactgcaatttgttagttatttgaatatttgttcaagagaatggaatcacgcgtactcatgcaaaatggtgggcaggaagacgggcatagagctgaaggcaacgttgcagctgaaaaacatgaactgcatctgttagtaagtacaggtcttaacagtttgaggatggacacacagctgtaatataggacttgggatcagacagagtctttccaacctcaccccagttgaacctcctgccatggccatgatgctcaggtttggcaccgtttcccatccgcagctgagccaccatccgttgacggggctcaaggaacgccgaagttcccggtgagtcaggaatcgtgtaccaggcaaaaacagcgacaatgacgctggggaatccttccaccagaaacaatgtgcgccatggtgcaataggcccatcgctactggatttcacaatcagccacgccaggctgctagcgaacgacgaggccagcggggcggcggaaatgaacaatgcgtttcgaaaggcgagctcctcgcgcttgtagaatagagacagataaaatggaacgcctggaccgaatgctgcttctgtgatccctagcatggcgcgcaggaacaacattgtcccaaaggacgttgcgagcgactgcagggacgctgcgaagccccatccaaaaacacagagcgatac

SEQ ID NO: 16122 - DNA, 556 bp, Emericella nidulans
cctgctcctgattcattgccaaacattttcgtggcctttcatgtgtgccaggacagagtccggcaagatgaacttatcctgttcgctgcgagcctccatagccagactcttccagttccaatcacgcaagatgaggggctgttagactatcatgcgacttgccactatatcgagagaaggtgcgggggagggcaaaacctcatgaaacgtgactcatgcactcgcacttataatccgggaggctcaccctgaacgaaagaatgactgagcgtgctacatgtccagcaccttcaacggtgaacatgagcgaaagagcaatcctggaacggttctccttgctgtgcatgaagtacggccaatatgcaatgccaatgctgactgacagttaccacgggttacactctgatccgactgaacaactgagatcgcgacagctctcaactatcagtggagagctcagaaactcggctacaactgcatatctagccttataagaggcgccgacaccacagagagagatcccagcagccatggacacagcatctatatacacaat

SEQ ID NO: 16123 - DNA, 551 bp, Emericella nidulans
caaacataatgtggaggatggggtatagcgcaaggcaggatccttactcaagacgtcaaagctttttttcttaccagaactgcgctatcaagactccggtgtgcatgtctagccagatgcaacggcccggcgctggtttatctactgagaggccgcatgactcgatgttgatccttagcaacacatcagggctacctagagttcttgttcccactactgaagccagcgcgtctcttcagcaagccggacgggcttgtcgatggcgaccgctgagaaggtgctggctctcttgcaagggcagattacccggcaatggcggcatgctgactatcagtatctatactgaccctagactgaccttggctgatttatgtaccactgattgatcactgcttacgaaagagtctacgatgctgtgttgaatcgctccgctcagatgtgaaatctgaccttattagcctgactgagcgtgaaatcctgcgctgttgtactcttctcgcgaagctccgagctctacgcaaagctggtaggcatcccaccacgcgatgcta

SEQ ID NO: 16124 - DNA, 958 bp, Emericella nidulans
gaacatcccacctatttttttctcgtggatcaatcccctttatagtctactgtattgcctcgtgtatgatgggggacgtttcatcaacaatacggggggcttattgcggttacaacgttctgtaacagaagactctgagttggcaaccatcatggtgccacgcctccggactctgactgttaagagacatcaccagtccaaatggcttgctcccaagattctcttgaacaccctcagacctgcagccaaattgtaaaccatccaccacactatggccacttctagggcccggtcaagcggtgaccaaaggattgcccaattgttcaccaatgacggctgtgcgacaaaatgaagctgcctttcgagctcattcccatgcaacatgcgtcgacaacctgctccctggaatgagtatatccgtacaatactaaatttgatggcattaatcagacgaagggcgctacatcccagcgtttccgtgttctagtgcaaccatcatggtttcacttatggcttctcggctctagtttgataacactggcccttcgtcagagcctctctcttttttggccctaaggttttggaatccatctgaaccttatccaatgcgggattttttaatattatctatttcactcagttcattttttctcatttattctctttctttatcttccttcttatccgtaaccttttttccgatctctaataatttttcctattctatacatcctcctatcttctttactctacttcaccacttcctccttgtatctttttatcccttcttcccttttattcttttacccattcttccttctcctctttattattccacttccttcttattccttattattttcccttactctctttctatatacatctttctcttcctttttttctttttctcatccctcttacatttttctcctctcccttctcttctcctcaattt

SEQ ID NO: 16125 - DNA, 2739 bp, Emericella nidulans
aacacgaacgatcggaaacgtatagcgtgttgagcaattacgaatctgggagaaactgattcccacacttactgggaaggtatctttggggtgtccataacggggcggcgtaacaaagcagacgttgaggggttctatccttaatttgtacatataaaagataatcgtgcatcgcttcagtggatgaacctatgcaaaaagagatatggcaagccagaatagagttggacgttgagacgcagctggttatggtcacatggttcaaggtatatcttccagctccagaagaatcatcttcaggtttccacacagggtcataagcgaccagcaacaatgggtggcagcactatattggaccagacggcacacccaaatccccgtctgattcatactcaaaatccactagcctggaaatgccccaggatacgcttgagaaatgaaaagtttcgagaccaattgtgcccctgatggtgacagaagctgccatatatctacgtaacgataaaggtacgtattgcctcttggctgttgcagaaaagcgataagtaccttcacagccctgacgattctttccaggagattttacgggttgtgctaccttcaaatccgccgggaccaacagcaatcggtcaagaagcgagcaagcccctcttcagatagcaaggtaggggacaaactttgaatggggctcgaagtttcgctttccagaaatatggacagatacgacggaaaagagaaaaaaatcagggaaacggcagccaaaacaacgaagagagagaacaagacctgcagccagccggggagatggttgtactggccaactaatcaagccatcaacaaacagtggcagcgttaagtggattgatctcttctattatcttttttgggagtactttttgcctcttgttcccctgctctgtttgactgtccagtcttattaccgtgggtgttcttggattgtgttgtaaattgctttctttttgctcttcaaatccactgtataaatcctctttggcagaggatgactgcaagaactcctgtttttgatccatacttctcttcattctctccaacccacttctcatgcgcagaaaaagagaaaaagagaaaatccccgcgtaccttgtgttggtcgcccaccagcgactgtgaatgacaaccctctcatgcgctcatttctcgctgccctcctctgacaaatttcatatattcggttgtgcgaatcatatttcgcttcatgattgtatcattcactctgtccttaaatctccctcttacccttttccattgcccctcttccctcctcgtcgccacgctccaggcatttataccggtcaaatcccccacttactgaccaacaccaatatatttctcctcctctttctggcaaaaggactcccttcagtgactgctcgatgtgcttcagcatgtcttcctcactgcgtcctcagttcttctgtactcgcccaaatggcactcttactcccctcatcgcagttgacgaacttccagcccatatcaccatccacggcgctccccgtgtattgtctccgaacgaaactcagggaatgacaagtttgggtgctgtgagcacgcgcggccagttctattctgttgaaggcgctgcgcctgcgaacggcaagaaccaacctggaagcaatgacttgcagtctcaccttctaaggctcctcaacgacgagaatataccagcagcccagcgcaatgcactcggtgctttgctccagcagagccttcctcagagctggcaggtgacgaatcctccaactaacgggtggctgatctccaacaatggcagtaatagtggtgctggaaacagccaacaggtaggtaggatatcttgcggggtgcataggccgttgtatttctcttatgctgatgatccatggaagcccccttcccgcaacataaaaaaggaattttgttcgtactggatacgtcatggtgaatgtgattattcgcagcaaggtaaaagcggagtactttggtgcaccacattacggctaaccagggcttcattaggatgtctttacaagcacgagatgccccatgatcgcgctatgttggagaaactcggcctacgtgacatcccccgctggtatcgtgacaaatacaacatcccaagtcttctgccaaatggacatggccatccacgatccaatcctgcaaatggaaatgaaatgtctcttcgatcgattcagtatactccccaaatgggagcctatggagcaggagagcattctgatatcaacgaaagtgtcaagcaggatgctccagcttatactccccagcagcaccagcatggggttttgcttccaggaactccttttagccctctagcttctcccaccggtccgtttactcccaggcaggcaccaaggagctcatctggtcaccttaacgctggcaacaggaagtttgacccgctcccctttgaccacgcggccttcataccaaacaacaatccgccctatcgcccgtcgaacgaggccagctatgaagcattagggaagtaccagcacgagaacgtcgttcagaatttccctagtctcacattgaaccccattaccacgaacacagattacctcccggctaccttcgattctcccgtaagctcgggcggcttcaagcattcgttgcggtcacgccgattgtaccaaggaactcacgacgtcgaaccatccagtagccaagacctcattgaagctaacaccttgcatg

SEQ ID NO: 16126 - DNA, 573 bp, Emericella nidulans
  unsure (1)..(573): unsure at all n locations
aagacgggacaatcaggagaacttcgagggagacgagacttacgtccataaaggagtcggttgaacggccaaaggatactggccttgaatgtgacgaggccaacgtacgggtgactctagcactggacaacaaggtaagtcaggaaccggatactaccgattatgggccttgtcaggataaggacccatagcactctactaccaaacacatgactgaacctaggagtacatgaaagtgtgacaaaaaaatataaaacagagtattggttactatgcataactgtgcacctgtacacatggcatgcgcagtgacgatgttgtgtgactaacccaagcgcactacagaccagttgcacagatctagcagcacactgcgaggattatgctatcattgtacactctatcacacctgaaggtcggattggaaagagcccttatttccctatacatctaggaccgacctgataatatgggtacctgaacaaaagtgtaagccttagcgtcttatctgacaaaccatgggcacgttcagcacatgatcatcggcgtgncggtctgagctacataaaaccc

SEQ ID NO: 16127 - DNA, 468 bp, Emericella nidulans
  unsure (1)..(468): unsure at all n locations
acagaggagancaaggaatccaaaagggtggttcccaacacncanggagnaagcaaaggacaggaaccgagcagaaggacnagaggcgccgccaacagaggcagcggngggnacnnagaaccccgcagacgcgagaaggaaacnaacaacanannaggcancnnngcccgcgagcaacancncgnacgncaccnaacaangcaccagcngaacgggcggccanacncacgaacagaccagcgcaccgaccgggnaccgaanaccaacgaaagcgaaaccagccagcaannaaagaagcgccgaagnccncgcggaaagccacanacccgcgcncgcncaaaaccgcgcaggggccggcagaaggccccgagggcgacgaccngnaccccgaagacncaagcgcagggaagaggcaccaagaccccccggcaagacaagaaaccggagccggaacccgggcgggcggaa

SEQ ID NO: 16128 - DNA, 2692 bp, Emericella nidulans
cttcaactcatttgcatgtttctcgagaattttcacagttcgtgaggaaatcgcgagcagccatggtatgattgcaaaaacgcatggagccctacatggtgagacccgtccggtacaacgctccccccataaagaagactccaactgatcgtactcgttcaaaggagcatgcaactgcacatactgcacggtcaatgcatggtcctcgtctgatacacaaatgatcgaggaatgcgcgtccaacatattgaaggcaatgcaggggtatttcactgaggatcgacatacctgcaatgctcgtacaacgttccacgcttcttctgcgccctatgtgacgaactagataatgagaagctggggaattgccttaatgagcatctatttactgctaagggaggaaatcagaagcttcaatctggggccataacgaccatagtttgcaaggagactccccaacctcgtcaattgagcatactgcgatgtcagctcagcgctaagctaaaaaaaaaatttctttttttgcgcccttttaacccaattaggagcccgacagctatccgacctcatatgaatggccaaaacgttggagcctgccaatcttcgagtcatctctcagacaaaaatcgactaagggagtcaccctgtccttggctcagatatgcttatttattattgttctttttttcatccttggttgccagcgttatggttcttctttctacggacagcagctgattgacaatgtcctcccgcctcgtgcttggggtttcagcggctgcctgcgctatcgcggtcatactatcgatcccgcacggctacagtctcatcactcaaagcagacgcgagaaacggtacgcaattatcgagcctggttgcgatgaggccactaccacagggaaacacccgcggtcgctgtggcagcgcgtctgtcttgttgtggtgggagtcgtggccgccacagcggccttgtggtcgtggaagagcagaacaggaagcgcagatgcccaattcctgctatgcatagcatgggtaagtgcgcctaagtgcgccacctgtttggtgtttgctcatgctaaccgttcaggcctttattctgattcagggaatcgttctagcattgagtcgacatcccacggagatatacagcttaggaatatatagcgcacttgcggctataccgaccagcatctctatttcactgccgtacgccctggcgttacagcgcggagagcatctcgttctgtcgggcaaccgccatgcattgaacgctgttcaactcgtcgctgcactggtccttctggtcgtaaacctcagccttccacggggaccactgaaataccgcgacggccaggtaatcgacgcacgggactccatatcattcatcgaccggtatactttctcttgggcatatcgaaccctatccctcgcagccaagaacgggcgcctcaacccagaagacctgccgctcgtcgccgatgacgtgcgcgcacaaactctctccgacagatttttctccaccgatccaacctcagttcagtggcgaaagtggcttaaactgtactggcgatctgttgccctgcaagtcacggtccagctctgtaatgctgtcgctggcttcttaccgaatctccttttactcactatcctgcgactgtttgaggcgcgcgatgcgggcgcgagcaaccagcttcagctgtggttggcggctctagctttgggaatgtcaatggttgcgacggcgtggttggtcgctctcagggatttcattgctgacttgaagatctcccttccggtgaaccagcagctattcgccgtcataaccaagaaggcgctcactttaagggatactgcagttgctgaacgggcaagctctggcagcgacgaggagactgatgatgaaggggacggtaatgacgatgagagacctccgcaaacaaaacactccatcctcaatctccttggagtcgacgtcgagcggatctccgatttcattgcatacagtcatctcctgcttgactgcgtcgtcgagtccgtcctcacaactgcttttctggtgtacttgatgggttggaaggcaacctcagcaggttgcgccatcccaatcttgctgacgcctctgtacttcagcgtgacgaagcaatatagcgagaaagagcaggcgctcatggaccgccgtgatgagaaatccgcctcgctaacagagatgattcaggggatccgacagatcaaattcagcgccctggaagccgaatggtacgagaaaatcctgaagctgcgaaccaaggagttggacgaacaaagagcagtcttctggctgaacatttccctcaatggaatgtacacccttgttccgattttcatgagctgtttctcaattaccgcttatgtgtacttgaatgggagtatttcgccatctatcgcgtttacagcattgtcactttttgagactctccagaacacaatctgtatgcttcctgaagtcatcactcagtttctagatgcaagggtcagtcttggaagagttgcaaagttcttggggttggaagagcacgcggatggcaggagtcctggaaatggggacgggatatcgcttcaaaacacgacaattgcctgccgtctagcggcgtggaagctgaggacgaggttcgatttcagctaaaggaccttaacctctatttccctgcgcatggac

SEQ ID NO: 16129 - DNA, 969 bp, Emericella nidulans
  unsure (1)..(969): unsure at all n locations
cataggggtgagctgcatgttgtaattaatatttcagcgcgtccggattttgcagcgttaagaactaggtccttattgctcccttgatagggatcgaaatgccaccatccccaacgggacatttctgacttccagttttcaatcaaagtcccagggcagataatgagcgtccgcggataccacaaatctccttcactccttcgcatctttctcatcctcttgtcgtctctttcgtctcctgtcttcccgtacgccgcagtgaggaaggcaatcacctgaactgtcttccccaaacccatatcgtctccaaggataccccctttctggtaaacaaacagctgatgcaaaaatgcagcaccttccacctgataaggacgaagccactgggcaatgggcgctggaattactcccagggaacagggtaggctgatatctttatattcagcgcaaggcttgatgccagagaacgctggtttcctacgaaggtagtctagctgctcatcatcagagaagtagacatggtcatagcttggaggtagtttcagaccagcgtcctgtagatgctccaagccgccgtcaaattgagccgacgcttctgtggtagtcaggagggtatctccatcaagtcatatcagatacacctcttctttgaatcacaagatatgaggcgaaccctttgctccttctcctggacctgccacgatgggctttgtgggctttctgattgctttgtcaactgcagttgttcgttcggattcgactaactttatgcagtccctttgaggcatgcgtgtttcgcggggggtcgaatttgcagggacctttcgcttatcacgttggtggaagggctattcntttctggtggggggtgtattccctctgtgtgctcaactttcttgttcttctatgaattctttatcaactattctttctctctttgctctcctctttctctcctcatctttatac

SEQ ID NO: 16130 - DNA, 3487 bp, Emericella nidulans
agagatagcaggagtgagtagagagatgtagaaaataaatagggtaagaactgatagtaggtagagaggaaggggagaatgagagaaggagtaaaagataaagggataaaaaagagaggagataaggaacgtgaggaggtgctagtaaggagtatgaattaatagtgaggaacagtatatgtgaaaacgaagttaggagagataaaggggaaggtagacaagaaaagtagtgagagggatggaaatagattgagagatagaaggtagtagaggaaagatggaaaaggggacaaatgatgaaaggaatgataaagggtaatagaaattagttaaatatagaaatcagacataaagagttaggagaataagaaaaagaaggtaaataggtgtcaaggataaagggggagtcaagaaagaccacgaattataaaataactgttgcgccttacaagaatagcagagttactgctgctagagaggtcagcgctcttgtactgctgtatgggtttcagaacggagatcgtaagcttcacaagacggtccgtatttcgcaagacgccgttgatagtccacagacaagccatgacctcgttgagctctgcccgtgccagtttggccacgctcttgaaaaggtcattttggacatctttcaagagcgtattatgagagtttgataggtatggtagaacacatcggtagatgatcacctcagagcggaataaaaacagatcttctgccgtggcaaggttccctatgtaaggatggagggcatccacctggtctggacgaagtaatttggggttcactttggcaaatactgtcatcgtttgcagtaaagcctgctggaactcctttcttgaatcattaccctcgatcaatttctcgaacatggtcgcaaccatagctttgcacactttgaaattcatagtagatgtcttggacgaatcagatagcagctttcctaagcaagggccaagtgcttctaaagccgtatcacttctttgtaccagatgtacaaatagtgtaattctttctgcgagcccaaccttcagctttgggatatcctgagcggcgtcgaccagatcatagaacggagtaagccagatttcttcgaatgtctgacgcgccaatgctgccacgccctcttcaaggtcaacagttcgctgaagaaagctatccaggatggccatttttagctcgacgcgtgaagtccttaggtagatttctttcatcaacccaatgcaccgttttcggacgccggctgcagcatcgccagagcaggccaggatgctccggcagccctcttcttctaagttcggttttaagacaatgcatttagcgatcaacgacaatgcggagtcgcgaaccataggtgacgcgtctgtcgcacatcgaagaattacgcgcataaccgaggcatctctatccagaagactcgggtccttctccagcatatatattacactctttagactgcgactccggactttggcttggtcactcgtgattgagttgaggagcactttgagaatggtatcgaaagctttgcaaaagctcgagttcaggaccgttagaatgtaggcaaatttcccttgggcagctgagacgttgtcgaaattcctgaaaacattagtctcaagtcaacaattaaatggcattctgggcaggttacctattagtctccagccatcgtgaatcagagaacagctttgcaaaaagatgtactgcaccctctgttgcatcatcgtatgtaacttcgtcctttacctcggagttgtagtgaatagagcagaatgtctttgcccactgagtcaaaaaaaatcccctggcgctggtaagttgccaattattcgagttgctatcgttgaggaaatactcgagggccactcggtaggggccattcggaaccacgagatcttgaggatgtagagcacgatttgtataatcatcgaacaattgctttaaagaatctgtaagctccgtttcggactcttccatggcaggaagtaagtgctgtgctgtagaaatcaagtcagagatggccgaacccatccaacccaaaagctctagagccatgctcttcgctgtggcggggctcttctcaaggtccgcgatgctgaccatgtgcgatgccatgatacgaagaagcagttccgcagcaggccagtccatagaacttagaactccaatcaagtcttcagtgaagaggtcaaggatatttcggtagggttggtcaccagtcttggtggacgtcattgctcgctggacaatgaacttgataatatactgagcgcttcgcagagcattatcgtacaggccattgaccttcgcagccaaacgcgctaatgatacatcggactgatcattatcaccatcatcaatagtttcgtcggcgtcatcggtaccatcgtcctcgccttcggacttcacaatcttacgcttagtctttgccgacctgtgagaaggagtgtctaaggcagtggtctgcacgagctgcatgaccagggcggttagcaactggatatttttgccatcggcaagcttgaactgcctggcactttgccgagtagctggaagcttttctagggaaactaagatctcgtcgaggatgaacgcgcgctgggacggatatctcgaaaatatctttgcgagaatgtccattgccccgcgccgaacagattcatatttttgactaccaaccgccgagtccttttccgtgtgcgaattctcaacgaatatcaatttggcagcaaaaaactcggttgcggtaattgctccttcggaaacatcgatccgtgctagaaatccagcaaaaaggctgagaaccttcttgctttgctgaattactccaccaatggcacgcctttgaagagaacagagctcgaaaaatttcccgtccattcctccgggccgggcttcaacggctggtattatgcagttgtcgaagacctgattaagtaggttcggaatcgcttcaatcaagtcctcaggacaaaggtcccgttctgtctgggagccagacatcgtctgaaggagagtgttgacagcaagaagggcattgtgcatgtcatccaactttttcaaccagtcctgagatgctgtttcgtccgatgcatcctctaacttcagatcaggcgcttgcgcagcaattattggcctttcacagaacttctggatgcgattgaggtaatctgagggaatgtcttggagtctattgaagctcaccaccttcttcatagccttttgaaggcgtgaatgggcatccggagaaagaataggtccactggattccaacgattgaagcgaagtgaatatcatgttcggtccatctggagctatgtcggatccccacgagtcaagttgatcttctacttcaaatatctcatgaagaatctcctgcaacttgacaagggcagcatctgcttcttccttctgagctcttagccgaatggacgttacattgtcatcaccaccagtgctctcgttc

SEQ ID NO: 16131 - DNA, 524 bp, Emericella nidulans
tggacaaccgctcacctagaactgaatggctcccccacgggcgagcgattgtgttgccttaactaacagcgacgcttgccatttaacctgaccatttttagaccatacatgcacaatgtgtccagcacgacattgcctgctctggatactaacatcaatccaattgttcgctagcgtcctgacgctagcattcaatactatgtcgagactatcgccgttttgaccacgagcgcaacaaacgactttatcaacgctaatgaaactcaaaagtaaacctggaatgcctacctctaccgaatacacttgctccataacatattatgtaaggaatcgagagatatgaatgctataactacccctaagcctagatgagtgaacatcgagcggataactaaagagtgacgaggatatgctgctcatactgctctaatctgacaggacaaggataagtgaaaccttaaccaatgcaaaaactgtcaatgacataagatgaacaccatatcgtaagcccatggtactataat

SEQ ID NO: 16132 - DNA, 5493 bp, Emericella nidulans
cccgaacctttcccaaaaaaaataacgggcatgaatttcaatctggtaaaggctgcgcaagtgatcacatcagcgaattttctgatgcggcttacctctaacctcgctgaaaagtcgtcaaaccggattcttcgtcggaaactctccgaaagagagcgcaaccaaaagcctggccaccgtaaagtctggtcttctacgactcgaatgcggaattcatggagctgctgtatatgagcaagagcgccttgcaaaggcgaaggcggacgtatccgcgccggtagtagatcagcaacctgtctcctaccttcttggtgatactgccgcaatcatcaaggacaatgttgaaggcgagaactatccacaaggtaaagtacaagtcgaacgctcgccaccagctgaagcgagctcgaagacaaccccagagcgtcaacccttcgctcaatccgccagtccgaagcctgagattggccatgatgtcgaccctgtaaatgttgatacgcaagagtcagtattgtgcatttcccagatccctgatgcacagctcaaatcgcagaagctggaggcttataatcagccttccaaacatgtggttgtcgaagtaccagacagccaagatcggactcaagccaacggtccaacagctgccgcgctatcaaccgaaaccccttcttcaaagccacatcctcggcgcgaacactccagcgccgtttacgttgatgacagcgacgacgtagaggacgctccccagcaaggaggcgtacaagttgaagagacaccgcccggattgccgagtatcaaataagtgttctgaagggatgtgttgacttatagcggttatattcatgttcttctttctccaaccccctaactgcattattatcttgcttagaagaaaagatatgctttcaggcgtttcggatggtggtcattttgctgggcatgagataccacgcatggcattcgggcgcattgcattgctttatcttattgcagtctgagttcctagaacgactgtttgcatgttttacttcttttcttatgcgaacttacaacgcattctatacaggctctatcaacacctgcataatctccgtaaacccatcgcacaatatctagttaaacatatatcaccattcactttcatcagcagaaacccaccacgccatcttatccctcttgaaggcttcaaagtcccattctgcatcctctaacatagtccgtccagcaatccacacatacgtctccgtttcaacctcctcctcttcatctgcaaaatctgcccccgcagcctccaacacatccttgatgtgcttatctctagctgcatctgcgtccacatgcgcccggttctcatccccattccgaaccccgtcttgattgttcaagtcctttgataatgcctcccgcagtatccgcacagaaactttttcccgcctatactctgcgccctcgaagatatcgagtctgtggatatcgccgtccgtaaggcctgagacgacagtgccgagaacgcttgcgcgcgaccgtgtttcaggccctgaaggtagcgctgctttacctgttgcagactcagacccatccgtagcagcatcctgcgtcgattctgactctctgatgattcccggataatcagctcccctgactcgatgtctcctatagccgtgcagtactgcgggacgaaactggagaaggtctttttgccattgttgtggcgtcggagagccgtggattacacggtgaaggatttggggggccataagggttcctgacttgctgcttagtactgattcaatatttactcaggatttgatgatgaagtgagtcgcgctggtggggttatatatctgcaacgctacggtagaaaaggcaggggaacaaagaaaccgtaccgtagaagaagagaacgtggtcgcccatcttgaagatcgttaattgctgtcctctagcaacggggatatcaaagcgaatcggcgagaggatgatttaagactgggacttagctgttggagtcttgcagtatacctaagtagcgcggggtcagcttaggtggagagcggagtgatcttcaactttaagctgtctgaattgagctatgcggcggatagtataatcaaaagtagatcatccaaagagctattgtaacttgagaatctctcatcgtattaaacaagaatataaacctgccagacttttaagagaagcaatatacttcaccgtcttacgttttcacagtaccagtttccagtaagcttgatcttatcgataagcagccgaaacctctggagcgcagacggggacatgtggctttatccgcatccaacccatcccatcccttctgggcacctctcctacaacggatctctcccaccgacagggagacacaaagaaaaataaacgatgcactcgacactaaatcgtgcccaagcggtcttcggcttcttcacgacagtcgcgctctttgttgcgggtttcgccgccctctcggtactcttgttcccgacagataagattaacacggaagtgtcgctgagggatgtgaaagtgtacgtcgccattgtctaaatactcgctagctattaaggaaagctagaagctgaccaagccgcgcgatagaataaaaggtcgaccccactactactccaccaagaaagaagagtacgcgcagatgagatttgacttggatgctggtacgtaccgtcatcactcgattgaaagtatgttgcagatgacggcctaatcaaacgaaaatgcaatagatctctcaccgctcttcaattggaacacaaaacaagtcttcgtctacgtttacgcgacgtactcctcctccaacaaaccctccgagaactcgttaacaccgcagtcccaagccatcatctgggatactatcattgaagcccccgaatcgccttactcttttgcgaatctgcgcgagcagttcttcccgactaagagcggcaagtccgcatcatcgcgcaagcgctcttcgacgaacaagaggaacgatagcaacaagcaggatgctgttcccggaactctccgtctccgcaatcagaagagcaagtaccagattagtgatattacggggaagatggcggaacggacgaatgtcacgctgagcgtggggtggaatgtgcagccgtgggtaggagcgttgtggtgggctcccggaactggtgcggttcccagaacaggtggcagcaccggggtatcgagagcgtttgatttgccggcgttgaagggaacgaagccgaagacggagggggcagaggcttcagtttagatacggtagggtcttagggtctaaatattcatggctgcttatcgtcactgttgagattttcctggttcgataagatggacggctcgtattgttgacagtctgctatccaacatgcaggaaaggtaataaaaagggctgccgccaaaatatcgatgtcctattataccccgaaaacaacctgtgaacactgtcgatgggtgtaaatacacgaagctagcagctaagagcacactcagatccagaaaaaggtcccaaccaatgaagcatattcaagaaatggtcccgtaattatgccgcccccctcgctggatccgatcggagtagacacctggcgctagatcggccatgacggcctcgcgatttttatagtacacatattccaggtaaaaggcgtggatgtggccggggagatagctgcacaggagctgttaacctgagatcctattgaaggggaaaggacagcgaaccctagtatcgtgagcatgatattgataagaaagtcgacgctgcagcctgaaattaggaagacgcctagaggtggtactattgggcctcgtcagtatactcatcggaagaccaattgccttgaagaatggacgatacacactgaaaatggtaagaatgatcaggcatagcatagaagctgaaccagccatgttgactgttgaattatgattgcgcacgttgttccgcgcgttcgttggtatccgagtatgttccgagaaagcttaggaagaaaattataaagagaaggatgaagatgtagatggaaatgtagtcatcatggtcggagttaatgcgtttcatcttacgaggctaacgggagagaaacgacgtcaccagaccaggggtaaatcaaggagttgctgttataaaggcctaaggatatagtcacacagatattcaatggatgatattcccttgcattgcaaagacagccagatgtcggccgcggtttgcttagttgacgtcattccgcagaagccgatcggggccatagggctaggcagcacgataaccagcacagtagccagcacggtagcacgaaggtacgggctaaggctgagatggcaggagtaagaatcctctgctttggtatatgggatatacgccgggaaacactctgtataacactctagcgcaaaatagagtcgatcatacggcatcaattgctgctcttgtcgtcacttgctcgttcttgttgccgagcttcgatatctgaaggaacgcgtccacgccgtatccctctaagctgtgcagctccagactacctgcccagtactctgcatagactctgctcattggcagccctatccccagcctaagatctggaggccgcgaagtcagcgtgtctagagagctctctcgaaatgtctctttgtctgcatgttttatgtcgctagacactgagagctcctgtagtgtagctgccattgccgggacctgtcctaaattttccagtcgtactttgctgtggggacccttcgtaaaagaccacaagtatggcagaatctctcggggtatgcctcccccttggtccgaaacgcgcataatcacatgttgaggtgcttcacaaatcagcacctcgatggggggtggtgtttggttgagaccttgatatctctcgctcacagcctggatcgaattacgcaggagttcgccaatgatatactccaggtgactgagcatgtacggaaaagtggcgtccaaatgcccctgcacagatatctctgggatcttatctgacccagaactctgccgaataatgtcttgtaccagcttgccgcatcgctctacgacttctttggcgttgcactttaggaatacctcgccgacaaaatctgcatttaggtctgtccgatcttgtgatccagggaagtgccacggcgaattaaaggtttccgtcaatgccaggtgctgttccgcaataactcgacgagaaatcctctgtcatggattagacgtgtactctccaatggatagaatctccttaccgccctgagcaacgtattcatgaattggtccattgcttctgccggcaaaagcccacggcattcaagaactcccatggccagccttggtatcacaaccaagtgctctttgagcgtcttccgcaggatgtcacagaatcgatcattatcgtcgagcgttcggatttgggccagaccgaattttcaaagcttatagttgggtatttcccggggaggagggtt

SEQ ID NO: 16133 - DNA, 5079 bp, Emericella nidulans
cccaccaccaccgctgaaacacaacctgcccgatctcccagctacctgagtcaaacacgtccgcaccggtaaccctcactccctcgccgccctcgtcctccatgtcgtataccagccggaacaggccgaacgggtcctgggcagactgcggacgcacgggagttgggaggttgaagatctggatcagtttgtcgcgtgtgctgggccacgggaggatgtcgaggattgggtggtgcggaaggaggagttgcgtgcgcgttgggtggaggtggatagggagcgagacgtcgatgtttaagtccaggtctgaactcaataaggccgaggatggtgatgaagacattgatgatagtgatgatagtgatgaggacgatgtatgtgcccctcgatagaacggactcactgcatcaatgtcccagaggagatgggcgacgttcagccggagggcgacttgtactgcagcattgagcagccgcagcgaggggatttcgaggatatggtcgtccggaaaggtgaaggtcgaagactcggacagctggagctgggaagacaggtcctggtccaggtcggcgcctgtcgagtcgggttgaaagtcgaagaaccggcccagatccgatgggggttggccatggggagatgcaaaggggtcattgtccctgccattgactggcaccgacagaagcgagagatcctggccgttcagatggccattattcagtcctcctcctcctcctcctgctgctgctgctgctgctgctgcgtctgttccagctcggcccgccacctggttttcgacctgcgcctgtagtctctgcaaccgctctttccgtcgctttcctgtagctcttagcaccagagcaatcataatatgcaagggcgcgaaactcacggtaccgtcgttgcgccagcacattcagcaccctcttcctttccgctgcatcgtctgttatggccgggatgggcaggtccccgctttttcgtgctctagcctgattgttctcatttggcattgacctggacccaaggtgttttattaaagaaaggtggtggatcagagtggtgaagtgatgaaagtgcaaggccaacaggaataacgagcggggaagcgaaacgagcataacgttatgcttgcgccagtcgcgaatacgaggtactggtcgggacccatgagccaatgaaacgctggcgtggcgtatttagtactcttaatggacaagttggattcaagaaaagtgtctgtaattggcataacgctgtcagcctgtgatggtgggttttcacctttacgtcgttatgttgtttactgttgtcgtgcctctatataaaggatcctcaccatgccacagttcaatagaccaaagatcaaggatttgataataatctgtcaattcacctttctaattccattcttatttgaaccaagtcccaatgtcaacgccgtcgcaaccaaactactccattcactccatcattgccgcatacggcatcggcctgatccctcatggctactactttgtcaccatgatggccaatgcacggagtcaagctagcaatcttctgtatgatccagcagcgagcttttcttcatccaagtctgtaagcttatcgttgttgtgatgcagccctcgagagaacctgtctaccctcaagtccagcctcccctcgcagatctggacaaagctcgccaaagcccgcggcgcacatctcaatgccatggagaatctgccgctgtttgctgccgctatggtatgtagatctcattcgctgtagcgacccatcttcagtcattcaggatggtgtgctaaaaagtgtaccagctggcaggaaacgtcgcccaactccccgcagacgagctcaacacgctgtcgctcgagtacctgggtgcgcggatcctgtatatggctgcgtatatgggagcaaggtcggaagccattagttatgtgcggacggggctgtgggcgtggagtgtctcgatcccgattatggcgctggtcaaggccgggaaggcctttgatgggactgcgtagaggttaatgctggctcgtgggccgctcattagaatagggccatctcaatgagaatactcgatgagaattatctataatatttaatgacgcatattgctttgttctccagacaccggggcgctctagaacccaaccgagagaggttagattgtaaatcaatgtgtctcataaaggcaagctaagagaggggattaacagctacctatctaatgtaagcagtgtaaaaagataggttgcagagttggtataatttttctctggtttaatgtagggtttcccctttgcaaacgtcgccttgccgtgagtcgcgtctattatttatctataatcagcagacatgaggtatccgctggcaaacgtctcttctatgcaccagtcgagtcatgcagctcgaactccgcgaagaacgaagtctgattactaccggagagaagcgatacttctcaatgacaaaccatttccctaaattctaaggctcaaagattgagacacacggaagtagactgaatcgaatcgtctgatcaagtgaagtcaggtaagcaccgcgccatgccggtgcatgtgactctagttgttagtgctggtctgcgattgggctctttgtgatgctacatagaactagctaaaagtagcactgcaatgagccatctggaatgagagttgccagtgttggctctctctcatcgtggtaggcacttagtcaaaaggggcaccgcagctccaaaagaaggtgtctactcaatatagcgctctcgaggtcagattagggctagcagagcgtctcggcggtctcccaagcaggtctgttcaacgatatccttctagatagttgtgattactggtccattatgagtatgtatctgcgtccaactacttcctatacaagacccagaaccacacgaggcagcctacctgttccacaccctcacataatccacctccagccttgaactcgccgcagtatcatcctgatcctcagtcacatcccgaccaacagcaacatctagcagcaggaaatgcccctggtacgcgatcttctcccagacatcgcggtcgccgacatcccgcccgcttagcgaaaacgtcttcaccccgtccagataccagttcagtgtattgtcttcccacatctccgccccgtcgctgctgaactgcgtgcggtcgacctcgaagccaaggtagtgccagttacagtctctccataaagcactgctcgtcaagcccgcaaactcattacagggcccgccgggtgcggttccgcaatgcagtgcctgatggactttctcctcgccttggacaatctcagcgatatcccactccgacacagccggccagtccaggcacgtatcccgatcattcccgcggatctctgtgccgagagcccagaagcggaaggtgactgcatccgcaggcgatgccttttctagtgtcgaaaccgagacaccagcagcggcacaccccgtcttgatccgcgcgtcgatgaatagtttcccgccgcgctcggctttgaagtctttgcggactgtctcgatacgcgcgcttgtccagagcctattgcttttcttccgcggggtgatggatagcgtcccctgctttgtaagatggatattctcagtatccgctgtatatgactcgatatggagtccatgatcttcccagctggccgggtagctctgccctgtagcatagagccattttgcagcactgggctgttcgactgcaccgctggacggctggttgaattcttcgtgccaggtgagactgtaaccggccagcagaggcttattgggtcctgagtccaggccacgagaggagattgcacgggcgccgtgtgagtggggtttatgattatggttgtgactgtgaccgtgagctgtggttgttggtgacagtatgaggccgagtatgaagagtgcggctgagatgggggttggcggcttcattgtgggtatgttcttggattatcttaggaaggctatgggccgatggccgatatatcaaccatttcagaaaaaataaaaataaaagccagccgcagctttattctgggcattgccagcggggagcgctgattggtggatattgcatctagaccggtctggccagctggatgtttcgcagagcgtttcacgatgatcgagttggcatgtcttcaatgtagaaacatatttttattgctcgttaacctattctttagtgttttagcgtagttaatgtactgttaggactgttggtactgttagtgttcaatattgttaatattgctatgctgttattgctatagggctgccgtagctacgccgaatggcctgctttccatactgtgctcgatcagagtacacgaaacagtagagttgacctatgctttaccctgcaagcaaagctaatcctagggctagctgttccatctactgacggacccggaatggatcatacagcgggtcgacagacagcccatcgagcttgtgggtgaccacccgcccgtctttcaagagaccgaccaaattctctccaatgcgatccaggactgtgatatcctccagaggatttgccttgaggacaagcaggtccgcaatacccccgctcctgatactggcccagcttcccctccatccccagatacctggccgcgtccacggtggcagattgtagaatctcacgggcagtcaacacaccagccctgatccggaactcctggttctgcaggggatgcaagcctgccaggagatcggatccgtagcacattgccacgccggcgtcacggaggaccgccagagcatccaggccgcctcggaggacctcctggttcttcctctggctggcatcgtctaggaagtgcgagaatgctggctgcaccatgccgtagtatgtcacgagcgtcggggtgaatgtgacccccatgtccctgcagtactctgccgtctcgcggtcgatgaaatttccgtgctcgatcccgcggaccccattatcgacatgcatggcggatcgcatccacagtatagcagtgcgcagtcacgtacttgcccgagtgcgcagcagttctcgtgatcgc

SEQ ID NO: 16134 - DNA, 3192 bp, Emericella nidulans
gcgagagagaccaagagcaagttgaaagatcacgcagagcgtccccggaaacaatcagcccgctctggcaccaccacaccttctttcttatctccgctctcaacttcttcgatcatctctttctcccagtttattccttttgtcaggcctaccttcaggcctatttttcgtgctttaggactttgcaccgcccctttggtctctaatctataagctgccaagaggatcgccagctccaaggaccggcgtctccactagtcgcttgacccagcgtgaacctcaatttaagccagcgacaagacgagtggcttcccgagtgcttggctagatgtcggatctgggattcctaaaccgtggttccctgcctagactcttgtcgaattccgtcagacacagccccagttgccatgtgcccaatgcctgacgcagttggttgaccgcgtttgcgctgacgagctgacccgtgctggttgggtatgaaggcgagcgtagcttggcggtctctaggaaacgagacgaaaacaaattccagcgaggcggaacccaaggatcaggggtcagttgcccacaaggtcatcggcaattcctttatcccgttatctcaatgttataaactaactcacctactgagcctctacagtactgaaccaaggtataagagcaccgcttttccgtaaacaggaagagaagagagttcggcttgagatgtcgacgcccaagcgaaggttttggctcccagcaagtattggcctgcgccaaggatattttttccggtataacatgcgccttgcggaattatcacgtctcgggtcgccatcacaggcgcatacgtctgactcggtcatcagtcgttatgttccgggtacgacggagaatggaccgagccatgcgtggtggctgaattgcggcatgagtaatgtagaagacgacgcagcttcctcttccattggccgtgaaccagcttggcgagcttcttccgtcaccattttaggcgggatcaaagtctacggctgcgtcgatccttgaacaggcccggcaaacctatcatacttcaggaggcgcctcggtcctccatgcttgttggtgcgttctaactgccatctcaccctcgcgccgattattcccgatcttccaggagatagctctgctcgccgagctatggtgtccagtaatacgaccgtagcgcagaggtcatacttcagcgtttcgctcttagcccttgcagtttcatgtcattgcgtcatctcctgggcttatctataaggtgcgacgcatatacctttttgggtctttgatccactatgaagcccgtctgtctcggcagcggggcggcggagctggagtctactcacagtccataccggcgcggggtggcgcctggctagggaccctaatttcaagcatactttgtccacttgataaggcattgtattgacataatattgcggagtaatcgctaacgacttttacaggcatagggaaagtggcccgaccaatggattgtcaggatgcggcagcatttcctaatctgaacactatatgctccgcatcccagcactttaccctgtcatgcatactatagagcgagctcttggagttacgcaagcctatcatgatgtttcgaaatgtaagcggtttcccagctatacgcaaaccctgagcaacgatggcttttacaaatgacagtggcgagagctaagagccgtctattccatacaatcacgatcgggtactaccaactcaagcaactcagataatataaaccctcccctagtagtgcagtaggtggacacgattcgccggtcaaggtttgatgagagatggcgagggctgtgcagtcccccggacggggcatatccgtctccaactcaaggtctcctgcctaggcaacagtcaccctgcaagcctaaagagcgtgggggtatggaatgatcgacgtaatccagcaccggcccttatccccacattttgaactagattatctctgcgacgactggagtgacttgagcagggcttgcagtaagatttcatccttgccgcatgtttatcatcctttcgcgccgcgtaacagggtcgtctacacgatggagctgcaagaccgtccttgaacgtgaaaggttgctgcctggctgtactatataactgactaaggcgaggtaatcctaacggttttcaagcatgcaaatcgtgtcaactcttcatgaagacaagcagataacttgtgttgttgtgccaattcatcactacgaaacaagtttgagtcaacatgacacatgcggtaatctctttaaacgaacatcgtctgctaacaagcagtagtttgattattgtagcagtggtcaccttccggtcggggaaacgctgtgtgctacaaagttctccgaactctttgccctactcttgccaacattctagcccttaagttgcggcacgacgtagccgcggttagcccactagctgcttactgtaagtttatcatggaagtcatatgtgaaagcagtgggatgcccttactcgagcttcggcatatgcgtaatcgcgcgttaaggaaacacctggttttcatagcgagtcacgcaacacctatgcagcatctgtgtgtctaaggtatgcttgttcaggcgctcatgctccgctagtactaacacaaacctttcagtttccaaagctgagatacataacaacctcggaatgaccagcatcatgggagctctcctaccggaataagccaactcgagcacttgcgctgagacagcattaggcgtgcggacgctcgaacccgagcatcacacgaaattccaagtaccattgttattggcgattattcgagagggttcgcgtcaagtcacccgtggataagtggctacattctctggagagagtgggactgttgctgcgaaaaaactgcaaacagcccgatccctgaataatcgataatcctaagcagtatgggaaggtgcagaacggcatttagaacgatatgaggaggcccgaatgctattggaatgctctaagaccgttgggcgccgcttccaagactacgtaaaagcctgaccccaataagcacattagcgtagccctgatgatcacccacttttattggttgaattggaccgcccagcacacccgtttcaaaaaactggtgaacaatccaccacccttaatttcagccagaacctcccgaccctgatg

SEQ ID NO: 16135 - DNA, 355 bp, Emericella nidulans
  unsure (1)..(355): unsure at all n locations
agagaccggcggaaggaaatacgttcacacaccgggtaaaaacccagacgcgcagggcccaacaanngggaaaaagacaaggccacggcaggggcgaacccaaccacaaaagcgagcgagaaaccggagcaacgaaacgaagcaaagagggcacgaaggaacggaccaagcaaccgggagcgcacgaaaggacgcacccagcaatccgcaacgagagggagcaaacacaaacgccacacccaggacggaaggaaaaccaaagaacaccgggccaccaagcggaaaccagcgagcggaacgcaccacagacaacagaaggggacaagccaacccgccaaaacaccagcaaagacgg

SEQ ID NO: 16136 - DNA, 1170 bp, Emericella nidulans
  unsure (1)..(1170): unsure at all n locations
tacgactggagaatgctgtaaggcaaatccggatatctttggggatagtggatataaaaaggatgtcaatgtcgaagggcagaaactgtggtcctgggctgggctgtcttcgtatctgccgttttatttgccaatcttgctgttcggggtggggaagtttgtgttttagttgcttgcaaatctgatacctcggatcccgtgctggaaggaaggaaatttgtgctgcttgactgattagcccctctgactgatttggcctgcgtcggcgccggacgtatatttgaggattctaaaatttcattggaatgaatacatacatgaataaaaacaaaggataaaccagcggttctcctccataacgaatatatatatatatataaatagataaggatataggccggccaatcactcctctagaatcggtagcgggcccaaatcgtcgaagaaccgagccattccctcgaacgaacagtcagggaagccaaagccgtatgcccattcctgcactttgtcagttgctacttgggtagttttggatttttataggacgcaccgggccatcaaattccccaccagcattaccaccggcatatccgaagccattgccgtatccatgagtgtgagcatggacatgggcttcgacttgaccagcaccaccgttaccgctgccaaaccatgccgtctgtgcgtccgccgcctgcaataccccgttcgcatcccttccccgtgacccatggtgttgtttatgacgctgaagcggaagttgattctgattctgatgttgatgttgacgctgagtctcgttcccattcccactccaaatgccatctccattccgaacctgaaactccctcaaatagtaccgtataatctcggcacatttccgcgtcacgacgctctcgtctgtggcttcaagaatctctatagctttttcgacggagcgcgttagggatttggtatcaatgtctctcaatatttgatctgggggtaaggttgatggcgagtgcangtgctagacngagtgctagagcggtctaagacggtaggctgttgcgaatgtcacttaagctgtgttgtacccacttttggcatccaattaggaccttcgaggccatttatttttcattgagcccacatgaaggtaagaccgtaattgtgagaagaagggaa

SEQ ID NO: 16137 - DNA, 855 bp, Emericella nidulans
gtggcgaacgaaatgggcgtgagtcatattgaaggggccgagtaactccccatacaccggcatcatcatcatgggacacactcttaacataaaaagccggattgagccattaccattatgaagagagaggatattacatacctgggcgctggccctgctgctcttccaacggatgttcttgcgactgccgcagaagctctccagaactatgaggagaccggattgcaagcattgcatggcatctcaatccagttgcggacggcacgcaaagttagctaacaatgtcttcctagaggtgtcgcagagcacagccatcgcagcgaattggcttctggcattctgaattctatgaaggcagatctagcgacattcctagacatcccttctgacttcgaaattttgatcatgcagggtgcgttcacgaaagccgatctcgacgtgatgtcgtgcttaagctgaccgggaaattgaaaggtggtggatccggcccaattcaatgcaacccggtacaatcttatcggtatcggggttgggaaacaacggcaaaaagattcgaaggataaagccaagatccccaggaggaggtattgcggatttccccaaaggggggaacagcttgaagttgactactgggtactggttcggaggcttttcaataatttgcatggggtgaatggccaataaaaaagctgcaaggcccttaggccggcagagccccatatttggcaggacggaacatcaggcccccgacgaacaggaattgaaggtgcagataacggacccgccaagcgttgtaccttgaacaatcacgtggtcctttcccaatttataggtgaacccctttgcatcaaatac

SEQ ID NO: 16138 - DNA, 868 bp, Emericella nidulans
cggacagctggaggctttggggtttcattttgagaccgacccaataatttccctgacgctggaaccggaaagtgggggtcatttttaaggatttatgcgcatggttaactttgaaggagtcagaggagggcaaaagtgcgaacagtgccacagtccttcagcaccaataagcgagtagttggccgaagacagctatatgtaacaacctgcggcacatatcgaataataaagagcagaatagtgatagctattaaggcggggtgaaaagaaagctgatagcataccagagctaggcgattcaagtatgcgcgtcgccccattgtaaatcacgtctctggtctcatcacgccgagagagagtccaggacgaagcgaaactccgagtagataagatggcgacaggaagaagatcgcccatgcttatgatggttaggcggctgctgttgtggcttcggctaccggcgtctaatgcccccgttcttagaaggggattccatgcctgttgggcgtttgtttgaaggtttacaacaacccaaccgagaaaccgtttaaaaaagtaatcaaaggtttgacaccagcctgaacaacggacttggctttactgttaacatttttggttaggcatgtccctaaaattaaaattccaacctaatgacttacttttcaaacctttaaaaacctttggggtttaacttttctttttcgggagccccctatcccgcctttggtgttttaaaaaacccttctacttattgcccctctctcaatatatgttataggttttatcttacctgtggaaattaattgtttcttttttcacaaactatgattcttcttactatttttcctttattttctcattactcatt

SEQ ID NO: 16139 - DNA, 554 bp, Emericella nidulans
accctcgcatggtgcttcgtgcgatcagtcagcatcggcagtctcaaccacacgagtgtggagattatcgtcgcccttttgataggccgaagcatatcgagcctttcaggctacaaggtgatacgaagtattatcgtggatttgcgctgacagctctgagggtgaaagtgaaggagtgggcgtagactcacgaacataatgcgcaatgcgcgatcgagatttaactgacctggaagaggaatcggttaaaaacagctgatgactacagataacgcgtagccaatcaaagaatgttgcgctatgcaaccctgacttttgcactaacgtcagctcgcactgcaagagaggtccgtgcagataactcgacagactattgctaatcataacaagctgaggcttcacattctctgcatacaggctttagatactgtgccatagtgggtgattgacgagacgaaccggtaatacgactcattgagagcgtgaggcaaatgcgtctggcggaagatcaaattgccccgcgtagaagtcataccatgtatggttgtactttg

SEQ ID NO: 16140 - DNA, 532 bp, Emericella nidulans
ccagtaacacggcctatctccttagatgatataagatcgccctataaccaaggtcaatccttttttgttgatcatccatgccaacgcagcatgaagctggcaaagctatccctgctgcaggttgctcgccgggagacaggagccatactttttgactgtctaaaaattcgccttggttgaaacctctagaagggccgcttttcaagtttcgctgatccacgccagctctttagcgtggattgataaaccttgagaaccagataaggttgggccttctgattaagcttgcttacgtgggacttaggatccgaaccctcagcccttgatgtttgcttgtgaacactccccggccatgccttagtctcctatacaatcttctttacaagtaattgctcgtacagtatttgcatgtacgaagaatagcgataacataagctcgtattcaaactacgccatataaaacctatgtacaagttagcgatcctcatgaccactggagtctgctgatttagcaggagtatagtggggatct

SEQ ID NO: 16141 - DNA, 2953 bp, Emericella nidulans
ttctcgcgtcgcctttcgcgctcgcgctcctccgcaagagatttttcgaagtcctccagcgtcatttttcaattgttaagacatttgaagtgagaaagcaagcaatgacgtcgaaaaacggtcgagaccttctcgctcaccgcctttggcaattccccctcattttctgtcgacattttatcatcaagcgtactctttacaagactacaggctattgttcttgggctgtgttcttgcttgcggaatcttctacgaataatttctacgagagcgtccagataacgtgggagtgactcaccatggcgaattcacctgtagccgtcgtctgcgtcggcatggcaggtcagtcaaaggatcctacagagtattgggagaatacgtgaaactaactgtatgaatcaggctcaggaaagacgacttttatgcagagaattaactcacaccttcattcgaagaagcagcctccctacgtcttgaacctcgaccctgcggtccacacagttcctttcgaaagcaacatcgatatccgcgatgccatcaattacaaagaagtcatgaaacagtataaccttgggcctaatggaggtatcctgacatcactcaatctgtatgccaccaaggttgatcagatcatcgctttgcttgaaaagcgcgctgctcccaatcctgagaaccccgccgcaaagccgatcaaacacttcctggtcgatactcccgggcaaatcgaggtcttcgtgtggagtgcgtccggaagcatcttgcttgagacactggcctcatcgttccctaccgtgatcgcctacatcattgatacgccccgcacgagctccaccagcaccttcatgagcaacatgctctacgcctgcagtattttgtacaagacgaagctaccaatgatcttggtctttaataagacagatgttcaggatgcggagtttgccaaggagtggatgaccgactttgatgcgttccagcaggcgctgcgggaagaagaggagtcgggtcaatttggaggcgaaggaggagcaggaggcatgggcggaagcggctacatgggatctctcctcaacagtatgagccttatgctagaggagttttatcgacatctcaacgtcgtgggtgtgagcgcgatgacaggcgagggcgttgacgagtttttcgaggcggtcgaggagaagcgcaaggaattcgaaagggactacaaaccagaacttgagcgtttgaagaaagagcgtgaagaggcgcaggcgaagcagcgagaaattgagcttgggaagctgatgaaggatatgaatctgtctagctccaaggccaaggaggagcctgagacagttagcgaagccgaagaagaggaagacgaacgagttgcagcgatggggagagcctatgatcctgattcggacagtgacgaggattatccacctccggctggtgacgacgaaggactcagccagcggtatcagagtgcactggcagactcgagaagtgggccctcaaatgaagacgcgagcttcatgcgatatttacagcagagcaatctcaacgggtagaatcgcctccagcattcttggtggtacaatgttttggggttacggcgttggtttgcagtcacactatatacattatgtgaaatgaaacatcaataaacaataccaatttgttgcacaaagttagatgcgtaataaatctatcttgcagtctttatcctcacgtgcctactacatcatactaggttcagggggagttgtgtcgtactgtacctaggtagcaagaccgctagagagtgacatcatactgactttcctcgcacactactcttatttataccagctcccaccaagctttctcttctttgcaacgatccccaagttattcgatctcaaaatctcaaatttacaattagcaactatggatgtatgcatttgtctaatcttttacaaaatactgctgactagaattaggttttctacgcatacacctactcaacatcggcctggctggggctgcaaagcgccgccctgatctctgtcccgcaagggatctcagctatgctgcttgatgaaacccgtcctgctactggtatgccttctctgcttcagttcctctacctcccaactaacacaggcgacagaaattgaagtctacttcgcccgctgcctcggctttagctcctcgcactcgcaacactcacattcctgctcacgggcaacataccgctaacatcaagcctcgcggacccaatatcaactgaagacccggagtccgagaccgacccgaaggcaccctacgcagtgccaacattgctcgtaacatcagcgttccacgcggcctctgcgttctacgcatacacgcgctacgtgcttaatgcaaagggcgtcttcctcattgcgatggtgggatatgcaacagtggccgccgtgggactttggtgtgttctctttgctagcagccatgggcggattagcaggaggaccggtgctgataagcgcacggctgggtttccatttgggaatagggaggcgaagaagaagcatgctaaggggatgtaagtgaaacggtccggacagaaaacggaaaaccggagcacgccgagcaacgtgatatgggctctatatggcgtaactactactccgtatctgatatgagctatctgcagcgacggagcgctcggaaagctaagctccaactgcagattggttgtggggattcgaggcttgttcttgtgggtcttgatcggcagagagataaccagggaaaggagtaaacagaattattgaaaaatatttaaacgacgcttttccctctggtaccgtgagcttggtcgttgggtactgtagagcttgtttgcgcgtaagatgcaggtcaggtcctttctcgcgtggtggctgctcaccttcacctcgatgccttcgggctcgggggcctcgacggatatagtccgccaacactccaa

SEQ ID NO: 16142 - DNA, 3304 bp, Emericella nidulans
atatgatgagaactggaccctattcgaatgcgattgtggaagaaggtggttgtcaagaagtagggggattcccgaagagtatatataagctcttcgaacaaaggaaaaattggataaaagggaccggagaaggtagattggcggagcatcttttattgacagatctaacaagtgcgccgttattagtcgtagcttcataaaggatttgttctgcaaagctctctgagcaaaccccagtactgtcgacattggtgacaatgcctatgtttcctttcgttcggttgtagtggacagctcaatttgctgagttgtgagctctttatgttttctttatcagcggtttagatactgcccgttctcgttgggaacttagcatctgtacagtgacatgttttagatgttgtttgattagggcaagagatcggatcctggcatagagagcgcactgaggcctacagatgaacggggcttggacaagtgcacaattatagatgcattgcttaggagaccggttcaatctccacaactggagtttgcacgaccaggaactccaaatcatgaaagtgaagctacctcttatagtcaaatcttcgttgctcctctccttggatctatgtactgtgcggctagggccctccatttgattaatattaggctggcctcccgcctagctgtttagtaatatatgtaggctctgggtagatgaaataacaacgtgttgtgccatcgctgatgccaatcagtatagagtctcccttcgttttggatagcgatttggagtaattcatccggaatgggaaagataaaggccatagcgcctgcgcggaaggacggctccaaggtagcacccagacgaaggagaacatctgcagtgcgatccatcttgttaaggagagcgagtagttacataagcatattcttagtagaattgcggatgaagcttccgtgtaactacaaagtggtgttccatagggtgagaatcagtcttattccctgccagggcttccctagtttacaactagcgaaatggcacattccgaaggctaaggtttagccgagcctgtcttgctcaagccaacgatcacagtcctatcctgttccgggtatcctattcatccgcttcagcaaagtctgcaaggatggtacggctgaaggtagacttgggggccgccctttcctttcaggctagttcaagctccccaccgctccttcctccagtattgtcattctcaatacctccctgcggggtaagtgcagctgtgcctttgcgtttcatccgaaatgaacagcctcggtcttgtagcgactcgatggaggtctttggtagtgtagtctttggcacttggtggctcaactgtgtgtttaaggcccccggtcacagccctcgcagcacgcagagaactattgatctggtttctcgcgccgtttgagacaggacagaccgcctagttggcggtaggaacagattccttttgttcttggctggatccagaagcatgcatatttgggcacaagctgcagtggagtttcagcagcaagagtcactcttgtttcagtctagatcgcgtttctcaaatggccgctaagccatttcgggcgggttgtcttagatcttctgctcacgataattcactggtcgatagcaatatcttgtgggtagatatgttgatgtcaccgtcggtaggccaaaccagcaatagttgtttggagccgcagcggggagcatagtacaagcgccaaggagcctgagtgtattaaaatcgctggatatttagattcatccaccggtaaggagtacccaagacccgggggcgtaggatacggcttgaagtctgcagtcgagaagagcagttcgtttcacttgtctaggcacatcgcagggaaaagtttgaagtgcaggttcaccattcaggtttagatgagcacgattctggggaagctcaatgtcagcatgattacacgagctcacgttgccagactctgatcgccaaatgatctcgaagaccccttgcatgcacgtgtcttggacctcttcgccaaatagggaaagaaggctggcagctggccggtctttgactgactgcgaacaatgcaaggtttgaccctgtagatgcaagaaattgacgtcgatgtcgcagttgtctccagaaaagcaggcttggatacagcctaatcttgtgactcgggcatgattagatggcccaaatgttccaggcatgactagacagcgctgaactcacttgaaggcctctggctgacattccgtttgagcctttatacttgatctgtaaagagaaaggcggttgtagaagtcaatttcaaggagcttctgcagtattggatccaaatcaatcaggttcaatcaaacagctttcaggtgattgccagagaatagccatcaatgggtaaatgaataagtgaaaggctagtagtctgatcatgaagtcattcagagggagaaaatttttgtagtgaatggagagtaacacatctgaagtaccccatgcaggagagaacagccaccttctctctacttaagccccgtcacattcttagttgtaaacttttcttactctccctttcaccatctcttacagttagcctatctttatctatgttatggtttgtctagatataaaatctgttgtcttttattcgtgcctttgtacatcgtccttaaaataccactgtgatggcctcacccatcatccagccagctggtgctggaatacatgacatctttactcagcttgagctctgggagtcaatagacaagggactcagcatgattactattttacgtgataacgatgtcctgtggaaaccgtttctccagcttaccctgttcaaccaactcaacattgtcaggaaagcatggagtgcaactattcaaaaggcttctgaatctgacaaggttcctactctcaaagatgtttacacgagtgaatcttcttttattgctcaagcactgttagacaccaagaacttgcagattactccacccgcaacaccccgaacagccctctcgggagctttgttggcaaagactatcgttatatttcatcattcagaaagagcgcaggaagaattgggcactgaactgccagaggaagtccgatctctggtcaaccaggtaagtgagcttcttcaaaccggttcatttgattgcaggactaatgcgataggtacaatagaatgccatttgtctcaaagtactctacaatgccaatcaatggcatattgaccttcattacaagcgcgattcgctctcttccgctcaggctggagaggttgccgagatctt

SEQ ID NO: 16143 - DNA, 903 bp, Emericella nidulans
  unsure (1)..(903): unsure at all n locations
tacatcgtagggcatttgtangtagccgaagatccaggaagctgcatgctgcctgcagatatataaacgacatatgttgacttggcataatcccctttcatagagaaatacgcatatttgtgcatctatgcaaacacgccatcaacagtcaggttcgtacgaaagtcacctggctacttaaagcaatctacccctctgtttgtacccagtccagacctcatgcagtatccgttctgagttcgcaggtggggccgaggtacatatttgagccctgctgaaggagtcttattcctgcatgaacttgggggcatgaatgatttggtggcatgaatgatatcctgtcagtcaaacaacatggccataagcattcaagaggtcaagtctccattcaagcgccggatacgtacataaatattcatgcgtactatgctgcgctggaagaatatcccaaacgcagatggggcgtatggcataaagaatgcacgaagcgattcgttgtttgatactgaatagcagtggtaagttcatgttgtcatgttacaataggatttattgtcttcccgtaattcgttttgtgcatagacgagcaccgctactgaccaatattttaacttgggataacgcttttaattggccgtccttatgatcgaacagtcgctttttattacgaatcacgaatcggttgttcctaaatcaagagattttctttttcaacgcctctgaagaattatctaatatggttggtaaccaaggttatcaatggggttcaaggaatctctttgcgaacaggctattttttttttgcaattttgtccactcgtgtggtgaaattgtggttttgttcaatttttatattaattttttgttggacttagttttcttattatcttaataggtggtgag

SEQ ID NO: 16144 - DNA, 511 bp, Emericella nidulans
gggggaaagcccgggtacacccctgacgcctgtcattcacggttttggcggcccaattatgctacaccaagcggcggagatgctcaagggggagttcattcgctcattgtcggagtacgcacccactcagtcaagtctctgcagatatcccctacggggcctgcaggggggatatacagtgaccagaggtaggcctatacagggcacacaggcagttacaacagggacctgctgaggacataaccagggcggacgctccgctcatttgggaaaattgcagccagagaggtcctgattggcggaacgccgtccgtgctggtgggggtcgaacctgcagcttcgaccagtagaatggatgatggaggacgagattcggcttgtcgtggatcctgaccagcggggctgtctcagtgctgacacagacacagtaagttcgtgagacggatgcgagccaggggtcacgctatgatgctacgacttcgagactagaggctggccgtcgcatgtagga

SEQ ID NO: 16145 - DNA, 3182 bp, Emericella nidulans
gcatgagaccggttccccaaaacccgggctcttaccggccaaatatgtcgctcatatcctacaggatcagcagtcgtaggttggtcttacggactagtccctagacttgtcttagatcctgcgcttgccagaagatccggtagaatggtagacccgggaggatggcgtgttgtcatgttggcgagatttcgtctcatagtcgagctaccacgtagtcctcgtaacatgccaaatgaaccgaggttatgcaattactatcagagcctacagaacttactatttgtttcatagcacttgattttgacaccattatgtccttgcagaaggttgagaggctacactataggccaaaaatcatgcatccaatcattcttctattgagttcctaacagattgagactatactattgaactcccttttctatgcaacctacatctcataatttgtttggaatgcccgtaatcttctccgccaatgtgtcagctttcagggcgggtcggtctgctttgccggccgtcgtctagttatagatagaggcataagattagctcaggttattcaagctggacatgagaatcatccacttacccctccgtcgacaggcatgattagccctgtgatccatttggcttctttgctgcagaggaagagaattgctaggtagcgcacgtcagccatgctctcttctcttgccagtacacttaccataaccaacatcccatcccgttccttcttgcttcaggaggttctgattgatacgagcctggcgcatctcgtccgtcattcctctaccgcgtaccataggagtgaacaccatccccgggcaaacgcagtttacccggatattttctgggccatgttgcgccgccatcgcccgagtcatctggataatggctccttttgttgtagggtacagcaaactagggttaccgccgaggactgcacttcatatcagtatgtcatgcacaaggtaggacatttagaaatgaatacgtacgaccactgacagaggacatattgacgatcgcgccgcgtccgttttttctcatctccggtatgacatacctgctcatcagcaccatgctagtcacattgatcctgaagtctctgtcccatgctgcaaggtcaagtcgcgtagcgtctcccatggcacctccaactccgactggaataaaatgcattattagcttctggcccagaatgttctttgggaggcttaccaatgttaacaagtatattcacggtcccgaatgccccgatggtctgcgccacggcttttttacagctttcttcatccgtcacgtccgcctgaatcacgatggattgaccaccgtcgagatcaatcatgcgttttgtctcttgtgcccaatcgacattgtagtctaccagggcaaccttggcgccctgtcgtgcgagcaagattgctgttgcgcggccgtttccaatctcccctgcggaattatgaggtgaattcgaacacagccagctgaggaaggggcttaccagccagacgagacccggcaccggtcacgattgctacttcatcagtgaagtcgaatgctctaggggatgtcatcttgttgaagaaacggaagtttgtttcagcgagtctagagttgggtcacatatggcgcacagaactcacttataaatccctttctagggtacgatatctcagtcacagtatggaaaatggccggacctacttcagtgatctgcagtgtgctgtggtttgttcggccattcgccggttttccggccctagaagcgactagatgcggcatacattcacattggataaccccgcccggcggtagtactgggtagcaataatttgaaacaataataggggggagcggaggagagaatgcatacccaacctagtaagatacgaagttgagcgactgtcgatgccgacaggcgtgagcaacctgtcagagtccacaagatccgttcatctggtttcgtgcttaggtgtttattaagttttacttgtaaacttcattggcaaaactactagttgtgtaattgaaaagcttgtcaggattcatatgaagatcaatggcagtctgatttcctttctaagctcgtgttgaagtcgaggaactacttgactcgggaatacttcaacatataattcacgatctgcatttggctgactgcatctaattataagcaagaggcaattgaaagctcggtgaatgtctagactgatgatactgtcctcgtagtgtcagagatgattgcgatagcttgatgaaccctcttgcgatagccaaaaatcaaaccactgcacaatcccttgcagactctgttcttttacgtagcctgtaaagcataagccagctttggccccagattcacaaagagcaacactcacgttcataagcattgtccatgtttccccgcaaagcaaagccatgctcgacgccggagaaaagctggaggtggtaggttttcttgccggcctgcaagatctgcaaagccgtccggcgagagtcctgatcaaatgtatgatcttcctcggagcatgatagataaagaggctctgtacccaatcagaccttctgtgccaaaccccccgatagacaacccctactcttgatgtttgcaaaatgatgattcttcaagaacgccgggtgcgcaaatgcaccagcattgacggtatttttggccagttcggaacagacatatggtgcgccaaagcaatacctatgatatagactgggtcaggtaaagcggcccaacagcgggatttggttctacttacccgacacaggcgtacttcgtggatggaagaccgtaggtgcgttttacttcatcaatccatcgtggaaccgcttcgtctgcaaatttcatatgtttctttttccacgcctcgtagtcgaagtctggattagaccggtcgtggcgattacggcggtgtttccaaacggggtcctgtagatctctgagttagacagaaagtggcgcagaatccgctaagcatactcctcgaaaataatcgacgcctagcaccagatatcctgcatctgcaaacgcgtccataaccaggagtccattgggaaacatgccccaaacgtccgggaagtatagcaagatgtggccatttgactgacgtcttcggggtcgcgagagatatgtatctagttcggcgactgtaacaaattggcctcgtggt

SEQ ID NO: 16146 - DNA, 1534 bp, Emericella nidulans
ttggcgattttatttctctctaagggcctagagccccttggtagtctcctccatgggcaagaccaacaccggggcggttcagtatattcaccccgacacccctctcccaccgccgttgctaaagaagaaggagctcgatctgctcagtaagtggaagaatggcgaagccacgatcagcattctagacttcgacccattggaacttgcgcggcagttcacgatcaaggaatcgcggatcttctgcgccattctacccgaagaactgctcgcaagcgagtggatgaagaagaccggatcgcttgcggtcaatgtccgcggtatgtctaccttgtctaccgatctggcgaatcttgttgcagattcaattctacaactcgaggagccaaagaaacgcgctgccattatcaagcactgggtgaaaattgcaaacaagtgcctggaactcaacaactacgactcgctcatggcaattatttgctcactcaactcgtctatgatctcgcggcttcggcgtacgtgggaagttgtttctcagaagacaaaggcgacgctggaatacctgcggaagattgttgatgtcggccgaaattatgccgtacttcgacagcgtctgcagaaccacgtgcctccctgtctgccatttgtcggaacctacttgaccgacctgacatttgtggaccaaggcaaccaggcgcttcgcagtctcccgactgacgacggtgagatggctgtaatcaactttgacaagcacgtcaaaactgcgaaaatcatcagcgagctgcagcgcttccagatcccgtaccgcctgaccgaagtaccggagctgcaggcttggatgcagaacgaactggtgcgcgtgcgatccaatggtgaaatgagtatgcagaccttctaccgccgctcgcttgtcctagagccgcgcgaagttcagccgccgcgcaccacgctgcagtcggagtctagctcctcctctctcctggaaaacgctaaagacaaatttgatttcttgtcgtgggccacgacctcgaagaccaagtcggtgacaagcaatgcttagccgcctttcctcactcacctacccaccaatctcttacgatttatgaccttctcttcatgtcttgatggcgttccttatcttcttggatatcattttgtcagtcattgtggatacctctaatttgtttaccgcctttgttttattaccctcgctttttttctcattttgttctctatttgaattcaacagcgacggcggggaaaagggattcaaaagtatgagaacatacaggtatagagcctcgcggctcggctatatagtaggcatttttcatgagagacgagacgctctgatgaccttgcctgtcgatcactggttggatttgcattgttttggactggactgaactggattggactgggctaattgtttggcatggattggataccttgggaggagcttgggaggagttactggcaagctcagcctgtattatttgtatatagcttaatcaagcgattaattcatcactatact

SEQ ID NO: 16147 - DNA, 860 bp, Emericella nidulans
ggggtgaaggattggagattgaaggatagtcatcatgggggtggagatgaaaccgcagaggacaaagttgatgttgatagtagtagcagtaatgatgagggtagtgttgggacagcgagcgagaaagagaaggaaaatgttcccatggcgggtggaaagtccggagggtagggttggggcttaggatggaagagaaaggggagaagggtaaggctgacggcgaggatcaaggtaatgatttgactagtgtacagcatgcgtagcagttttcgcttgatctggggttgaagtcatatataaaacagcatacatatgcctcgcgaatgatatattaaggtattggcattgtcatagtaattgatatgctctgtattagcaggagttatgctattccctagcaatatattatggcaaggggtaggcatgtctgctttatgtctaaatctatcatatatcgtaaagtccgtacattatgtccaggtcaaaccgctaatgatgcaacaaagaaaagaagaggaaagctcaaccgaatggcaagttatctaatcaactcagcaccagccccgtcttatgcggaccatgcattctttcctccctctgcaagcgatccttcttcttccgctcataaactgcccgaacaacccgcttaacctgctgctcgccctgcgcaaagttcgccttagccagtcccacaaccgcatcaatctgctcaggcgtgtagacaaagttccaagttgagaggaagtcgtcgacgtttgggttgatggtgcctgggtgcggggaaagcggtttagtggtgtcaattgtgtcctgagcggatgaattgttctcagagccagagtgttggtcggatggtgagg

SEQ ID NO: 16148 - DNA, 3024 bp, Emericella nidulans
tagaatcaaactagatcactcctaattgccacgctcgtcgttagcgttgcggaaccagtctcccggtaccggtttgccccagccaacaggtcctttccgcctcatcccacccccatcaatcctcgtcgtttcacctcctttggatttcgcattctttgctttattgaatattcaatttctacgggtcttgtcccacatatgacgggttgttgcggtgtgcacatgtctgcaaataattggcagtaatctactccttttacccgttcaagccgactgtattttattctcgacgctcgctgtcatcgttcttccttcttcccgaatttgttgtttgacgggccttcgacgtgtattcacgctcgatcattcgtcgtttcagactcgcaatgggtatgtaatcctatctatcattgacatcgccaactgctaatgagatagtgcacgccgttctcccccagacgccgctgtcgccgcgggctgcggccgcaaggccgacatacacccaccgtgaatccggaaatgtccccatgtcctcgacctcccaccctgataaccccgtgccggaagaacctcgagtgcgctccctgtccgttacaaacaagagcttcggcggctcttcggtctcttcacaagaaacagagaacacagattcagagtcaccgtcaacaccacccacagaacaatcagatgaagagtttgcggagaaacaacccaaggatgatgctggacgtcaacggcgggcttccactgttctgatctcgcagggtcccgatgacatgcggcggatcttagaaaatgttggaacaggggggacacagaaactccagcccatgtgctgtggtggcggttgctgccgtcttcaaccgctgaaccgagctcccgggcctgtttcggtgatcaaccccgtcacaccaccagataacaaggcgtaccagagtctaaagcttaacgtcgacctccttacgctcgacagcgagctcaccaacatcgctcctctgccagagaagaaggtatcattctcggcagtcccaccttctgctgtgaatatgaaccttgggcccgcggatcatccacctccttttgtgcaacctcaccctccgtacaatgtgtaccgagcccctgtttaccacgcacgagaactcacgagcgctggcgctgagaagcggacataccatttcgatatagacgtaactgattatccggccgagagtggaatggtcgacttcgttgtaggtggtgccatcggagtttgcccgatgaacaaggaggaggaagttgaggatattttcaaccaacttggtattcccaagtctattcgggacaagaaggtcactgtccggactacccacggcaggtggccaacgatctggggtaaagaggaagcgcgcgagttgatcactacccgacgcgagctcctgaaatggtgctccgacattcagagctatgccccgaccaagggcctcttccggctgctcgccgagtatgccagcgacccgagcgaaaagaagattcttttgttcctcgcatcagctcaaggccaaggcgccttctgcgatctccgcaccagttcacacatcaccgtctctcaactgctccacgcattcccctcatcacatcccccgctcgaccacctcctatccaccctcaaccaactgatgccacgattctactctctttcgcaagaccctcttatctcccgcaaacgcaaaggtgatcagtaccgccgtctagttgaaatcgccgtcacagtcgccgaatcagaagactggaagggcggtagtagaacaggcgtgggctcgggttttatggaacgtctcgcaaggcaggccgtcgaagctcaagcgcaaggtcgtgaaccaggcgatctcgatctgcacgttcccatgttccgcggccttatggccaaccctctcgctaagcgctttgcttcagacggacctatgctcctcatcggtgctggtgttggaatcgcgcctttccgcggctttgtccagcgtcgcttgcagtcagcgaactgcgcgaacaaagtctgggtgttgcagggggttcgcgattctctgctcgacgagctttaccgcggcgagtggggtgtcgaggaggacaaagtgcgcaaggttgtgcagagtcggcggggcgagagcaagtacgtccaggaagaagtccgcaatcaagcagaccttgtttggttcgtgatcaactcgctcgacggccgagtcttcgtctgcggaagcggcaaaggtatgggcgagggcgttgaggctgcactagttgatgttgccatggcaaagggaaatctgaatagggaagaggcggagcttttctgggaaaataagaaggaggcagggcaatatatagcggtaagtcgtcgaattatcctcgtgttgttaaaaaagactaacgaaaatcaggagacgtggtgagacatatgtaagatagactcggactcgggttcggactcggagatactagagcgatctgcgtgacttatcccgagttcctggagaactcggagaaaagaggcccttctactttagcgctgttctttatcactgctgtcgcggtagatggttgttaaaccaggataggtatattggattcaactaggagtatgtatgatttataatcaagtttatatcattcactaaagttaccgattttgtcctttaccttgtaatcgacattctgagtgggatattatatacactgcgatactgccgcaaatatagcaaagttgacagcgataattcgagatatactagtaaaggaagggcaatataattacgatatcctgtgatcagcatagccggtgctttactgtcctgaggccctccatggtctatcacgaccaaattggtctcagctaaccttgcaattatctcatgttggtgagctccgccttatatacaagacgaatcaggtctaactcagttcgtcaagtgtccaccactccaatgaggagcattagttggctagctataatcattcaagggcatctaccttttgaaacaaagcagcaacttggat

SEQ ID NO: 16149 - DNA, 1692 bp, Emericella nidulans
caagaaccacaacagagggcaccgcacggtatttcggctgctctgccctcttagcaatgccacagccagggtcaatcgcaataatagctgctccaaataaaccaggatggtaattcaccaagggttccttgataattacccaaataatggccaagggagccaggactggggattccacatgcgccgaacgcaccagtgtttcaccaccacgcccgccccgaggccgcgtctctcaggcaactgcgttagattgagaatgaccataatattaaaataatgctttcattatgctctatgaagtgtgattcacgcctccttgactccaacatctttatgtgtatgggtattttgcttatgaaataattcttcacagtcatggcgctcagacaccatatcactcaatccgtccaccccatggggtggcgtgaatagatctgcatcagccaaaacaaggtcgcttttgctgcaatcagcgattcgtctgtcatcctcaaggttgcaaggagaatagttgattgaataatcctcatcgtgtttctggggaagtgtttcgtagaaccggtgtctcacatgctactgttgagtaacttcagggttgactctcgcgcctcgataagtttggtaactgcgcatagaacaaacttcccagcgttcttccttcggttatggttcgatggtcgtaattgtcataaagagccgcaagctttgtatatttagagtggtctaggaataagaagtagtgagtgttagcactggcaataacacagaccgcgaagcacacccaccctaaataatcctccttgattgttccaatcgcattgatcgcggcgacgtctggcttcacaccaagaatcttcagtcgcagactggtacctttctcaataacctggtccgcgtggtcggtgtattgcggcggcactgtgttgggctcccacctgatgtcggaggggatattcttgaggaacaattagcacccacaaaacaacgagcgcagcaacaaacaaaggaaacgtactttgcgcgcaatgaaaaccgacaacggaccagccaaggtgaagatgcccgtaggtttgactgatgtgacaagagcatcaacctattgaccggttagatatcacctgagaccacgtcaaaaaataacatacggtctctcccctgaaaggtttccagataattgctcgatactttatcgtatattccgcttgtccgttccccgggagcactcttccctcgccgatatctaccatgtccatgacgcatattacaaaatgatctccggtacaccgcccttcttcctcctcattcaagcggttgatgaggtattctcgcacattcgggccgaagtacgagggatgtagagtgatgacctttgtctcttctttgaggaaaaacatggcaaaggcacgtcaggttcggcgatatgggataacgaataaccgaagataggaggtctgcttgtagttgcgaacgaaggcgtaagtttgcgacacggttttcgaagggcgattcaggatggttgtattgtcgcagacgtcgcaaaggtcaaataactgggtgggctggcaaaaatggattaacaactcagaacttaatgattcatggccgctcgcggaacaaagatatttatttgcaagtatttgaaatgagtgaaatgcagagtttcttatcggcgaatagattctctacagagat

SEQ ID NO: 16150 - DNA, 1961 bp, Emericella nidulans
tcagctatgtgacctggtactgggtctcagggaaattgatgtgataaagggaagttgaaggagagaaaagtaataggaagaggagatagactgccgcgtaataaaaatgggtttggcgggctcctgaaaccgcgggggttgtcaccgacttcggggcggagtccaagactttcaaggttgttctcatcccacgcgaaggtggcgatcattaattagttactccgtacggattatactcttaatttaaagggaatcttgccaagatcatagctggctgcaaaggggtgacgcgacatttgctcaattgaagcttcagtatacggtatatgtacgctactaacatgcagttctgtagccaaccaggtcgaatatagacaaaataacccggccggtttaaatgaattcaaaatcgtaatacacataggccgtgtagtcagcaccaccaccttcaatgccatgcatctcattggggtcatccttcttgacccggcccttcttgtcccgtccgaatgcattcccggctaggtatgagtatttctcgtcaaggttcttctttgctttatcagcgtgttttgagcttggtgtctgccaggaattagtcttgactcttcgagcatattgtggtacctaccttgataagcgtgcagacaaagtccagcgggaggccgtagcggagtacggtctcgacaaatacgcggaggacgagaacatgcacccataccatgactgcctcgctccatgaagtccgccccagtcgcagtgtctcaccccacagcttacgctcgtcgccgcctacccgctcgacttcccgacgctcctcttccttcccgccttccacgtacttaaaatcgcgaggaatccatttctgctcgcgacatttgtggacgaactcggtgctatgtttgcggaatgttgtcacggcatatagggtgaactcgtcatcggaggcgaccaagttcgcggatcgggggacaaccatgggcgatacagtctcgtaggtcttgaggaagtctttcacttgctgcgctggaacagcaacgagatgtgtctcaatgtattcggagtcccgaacgagggcgcgggggtcaacgacggaggcaagggactttgtggataggtttccgctggtcaagttagttgagcttcgcgaaccgtagttgggagatttcacgtttgttttcgctgaagagtggccaatgtattcttgatctgattgtactgggagtatttcgatcgaaggtcactatcgatactcacggcttcctttgacgagttagctcatggcgggcatccatttcacgaaactaaccttttgtaatagatcaattagctccgatagcgacttgtcggcgcggtatttgactttattccatgagaacgttcggaggtactggtccacgggctctatttttcgtcaacttcaccataaccaacaaatcagggaaaaggtgtattccatactatcgttgacggtcttcatcttctcaatctgcgcctcgtcaccttctaggatattcttcaacgcatcgccaaccttgctgacgacaccctgacacgcagcctctagtttggctaactcgtccgcttgctgtacaagagcgtcaagggttccgatcttaaactccggaattgggaaaggagcgactgagccattatccgagccgacagtggcggcgatggcgtccaaggcatcgtcgcggtggtgcgagggagtgatggaggaggggagggagactaggaggtacttgatcgatttggacatgatgacagctgtcagggaggaaggatgttagagtaagctatcgccgcgcctgacaaggcatgaaggagatgtgttggaagccggaggtcgaggagtagtgatgtagtgatgggtagctgtcccgtccggttagattattgcccgaagctgcggttggcggaggcggtcggggcactgcggagctatacaattagacagc

SEQ ID NO: 16151 - DNA, 878 bp, Emericella nidulans
actaacttcttaggttattacatcttaggtagaaagccgtgcaaaagctctgcagcctggtaattaaaaatgggtgacagtaattaagactattcaaacaactggaagagttctacctctacttgttattctaccaggcaagcaacaccaaggcgcttggtatctggatctaccaggtaactggactattggagttagtgataatggatggaccaacaacaaactaggagaattatggcttaagcaagtctttgattgacatactaagtcttctaccctgggtatataccggcttctaattctagatgggcatggaagtcatgcaactgtagcatttgactattactgtacacagaatcagattatacctctttatctaccacctcacgcctcccatctacttcaacctcttgatgtggcttgctttgggccactaaaaaaggtatatggccagcaagttcaagaccttatgcgaaatggaatcaaccatgtggataagagtaatttcttgcagatttataggcagatacagccttaagtcttcttaacaggtaatataggcagtagcttctctgcaagcggcctggtcctatacaaccctcattgtgtgctggagggtcttttaatctattttacaccaacaccagcacgcagttcttatagccaaaaatcatccagttggactgcagaaacatccaagactgcttgagatttacaaaaacaatctgccttaatacaacaactctggagacagcctttaacaaccccacctagtcccataactcgtacagttaatcaggttgtcaaaggctgtcagctggcgatgggcaatgccttacttctagaacatgaagttaagcaactgtcaaggtgctggc

SEQ ID NO: 16152 - DNA, 983 bp, Emericella nidulans
tatccgtcggcatgtttggccggaacttcgcctccttgccggcgacctctgcgcccttagcaaagctctgcacttcatcaaatccaaacttcttctcaggaagcaagtcatacacgccgcgcgcatacttctccgtgatccgcaacagctgtcctagatacttggcctggatcttaggatactcgaccagcttcaggagtctggccgtgttggtatgtaagtgctgtcttgccttctcatccatgaccctttcgtagagctcccgcggctggtcgtactcgctcgctttgccctcgtggaagaagtgcgacttgcggctgacggtcccgtcagcgagctggtagggtgcctcggccgtatcggtgcggaatttgtgcacgaagctgttgggagcgtattgtggattcatggcgtggtttgcgtcaacacgcagctggccgtcgaaattgagggaggagtaggaggaggccataaaggggcagttcactatcaatcagtcagtcatgcttgttgcagggtaaaaacagtgctcgtacctgggacctgatgcaggttgacaccgattcggtggtactgcgcgtcgcggtagaaaaacatgcggaattggaggagggggtcgggactgtcttcaatgccagggaccatgctgccgggcgagaaagcggcttgctcgacatcgcggtggaagttctctggatttttgttaagggtaagtttcccgaattcttgcagctgcgccgtattagtccgagttcgttattgtcaagtaggggtcataccggaaactgcttcttcggccaaaccttcgtcacatcaaaaggatcaaaacccagtttctccggatcggcatcttcgggcttcataacctgcacataggcagtccagctgagctcctttccgttctcgatagtccgccagagttcgcgcttcgagtagtataagtcttcgccgccgtagcgcagagcctcgtctgcgttgaactg

SEQ ID NO: 16153 - DNA, 2074 bp, Emericella nidulans
aaacactgctctcaaagaaatcgaaaccctgattccggctgcctatgtacaaatgagattacacaaggaagcagcaacatgcaacggaaagggcgagaaggagaaagaaaggaccggtaaccagccaatcagtaaagccagcaccgtggagatggctattgattatattaaatcactcaaggcagagcttgatgcgacaaaggtgaaactcgcagctgcagaggccaaattgggaaccagcgagaccgccaaagaggcccatggtagcaatgggcaacagaacgaagaaaaggcagtcgacgaaatcaataccactgaccggacgtctgatccgaacaacgcccagtcctcaactgccggagagtcatgaccagcgccagtctgtctgtccattttctacgcatcaactccaatcacgcgacatgttttacgaggcacggtttgaacgtaatacacattggacatagcgaatcagggtaggaaacggtgtaccttgatggctgtgacttgtttccggcctatttggttcggtctggaggcttttctgcttattcatgttgattcccctgtcattgtttcagaactactggtgggagtaggtcggtgttcatggtctgagcttgcttcttgttatgtgtctggatccctctataaatacctgttccttgtgtataccgatattttgctacaatggcaagccaatataatgactaggctcaagcttatgggatctgatgtatttcaaaataaactacatattcccaagtaccggtatagacggagtggtctcccgtagatgtcaacttgggcatattagtagagccagtagctgctgcctttgcggttgcttccagtagccaataaatttggattaagattatacagtcaaaggaaacttttggatgttatcattgctcgttactccatgtcgaaccccataaagatatgtatgccagttcaataatccctcatcacagcaatcatatcgtctaaccgggcaacttctccaatcaacaacgcttccttggctctccattcccgcagtctatcaagctctccttccgaaagatagagctcctcgttccccttgacatcactgcgctctgttttctcgagaaagtcctttaaccggccgcgctcgaattttaaccgctgcagacaccgcgacatagctttgtatgtatcctgtagcatgctgtcccgggcacggtcggggtcgtaataccagaggtaaatcgtgcgcgaaggttgacgctgcgcgtcacgcggaacttcttggaggtcgacgaagccgcctgtctgcatggatgcgaggacctgacgcaggtctttgaagggaaggaggctgatttcctgtaggcgcttttcgtctagtttccctttcgcctgcaggacgcggagcacccggagggcaacgtcgccgtaccgggcctcgacgatgcgttcgagttcaaggtggcgaagtttacgggctaaatgtcggaattcgacggtccaatttattatgccaccattaagacgtttggaagtaagattgagtgggggttgggcgaggagtgagaggtgttggtctatttcataggtgcggttgccagtagctccgtggtcatcgtcgttgtcatcaactgtgtcgtcaaatgtgcgtttgcccagtcggttattggcgggggtgtttgttggcccaagggaacctgcgaggtcgagataaggatcgatgtctcgagcaagagcactgaggggaataggaaccgagtactgttcgccttcttcaccttcgcgggggatctcggaggcgtcccggcacttgctggtttgatattcaattcgccggaggaggtagtcgtatatttgagctgattctgggggtgcgccgcgttcggcgagttcgagaaaacgccggtttcgaagcgcaacgtccagcttttcgtagttcacacgaaccgttaatgaagactatcgacgattagttatattggattatagctaaaaacgggtcgactgtcgagtgtacctccatggggacttcgtcatccaaccattcattctcttcgacttcgtcttcgccatcgtcgta

SEQ ID NO: 16154 - DNA, 1271 bp, Emericella nidulans
cagagtcaaaactccggctacaagtgcaagtccagaaacaacaaaggcatatttcagataatgacgccaaggctgatccagatggcaacaatggtgccctatacaacaacgcgctggacgcaatctttcagattgtccaagaggagggcatcgccggtttatacagtggactcgggagctctattacaagcacggcattcatgaactttacatatttctactggacagcaaccgcgcgcaacgtgcatcagtccaccctccagtcgttcgggctttccgactcaagtagcatcgtcaaggaattgggccttaatgcggtaggtggagctatggctcaactatgcacgaatccgattgctgttatttgtacgcgccaacagactcgcaattattactctgagaagctccccctgtgggagacaatgaaggatatagtgcagagcgaggatggatggactgggttgtggagggggttcaaagttaacctcatcctggtcgtcaatcccatgattacatatggcttctatcagtggctgaggggaaggttgaagaaggcgagggaacttggagcgcttgacacattttgtaagttcttttcagctaatgttgatatttatactgacttacatccaccagtactcggggcctgctccaagttgttggccacggtcgtcacccaccctctcatagtcgccaaaactatgctccagtccgaggcacctgagagtcgaaagggaaagtctttcaccggattcaccgagattctagcttatattataaggaatgaaggactgttacggctctataagggccttgcgccgcaaatcatcaaggggttgctggttcagggattaatgatgctactgaaagaacggtacttatcagcagtataggaaacactaatatacgctaaccacacgcaacagaactgaacttctcatgatggccctttctctacacggaaaatgcttatccaccagtcatcctaaaggaactattggataagcaggcacccggtacccattgattactataccatatagttagtctatctggcaattatatatgtctactctagttagccttctgctcttctcatataaatgaaagcaggcgtccacaggatagtcggctatgtagatgcatcggcatcaccgataggcgttcttactcgaattcaccactaggaatctgaaaagatagtggtcttgctctttaaatctaaccgatcacgacggtatgaatcatagagtaagaagaactaccaggat

SEQ ID NO: 16155 - DNA, 3348 bp, Emericella nidulans
tcccactaactagccgaaccatgacgcctatcccagctataatgctaagaaggtcgcccttcgtgatctttccaaacaacctccagaaactttttttggatctatacagcagctcgtggtcgagccttcgcttcctttttcgccttagcctcctctttcttgcgcttcttctgttcttggattttctcgtcgtcgttgcgcttcagggttgctttctccgcgtctgtcttagcaaccggcttaaaaaatccttccaaacgcgactgctgtgcggttttcaagttcttctgtaatcgggcagcaccgttgcgcacccggtcttcattgaatcccttatccttcaccagaaaatctacaaggccttcgatgtccggcgcctcccacttgaagtcgcattcggggtcgttggcatctcggacatctgggttcaggaagagttctctggcatcctgatacggccaagattccggaatgacatatttctgcttaggatctttctcgatggactcaaccaccttttccagggtaccgtggtcgcggatcagttttagagcggtattgggccctactttgggaatgggctccagatagtcacatccaagtagaatgcagagatcaataaactatgtagcacgtccagaagtaagcattcaacgcgccaacctgcgtgggaagaaattacctggtttcgatccatgcccagtccctccagagcacggttcaaatgaatctcttgaataggctctttcctctgctcactgaaagtcagatgcctcagcaggatcggcgcctcgaagcataacgtatccatatcttccgatgctgcggcatagactttgcccgcgcgagccagcacagcacattgcgcctctgcctcggtaggagcatcgatgtacggaatccccatcaacttcaagagttttttgcactccgcattgtgctccctcgttactcgcacagtccgtcgcgagaacttctcaacatcttccgccgtgcccgtctccttcgcttcttcatgcgcttcagtggcttcgtgtttcctagcgctccgcttggctagttcgcccgatttgagtttcggtggagctccatcaaaaacatatagaggcttgatcccattatccaccatgcgtagcgtccggtaaaacatccccatgagatgtgacgtggtctcgccggtatcgctcatgagctgctggccttcggagcgtacagcgatgagaaaactgtaaatactcattgatctgtggcgtatcagcataaccattaggcgagttcaggcttcagtccgacagcaacgtacgcatcctataaggtgagagacgtcgttagaaatggttctctggaataattccgaaattattaaaatgcttttcagcagaacgtacgatggcgaccttccggccgaaatgattcttgatatcccctgccttgatggcatcgggcgcattttctgcgatcacttgatagaggtctgtaatcacaagcaatgagcattggcagcttgcagtatgcaccagtcaaagagaagttatgtactcacgcttgattcccatgttgagcttgtcagtgaactcagtaataggcaagaccgcagcttgaaagcagagcagtcaagcacggtggcgggcatgaaacgcgttgaacgcgctgacaccattagactgcatttggtatagcgtcatgcgatatatacacgtgattcccccacttccccagtcctacctatctagactaagtcctctacggagccctgaagtactagacctgagaactgccacagccacattggctcgacaggtgggcagatgaatgagaaggacctgaaggaaaatcaggcataaccatgtctatgatatagtccgctaccttttgattgcgcagaaaagtagaaggctagtgcttgcatttacggaggacaggactcgaggcaccggactcagcctagcccgagcgggtctttaacccgccagtgacccaacgctcctcttccttatccgcccgtctatctccgtatcattgcaagagcacacccagatcgacgggtccgaacatactattggtcatcatcgcatcactgtctcatatccgtttccgaccaatgatgctcagtatagcttaaaggacactcaacacaaggatccggggaaagcagcatccgtcagtcgtccacaatgtggcgggaccgcaccaatctgtacttaccgaccttgccttgtatatgcgcctctcaacgggtttatgctaacacctgtcctctcgcagttacatctcctaccgtcagtcatttacccatcaccccgcaaagaagccgcgatacctcggaacacccaatggcttctccgacgtagcgtcacaatctgaagaaagtcggcggcttatatctgaatccacggggattgacgacgatggcgatgcgatcattgagatggatgtgctcccgccacgctgggtcgatgtgcaggaggatgtgacggacttactcgcggacattgcacagaagtcggcccagctagataagctgcaccacaagcacctcttaccgggattctgcgatgaggaagtacgaaagcaagacgagcgtgttattgaacggtatacgcaagaaattacacgcggcttccatgagtgtcagaagcttgtcaagcgcatagaggttatggtacatgaagccaaacagcaagggggggtgagtagcggagatgaaaccatggccaagaacattcagatatcacttgcatcgagggtacaagaagccagtgctcagttcaggaagaaacaaagcaattatttaaagagtatgttgaccggtttgtcgctgctcctagacggccagtcagctaacgtatgtgtcattagagctacgaggtcttgaagatacggcctcacaattcgatcgttctactacgccaatgcagaatccgtatacagatccgtcattaatggagtccgatgccgataagtccttctcgcaaaccaccctgatgcagacgacacagcggatgaccggccaaaacgatgccgcaatcctacaacgagagcgggagatcaacgacattgccaaaggaatcatcgaactatctgatattttccgcgagctacaggcaatggtcatcgaccaaggtacaatgctggatcgcatagactacaatgtggagagaatgaacaccgatgttcaagcagcccagaaggaactcaatgtggtatgtctcacaaccctactggcgggcatacaatctatagaactcgaaaactaaacatctaactcaggcgactaactaccaacggcgtaccacaaagcgcaaaataattcttcttttgatccttctggtggtggggatgataatt

SEQ ID NO: 16156 - DNA, 1215 bp, Emericella nidulans
tggctggtttcaacttcatggtactttcttgcccacacctcacgtttattcaggaccacgctaacaaatgaaaaagtcccacggctcccaagacctctacccgacgctagtccagcgccagtacggcttctctcgcgacgccgtaacagtgacccaggtcgtggccaacctgggcgccctaaccggcggcacgctctgcggctggggctcccaaattttcggtcgtcgattcagtattattgtaatcagcattgtcggcggcgccctcctatacccatacacctttatttcgagccataagatcatggctcctgccttcttcgagcagttctgcgtccaaggcgcgtggggcgtgatccccatccacctgatggaactctcgccaggttctatccggacatttactgtcggcacggcatatcagttaggtaatctggtgtcttccgcgagctcgactatcgaatcgactatcggggagaggttcccgctaccgccgacggaggagggcgaagaaaggtatgactatggcaaggtgatttgtatattcatgggctgtgtctatgcgtatgtgattattgttacgtttttcgggcctgagcggctgggacgtgattttgatgtcgagaacgatgaggatgttggggaggttagggctgagaggggtgtcatcgatgacatggagaaaggtcgcaactgatatgtttactccttggagattttgagatttgaagcttgaattcttggataaatctgaatttggatgtggttacctctggtaggggagctattacttaatcgactggttgaataacgaaacgaatgaagtattaattcacttgggtagccatcaaacataatcatatcttgtatatggtttgtgaatgttcttgacagttgtctgtacattggtggcaagccaacgctttactccctttggctttttgaaccaattcttacctacttgagatagaacgaaactcagctgaaacagtcgtgaggctccatatctgtctcaatacccgtgactgcatttttgcatgtattggcttatttccgtccatagtaacattccccatgttttcagatcagaccaagagccattctggcaacgttggagtgttctaggaacagaatggaatggagcaaagtatgacctagggctagggcaatccaggcggctagccctagctgtatggtagtaatactctggctctc

SEQ ID NO: 16157 - DNA, 1654 bp, Emericella nidulans
ggcttgtaggcctataccccctaaaagctgtggcagccaggcaagcactttttgcctatatataccagcaaatattgatgagcttctaaagaaagcttctttactcagagattttctcaaacagtactcaaaaagtccactatcaccgtcccataatgccctaaaccagctaattaaaggctgtcaaattgcaatgcaaaaggtcatactattggagcaagagaatagggtgctacgtgctgaaaatactatacaaaggcaaaagcaagcttgtacacatagatagatagctcatgataatggtctgtctgtacaagaggctacagagctcgaggaagcttataatgtgtcttttcaggcaatacctggtccatgcgggccaccagcagaaggtgcacaaacaccaaaggcatgggcattacctatatatagtacctgccatagaattgggcatagaagaaatgcttgtccaaataaataataattaatataaaggcgttgtggttgattaaaaggtcaaaatatgggaaatctgtatgcaggtgcgcagctcgcttacatgcgcagctcgcttaccaaccacgttaaggcaaccatctgagtcatcgcttatcgatggtttacgcgatgccgaactaagaaacgtggaaaccaacggacgtcaactccaatccgctagaaatgcgagataatattctggttcttccctggattcttttattgtaggcgtatgttctaagataggtaattctattattacacgcagggagcactcggcatatgccgcaaagagtttatgtttgcctggaatacagagcattgtatatagcgacctaaaagcgcgatattacgccgattagaaagaaagttcaagcagcacatgcacaacgaactatctcatcttatccctgctgggtcaaagctacgttacaatgctcaaagatcccaaactcactgcaagcttaccgcaagggctctacactgtccctgggtgtgattcgaagcggacaacttgagatccccatctccggcatccctgcatactgcagtgggccattcacctcaaaatcagatgactgctgaaggataacgacaagaccgatttgcagtgccctagtacaggtgttagtgccctcattcttagacactaaggtagtaacttacatccttgctaacggcatccccgcgcagcggtgcctcccgcggccgaatcccagatgagaggtgatattaggccggtgcaggatgaactcatcaggctgagagaatatgcttgggtctcgattggccgcagcataggtcatggtgatgggcgacttcgcggggattgttcgcccgcagagttcaacgtctcgggaaggagtccggcagaagccgcgatagggcacgtacagacgcacaaattcttcgatagcggctgggataagggagggattggagcgcagcctgttctggagttctttatctctcgagaggtggttgcatatgttaccgaacagtagaggaggtgcaaccatgcccacaacgagggattggcggagggcgccgctgtaaggattagcatcatcaaagagcatggtggtgcaggcacatacatcaagagcaaaacattcagcggctgaccgttggtatctctctcctggaggagtgacga

SEQ ID NO: 16158 - DNA, 1439 bp, Emericella nidulans
atttaccgtgcccactccctccctgccaacgggtgcaagccgcaacaagcagtactgcgcctctgcctgggttggcattgatggcgatacctgcagcaccgcgattctgcaaacgggcatcgacttctgcattcaaggctcctcggttagtttcgatgcctggtatgagtggtacccggactacgcgtacgacttctccggcatcaccattagtgccggtgacagcatccgcgtgaccgtcgacgcgacgacacttaccgctggcaccgcgacagtcgaaaacctgaccactggcaaaactgtcacgcacacctttaccggtggcgtggatggagatctctgcgagtataatgccgagtggatcgtcgaggacttcgaaagcaatggacagctggtcccctttgcggattttggcaccgtgacatttacgagtgctgaggtgaccaatgatgggaagactgttgggccgagtggcgcgacgatcattgatattaagcaggggaatagtgttcttacagatgtttcggtgaccgacgactcggttactgttagctacgtctaggctctagttgactgcactaaactaaacgctgcctggtatttcatacaacaaatacagtgaggatgtatttgggtgatgccggtgagtgggcatgtgacaagccgagccctaacatcgagttgcagatgctgggacagagcgaacgagggaaatagctttgccttgcttgtttctgtttgtctgtttctttgagctccttgagtacctcttcttgttggataattatgttctccgcttgcaggcgttggtcaactgcacgtgtatactctgaatcacgatactcgtcaatatatatatcattcctccgggtaggggggatcaacctagtaaagcaggtatcataacgtggttggtaagcgagctgcgcacccaaccacttttttacatgctgacgcggtcatctatcttccaacagccaccatgccccgagttcgcgttagttcaagccaaaattgccatgagaaggaaggtcggctcctactggctgtacaggctattaaaaaaaaggagattacatcaatacgcgaggcagcacgtcgcttcaatgtgcctgaatctacactacgtacgcgactacgcgggactacaaatcgcgccgaatctcgcgcaaatggccataaattgactgagattgaagaggaagtgcttaagcagtggattctctctttagatctacgcggagcagctcctacaaaagctcatgtacaagaaatggctaatattctgcttgcaaagcatggttccaccccaatccagactgtcggccagaaatgggtatataattatactcaacgccacccggagcttgagtctcgcttgtcaaggcaatacgactgccagcgagcaaagcaagagaacccaaaggttattcaagcat

SEQ ID NO: 16159 - DNA, 1408 bp, Emericella nidulans
tcaagctccggtggcgtgagtataattatatacccatttctggccgacagtctggattggggtgaaccatcgctttgcaagcagaatattagccatgtctcgtacatgagcttttgtaggagctctccgcgtagatctaaagagagaatccactgcttaagcacttcctcttcaatctcagtcaatttatggccatttgcgcgagattcggcgcgatttgtagtcccgcgtagtcgcgtacgtagtgtagattcaggcacattgaagcgacgtgctgcctcgcgtattgatgtaatctccttttttttaatagcctgtacagccagtaggagccgaccttccttctcatggcaattttggcttgaactaacgcgaactcggggcatggtggctgttggaagatagatgaccgcgtcagcatgtaaaaaagtggttgggtgcgcagctcgcttacatgcgcagctcgcttaccaaccacgttacaaggactaccatggatcttatcgataaggattttccaaagaggggtgaaaccaccctcagtattcgtacaaagtacaatgactgtcaggcacattttcccttgactgaattcagccttaggctctcatcaaaaatcagacttctttactgccttactcaacctagatcagcctctcaagaatcagcgttccacaagtacccttgagtagatgggactccaacgtggagctatcaaaatgcgggtcaagctagagccagaagaggaatgagccacggcccgagatatcgatattttgcttgcagaagctcttatctctgtgccgtgtctctagactctcgttgtctgttctcctcgcttccccaaacattgtacgcaaccatgaacacagacccgggattcattgctgccgtcgaagaggccaaaaagggtgcggccgaaggaggcgtgcctatcggtgcggcactagtaggcatggacggaaccattctcggccgagggcataatatgcgtgtccaaaatgggagcgcgacattacatgtcagtctcccctgctcttcctgccagactacggagtacaatcgagggtgtggctaaccttacccaggctgagatgtctgctctcgaaaactccggccgtctgcctgcgtcagcgtacgaaggcgctacgatgtacaccaccctatcgccctgtgatatgtgcacgggggcgtgtctcttgtacaagattaagcgggtggttattggggagaacaagaacttcatgggcggggaggagtatctaaagagccgtggcaaggagctggtggtgctggatgatgaagagtgcaaacaaatgatggaaaaattcatcaaggagaagcctcagctttggtaggtttcttttatttgttttgtctcctctatttagccctcgattcggcgtta

SEQ ID NO: 16160 - DNA, 2658 bp, Emericella nidulans
tacaataactgcaaggcagacaatctttagcttgagaagatgagaattgacattgtagtcagtgttcgtgcagtaatcttgggagaccatgcttgaacatgagccctcaaggtcgccatactcgcagcgggttgtccagcgctcctgccttctggtgtccgcgccactcgcctggcgatcttctactgcggtttatcctcgatctacctacatgtcttgttacatagcccgttctgcatacataagtcggcagttttatttcctcagcattgactacggcgctatttctcttctcccgcatatcgagcacgccgatggcaacggtcacggtagatgtctacagaacgccgctcgccagcaagcagtctttgacgaacttctaaagtgcgcctagccccttaccgtacggaatcgagaatcggcgatgcctctatattatactacggggtcgctaaccctgccgcacgactccccagaatgggacgccatagcaaaggccagccgcgcgacacccaagtggcctgttagagacgtgagtctactgctgcctgcgtggaaggtcccgcatctaatcataacttccagataatcttcatcagtactatcagtcccttcatggtagcggccttcatagaatggatacttttccttgccgctttcgtatactgtctcattaaagtataccagaaagccgaccactggagcatcagagctcttgctgtcatgatgatcatccttttctcagccctaaggtcggtcttcgccgcagtagaattatagaaaggtatgagctaatacgcttgaaggggaatcttcctaccagtcatgatcacaacacttccttttcctccgcatatcaaagacaagtttccccctgctatggtgtcgtttcttcagtggttcgcgttctgggcttttgctggacttctcacggtaccatggttgttctgcgtttacaggatcgtcaccaactcgataggcaagacgcgaagaattcaaaaggtcctcgatgccaaaactgcgccaaaagtcgtcatcatcatgccagtgtacaaggaagaaccggaaacgttgatcaaggcagttgattcggtcgtcgatagtgactaccccgggtgttgtatccatgttttcttatcctacgacggtagcctcattgacgagccataccttcgtgtaattaaccacctcggcattccaatctcacttcggagctatccccaaagcatcgacgtgacatacaaaggagcaaggattacagtttcccggttcaggcatggcggtaaacgacactgccagaagcagacatttaggctcatcgataaagtgtacgcggattacctcaaggagcatgatgatctcttcctgcttttcattgattctgactgcatgctggaccggctttgccttcagaatttcatgtacgacatggagttgaagccgggaagcaagcgcaatatgttagctatggccgggatcattacgtcaactaccgaaaaaaattctctcattaccgtcttgcaggatatggaatacatacatggacaactctttgagcgatcggttgagtccggctgcggcgcagtaacttgccttccaggagcgctgacgattctgcggttttctgcctttcgcaaaatggccaaatactactttgcagacaaggctgaacaatgtgaagacctgttcgattatggtaaatgctacttgggcgaagatcgctggcttacccatctcttcatgatcggagcacggaagcgctaccagattcagatgtgcaccaccgcgttctgcaagaccgaagcagtgcagacgttcaacagcctgttgaagcaacgccgacgatggttccttgggtacataaccaacgaagtttgtatgttaacggacgttcgattgtggagacgatatcctctcttgtgtttggttcgcctgttgcaaaacactatccgaacaacggcattgcttttcttcatcctgctcatatcgattatgacgacatccagtagagttgacgatttgccagtgggcttcgttgtgatctcgctagctctcaattacacgctcatgttctatttcggtctgaagctcaaaagatacaaggcctggctctacccaatgatgtttattctgaaccctttcttcaactggctgtatatggtctatggaatatttactgcaggccaccgcacatggggagggccaaggaccgacgccgctagggccgatgagtttactacccccgaacaagccgtgaggcaggcagaggcacagggagacgagctgaacgtcgaggtagaaacttttcgatcagcagttgaaggaaaaggagtgcctgtccacccgtggaagaaagtcaccggacgcttctcaaatggagatcttatgcctattaaaggagggatggtcaatgataccgaggctggcttgacgaagttcttgtcgccccttccagaaatacctcagattggcctacatccaccgtggtccacagagtccgtactgtcttctgtggaatctatcgagatgccacataacgtcgagagcctgatgaatgacgagaaatattaccttagtcgcaaggctcaagagacctcaacgcctcgtcgcagcgtagagtcattttacgattctcagaacacaaatgatccccgacta

SEQ ID NO: 16161 - DNA, 3376 bp, Emericella nidulans
aactatcaaacattgcattgattctattagctattacctatgttgccaatcgacagaccaccgagcaagctacggtgatccatgatagggctaatgagtcgagtgcgcatccaaactaagccagattcaacaggtaaatcacccttctcgcagcccaatatcacgatagtgcatcaacggccacggcaaccaagtcacaaagcaaactataaacagcaagtggtatcaatctagtgcgacggcgcatgatctcccaggctaaaggggtatcccctgagagatcggatatcataaaggaatggactgtgactccagatatcatcaacaacataagtagccacgaaattgaccgtcaaagtagcagagggtatcattgatactccagttgcatgagccaaacccacaaagccctggcgacaagcggagtgacagtggcaacattaagctagacaaaattcgagtatcggctgaaaaatattctgaaattttttgtttttttttcttcttgcttttttttttttcccccatctggatcatgatgcagaagcgcaggaaaactcataccgtttgtcccaccacttctcgaattcgaccgactttggggcagttcaagcagcggcctggacgggggcggcagtggaggagacgacaggcttggcctcctcggtggcgggagcatcagcgggcttggaagactcctcagcaggggtggcctcagcaacggcctcggttttaggctcagcagcctcaccagtctcggtggtctccttggcctccttagcctcggacttcacagccttgctgggcttgcggaaaaggcctccgagcttgttcttgggcttagcctcaccctcagcggcctcgtcaccagagtcagccttcttcttgccaaagctgccaaagaaggacgtgcggcgcttgtccttggtggtagcggcaggagtctcggcgggagattcagcaggagtgtccttagcagcctcaacctcgggagcggcagtcacgctctcaggctcgatgggcttagcagcctcctcaacagggttgtcgagctggggagcggtgctagcgacaggagcaggttcggcaggagcagcagcttccttctccgtcttctcttgagaggggctggtgaccttctggaagaagttaccaaacagagaagagcgcttcgacttcggcgcgggagcggcctcagtctcctcctttttctcttccttcttctcctcctccttcttgtcggtagtctcggtagcagcagcaggggctgtatctttgttagtcccaaggttgtcgtacaaaggtcgccagaatatacataccctcagtagcggcaggctcagtgacagcggaggcctcggcggcaggagtctcggtggtctcggcaggcttcgctcctcctccttcttttcctccttcttttcctcagcctcatccttcttaccaaggagagtgccgaaaatagaagtcctcttgcgggaacgagagcggctcttagcgtccttgtccttggtctcttcagcggaggcggtacgagaagaagtagcggcaccagcagcaggagtctcttcctccttcttgtcctctccctccttagcctcctccttggtctcggcaggcttggcagcaacagcagcaggcttgctcagcttctcaagctcagccttgtaaccctcgctagaggtgatggtatccttctcggccttggcttcggtggacttggcctcgagggcagcgatccagctgtcacgctcggctgtggtagaggcctggaaggtgtgcttgtggccgttgagcttgaagaggaactcgttggagccttccttggtcacgtcagagatgtcggcctatatagcatatatattagtcgatgtccccaatgtgaatcctaactgctttactaaccaagctgatgataccagcaggagtagccttgtcctcagggcgcttggtgaagaagagcagtcccttgccggtttggctggcccaggcaacaatggggttggcaacagcgggcttctcgttgctgcggtaggcggagagctgcttagcctcaacagcctcatcgctgaagtagaagaaacgcttggagaagcgaaggctcctgtgagtagcattcattagctactattgtccccgacacaacggtattggaatactcacttgaccagaccaggagccttgtagccaagggtgccctcagaggcagggacaacctccttagcctcttccttggtctcctcagctggagcatcagccttggcctcctcggtagcagcgggggcagcctccacagctccctcggtgccctcagcggtggtctccttgggagcttcggtggcgggggcctcggtggcaacaggggcctcagtagcagcaggagtctcggtggcagaagcagcaggagcggccacaggggtctcctcaacaggcttctgagcgtcagacatgtcgatggtagattaaaaggtaattatagcaggtattgatgggattagataatcgtacggaagcgaagaagcttcgtaaaaggcaagtcacgtcgagctgggtatcttaagggggtatctcaacagaaagaaacaagagcaacctcagcgcagggctagaagagctcgggtatcacaacgaaggcaaaggtggtgtaggggaagaagcgaagcgcggtatctggcagggagaaaagagaagaggaagagaagaagaggagggaagagggaagaaaaaggaacttaaaggagcaggggctggaaaggagggaaaggagggtaaggagggttaaggagggtaaaggagggagtgggcaggccgcccgatcaggaaaggagccctggattaagtgtagtaagtggcaggactgcgggattacaacgtatgcgtgtgggaggggaggatgtccggcctgtgggtgtggttgctagcggtaagaccgtatggatggtcaccgtactctagagggaagtgttaaggtagaggtggataattcgtgttaaaatccgaatgatgcctgtttctccaactaccaattatggattatcagtacccctaatactgctcctgcacctaatccacttcttcagcatcttagcagtctccatgactgcctcatattccttcgcttcaatgagcgcagggatttcgtttatttttcctgtggtccaagaacaacagatagctaaacgccatccaaattccggctggaagttgctgatgggtctaacgtctcgcttatccttcaatatggatgtgcacatacttctgacgatagatccgatgcctgaatgcattgctcccttagcgttgaaaatttgtccgtccctgttgtctacattccctgcaagattttccttagcagtaacgccggaagaagtccttt

SEQ ID NO: 16162 - DNA, 2935 bp, Emericella nidulans
cttcttgctcccagcgcgttcaacccagatgttgggatctgtcgtcgctgatatcaatgccccctgatgtcggaaatttgtttgatcagtcatggatcgcccctattcgatacctgcgatattgactcactaccagctcaggcaatcggggaatctgtgtcggtcaccgagcatccgttgtttccgacgccagcgctttcggatccgaaatcagaagacacttcagaaaccacatcaaatcacgtgaagtcctgtctgatctctgtattggatgtcttcagggacgtgtttgctgacacgccgacgccgtgcaagaaagccgatagacagcagagttccagcagggccccaacgatagagtccgttgtgtcagataatagagaggctatcgacacgctcagcgctgttatggattgcccttgctctcacgacggatacatactatccattgtctcacttgctgttttgaaagtgatgggtaggtatatcgccgcagcgaggggacaaatacccgctacggaggacaccaggggctggggacaggaggtctctatgcattcagatagatctaggcaattccttccattcgacgagcagttaccgggctcgccaggcccggtaggcagttactctattgaaggaagaaaccaaaatcgtatggcagcgcagcttgtcttgagcgaattacaccgcgtacagcggcttgtcaacgtccttgcatcacggctagaaaatgttcgcctaaggtcgtgtctttcgccggcttctactttcggccccaacagcacagatagcatcattgagaacccgttgcttgctgcgagacgcatattgccgttatcaggttccacgttctccaaaatggaggatgaccttcgtaaacgccttcgcgccgtatcttctgaaacaatcgaaattctccggcgggcatgatgatgaacagatatctacgctgacggtacattcctttgtatatagattgggcggcaacttcgacgcgggcggttggggtagatccaccagagctcaaacgcaccagttcagtaaaatccaactctttccttcaaacaacatgatatttatttccggaaactgatgctgagccgttgtcttctgtagtgaaatccacagttggtcagaggaagttggcatagaatagagagaactaagtgatcattgtctgagggagcgagctcatggacttagttacagaacagaaagatgggagatacacgtgtcatcttatatagccccttaatattggagtatcaactactccaactccaagcaattactccaactccaagcgctaagccatattcataacatcttcagtatgggttcagataaaaatgtcaggttatccgtgtcgctgggcaagcgaccctaatgttcaggagacgcccggtgattgcatgataaatacttcacccacagatactgaagcctgtgcgggctctacagtacactcctcgggcggaaacataacacacttgtcccagcaaagtgagaatatgatgggccagttgccttgcggtcgaggccagcatcttgccgcttaagaatttcagatttcgacgtggacaaggattcagtgttcgtataatcactaggttcgatgccaaatcacccttcacccaatcgcacaatcgaattcgtatgcatggtttggccctcttcaaggatagttcatctctcttggaactgacacctcggctatgcgaggactcttggtcaatctggagcattcacatctagttaaggggatcttatctgcagagaactgaaccaggccatagtcgtctcacagacgctcaaggtaaatggtagtcgcaaccgggaatcacaaaaagtcgtgcttagtcgacccttgcgacatatcaggatgtgccagtaccagcacaagtcacaaaggcactctgccaagctctccaaggctgaggtcaaatcgtggcccctgcggctctagagcttttctgcatctcagagcaagtactgcctgtttagaattgatttagactggattttaggcagcggattcagccgaaccgcactcgcaagggtttcattcatctcttctctctgagacagcacgcagagcatcattgttcctgtattcgttcgaatctcggaggaggtttcgtgggtgaaatgtggtcaggcagattacggaaggggagagaaaggaccttcatgccgtcgccttgatgccagtcacgatcacgtggctcccttgggcttgagggattaatcatccagggccacctttctactccctaaacaccattaaatccttccgatatgacttcgaggaattaatggattatctccaaagtttctcactcgtgacaaaatgggagaatcacatctgtgtggctttctgcagattaccctttcaggacaggagaacgataatatgtaaagccccttcgtaatctccaatggcattcctcaaacataacatactgatggtgtggctgttcgtcccagacaactcattacttaacacttcagtaaagggctacaatcaagcctgatactgctggatggggtacatatccgcatttctcaaacgcgccggccattatctgtttgaacagcgagttgtcgagcttcattaaaacaggctcattgcgatggtactgaacgacgtttgcaccggctttcagaccccgctggaataaagacggcgaacgtggatcgacagcctcatctaaggcattagacggccctaactcgttcaacgaagccttcgggaaattgaatcaacacatgcaggacttaagttcgccgattcatgtcagggggcatggattatttaccatagcctcaagcaggaacactagcacactcttcgtctagggagctgacgccctggcaggctgaacggtcaggtcgatttgggaagacactgtgcacgatgcggagagtgtga

SEQ ID NO: 16163 - DNA, 1388 bp, Emericella nidulans
gtcggcaaataatgcacggagcgcttccatgtagacatacatctcatcctgatgctttgtagacttttcatactcgtcgccctcaagctcagactcgtcctcttgatcaatgagtgcttgtgaaaggagcttgaccattttctcacgccattccttgtattgggcagcgtggtcattcatcatatcgcagaaatcctgaagtcgctcgaacacacgacgagattcaagccctttactgtacatatgaagcttcatttccggaatagccacgaaatctttcttctcggctttctctttgattctcttcacgtaatgcttagctttccgggaaatctcagtcagcatttcttgtcggattaatttggctttcgcgtaagcctcctcctctaactttgtcaacgcctgaaactcctcagagtcgggtttggtgagttcatgatcggattttatctgaaaataagcatttcctgtgaagaatacagcaatgtgttcgacctcgagcgcagttcgtagtcgctggcggaatacatggagtcgagagtttttctcggtttcctcactttcatcgtcactgaaggacagcctttcatcatgcgctccattagctagaggcgttagctgcttctttcgttccgtctgaagtctctcccggcattgctgaacggtatcactcgcacgatgaagggaattcttccagaggctgagggcctctcttttaagcttagcattttctagtagctggccacgccgaagttgcgagaggagaagagagcgttcctcagcatgtatgagagcatcgttctggtcgatcatcacctccaaaacgtcattgaccgatcgtaatgggccgttaccagcagcgaataccttacgccgatttccggtaggatagaggcaagactgccgaagccgcacaagccagcttcgcatcctatctataaccgagggatcattcgggttccaatcattgttgcgaggtgaccccgaactatcaagtccgcaatcctcgcacatctcctcgtagagctgtctgtagctttgctcttctactgcggtaaagggtactgtgataacaatccttttctgaggtggcagatgtagctcttctcggataaaatttttgctgtgtcttagagtgatagtattaacgatgcgagccagaactggcttgaacgtggcatcacataaccttttccatatgggcccgcagaaaggttcataccgaaggaagagcagtagtccgagcaaatcggtgacatctttccgaagcggcgttcctgtcacagcccatgctatatggcgagggataagtcgagcaactttggctgcattactgatgccactctcgatcatctgagcctcatccaagcatacccgccaccacgata

SEQ ID NO: 16164 - DNA, 5542 bp, Emericella nidulans
ttaatagacccccagtaaccctttagcgcgccctaacccggtatcagacggtgaccagccaaaaccttctccagatcaccccacgtccggacctgccacgtatgcgccgcgtactctccctcagtaggggcgccaaagaactcgaggcccttgaggtagcgccagggtgtaatattgttatagccttggttacgaccatggatagcacgctcaatggtgtatccgtcgttgttgataaggaagataatgacgttgagcttccggtggatgatcgttgccagctcttgcgctgtaagctggaagctgccgtcgccgatgaataggatggaccgggcctcgaggaaatcgtggtactcggatcgagcgataaggtcgtgctgtgctagactcgcaccgagcgttgcggggagcatgtatccaatagacagccaggtgactgctttgaacagacgcgttttcgggggtagtcggaattcgtttgcgccatatgatgccgttccggtttcggcgaggatgatgtccccttcctggaaaaaagaagacattcggtgccagaaaccgccggcttgggtgacgaggtcggaggcttgtacatcgggcggcgcgacggaggaaggatgatcgaagttgcatgtatatctattgagtttcgctacttcgaggtgcccaataagctgcggtaggaagtggtttgctggcagatcacggatgatctcgctgtcgatctggactgatgtcggatggaagaagatcgtcttgtgctgttgcgggactgtttggtagaggtaagagttggtgttggaaaaatggggcccgaaacacaggaccaggtcactggagtcgataaagtccttgtatctgggagtgaacacgccgtagacattcggcagagactcagcgtccaagatgcttatctctacgtccagggacctgaacagcttaaaggctggcgcggttgctatacagactggatgcctttgacagagcatcgaccgcctcccgctcgatggtacgggcgagctcttcgcatgtcgggatagacttaatcagcccggcagcaagaccgacggaccaaacacccgcgttgatgtcacccgtctcgtatactcctcttccccgagcaccagacataagatgcgccacttcttgaaattgagggtctagcttgctgttctcaattttatgtacctccagcgtgacctcgttctatcgactcgtcagcatatgaacttgatttcgaattgcttgttaagtctcacccgggccaaacgcgtggtgttgcggaactttcgcagaacgaggattgtgccattctcgtccatcttgacaattgcttctttgacattctgatgaattggggcctcgactgtgcacatccagcgagtgcccatgttgatcctgttcatgttagcacagatcatcctttagcgagtacgatcttacccttgcgctccaaggacaagtgccgtagccagtcccttgccgtcgcagaaaccaccggatgcgatgaatgggatcttcagctcttgagcgcaccttccaaggaggatcatagatgtaatatcatctactcggtcagttgggtttagtttgcaaaatctacgatcgagctggaatgcacctacattcgcctccgtgaccagcgctgcaataatcctctgatattagtcgctgttccgaacactccagttggaagagaactgtaccattcaatactatacgcactgttagcttcgactcacctattcaggctgaaattgagaagctcacccgtcaatggaaatgcaatctaccccctttgcctgcgccttcaaagcatgcccaagcgatacgcatttgtggatgacgatacaaccgttgctcttgaggtacttgagaataggctcagggtttccggcggtctcgatgatcttgatgccctcttggacggcagccttagcataggccaggtagtcgggggcgttaatggcgggaagcatggtgatgttgacgccgaactagggaccccgggtcagcctgcaataggtaaatatcctcgagtggcttaacgataccggtttatcagtcatgcttcgacagcgacggatttctgctcggagggcgtctggcgaaggttgggtgagggctgtctgtccgtctcgtcagaggatgttcgtcgtcaagggactggctacccagcatactaagaacccgagacctccagcatttgcaacggctgatgtcatttctttgggcgtcaggtagcggagattaggacattgagttggcactcaccggcgcgaccaacccacatcatccctgggggattagtatggtctttcgaacgattacggtaaggagcttacctccttgcacgatggggaccttgatccccagggtttctgttaaccacgtcttgaacggcattgtgaaaacgttcgctgatatcgaaaatagccagagactaggcgtgccagctggaggccggccgggtatttaagccttagcaggagccgacaagccgcggctcagacagcgatcgcgtcttgtcattgtagattgagcaagtcagaaatattctaaccgacaactactcattagggaggctatcaaattgcactgccttatatatgtttgattcactaactcgccatcatacggctctatctcgttatctatggaatggatttaccccaatctctgcctaccccacacttcacctgtcactttactaatggaacttcctctccaactctctcacttcctcttcctcccttcaactctcacagcaatactgagctgtcaagaccggcagtatgcggtctccatttacccctctagcaatcggctttggcttcctatccaacgctggggccttgacaatcccttcttttccgcagcagctccttggggcttcggctgcagaagagatttgccctcttcctgcaaaggtcactttcgacgacagcaatctcttcccatctgttcaatacttccaaaatgaaaccatcctccagcgtcaagttgatcgtctttccagagctgttcaaatcccgactcagatcactgattacatgactgatcccaatgacgacgcatttgcgccctttgttgacttccacaagcttcttgctgggctctttcctcttgtgtgagctcacctacccttttcctccttacttcaatgaccctcgcgtcacccgcgtatccttcccagctcaggatctctcttcccaaaactaacctgagacagctactccaaagccaagatcgagcacgtcaaccgcttcaatcttataataacacttgaacctccctcggaaactgtagaaaagagaaagccccttctctttacggctcatcaagatgtggtccctattaacgatgcctcagactggacgcatcctcccttctcagggtattttgatggcgagtttctctggggacgaggaagcagcgactgcaaaaacggccttatcggtcttctctctgtagccgaggatctcctatctcagaactggacgccatctcgaccgattgtcctggcgtttggattcgacgaggaggcacaagggtatattggtgctgcgcgaatcgctccggttctggaggaaagatatgggaaagatggagtagaattcatccttgacgaaggaggtggcggtatcaccacccttcgctcatcgttatcttccgctggagaggaatttgaggacgagagtgtgatttacgcgctcccggatgttggcgagaaaggcgccgtcacgatcgtccttaccctcgctgtccctggtggccatagttccgttccgcccagacataccggggtcggcataatgtcggaaattatttacaagctagagaatactgagcttgacattttcacgcccattttagggtctaatcacccttctcgccgagtgtttgagtgccaggtccgccattctcctgaatatgtggaggactggcttgcttctgcgcttgactcggatgatcaggcagcaacggccgaagcaattgctaggtctcgtggagaaagcgttcgattcactctccagtcgtcccaggcagcggatatattcaatggaggcataaagagcaacgcgcttccggaaaagatcaccgctgtcgtgaattatcgcatcgcattgcaccaaaccccgaagatgctccaagaccgagcggagaagatcatagagcccattgtagagaagttcaatttgacctggtccagattcttggataccaacaaggacgagatcagcagtgaagtggcaagcagtggtcatctcacgctctcgaccctaaattctcctctcgagccagcccccgttagccctactgatatcgatacaagtcccgtttgggcacggtttgccggtgtcgcccgctcggtcttcgagtctgttccaagtctgaaaggcaaaactgtcgttgttggtggggacatcaccaccggcaacacggataccaggctttactggaacctatcgccaaacatttcccgctggagtcccgcgcgcgagggccgtgcgttgaatatccacactgtggatgaaagagttggcattgatgctcacctcgaggcgatgatgctgtattatggtaggtcttcttcatcgttgcacgaaataggtagctaagtatcacagatctgatccgggcctttgatgcatgggacgctgcggaacaacaaaccacagacctttgaggtacatggttagtactagacaactgacgcgataatctgatgacggtataaattcggtttaacggaagaaatgcagaagcaaaagactgcattggttctcgtcgtcttgcctatgtaacactatgaatatgttgactagtatcaatgcaagctctacagatctgcattcatagtacatcactttcagctacccagagggattgaaaaaggctataactgatgctatatactaccacacaatattacacaacttaaacacgaccatatatatcacatctaacacaaatactgggaatggaccgcctagccgctcttttgtcctgataaagcatgtatgtacctggaaagaatttcagtcgagaagcaacaaagtgaatgccgcgcccatgacaggtcgagcgatgaaaactaccggtgggtagctgagtgaatcagcaaagcgtctcctaggtttaggtaggtacacttactctccggttacagtgtcatagagatccgtaagtggacggttcgttggcgtctcgtttatccactgggcaagtagtttgatgaacatgtctcgtgtgcttactgatgcgactgccgccgtgaagagctcccaatcacctgagaccgtcaattatacagccgcgacgagtagatggccacatacctttcgtgtattgatggcgggtatccagtggcactccgtattgacccttgattgtcgggtagaagttgctctgcatgtcatacacagattgcgggaccaggttcaagcctagctcgcgatctgcgtaaaggttgtacaggagtccttggaacaatcagtattggccaagcatcacagtgaggagtacacaaaccatgaga

SEQ ID NO: 16165 - DNA, 2633 bp, Emericella nidulans
gctcaaaagctcatttcgactgtggacccagctcacctaagctgcttatagtgtttctttggtcatgtggctcagcagggggcatgtgaaggggtcagatgatggagttttttgagcaattcagaatgagttgcctactgtgactttcaatgataattgccactgaatcaccagaagcgcccaatctgaatggtgcgtaccaaagtaatatagggatactgtacattggtgctgtacgactaatcttattctagcaaagcatcatcattaggcgatacaaattcgtgagaaagattcaagacccgacatcggaaagaaatgcggccgtagcaaccccttgctcatatcaggaaagtatacggaacgtaacacagaagcccagaatcccgcgagcgaacaaaagaaagtgtcgaatctttcccaccgaaaaccaagaacagataaaacgatttgggaatcacaaactcgcagtctaatgcaatcactgcacctggctgacgatctcgctggcgcgcgagagactctcaaccatttgctggcattccttccgccgccgaatggtgtaatcgctttccttgaggaggtcgtctagctcggcattgcggtacatgttctcaagcaactcgcgctgcatgccttccttggagtatctatggctatcagcaaacgccttctcattaaggcgagagtacttactgaacaagggtgtacatgatggccttcgggaccatatcgatcatcgtgcgcttcacaatgttgaagtaggaggtaataagaagctctgtgtgatattagtatcatctcaagacctcgatgtgaagcaaacatactgatgacttcgacttcggtactttcgcgctcagaaagagcggcggatgccttgaggtttgacgggggcgcctccatagcagccatcttcttcttgttctttgacgcccagaagctgccaaaaaatccggaagagctgttggtgtccggggtagttgcttccacggagggactgttagcacggggaggcaggggcttgccagtcttagggtccacctgggtcggcttagcggcggcgtggcgttcgttgacaatagccatggcctatcccgttagtgattgctagggcgaaaaggattgaggacttacgcggtgcccgttgaggaaatcggggtgggccgtgttgatgtaggtggtctccattgcaatgagatcgcgaaccaacttatttgtgggctccatagcctttttgaaaaaggcgataacaacagcatggaacttctcctttagcattgggtaccgtcggaagagctgcttgttcagaagttgaccgaggatgcggacaagctcgtcatagacaagagagatgcacttcagactcgggtcttcaagtcgggcaatctgctgcttgacaatgagttcgaaggctgtagttccgatgaaaagggcgggcgatgaaccagacgagttaaagaggatcgtccggatatcaatgtccttaacctggtcaaagggatcaaccgccttgataccgttggagtacagctcgtggaacacgaaactgatacgggcaccgccagacaactcgacgctagaaagctcctggttgttaccctccaaaactgtcctgtactcgttgctaaattctgtgatgatgttgagaatgatgttggcgctgttgccgagcatggagtcaccgagttgagccagttcagacgagtacttttgcagcgaggacgagattcgagatttgatgtccggcagcgtttgcttaatgtgcatcataaggatctactccagttagaatacgctttgtagcagtgcgtggaattactcaccaagttgagcttcctggcgaggtacggcgttccgcagtaagacgccttgttccggtacgccttgtggctctcaaagaagttcttctcgtgctccaacgcgtaggaaataggccgcttgttctcaatgtcgcgctgtccacgattgaccacaggaacgtaacccaggcgcagagggataatcctgccagcaagaatatctaccacgtctgtaccctcgtccatgagatcgactttggtcaacacaccaatggtgcgctgaccttccgggtccacctcccgtgcgagcttcagtccgtccgagttggcaagatcctggttggcagcagtgacagccagaacgatggcatttggcttgctaatgtatttcaaaaccatgtcacggatctgcctctcaatatccttcggctggtcgcccaccggcaccttagtcaaaccaggcaaatcgacgagtgtcagggtaaggacgttgggagagtaaattcgcaggttgatgggagcggcggagattccagcgttgcggccaaccttcgtttcggtttcgcgaacgatttcatcacggatcttgttgaagtcgtagaacttctggccgggaatgtgcaagaactcgccatactcgtcaagattcgcttccttatccgtcgtctcgagctgttcgtccttaacaccgtttatttgtgatggcttgttgatgagttgcaggatgagaggtcttcgagtgacgattccagaaccacgggggaggctatagggaagctccgttagcgacgcgcggcccaaacttggtgttgcagtcgacaaggaggatgc

SEQ ID NO: 16166 - DNA, 891 bp, Emericella nidulans
gaagcgtctctccttcctcttcccacccactcaagtacaatcagacacatactaaacacgtccctagcctttgtcagcagagaatcgaaagcgtacacattttcaccccacgtgaagtgtctgatagtgaattatcgaacttcccactcagccaaaaagggctaaccctccttggagagataagttctgactaatatacctgttgtcatgaacgaaaccttcgcagtccacagataaaaatatcacaagtaatgctttgattatagttccctgctctggaaaggcgagtacatacgaccatagggtgtggaaaacagggcttcccgtccgctcagccgtacttaagccacacgccggctggttagtagtatggtgggtgaccacatgcgaatcccagctgttgtatgttttttactcatgttgtttttttgactcaggctgcaaccaactagcctgatgctactgcctcacatgtccttacccatgcgctgttcatgtactaagtaatcattctacttggcctgtgagctgtagcgacacaagagcacacattagtcgtgaggctacagtaacagcagtggcactaactctagatgattcaaagccgtacctttgagacaatgacgtaagagtccttcagacgtcacctccaaaattcagctggctgatccctggaatattaccctagaatatacctcgacctctggtaacttcggtcgtacctccatatcgccatgttcctccccagaatacgtacctgagaaccatcttcctacctatcaccggctacaggctaaacaacgactattgttgcaatgagcagggtttgatcaaatgtatgaagtattattattcttgtgttctccaaagctatcggtagtaatatcattt
